United States Patent Application Publication US 2012/0005773 A1 - sequence listing, part 3

SEQ ID NO: 8593 - protein, 520 aa, Cryptococcus neoformans var. neoformans B-3501A
MFYAMRTLASLAILPLVLSLQLPHFPTPQDTLELAESFIRSGHAHAGDHAAEVEMVHANDMRLSTIGDEHVILTHKKYPNHKVRIKSTTGWCDPDVKSYSGFLDVGYGKNLFFYFFESRSKPSEDPIVMWINGGPGCSSSLGMLMELGPCSVKDDPKGVNDTARNPYAWNEKANVFFLDEPIGVGFSHADNGQTVSTTEEAAIDVQAFISIFFETFKEFEGRAFHMAGESYGGRYLPVFASAVVDGNKQLIKDGKTPINLNSVMIGNGVTDYFTTTESYFPFQCTVHGDLTEPVQSIGACVAMAEAVPKCHKLAKKGCLETHDYTTCSMAINYCEEVLGETFLSAGVNPYDVTMPCTVEELADSLCYPVTKKIGTYLDLPDVRHTLGVEKLRSNWSSCDGPVFTRFTQSLDNTGKTWLYVAGLLERGVRVLNYVGMLDFICNHVANELWMERLEWSGKEGYNAAQFSDWVVDGHRAGEFKTYGNLTMLKIRGAGHMVPYDKPKEALSMVTSWLDAAALDQ

SEQ ID NO: 8594 - protein, 605 aa, Cryptococcus neoformans var. neoformans B-3501A
MINEQKPVVGWIGLGAMGSGMAASLVSQGYKVQAFDVYPPSLKRVAEQGAIPSSSPRDAAEGVQVLCLMVVNAQQVEETLFGKDGGVAEILKNGASIIVFSTVPPSFLVEVARRLDKLGKNIGLVDSPVSGGSTRAAQGQLAIMSSGTPSSIATARTVLDSLTLPPQGGLTLVGDRVGIASDFKMINQVFCAVSIAAQGEALGLAKALGLNVRTVYEIVKQTTGDSFMFGHRAPWSIRPDPIPKSAMTIINKDIAIVMGEARRDHFPAPLSAAAEQLYTAALAVGLEKEEDGLVSKFWEKLGGEPIAEQGTEEEEIEKARELVIKPGKKVQKVLLATKNIDSRISYLKETLKKAGVEVVEQGKEVDAVIVSAGSAAAVEELLLHISSAGLSVNTPVIIISNVLPSSRLSQLAIEIKPLQLIDAPTAGGSKEAKGGSLTVFASGEADALSASHSILSALSIQGGDPTKLHFIAGGVGSATKVKAVNSLLEAIHLAVTGEGFAFAKHKGMDIEKVFKVLSGGAARSFIMGDRFPRIIKKSSQDAPENTVSTMWNDLSITLAEAKQHKCPFFLTQAAMQQLERLHSSGYADADDSSIIKLWEETGVKI

SEQ ID NO: 8595 - protein, 485 aa, Cryptococcus neoformans var. neoformans B-3501A
MMHASKHKMGFSDFRDAILIQPPSFKKKKEYVLEELLGRGGFGKVVKALWTPPEREPKEVALKIINKKLVKGNEQAVLDEISVLKHLDHPNIVHVWDDFESRDKYYIAFELAVGGELFDRISERGKFTERDAVECIRQVLQATAYLHEHNVAHRDLKPENILYKTRDADSPLVIADFGIAKHLETPDQECSEAAGSFGYAAPEVLLGKPHGMKVDCWSIGIIAYTLLCGYPPFRSDDRNGLLQEMTRGRIMFHDRYWSKVSRTAKDFVKDMLETDPKKRSTAADALNHPWLTSGQATETDLSAAIRDNFDAKRKWKSALRIIQASNRIRSASRSRSPSLSTSPPSTANTANPSPNSALFVPEVPHVLTPLSMTDEDPMSDEHYYFSADDQGHTEEEEEAKVMTRGGKKKAGSMPVGSGSGVTTGTVTPYTTGNEGSNTPKPTIKVIDGNGELRPEETDMQTPPATAPVGAGMMGSIRGMMGKLSL

SEQ ID NO: 8596 - protein, 1430 aa, Cryptococcus neoformans var. neoformans B-3501A
MVPPARAHTHNTTNTKQAQLSSAYHELANELGTDNISVVGNYTLGRVIGQGTYGSVHLATHRLTGTRAAVKKVPKSFTPHLTRELHHHRRLHHPHIVHLHEIIATESHIWLVTELCSGGELFDYLVERGRILEGEARRLFGELTLAVGWLHMHGVVHRDLKLENVLLDGELRIKLGDLGFAREWQKGRLMDTYCGTTGYASPEMLACQKYLGVETDIWSLGIILYTLLCGGLPFDDDDERVMKELIQKGEYEEPDWLSQEARDLIRGMLQHDPSKRLSIREILTHPWFKMTIVDKVYPNGDVPSIPPSPNPTSPTAAGDDFFAESALRQQQQQQSRLTPHVAGRSPLSTHLPTTPRQNSGSSEAENGDSRTERKASNMQRLNSAEFSTTEKELEQLHLCTSRPAATATGSGAISPRSISSPSMRGKTLRTLPEGQVDVDETPAGLPPPLSLIDEHPHLPVALHSRTPSRTKRRSVSSTLSLERRLSHHSSHNSYITFPPEDYLSKLDPSLLPNPDSSSSSTTTPPARSFTTPSETRLLRQLDDLGLDVGQLKHSVETDACDASAGLWWLLRQKQEERGETDEVVRRREKEVVRREEKVAEYAKEERRKAREAERERERIPTSPMGILGTRPGKRDSIEKSSEGLRFKEEQPPSIPTTPSYTSVIDLGPPVLPVDVDVDVERTAVGRDAPREAAGEEMKSWKRVESPQSVAISSQSSLDPAPTLPPPAAAGGGGAAGAKTQKEDGRDQAGLDPVAVATPMSNANSSTGASTVAKPEPNVNASANANTSANPRLKAKSPSMNMLQRATSVLGGVGKKGDDKDKDKNGMNEKREESTNDSLHPKRGGSSSPNKLKKPMPAGMKGLTSTLSRSESESEGLLAGGGGGGGGGDSPAVSASGSKTVTPGSSPRRKGLTPQGTPRGGLRDAGAKDSSGERASGNGNGNAGGGNEKGKGGKKDSLWTTFRHLFYEDRRRRKRESVTPSASSPLLLPPSDIKLPAGAVVLSRGANSRTSQFKRSNVGYAPSTGSRRTSLDGNRPVYSRRSSSVHTTSRRSSVGSLHFQDHQAMISDLSRRASQRSHGSQTPTSDREYLDYPSAAAPISRPGSSHSIRGGVGGGSRRSSFSVRSPSLHPETFSASAGGPTSTRFKSSVPPPASPLLGYRRRPAGGNDSSRVRHIKVIPESQIMRSSSVASSIRSNASSRASSMDRDRDRDRESEYESGRDDVSLRSGKRQKRRSGSQRSLAQQIHRTRSPLALSLENTYGSNSVANVGLGIGGASRIPKKPLRDVFQKKGKRKDGGDDDWVSEDEDGFACGLGQGRGIAKSFSNANANGTVWMNVNAKTNPARSAAAFPTSKMVAQPTAQGGTSRRRERGRRSSLEEERGRPQEGKGKAKGETVAQGLMGIESLSGRSRRNLPDRSTAPGIIEEEEEDEE

SEQ ID NO: 8597 - protein, 326 aa, Nicotiana attenuata
ISKNGLFQSVSAAMWRTRAPDDSRSTTNGDSARGETAESEKDPDLVVQSKPPEQITMPKSEQKEEEPAKKEEGPEKPKKPVQMKRVGSAGLRTDSVLQKKTGNLKEFFSIGKKLGQGQFGTTFKCVEKATGKEYACKSIAKRKLLTDDDVEDVRREIQIMHHLAGHPNVISIKGAYEDAVAVHVVMEYCAGGELFDRIIQRGHYTERKAAELTRTIVGVLETCHSLGVMHRDLKPENFLFVNQKEDSLLKTIGFGLSIFFKPGDRFNDVVGSPYYVAPEVLKKRYGPEADVWSAGVIVYILLSGVPPFWAENEQGIFEEVLHGDLD

SEQ ID NO: 8598 - protein, 313 aa, Nicotiana attenuata
NSNTPSTTTTNVNVHHNRPSTTTTTTTVTSRKQEGSNYNREKGNINTKNSHQKQQPRSSQQNVVVKPNSRRQSGGVIPCGKRTDFGYDKDFDKRYTIGKLLGHGQFGYTYVATDKSSGDRVAVKKIEKNKMVLPIAVEDVKREVKILKALAGHENVVQFYNSFEDDNYVYIVMELCEGGELLDRILSKKDSRYTEKDAAIVVRQMLKVAAECHLHGLVHRDMKPENFLFKSSKMDSPLKATDFGLSDFIRPGKKFQDIVGSAYYVAPEVLKRRSGPESDVWSIGVITYILLCGRRPFWDKTEDGIFKEVLRNK

SEQ ID NO: 8599 - protein, 266 aa, Nicotiana attenuata
DLGRELGRGEFGVTYLCTEVDTGDKYACKSISKKKLRTAVDIDDVRREVEIMKHLPKHPNIVTLKDTYEDDNAVHIVMELCEGGELFDRIVARGHYTERAAAGILRTVVEVVQMCHRHGVMHRDLKPENFLFGNKKETAPLKAIDFGLSVFFKPGERFNEIVGSPYYMAPEVLKRNYGPEVDVWSAGVILYILLCGVPPFWAETERGVAQAIIRSVIDFKRDPWPKVSDNAKDLVKKMLDPDPSRRLTAARVLEHPWLQNIKKAPN

SEQ ID NO: 8600 - protein, 328 aa, Nicotiana attenuata
SSKVSGSNSNTPSTTTTTTTVNVRRNTANPPSTSTITSTKQEGSHCNKQKVKDNHRSQHQKQQPRNSQQNVKKHKNGRRQKSGVIPCGKRTDFGYDKDFDKRFTIGKLLGHGQFGYTYVATHKSNGDRVAVKRIEKNKMVPTIAVEDVKREVKILKALSGHENVVQFNNAFEDDNYVYIVMELCEGGELLDRILAKKDSRYAEKDAAIVVRQMLKVAAQCHLHGLVHRDMKPENFLFKSPKEDSPLKATDFGLSDFIRPGKKFQDIVGSAYYVAPEVLKRRSGPESDVWSIGVITYILLCGRRPFWDKTEDGIFKEVLRNKPDFRRKP

SEQ ID NO: 8601 - protein, 243 aa, Porphyra yezoensis
MENQKEKILVVDDEASIRRILETRLTIIGYEVITASNGEEALLVFRKEYPSLVVLDVMMPKLDGYGVCQELRKESDVPIIMLTALGEVCDRITGLEIGADDYVVKPFSPKELEARIRSVLRRADKITTSLGVPNSGIISIGFLKIDTNKRQVYKNNERVRLTGMEFSLLELLVSKAGEPFSRASILQEVWGYTPERHVDTRVVDVHISRLRAKLEDDPSNPDLILTARGTGYLFQRIIEMNKL

SEQ ID NO: 8602 - protein, 339 aa, Burkholderia vietnamiensis G4
MKPKIVLTHWVHPEIIDLLQSAADVIPNTTRETLPREDLLLRAKDADALMVFMPDTIDADFLGRCPKLKIVSAALKGYDNFDVDACTQRGIWFSIVPDLLTIPTAELTIGLLLGLTRHLMEGDRRIRSGRFQGWRPELYGIGLTGRTLGIVGMGAVGRAIARRLSAFDMKLVYCDNVALTDDLEQAWGARRLSLDELLATSDFVVPMLPMTPQNLHLFNADTIGKMQSGSYLINACRGSVVDESAVVEALRTGRLAGYAADVFEMEEWARPERPESIPQSLLDNTLQTFFTPHLGSAVKEVRIEIERQAATNILQALAGERPVGAINNPGGVNNQVQHP

SEQ ID NO: 8603 - protein, 354 aa, Burkholderia vietnamiensis G4
MTYQLNIQPLGATIEVEEGQTILDAALRQGIYIPHACGHGLCGTCKVQVCDGEVDLGDANPFALMDFEREERKALACCATLLDDTTIEADIEEDPDAEVIPVEDFNAEVTRIEQLTPTIKAVFLRLDQPIHFQAGQYVQLEIPELRQTRAFSIANSPADVAATGEIELNIRRVPGGQGTGYIHEQLAVGNILHVTGPYGRFFVRRSADQPMVFMAGGSGLSSPRSMILDLLQSGWSKPITLIYGQRNEAELYYDEEFRELGQRYSNFSYVPALSEKAEGATHPLAQGFVHEVAKAHFENNFSGHKAYLCGPPAMIDACVTTLIQGRLFERDIYFEKFISAADAQQVRSPLFKRV

SEQ ID NO: 8604 - protein, 443 aa, Burkholderia vietnamiensis G4
MSETKPALDRRLGVTSATMFGLSYMSPMVVIATFGAIAVKTQGAVGTAYIIAIVAMLITAISYGYMSSRMPVAGSAYTYSSSVLGRTLGFAVGWVLLLDYFFIPMVICLLTATGLSTLDPNVPFWVWVVGVAILSTVINALGITVTDRVNLVIMALQLVMVVAILYLCVRYAFETPSIGTLVSPQPFTNKDTNFSLIMAGAAVACYSFLGFDAISTLSEETVDPRRSIPRAIFIATLLGGAIFLATAYFMMLVHPSLKFASEDTAAYEIAGQIGGPFFKTVFTLVVTIAFFAAGLCAHASASRLLYVMGRDNVLPSVGFSYLHPVFKTPIINICLVGVVMLIAARLDIATSTSFINFGAFTAFCAVNLCVVVHILRNRGNDSGGKLSAAALALVGALACASLFFSLDGLAVKLGVIWLCVGIVYLACKTRCLTKPLPAVAVGE

SEQ ID NO: 8605 - protein, 489 aa, Burkholderia vietnamiensis G4
MQKSPTEARHRETAVDVRSAEFIQYTSNGSAAISAQIQEESNSALGHGLKQRHVVMLSIGGSIGAGLFVGSGHAIAEAGPAAIVAYIFASLLVVLVMRMLGEMACAMPDSGSFSTYAGKAIGPWAGFTIGWMYWWFWVLVVPLEATAAANILNSWFPDVAVWKFCLGVTLLLTATNLVSVKHYGELEFWFATIKVVAIILFIACGVAAILGFIPGLHINATANIFSDGGFAPKGWAPIAGAMLTTMFTFLGTEVVTIAAAESANPAREISRAITSVVWRISLFYLGSILVIIAIVPWNDPSLTTIGSYQAVLQKIGVPYAKFIIDALILVAVGSCLNSAIYTASRMIFSLGARGQAPRAVTRTSRSGVPVAAVLASTLVAFVGCAANYLAPKSVFDALLSTTGAIALLVYLVIALSQLRMRRRILLTSKLKVRMWLHPFLGLFVVFLITGALVVMVSGETHRQEVVATLAFSGLLAVAGYAHQRWQRRR

SEQ ID NO: 8606 - protein, 477 aa, Burkholderia vietnamiensis G4
MSTDDKIQTYEQEDLKRDLKNRHIQMIAIGGAIGTGLFYGSSWAIRTAGPAILLVYLVAAIAIYFVMRALGEMAVEEPVSGSYISYSNRYIHRFAGFLNGWNAFIFLLATSAADLNALGNYMHFWFPGIPIWVTAGAAVSLMFVVNIIGVKIYGEAEFWFSLVKVVAIVAMIVFGVGMVLFGIGNNGVPIGYHNLIDHGGFFPKGAGGTFLAIVMVAFAFGGVENLGLAAGEAQDVKTTMPKAVNATFWRLLIFYVGAIAVLLLVFPWTSLTSKGSPFVEVFTKIGIPAAAGIMNLVVIMAVLSAVNASVFTNSRTFYNLSLQKNAPAFLGVTNSRKVPHRAILMVFATMFAGVMLNYLMPEQAFELFSSVTVFALVCAWGSIVISHLRFRKNKIRKGEDGQLGYKMPFYPYSNYIALIFLAAVLIGIAILPDMRMSLVVSAVWVLVVFIAYTFYVRKESTRESIASETGDAKDLLA

SEQ ID NO: 8607 - protein, 144 aa, Burkholderia vietnamiensis G4
MRRVAVRRSPIHGKGVFALRQITAGDRILEYKGIVTTWKSAIRRHERDGVEGHTFLFGLSDGRVIDGGQEGNSARWVNHACAANCEAIEESGRVYFHATKDLEPGMELLIDYALELDVPVTDEIARGYICRCGSPICRGTMLGI

SEQ ID NO: 8608 - protein, 396 aa, Burkholderia vietnamiensis G4
MTTQDPIVIVGTARTPMGGFQGALAAASASELGAVAIRAALERANVPAERIDEIVFGCVLPAGQGQAPARQAALKAGLPLGAGATTVNKMCGSGMKAAMFAHDLLFAGSADVAVAGGMESMTNAPYLLPKARAGMRMGHGQVLDHMFLDGLEDAYDKGRLMGTFAEDCAQAYAFSREAQDDFAIASLTRAQRAIAEGRFTSEIAPVTVKAGKTEAVVSIDEQPGNAKLDKIPTLKPAFREGGTVTAANSSSISDGAAALVMMRRSQAERLGVTPKAVIVGHSTYANKPGLFATAPIGAIRKLSEKTGWNLRDVDLFEINEAFAVVAMAAMRVLDLPHDKVNVHGGACALGHPIGASGARVVVTLLAALETYGLKRGVASLCIGGGEATALAIERIA

SEQ ID NO: 8609 - protein, 533 aa, Burkholderia vietnamiensis G4
MTLQIGIPLETATGERRVATVPEVVEKLIKLGFAVAVQSGAGAGANFDDDAYRAAGASIAATAAELWSGSDIVFKVRPPSADEVALMREGGMLIGFVWPAQNPDLMQQLAAKRATVLAIDSLPRTLSRAQKMDALTSMAGISGYRAVIEAAHAFGRFLNGQVTAAGKIPPAKVFIAGAGVAGLAAIGTAASLGAIVRANDTRAEVADQVKSLGGEFVKVNYEEEGSGGGGYAKVMSEGFQQAQRAMYAQQAKDADIIITTALIPGKPAPKLITAEMVQSMKPGSVIVDMAAEQGGNCELTVPGEAVVRHGVTIVGYTDLASRLSRQSSTLYATNLLRVLEELCKGKDGTIDVDFDDDAIRGLTVIKEGTVTWPAPPLKQPAVAPKPAAGAPAAAAPAKSKSHGHSSEPMSAKALAIVFAVGALAFLLVGQFAPASFLSHFTVFVLACFVGYMVIWNVTPSLHTPLMSVTNAISSIIAIGALVQVAPPTAELANAGDRPSGLILGLAVGALTLTAVNMFGGFAVTRRMLAMFRK

SEQ ID NO: 8610 - protein, 397 aa, Burkholderia vietnamiensis G4
MSNAAKEVVVVSAVRTAIGDFGGSLKDFSPTDLGAKVVGEVLARANVPGDAVGHVVFGHVVNTEPKDMYLARVAAVNGGVAQHTPALTVNRLCGSGLQAIVSAAQTIMLGDAEVAIAGGSENMSRAPYTVPSARFGQRMGDAKLIDMMLGALHDPFQTIHMGVTAENVARKYGISRDAQDALALESHRRAARAIAEGRFKDQILPISIRTKKGEVAFDTDEHVRHDAGPDDFTKLKPVFVKEEGTVTAGNASGINDAAAAVLMMSADAARAQGAKPLARLVAYAHAGVDPAYMGIGPVPATQKVLQRAGLTVADLDVIEANEAFAAQACAVTQELGLDPAKVNPNGSGISLGHPIGATGALITVKALYELKRIGGRYALVTMCIGGGQGIAAIFENI

SEQ ID NO: 8611 - protein, 203 aa, Burkholderia vietnamiensis G4
MALTRERRLPGAVLLDKDGTLLENVPYNVDPARMRLAPGAARALRTLGATGMPIAVVSNQPGVALGYFPESKLGAVRQRLAELFEENGAALADFFYCPHHPAGSVPRYTCDCICRKPRPGMVRRALATLGALAESSWMIGDILDDVEAGRTARCGTILVDCGNETEWRLDAARTPHHVVDRLDLAADIVVREVARRHGTWVRR

SEQ ID NO: 8612 - protein, 340 aa, Burkholderia vietnamiensis G4
MSTYQIALNFEDGVTRFIDCKAGEKVLDAAFRAKINLPMDCSDGVCGTCKCRAESGRYDLGDDYLDDALSDDEKAAGVVLTCQMVPQSDCVIAVPASSLACKTGHGAFAATVAKVEPHNDAAIVLELDVGAAAPVFLPGQYVNIGVPGSGQHRSYSFSSAPGDAKLAFLIKKIPGGVMSTWLETARAGDTLELDGPLGSFYLREVARPLLFLAGGTGLAPFLSMLEVLARSGSQQQVHLVYGVTRDLDLVCVEALDAYAARLPNFTFATVVADAASNHARKGWVTQHIPADALNDGDVDVYLCGPPPMVDAVRGYFDEQRVTPRSFHYEKFTPNVTAKAA

SEQ ID NO: 8613 - protein, 403 aa, Burkholderia vietnamiensis G4
MLTQKTKDIVKATAPVLAQHGYDIITCFYRKLSDAHPELRNAFNMAHQEQGQQQQALARAVYAYAENIEDPGSLAAVLKNIANKHASLGVRPEHYPIVGENLLAAIKETLGDAATDDIVSAWAQAYGNLADLLMGMESTLYERSSERLGGWTGWRTFVVREKRPESSVITSFVLEPADGEPVANFEPGQYVSVAMDVPELGLQQIRQYSLSDMPNGRTYRISVKRESGGDYPPGYVSCLLHDYVEVGQTLALAAPYGSFHIDVEAKTPIVLISGGVGLTPMISMLTRAIQDSHRQVVFVHGARNSGVHAMRDRLRETASTHANFKLVVFYDDPLPQDVEGVDYDLKGLVDVNAIKDALLLPDADYYICGPVPFMRLQHDALKQLGVPETRIHYEVFGPDLFAE

SEQ ID NO: 8614 - protein, 384 aa, Burkholderia vietnamiensis G4
MIYLDHNATTAPAPAAIDAMLAVLTDVWANASSQHGAGQQAKRTLAAARATIAGALGCKAREVVFTSGATEANHLAVLGLGASATASAVRRRLVFGATEHAAQLKLAHALAAQGRPVDFIAVRPDGVLDLDSAARVIGPDVALVSVMAANNETGVLMPIADVKALAQAAGALLHVDATQLVGKLPFDFAALGADAVSLSAHKLHGPKGIGALLVRDGVPLAAQFPGSQERHRRGGTENLPAIVGFAAALERLADVLADAARIAALRDAFEAGLRAALPGVHVYGASAPRLPGTSCLRVGRLDADTVLQRCEQIGVCASSGSACSSGGSEPSHVLSAMGVPRDEALGAVRFSLGAATTARDIDYLLAALPPLLKPLLAEAAVQPT

SEQ ID NO: 8615 - protein, 596 aa, Burkholderia vietnamiensis G4
MYRYNEFDKAFVANRAAQFRDQIERWQSGKLSDAEFLPLRLQNGWYVQRHAPMLRVAVPYGELSSAQIRVLARIAREYDEPDTEVYRRALDAQRKLGTERLPTHQAHFTTRTNVQYNWIPLSKAADVMDLLATVNMHGIQTSGNCIRNISCDERAGVAPDEIADPRPFAELMRQWTTLHPEFAFLPRKFKIAISGSTEDRAATGWHDVGLRLVQDEDGELGFRVLVGGGMGRTPVIGIVLREFLPWRHIMNYIEAVVRVYNQFGRRDNKYKARIKILAKAEGQRFIDEVEEEFRQIVDFDGGPHTIPQAELARMRSYFAVPPEVAASRPADPEADVVRTATARQSPQFARWLERNVASHRDPSLRIVTLSFKRPLQSPGDASAEQLERIAELADRFSAGEARVTHSQNIVLPWVHVDDLLPLWHAAVAVQLASANVHLLTDMISCPGGDFCALANARSLPVAQSIMERFQDLDELNDIGEIDLHISGCINSCGHHHSGHIGILGVDKDGAEWYQITLGGADGSARSGVARPGKVIGPSFAAHEVTDAVEAVLDCYLALRARSGERCETFIETLRRVGLEPFKSAADAARTTAETLA

SEQ ID NO: 8616 - protein, 392 aa, Burkholderia vietnamiensis G4
MNVVLVINAGSSSIKFHAFAVDAAQLEPIAGGKLEEIYERPRFTVKGRDGDVIEHRVWPAGESLGHDAAIAFLLDWLRGHAGDATLVAVGHRVVHGGDGYSAPVRVDDRVLAQLETLIPLAPLHQPHNLTAIRSIRARHPDVPQIACLDTAFHHTQPAVATRFALPPEITSRGVRRYGFHGLSYEYIAGVLPEYDARAANGKTVVLHLGNGASMTAFDNCRSVATTMGFTAVDGLVMGTRSGSLDPGVVLWMLEEGGMDARAIESLLYKRSGLLGVSGLSSDMRTLLASDDPRAAEAVDLFCYRISRELGSLAAALGGLDSIVFTAGIGEYADAVRERVCTLAAWLGVSLDADANARHGPRISDAKSAVDVWVIPTNEELMIARHALSRLAR

SEQ ID NO: 8617 - protein, 392 aa, Burkholderia vietnamiensis G4
MDVILVVNAGSSSLKFSVFAVSGSALDPVCHGNFEEIDTHPQVHVTDAQGAPLDEKRWPEGFRLGHSGAIAFLFDWLHGHAAGYTAIGVGHRIVHGGSHYARPVRIDDEVIADLEALVPLAPLHQPHNLAALRIIAARRADLPQVACFDTAFHHGQPAVATQFALPREITEQGVRRYGFHGLSYEYIASVLARYDERAARGKTVVMHLGNGASMAALANGRSMASTMGFTAVDGLPMGTRSGTVDPGVLVWLMDHQHMDARAIETLLYKRSGLLGVSGISSDMRTLLASDDPAAANAVELFCYRVSRELGSLAAALGGLDSIVFTAGVGEHSAAVRERICRAAAWLGVSLDPAANARHGPRIITAGSVVSAWVIPTDEERMIASHTLDLLEI

SEQ ID NO: 8618 - protein, 582 aa, Burkholderia vietnamiensis G4
MSTVSGESSSPLAPPTGRHEAFIRSLTEIVGQQDVLTNERDTRRYRTGFRFGEGRTLAVVRPGTLLQQWKVLQACVAANVIVICQASNTGLTGGSTPDGDDYDRDIVIVSTARIRKVHVIKSGKQVICLPGATLDQLEQTLKPLGREPHSVIGSSCIGASVIGGVCNNSGGALVQRGPAYTEMSVFAQVGADGRLRLVNHLDVRLGAVPEEILARLDNGDFSERDIVDGDASGSDHHYAEHVRDVDADTPARYNADPLRLHEASGSAGKVMVFAVRLDTFPIEAGAKVFYIGTNDIDELTDIRRHALTQFKRLPIAGEYLHRDAFDIAQKYGKDTFLMIRHFGTKRMPMLFGFKSKCDAWFDRLGFLPRHLSDRVMQAVSNLFPNHLPPRIRDYGKRYEHHLMLKVSADTAEEARTFLTSFFAKRTGAFFECTQAEGEKAFLHRFAAAGAAIRYRNVHTRDVEDIVALDIALRRNDRDWFETLPPDIDAPIAIKLYYGHFLCHVFHQDYIVKKGNDCLALEHAMWKLLDARRAEYPAEHNVGHLYHAKPALKAFYEGLDPCNCFNPGIGQMSKFAKYREAHD

SEQ ID NO: 8619 - protein, 399 aa, Burkholderia vietnamiensis G4
MRTLALLVVNAGSSSVKFALFAYPPHGDPARRPLHDGEAVAAGNGIAIRFDANRDGTLPLSAGDPYRAVLAQVAMWIRVRLPHVTLAAIAHRVVHGGARFAEPVLVDNDVLDALRTLTPLAPLHQPHSIEAIDALRDAFPDVPQVAVFDTAFHRTLPRTEQLLPLPHEWFDRGVRRYGFHGLSYEYLSVALDEAFGAQAHGRVIAAHLGSGASLCAMRDCRSVATTMGFSALDGLMMSTRCGTLDPGVVLHLLDAGQLSGDALGQLLYHESGLKGVSGASGDPRVLLACEAAGDARAHDALALYVHRIVREVGALTALLGGLDMLVFTAGIGEHAAVLRERICAALGWLGVELDTRANAAHAQVVSTAASAVTVVVEPTNEAWVAARAAVRVLRGNRDG

SEQ ID NO: 8620 - protein, 585 aa, Burkholderia vietnamiensis G4
MNRPWSARVARMLPGIALLTHYQRAWLSRDLYAGLALSAVLLPVGMSYAQAAGLPAITGLYASIAALLAYALFGPSRILVLGPDSALAALIASAITPLAAHDPQRAIALAGALALSAGTICILLGALGLGFVTDLLSRPIQYGYLNGIAIALAIGRLPELLGMQTSGGDVFAGVQHIAHALVDGRFSVAAGLLGAGVLAAIFLMKRALPRWPGVLLAVIGATIATRLWPLPGVATIGALPAGIPAPRLPAVSLADLGALASGAFAVALVSFADISMLSRALSARAGDTPDRNQELIALGAANLLTGVTQGCAVSSSASRTPVAIAAGAQSQLTNVVAAACIAILLLAAPTLLAYVPRTALAAVVIYAACGIADFRSVVRLYRMRRGECLISVLCFAGVIAIGVVPGILLASGLSLLSFVWRAWHPYDAVLGRLTGVRGYHDVGRHPDAAQTPGLVLFRWDAPLFYANVEIFCEHLHAAITRSASPVTRIVVAAEPVTDIDVSAADRLVALHAELAEQRIELDFAEMKGPVKDRLRAYGLFDVFGAASFFPTVTDAVARHVQRTEGHARACKKKRAMRKRAARKAR

SEQ ID NO: 8621 - protein, 557 aa, Burkholderia vietnamiensis G4
MKRAATIAASIVAAAGATPACAAAPAVHAPAHDPLAIGMFMLFVAATLVITRWAARHNHSVADHYAAGGRITALQNGWAIAGDYMSAASLLGISALVFTSGYDGLIYSVGFLASWPIILFLIAEPLRNLGKYTLADVVSYRLQQRPIRAFAASSSIVIVLLYLVSQMVGAGKLVELLFGLNYTVAVVIVGVLMVVYVFFGGMLATTWIQIVKAVLLLAGAAFMAVMVLSRFGFSLDALFAQAMRIHPKHAAIMRPGGLVSDPVSAVSLGLALIFGTAGLPHILMRFFTVGDVGAARKSILYATGIVGAGYALIIVIGFGTIALVAADPQYHDASGAIAGGANMVAIHLAHAVGGDLFLGFICAVAFSTILAVVAGLTLAGSSAISHDLYANVLRRGRATDRDEMRVARATTLVLGVLAIVLGIAFQKQNIAFIVSLTFSIAASSNFPVLLLSIYWRGLTTRGAVVGGAVGLVTAVALTVLSPTVWVQVLGHAHAPYPYEYPALFSMAAAFVAIVAVSVTDRSARARRERELFDLQLVACELGVVPSQYDHHNLETTR

SEQ ID NO: 8622 - protein, 423 aa, Burkholderia vietnamiensis G4
MSQVISVRRPSAGATAGQALKNAVAAALLTAILTIPVLGLQLKLDGYQVVLTPHWRPVWIAVAAVFLFQLFKPWLVRAKSAVKLPAAPAIGAPQQRAIIWVLLAVGLVWPFFGSRGAVDVATLALIYVILGLGLNIVVGFAGLLDLGYVGFYAVGGYTYAMLNQYFGLSFWECLPIAALASATFGFLLGFPVLRLRGDYLAIVTLGFGEIIRLLANNLTDLTGGPDGISSIPKPTVFGFEMARSASVEGAKTFHELIGLEYSGEHMVIFLYLIALALVGFTLFVTSRLIRMPMGRAWEALRDDEIACRSLGLNPTRIKLSAFTLGAAFAGIGGAFFAARQGLVNPESFTFIESALILAIVVLGGMGSQLGVILAAILLTVLPEVARGFAEYRMLIFGLVMVLMMMWRPQGLLPASRPHVELPQ

SEQ ID NO: 8623 - protein, 766 aa, Burkholderia vietnamiensis G4
MKQTETQQQAAYDYHEFPTPGKISVVASKPLVTQRDLALAYTPGVASVCESIAAEPLNAHRFTSRGNLVGVITNGTAVLGLGNIGALASKPVMEGKAVLFKKFAGIDVFDIEINETDPDKLVDIIAGLEPTFGGINLEDIKAPECFTVERKLRERMKIPVFHDDQHGTAITVAAAFINGLKVVGKSISDVKVVTSGAGAAALACLDLLVDLGLPIENVWATDIEGVVYRGRTTLMDPAKERFAQETDARTLAEVIGGADIFLGLSAGGVLKPEMLSAMAARPLILALANPTPEIFPELAHATRDDVVIATGRSDFPNQVNNVLCFPYIFRGALDVGATTITREMEIAAVHAIAGLAQEEQSDIVAAAYGGDEVSFGPQYLIPKPFDPRLIVRIAPAVAKAAIEGGVATRPLADLDAYVEQLQQFVYHSGAFMKPLFAAARQLVRDGGKARIVFTEGEDERVLRAVQVIVDEKLARPILVGRPEVLLARIERFGLRLRLGQDVEVTNPEYDERFPQYWTTYWELRCRDGISKEMARVEMRRRLTLIGAMMVRLGDADGMICGTVGEYHNHLRFVDEVIGRKPDASTYAAMNILLLNQRTVALVDTHVNDNPDAEQIAEFTIAAARQMEWLNLTPKVALLSRSNFGSGSAASGAKMRNALEIIRAQAPDIQADGEMHGDCALDESLRLRLLPMSPLKGAANLLVCPNVDAGNIAYNLLKTEAGSNVAVGPFLLGVNAPVNILTSSATVRRIVNMTALTVIEANRNAAA

SEQ ID NO: 8624 - protein, 382 aa, Burkholderia vietnamiensis G4
MMRDAANFEPVDSRVTHPAFWNALPERWTSDVEETLVCCHVRQETHDVKSFFFRSPQGRTFSFEPGQFITLELDIDGETINRCYTISSSPARPHTISITVKRVPGGKVSNWLHDNLQPGAPVRVLGPAGEFTCARHPARKYLFLSAGSGITPLMSMSRAHHDLAEDRDIMFVHSARTPDDIIFARELDLIASNHTNFRTSFVVERVGARTNWPGVTGFLTLPLLKLIAPDFMEREIFTCGPAPYMKAVRDLLDEAGFDRKQYHEESFSFETLAQTASDDVLAELVPAADGGDVATKQYTVSFAKSNREISCGSEQHVLDAARQSGVRLPASCTQGMCGTCKVKLVSGQVEMKHNGGIRQREIDQGMVLLCCSKPLSDLVIDK

SEQ ID NO: 8625 - protein, 309 aa, Burkholderia vietnamiensis G4
MKPELLVLIALRDDAHRRIAASYHVHHAPTAEARGQAIAAHGGTIRAVLTNGSTGLTAAEIDLLPQLTLVGALGAGYEHIDVAHAKARGITVVAGAGTNDDCVADHAFALLLAAVRDVVRLDAATRDGVWRDALQMPPNVSGKKLGIVGLGRIGEKCARRAAGFDIEIGYHNRSRKEVPYRYFDRIDALAQWADFMIVATPGGAHTRHLIDGAVLDALGAGGFLVNVSRGSVVDTAALAEALRERRIAGAALDVYEGEPEPPRALTALDNIVLTPHMGGWSPEALDRSVQLFLDNAERHFAGESVLTPV

SEQ ID NO: 8626 - protein, 321 aa, Burkholderia vietnamiensis G4
MSAPTLTVRVARKWQEARDICGFEFVADDGSPLPRFDAGAHIDVHLPGGLVRQYSLCNDPRHGDRYRIAVLRDADGRGGSRAIHDEVRQGDTLRIGMPRNQFPLARDASHHLLLAGGIGVTPMLSMAEQLSAAGESFDLHYCARSLERMAFVEQINTAAFRDRTRLHVDDGDAAQRFDLPAALDAAPAGTHLYVCGPRGFMDAVLDAARARGWPDARLHYEFFGGAVVASGAERAFQVRLASSGKVVDVPADCTVVAALAAHGIDVLTSCEQGVCGTCVTRVLEGEPDHRDSYLTEAEQAAGDQFMPCCSRARSDLLVLDL

SEQ ID NO: 8627 - protein, 318 aa, Burkholderia vietnamiensis G4
MNDPLHFQPLGGNEMPRSGGIATMMRLPHVASAAGLDACFVGVPFDLGTSNRTGARFGPRQIRTESVLLRPYNMATRAAPFDSLQVADIGDVAINPYNLHDSIARIEAAYDAILAQDCKPITLGGDHTIALPILRAIHRKHGKVALIHVDAHADVNDTMMGEKIAHGTPFRRAVEEGLLHGDKVTQIGLRGTGYAAEDFDWCRDQGFRVVQAEACWNQSLVPLMEEVRARVGDTPVYISFDIDGIDPAYAPGTGTPEIAGLTVPQALEIIRGAKGLNIVGCDLVEVAPPYDPFGTTALLGANLAYELLCVLPGVAYRD

SEQ ID NO: 8628 - protein, 400 aa, Burkholderia vietnamiensis G4
MTEAFLCDAIRTPIGRYGGALSGVRADDLGAVPLKALVERNRDVDWTALDDVIYGCANQAGEDNRNVARMSALLAGLPDGVPGSTINRLCGSGMDAVGVAARAIKSGEAALMVAGGVESMTRAPFVMGKAASAFARQADIYDTTIGWRFVNPLMKQLHGVDSMPETAENVAVDYNVSRADQDLFALRSQQKAARAQQDGTLAAEIVPVTIPQKKGDPVVFSRDEHPRETSLDVLAKLKGVVRPDGSVTAGNASGVNDGAAALLLANEASAKRFGLTPRARVLGIATAGVAPRVMGIGPAPATQKLLARLGMTIGQFDVIELNEAFASQGLAVLRMLGVADDDPRVNPNGGAIALGHPLGASGARLVTTATYQLHRTNGRFALCTMCIGVGQGIAIAIERV

SEQ ID NO: 8629 - protein, 573 aa, Burkholderia vietnamiensis G4
MAGQTMAEYLAKTLAAAGVERIWGVTGDSLNGLSFSLAQMGSIRWMHTRHEESAAFAAGADAASTGRLAVCAGSCGPGNLHLINGLYDCHRNHQPVLAIAAHIPSTEIGLGYFQETHPQELFRECSHFAELVTNASQFPRVLARAMRTAIEERGVAVIVLPGDIALGDGPQEAPSWSVSAPPSILPADADLDRLAALLNESDAVTLLCGSGTQGAHDEVVALADMLGAPVVHALRGKQFVEWDNPFDVGMTGLIGFSSGYHAMESCDTLLMLGTDFPYRPFYPAHAKIAQIDWKGSQLGHRAPLALGLVGTVKETIAALLPRLTRKTQRRFLENALKHYAAARKSLDDLAVPEPPGRAIHPQYLTKLVDEIAGEDAIFTADVGTPTLWAARYLTMNGKRQLHGSFNHGSMANAMPQALGAQGAHPGRQVVSLSGDGGLSMLLGDLLTARQLNLPIKVVVYNNSLLGFVSMELKAAGYLDTNVDLSATDFAAIAKGAGIFSVRVEHSENVAQALRSAFEHDGPALVDVVTSKYELAMPPKIELAHAKGFSLFMLRAILSGRGDEIVELARTNLR

SEQ ID NO: 8630 - protein, 494 aa, Burkholderia vietnamiensis G4
MSDTTPLHYLDYAATTPADPRVIEAMMACLGADGIFGNPASSSHAAGRLAKQKVEHARAQVAALIGADADEIVWTSGATESNNLALKGYAETATGKRHLITSRLEHKAILDTTANLSKHGMTVTYLSPNADGEITADAVAAALSADTGLVSLMLVNNELGTLTDIGAISRIVHAAGALLHVDAAQALGKTPIDVRALGIDLLSMSAHKVYGPKGIGALFVRRDIADRIAPQIHGGGHERGLRSGTLATHQIVGMGVACELAADKLEREAARIAALSARVKDALLALGDITHNAAAARRIPHTMSFTVDVPGFFPFMLGDALAVSSTSACNSTSGAPSHVLTAIGLDAAAASRTVRISFGRFTTEQDAEFAIACFARALEQCRAAAATGFTASRQITPAELTAIRHAGFRAVICNRPDGESADQPAFDEIAAAARELGLDARYLPVERDGIDDAQVDAFGALVDALPKPVLAYCRSGSRSALLWNRLTERRAITV

SEQ ID NO: 8631 - protein, 394 aa, Burkholderia vietnamiensis G4
MVARQVVICSPVRTPIGAFGGTLKDVAATALGAAALREAVRRSEIDPAELASVVMGNVVQAGNKMNPARQAAVAGGIPVTVPALTVNRVCGSGAQAIANAAQDIWLGFGEVAAAGGMENMDGAPYLLGGGRWGYRMGNAEIADSMLVDGLVDAFSNLHSGWHTEDLVAMKGITREQQDRWAERSQRRFADAQARGAFDAELVAVEVAGRKQTVRFERDEQPRPDTNFESLARLKPAFRADGTITAGNAPGLNSGAAAMIVAERRYAETRGIEPIATLVSYGVGAVEPGLFGLGPVPAVKMALARAGWSMNDVERFEINEAFAAVPIAVARELGIDEERINVEGGAIAHGHAIGATGAVLTTRLAHSMRRDGIKRGIVTLCIGGGQGIALALEAV

SEQ ID NO: 8632 - protein, 690 aa, Burkholderia vietnamiensis G4
MIAPSAAVPGWELEVPPFHAGELAVQQRAGVTEAAGAGGRRGIRRFMPDQHRTFFAQLPLFVLGGVDAHGQPWATLRVGMPGFVTAPDPRTLRIDGDALPGDPLAGTWRPGVPFGGLGIEFDTRRRNRVNGVVRAVDGGALTVAVDQSFGNCAKYIQARKPVRVPREGERSAADAAPEVSDRLSDADRVLLAQADTFFVASANTAAAAGPARGADVSHRGGMPGFVRVDDAHTLTTPDFSGNRFFNTLGNLQLDPRAGLLFVDFDSGDLLYVAADAEIVWDGPLVASFDGAQRVVRFRVREVRRTRRVLPLRWSPVERAPQFAAATRAPAATASQTAASHVPTPASAAPSASGWRALRIAKIVDEARAIRSFHFDAADGAALPAYEAGQHLTLRVALPGGDAPAIRSYTLSDAPGAAHYRITVKREGRVSAWLHDHARAGMTLDAQMPRGRFTFDVASPRPAVLVSAGIGITPMMAMLRRALADDSASRRVMFVHGARDAADRPFAAELARLAHADARVSLHCFDSRAQRDGAGRVDVAQLKRILPFDDYDFYLCGPAAFMRELYDGLRALNVADERIRFEAFGPSSVVRTTHRADRTSPAASVPVVFRRSARDAEWTPADGTLLEFAESRGVTVPSDCRAGSCGTCATRVLSGAVDYLHAYDAAVEPGCALLCVAQPAARAGEPLVLDR

SEQ ID NO: 8633 - protein, 445 aa, Burkholderia vietnamiensis G4
MSTILESLPTGQKVGIAFSGGLDTSAALHWMKLKGAVPYAYTANLGQPDEDDYDAIPKRAIEYGAAGARLIDCRAQLVAEGIAALQSGAFHITTAGVTYFNTTPIGRAVTGTMLVAAMKEDGVNIWGDGSTYKGNDIERFYRYGLLVNPDLKIYKPWLDQTFIDELGGRAEMSEFMNQAGFAYRMSAEKAYSTDSNLLGATHEAKDLESLESGIKIVNPIMGVAFWRDDVKIAAEEVTVRFEAGQPVALNGVEFKDQVELLLEANRIGGRHGLGMSDQIENRIIEAKSRGIYEAPGLALLYIAYERLVTGIHNEDTIEQYRENGRRLGRLLYQGRWFDPQAIMLRETAQRWVARAITGEVKIELRRGNDYSILSTKSPNLTYQPERLSMEKVASTFSPRDRIGQLTMRNLDITDTRDKLRVYAQVGLLTPGESSALPQIKSDSGE

SEQ ID NO: 8634 - protein, 474 aa, Burkholderia vietnamiensis G4
MQPAEIGTPLRRTLGARHINLMALGATIGVGLFLGSATAIRLAGPSILLGYAFVGVFVFFVMRALGEMAVAHPVAGSFNRYAYEYIGPRAGFVTGWTYWFMWILCIMAEVTAVAIYMKFWFPGMPAWVWSLAALATMGLLNFVAVRAFGELEFWFAAIKIVTIVFMILSGIGIIGFGFGNGGVATGIGNLWRHGGFLPNGMWGLASAIPMVVFAYLGVEIIGLTAGETKNPEKSLARAVNSVFWRIAIFYIGALFIIMSLYPWNAIGTQGSPFVLTFERLGIRGAAGIINFVVLSAALSSCNSGIFGTARIVFNLAQQGQAPRIFAHTSKSGIPACAVVLTLVAALLGVLLNYVAPKGLFEWLTAIGTFAGLFSWAIILVAHYRFRRQRVAQDNRMLMPWWPYSSYCTLAFLAVLVAFMLKFDETRVAVIVGPLWLAFLWIVYGLSAKNGASRQGVPSPSASFAVEGVTRDIRD

SEQ ID NO: 8635 - protein, 565 aa, Burkholderia vietnamiensis G4
MNAPEFLSRTLPYIDTLYDYGAFLARTGGHLGTLPADGARDARIAIVGAGVGGLVAACELLRAGARQLVVFEANPARVGGRLLSQSINPDHPHLLAEMGAMRFPPSQAALYHYLERFGIDSSSTFPDPGVVDTEIHYQGHAYRWPAGERPPALFDRVDRGWRAFIRDGVRLDDGTQLPAPAELTALLRAHCYDDARRGWQQYIDRFGDESFYSAIVKIFTGATPPGGVRWRRSEDLRLFGTLGIGSGGFQPVYRASFLEILRIVVNELEVDQRLIPAGIFALAQRLLDDGGQAARVRDRVVHAAVRRVEKQPDGTFALTLDDGTTQVFDRVIVATTTRAMQVGMGITGIANLFAPEVVRAINDTHMVSSSKLFVLTRDKFWLKHGLPHNIQTDTLARGIYCLDYAPDDCDAHGVVLISYTWEDDSHKILSLTDKVERFQRLVAEIGVVSPAFAAHLRPLDDDYARNVTSHDWLSDRYALGAFKLNYPGEDIHSQALFYQFQTAAEPSTDRGIYLAGCCCSFTGGWIEGAVQTAINAASAVIHSLGGVLADGNPLDAMRNRYRYGD

SEQ ID NO: 8636 - protein, 424 aa, Burkholderia vietnamiensis G4
MPSHADSPAVHHAGSLTIFQGAALYIGAVLGTGVIALPALAAEVAGPASLLAWAALVVLSGPLAATFAALGARYPDAGGVSTYARRAFGPKAAAIVGWCFYFAVPAGAPAAAMFGGAYVAAVIGGGHTTVVVTAAALIAAVSAANAFGVTVSGRMQLVLSALLVTLLLAAVLASAPHARPENLQPFAPHGWLAVGQAAALLVWSFAGWEAITHLAAEFRRPAHDMPRSAGIAVVVVGFLYLSVAAASVTVLGPSAGASGAPLAELIARGIGGHAQVLAAAAALLLTLGTMNAYFAGAAKLGAALGRDGALPAWLAQGSQVGGVPRRSLGVIAALAAAALAATAFSDVGPKPLVLVSSGCFVMVYGLGAAAALKLLPRASAAYRCAWVSLIAVAGLFLTTGWYLFFPLLLAGAALLYLRLARRRA

SEQ ID NO: 8637 - protein, 371 aa, Burkholderia vietnamiensis G4
MLIGVPKEIKNHEYRVGLTPAGARELVRHGHRVLVQRGAGTAIGLLDDDYAAAGAALCDDARDVFARADLIIKVKEPQPAECAMLRRGQMLYTYLHLAPDPEQAAALVKSGAVCIAYETVTGVGGGLPLLAPMSEVAGRMSMQVAAACLESPRGGRGVLMAGVPGVPAAHVVVLGAGVVGTGALQMAVGMGARVTVLDTNVARLRQLDLVFANRISTVCSNTHTVEEAVRDADVVIGAVLVPGASAPRLVTRDMIATMRTGAVVVDVAIDQGGCFETSHATTHAQPTFVVDGVVHYCVANMPGAVARTSTFALNNATLGHALALADKGWKRAMTDDPHLRAGLNVCDGHITYEAVAFALGLPYVPAEDMLG

SEQ ID NO: 8638 - protein, 468 aa, Burkholderia vietnamiensis G4
MSRLVVVSNRIADPRKAAAGGLAVAVKDSLQESGGVWFGWSGRLRSEGERPAQGDDVQIQNVGGIQLATIDLDPQDYDAYYLGYSNNVLWPVFHYRLDLAQFDRRFADGYRRVNQLFARKLSTLLRPDDTIWVHDYQLIPLAAELRAMGCTNPIGFFLHIPMPPPPIMAAIPEHEWLMRALFAYDLIGFQTESDLLHFEHYVEAEAGAARLPDGRLRAFGRTLSAGAFPIGINVDEFAALAENRDGIDMFERMRDEYSRRQLLVGVDRLDYTKGLPQRVHAFRQLLEQYPENRDRATLIQIAAPSREDLGAYDDLRREMDSLCGAINGDYGELEWMPMRYIHRTVARKRLPGLYRASRVALVTPLRDGMNLVAKEFLAAQDEADPGVLVLSRFAGAAEQLKPALLVNPYDTQGTAQAIQRALTMPLDERRQRHNALMAIVRKTDVHWWRTRFLDALTEAAEVAAAAAS

SEQ ID NO: 8639 - protein, 67 aa, Burkholderia vietnamiensis G4
MDTGTVKWFNETKGFGFISPDNGGDDLFAHFSEIRGTGFKTLAEGQKVSYEVKRGPKGLQASSITPQ

SEQ ID NO: 8640 - protein, 347 aa, Burkholderia vietnamiensis G4
MNPPIPAAPERAHLRLGFVALSDAAPLIVAQRLNLGARHGLTLELHRQPSWAAVRDKLLSGELDAAHALYGLVCGLQLGIGGPQADMAALMVLNRNGQAITFARGLADAYRASGDVRAAFATLGRKPLLAQTFPTGTHAMWLNHWLASHGVDPLRDVRSVVIPPPEMVAALAGGELDGFCAGEPWHAVAEACGAGRTVAVTSEIWPDHPEKVLATRRDFVALYPATARALIRTVVDACAWLDDPAHRRDAADWLASPDALGVPARLIAPRLLGDYGAGPFAQPPLPIRFHDGGGVNRPDPQEARWFLSQYRRWGMLEGTQDDAQIAAAIAQTALYDAAVAEDGTAGR

SEQ ID NO: 8641 - protein, 320 aa, Burkholderia vietnamiensis G4
MTELLHGDGAIRRTTPYGSSIENTYAGVLSFMRRNYSRVLDGVDVAISGVPLDLATTYRSGARLGPAAIRAASVQLAELHPYPWGFDPFDDLAAVDYGDCWFDAHNPLSIKPAIVEHARTILRSGAKMLTLGGDHYITYPLLVAHAERYGRPLSLIHFDAHCDTWADDEPDSLNHGTMFYKAVKEGLIDPATSVQVGIRTWNDDFLGIERLDAAWVHDHGARAAVERIVGIVGARPAYLTFDIDCLDPAFAPGTGTPVAGGLSSAQALAIVRGLGAVDLIGADVVEVAPAYDHADITAIAAAHVACDLLCLWRQKKVAGR

SEQ ID NO: 8642 - protein, 340 aa, Burkholderia vietnamiensis G4
MSYRIEITTRDGEPFGFDCEPGQDVLAAAAQADITLPSQCRRGSCGACQATVVDGPYEMQGHSADALAAGQSGAVLLCRTTPLGDLRVAAPYDRSKVLLQPVPVRTARIVTLDTIARDTMRVELQIEPDDVFGAAAEFEAGQFAELEVPGSGLRRPYSLANTSNWDGRLEFLIRLRPGGWFSTYLRERARLGDALTVRVPMGGFGLFADSLRPRWFVAGGTGLAPILSMLRRMAEYQELADARLFFGVNEESELFLLDELERLQADLPQLRVDLCVWRPGPQWAGLHGTPVDGLRAALAQADVSPDLYVCGPPPLVEGAREAAAAAGLPAAQFASERFTV

SEQ ID NO: 8643 - protein, 655 aa, Burkholderia vietnamiensis G4
MCGIDGFLNSVAFDEETARGTLARMTASLAHRGPDGQGMWVDPEAGIALGHRRLAIVDLSVQGRQPMASACGRYVLVFNGEIYNHRELRAELERTGRAPAWRGRSDSEVLVAAIAAWGVDATLRRATGMFAFALWNRASRVLTLARDRIGEKPLYYGRIGDALVFASELKALRGYPGFDGAVDRDALCLYLRQSSVPAPHTIYRGISKLPPGTFIQFEHARDTPRVRAYWALEQAIEAGRERPFDGNADDAVGQLDAVLRQAVARQMEADVPLGAFLSGGIDSSAIVALMQAQSAKPVDTFTIGFHEAGYDEAGYAKAVARHLGTRHTELYVTADHALAVVPKLPSIYDEPFSDASQIPTFLVSDLTRRHVKVSLSGDGGDELFGGYTRYFLTPRLWRKLHRVPAAVRARIAAALHALRPDHADQLAAVAQGAWGGVDARDGASRIGDRLHKLGHVMTAESRIGLYRLLMSSVHHPERLALAGQEPPTPLDTVSAWPAHLSFAEQAMAIDTLTYLPTDILAKVDRAAMAVGLETRMPFLDHHVVEFAWRLPAAVRLPQGQPKALLRRLLDQYVPRALIDRPKQGFCAPVDHWLRGALRDWAEALLEPSRLRAEGFFDAAAVERLWRQHLTGRMNWQHQLWTVLMFQAWLEGQRAA

SEQ ID NO: 8644 - protein, 406 aa, Burkholderia vietnamiensis G4
MRHPVLVLNAGSSSLKFSVYDTRDDRSLDAGVHGQIDSLHVAPRLTVVDAHGVLLADRAVARPGHHAAIEALHAWFADHVGREAAFDGVGHRVVHGGPYFTAPVRIDARVLETIASLAPLAPLHQPHHVDAIRAVAAFAPELPQVACFDTAFHATMPALEREFALPRALTEQGIVRYGFHGLSYEYVSGVLAELDPAWRQRRTIIAHLGNGASLCALEQGRSVATTMGFTAVDGLPMGTRTGSLDPGVILYLLRHDGRSVDDVEHLIYAESGLLGVSGVSSDMRTLLASDAPSAAHAVELFAYRVAREMAALAGVLGGVDTLVFTAGVGEHAPRVRELICARAAWLGIAVDASANAAGRAVISTDASRVTVRVMPTDENLMIARHTRRVLDGAVFSPSTSSASLSR

SEQ ID NO: 8645 - protein, 337 aa, Burkholderia vietnamiensis G4
MSDSRQHQKYDALIARCRTVRPVTVAVVHPCDEVSLRAAVDAAQARIITPVLVGPAARITALAATIGVDVSGFRLVDAPHSHAAAALAVALVRAGDAQALMKGSLHTDELLEEVVRPDTGLRTQRRLSHVFIMDVPTYYKPLFITDAAVNIRPTLEQKADIAQNAIDLAHALGIAQPKVAILSAVETVSSKLPSTVDAAALCKMAERGQITGALLDGPLALDNAISPEAARLKHLSSAVAGDADILLAPDLEAGNMLAKELTFLANADAAGIVLGARVPVILTSRADNERTRLASCAIAALVADAARGAGVPAAVVSPASATPAEAAVLASAQAASR

SEQ ID NO: 8646 - protein, 508 aa, Burkholderia vietnamiensis G4
MSDASSSSSRSTAASAASDAPKIGVVPATLMVAGNMMGSGVFMLPANLAATGGIAIFGWLITVVGAVSLALVFAKLAAIDPAAGGPYAYARKSFGPYMGYQTNLIYWLANVLGNVGLAVAGLGYLTHFFPVMKDPLVFALAQIFVIWLFTYANILGPNVVGRVQSVTTVVALVPILGMALFGWFWFSKDVYLAGWNVSGTSSIGAIGATLNFTLWAFIGVESASVSAGVVENPSRNVPIATVGGVVLAAVCYVLSSTVIMGMIPNKALLASSAPFADAARLALGDTAANAVALCAALGCLGSLAGWTLLVGQTAKAAADDGLFASVFARVNSKNVPSAGLAIVAVIMTVQVLATMSPSASQQFGKIASIAVIMTLLPYIYSCIAIKVLGYGKMPPHQFTFYTIVGLIGAVYSLWAMVGSDGQQTRWSLIFVIATIVFYELSINRQREIEETHVHPGGRSPRWVRYFALGVTIVALAATFWISVGQHEADLLHARSPAAGVAATQHTGE

SEQ ID NO: 8647 - protein, 779 aa, Burkholderia vietnamiensis G4
MTASLTQPALRRLGMKALLVQHDIDERTATGRAATALAEELRTRLVDVVIATSADDACAVVVADPAIQCLLLNWELGNDPAHAPAQAVLDAMRARNATVPVFLLASRASAAAIPVDAMRKADDFIWMLEDTTAFIGGRIVAAIERYRETVLPPMFRALAQFSRVYEYSWHTPGHTGGTAFLKSPVGRAYFEFFGEALFRSDLSISVGELGSLLDHSGPIGDSERYAARVFGAHRTYHVTNGSSMSNRVILMASVTRNQVALCDRNCHKSAEHAMTMSGAIPTYLIPSRNHYGIIGPIMPERLTAAAVRLAIDANPLVRGRDGISPTPVHALITNSTYDGLCYNVARVEELLGQSVDRLHFDEAWYGYARFNPIYRDRYAMHGDPARHDASKPTVFATQSTHKLLAALSQASFIHIRDGRNPIEHARFNEAYMMHASTSPNYAIIASNDVSAAMMDGPGGEALTTDAIREAVSFRRMLARLHAEYDGNDDWFFDGWQPDTVVDRKTGRRVPFHEADETLLATDPSCWVLHPGDTWHGFGAIEDDYCMLDPIKVSIVTPGVAPHGGLMPVGIPASVVTAYLDRQGIVVEKTTDFTILFLFSLGVTKGKWGTLVNTLLDFKRDYDANAPLEQALPELVARYPERYGKLGLRELCDLMFAAMSDLKTTEMMSRGFSTLPQPDYSPAEAYEHLVHNDIEMLELSEMAGRTVATGVVPYPPGIPLLMPGENAGPADGPLLGYLKALEQFDRRFPGFTHDTHGVEVDDGVYRIACIRQAGRDSAAR

SEQ ID NO: 8648 - protein, 176 aa, Burkholderia vietnamiensis G4
MSSRRIAVRRSGIHGKGVFAVEPIKAGERVVEYKGERISWKEALRRHPHDPNDPNHTFYFALEDGGVIDGKVNGNSARWINHSCTPNCEAEEIKGRVFVHALRDIEPEEELFYDYGLVIDEKLTKKLKREYACHCGAETCRGTLLATPDDDGKKKKKKDKKDGKAESGAKDKKKKK

SEQ ID NO: 8649 - protein, 384 aa, Burkholderia vietnamiensis G4
MRSAITHRSKLPDVGTTIFTVIGQLAAQHDALNLSQGAPNFAPDPALIDGVARAMRDGHNQYAPMAGVVSLRERLAEKTEALYGARYDPGTEITVIASASEGLYGAISALVHPGDEVIYFEPAFDSYAPIVRMQHATPVAIKLSPEHFRVDWDEVAAAITPRTRMIVVNTPHNPTATVFRADDLERLAQLTRNTDIVVLSDEVYEHVVFDGAQHQSVARHRELAERSVIVSSFGKSFHVTGWRVGYCVAPAALMDEIRKVHQFMTFSADTPMQVAFAQMLARPESYLGLSAFYQAKRDLLARELAGSRLQLLPSEGSFFMLARFRHLSDERDSDFVLRVIRDVRVATIPLSAFYADGTDTGVIRLSFSKDDATLIEGARRLRSL

SEQ ID NO: 8650 - protein, 470 aa, Burkholderia vietnamiensis G4
MKAESNGRPAAGVKSSGQPALQQTLGTWQLWGIAVGLVISGEYFGWSYGWASAGTLGFVITALFVAAMYTTFIFSFTELTTSIPHAGGPFAYARRAFGPTGGYLAGAATLVEFVFAPPAIALAIGAYLHVQFPGLEPKHAAMGAYLVFMALNIVGVQIAATFELVVTLFAIFELLVFMGVVSPGFAWSNFMKGGWAGADHFSMGAFHGMFAAIPFAIWFFLAIEGVAMAAEEAKNPKRSIPIAYVAGILTLVVLAIGVMVFAGGAGDWTKLANINDPLPQAMKYIVGANSGWMHMLVWLGLFGLVASFHGIILGYSRQIFALAREGYLPEWLGKVHPRFKTPHRAILAGGVVGIAAIYSDELIQFGGQTLTANIVTMSVFGAIVMYIVSMAALFKLRRSQPNMARPFRAPMYPLFPAFAIVAALVCLGTMVYFNGLVAMVFIAFLAVGYAYFIATRSQRASAPADVLLEE

SEQ ID NO: 8651 - protein, 567 aa, Burkholderia vietnamiensis G4
MSHSKDLEPSTTTGARLLVDALLANHVERVFCVPGESFLAVLDALADDTARIQTVVCRHEAAAANMAEAVGKLTGRPGIAFVTRGPGATHASIGVHTAFQDSTPMILFVGQCAREHLDREAFQEIDYRRMFGQMAKWVAQIDDPRRIPEYLSHAFHVTTSGRPGPVVLALPEDVLSEACAPQPAVPAAKRIAASPSAAQLDELRERLARAERPFVIVGGSGWTPDACANLRTFVERWQLPVACAFRFQDTFDNAHPNYAGDVGLGINPALGRRIRDADLLLVLGPRLGEATTGGYTLLDIPKTYQTLIHVHQGADELGRVYAPDLPIVAGMPEIAAPLAALEPPQQRPWAGTVADAHRAYREWHAPLPMPGDVQLGDVMVQLRERLPHDAILTNGAGNYAIWLHRHFAYRHFRSQLAPTSGAMGYGLPAALAAKSLYPTRAVVALAGDGCFMMAGNELATAMQYGLNIVVIVVNNGHFGTIRMHQERNYPGRVHGTGLTNPDFAAYARAFGAHGETVAHTAEFAPALERALGCGLPALIEIRIPQDASTPAATLEQIREQGRRARGA

SEQ ID NO: 8652 - protein, 289 aa, Burkholderia vietnamiensis G4
MDLGFIGLGEMGQAIATNLLKAGHTVRVWNRSRERAEPLAALGAQIVATPADAFRGDAVFSMLADDAAARDVFDDALLAQAPRGLIHVNMATVSVALAESLAHAHASRGLDYVAAPVMGRPDVAAAARLTIMAGGPAEAIDRVQPLFDAIGQKTWRFGSLPQHANIAKIAANFTLASAIETLGEASALLGAHGVAMRDFLDVITSSVFPGPVYAGYGGMIAERSYEPARFKARLGLKDVRLALQAGDAASVPLPVASVVRDSLLDALAHGGGDQDFAVLGEVALRRAGR

SEQ ID NO: 8653 - protein, 756 aa, Burkholderia vietnamiensis G4
MDEQLKQAALAYHLNPKPGKISVTPTKPLSNQLDLSLAYSPGVAAACEAIHADPLDAQKYTSRGNLVGVVTNGTAVLGLGNIGPLAAKPVMEGKGCLFKKFAGIDVFDIELSESDPDKLVEAIAMLEPTLGGINLEDIKAPECFYIEQKLRERMKIPVFHDDQHGTAIIASAAILNGLKVVGKKLADVKLVCSGAGAAAIACLDLLVKLGLTKTNILVADSKGVIYEGRGNLDPSKQRYAATTDARTLADAIVGADVFLGCSSAGVLKQDMVKTMGDRPLILALANPEPEIRPEDAKAVRPDAIVATGRSDYPNQVNNVLCFPFIFRGALDVGATTITEEMKLACVRAIAELAEETDQSEEVAKAYEGHSLEFGPEYLIPKPFDPRLIIKIAPAVAQAAMDSGVATRPIEDMDAYREQLGTTVYRTGMVMRPVFATAKKKEARIVFAEGEDERVLRAAQFVLLEKIAKPVIIGRPSVVEMRLEKIGSKLKAGVDFEIVNPEDDTRYQRYWQAYHEIGARDGVTPEVAKAALRKFNTLIGAMLVHLGDADGMICGMIDTFHTHLKFIEQVLGRAKGAEHFAAMNLLMLPGRNLFMCDTYVNELPSAEQLADMTIQAAGEIERFGITPKAALLSNSNFGSAPSASSRRMAEARRLINERAPNLEVDGEMHGDAALSEAVRKAAFPGTTLSGEANLLIMPNVEAANIAYNLLKMVGGDGVTVGPFLLGAAKPVHILTPAATVRRIINMTAVAAANANTK

SEQ ID NO: 8654 - protein, 362 aa, Burkholderia vietnamiensis G4
MATPQFHPLRIRDVRPETADAVTVSFDVPPELRDAYRFTQGQFVTLKTHIDGEETRRSYSICVGTTDYDRDGELRIGIKRVRGGRFSNFAFDTLKPGHTIDVMTPDGRFFTHLNADHGKQYVAFSGGSGITPVLAIVKTTLELEPRSTFTLIYGNRSVDAIMFAEELEDLKNRFMNRFVLYHVLSDDQQDVELFNGVLDQAKCAQFLATLMPADAIDEAFICGPAPMMDAAEAALKAAGVSPEKVHVERFGTPLPQAGAPVVEITEQTPAADLEIVLDGKKRKLRLPYEGVSLLDVGLRAGLALPYACKGGVCCTCRAKVVEGEVRMDKNYTLDEREVKDGFVLTCQCHPVSDKVVVSFDER

SEQ ID NO: 8655 - protein, 890 aa, Burkholderia vietnamiensis G4
MSTPLKTLITKLNPLCRHAAERAASACLARGHYEVDLEHLFIALLDEATGDLPLALRASRVDPHALRADLERELTRLKTGNTRTPVFSVHLIALFEQAWLIASLDSQLGRIRSGHLLLALLTAPDLAQFAQRMSAQFAEMNVTDLKHKFDEIMAGSSEAEPRQPDGDDGGDAVSGVAPGASAAGPSKTPALDTYTTNLTQRARDGKIDPVIGREAEIRQAIDILMRRRQNNPIMTGEAGVGKTAVVEGLALRIAADDVPPPLRGVALHVLDMGLLQAGASVKGEFENRLKSVIDEVKKSAHPIILFIDEAHTIIGAGGQAGQNDAANLLKPALARGELRTIAATTWSEYKKYFEKDAALARRFQVVKVEEPSEPLAAAMLRGMSGLMEKHFNVRILDDAITEAVRLSHRYISGRQLPDKAISVLDTACAKVALAHSATPAAIDDTKKRIERIDAEIASLEREAAGGASHDERLGELRGARDTALAQLSDDEARYEAERAIVAEITELRETLDRARHASEDGEPVDVPATREKLTERVAALHALQGGEPMVPLQVDGHVVAEIVAAWTGIPLGRMVKDEIDTVLNLQPLLGARVIGQDHALDAIAQRVRTASANLEDPNKPRGVFMFVGPSGVGKTETALALADILYGGERKMVTINMSEYQEAHSVSGLKGSPPGYVGYGEGGVLTEAVRRNPYSVVLLDEVEKAHPDVLEMFFQVFDKGTMDDAEGREIDFRNTLIILTSNVGSAAVMQACLNKTADELPDPDALAEALRPQLYKTFKPAFLGRMKVVPYYPISDDVLAEIIELKLERIRRRIEANHKAAFEWDESLVDAVLARCTEVDSGARNVDHILNGTLLPEIAGHVLGRIADGAAIARIAVRADDAGEFAYTVE

SEQ ID NO: 8656 - protein, 532 aa, Burkholderia vietnamiensis G4
MKSSIQRNIGPFALMLTGLGSIIGSGWLFGAWKAAKIAGPAAICAWIIGAVVILAIALTYAELGAMFPESGGMVRYARYSHGSLVGFISAWANWIAIVSVIPIEAEASIQYMSTWPYPWAHALFVNGELSTPGLLLSAVLVVIYFLLNYWGVKAFARANTAITIFKFLIPGLTILGLMLSSFHSENLGTASNASFAPYGWSAVLTAVATSGIVFAFNGFQSPVNLAGEARNPSRSVPFAVITSILLALVIYVLLQMAYIGSVNPADVAKGWAHFNFSSPFAELAIALNLNWLAILLYVDAFISPSGTGTTYMATTTRMIYAMERNNTMPKMFGNVHPIYGVPRQAMWFNLLVSFVFLFFFRGWSSLAAVISVATVISYLTGPISLMALRRAATDIERPLSIPLMKLIAPFAFVCASLILYWAKWPLTGEIILLMVVALPVYFFFQAKAGWGGWGADLKAAWWLVAYLPTMAVLSLIGSKEFGGHGVLPYGWDMLVVAVISLGFYFWGVNTGYRTQYLDERESHDEILEGIGA

SEQ ID NO: 8657 - protein, 103 aa, Burkholderia vietnamiensis G4
MDTQQRIKQIVDENQVVLFMKGNAQFPMCGFSGRAVQVLKACGVDQFKTVNVLEDDEIRQGIKEFSNWPTIPQLYVKGEFIGGSDIMMEMYQSGELQQLFAAA

SEQ ID NO: 8658 - protein, 400 aa, Burkholderia vietnamiensis G4
MTDAYICDAIRTPIGRYGGALKDVRADDLGAVPISALIERNRDVDWTALDDVIYGCANQAGEDNRNVARMSALLAGLPSAVPGTTLNRLCGSGMDAVGTAARAIKAGEARLMIAGGVESMTRAPFVIGKAASAFARQADIFDTTIGWRFVNPLMKQRYGVDSMPETAENVAVDYDISRADQDLFALRSQQKAARAQQDGTLAAEIVAVTIPQKKGDAVVVSRDEHPRETSLDALAKLKGVVRPDGSVTAGNASGVNDGACALLLANAQAADQYGLRRRARVVGMATAGVEPRVMGIGPAPATQKLLRQLGMSIDQFDVIELNEAFASQGLAVLRMLGVADDDPRVNPNGGAIALGHPLGASGARLVTTALHQLERIGGRFALCTMCIGVGQGIAIAIERV

SEQ ID NO: 8659 - protein, 370 aa, Burkholderia vietnamiensis G4
MKFIDEARIEVIAGDGGDGSASMRREKFVPFGGPDGGDGGRGGNVYAIADRNINTLIDYRYAKKHMARNGENGRGSDCYGKGGDDITLRMPVGTVVTDMDTGELIADLTEHDQQVMLAKGGSGGLGNLHFKSSTNRAPRQKTDGKPGERRMLRLELKVLADVGLLGMPNAGKSTFISSVSNAKPKIADYPFTTLAPNLGVVRVGPSKSFVIADIPGLIEGAAEGAGLGHQFLRHLQRTGVLLHLVDLAPFDESVDPVAEAKAIVGELRKYDEALYEKPRWLVLNKLDMVPEDERDARVADFLERFGWDGPVFQISALTGQGCEALCYAIYDYLAEHSDAHRAAEEEDLAADVRFRDAPPSDGGATSGGDA

SEQ ID NO: 8660 - protein, 780 aa, Burkholderia vietnamiensis G4
MPWNSHSNPPATRHMSTQASSKAKLREAALDYHEFPTPGKIAIAPTKQMINQRDLALAYSPGVAFACEEIVENPLNAARFTARSNLVGVVTNGTAVLGLGNIGPLASKPVMEGKAVLFKKFAGIDVFDIELNESDPHKLVDVIAALEPTFGGINLEDIKAPDCFIVEREARKRMKIPVFHDDQHGTAIVVAAAVTNGLKVVGKDIKKVKLVASGAGAAALACLDLLVDIGLPLENITVTDLAGVVYKGRAELMDPDKERFARETDARTLAEVMEGADIFLGLSAGGVLKQEMVKGMAERPMILALANPTPEILPELALEVRPDAVLATGRTDYPNQVNNVLCFPFIFRGALDVGATTITREMEIAAVNAIAELAQHEQSDIVATAYGIQDLSFGPEYLIPKPFDPRLIVKIAPAVAQAAMDGGVATRPIEDMDAYKQHLQQFVYHSGTTMKPIFQIARAAPGEKKRVVFAEGEEERVLRAVQIIVDEKLAKPILIGRPSVIEHRIQRYGLRLTPGADFTVVNTEHDERYRDFWQTYYKMMARKGISEQLARVEMRRRTTLIGSMLVKKGEADGMICGTISTTHRHLHFIDQVIGKRPGCSVYAAMNGLVLPGRQIFLVDTHVNVDPTPEELAEITIMAAEEVRRFGIEPKVALLSHSNFGTSNAPSAQKMRDTLAILQERAPELKVDGEMHGDVALDAALRKEILPESTLEGDANLLILPNIDSANIAYNLLKTAAGNNIAIGPILLGAAQPVHVLTESATVRRIVNMAALLVADVNASR

SEQ ID NO: 8661 - protein, 402 aa, Burkholderia vietnamiensis G4
MTDITADQMARVKATAPVLAVHGATITKHFYQRMFTRHPELKNLFNQTHQKTGSQPETLAKAVYAYAANIDNLGALGGAVSHIAHKHASLNIRPEHYPIVGENLLASIVEVLGDAVDAQTLEAWRVAYGQLAQILIGAEADLYAGAAWSGFRPFKVARKVRESDEITSFYLTPADGGAAPTFEPGQYVTVKRFVGDLGVDQPRQYSLSDAPHGKWLRISVKRESGQAEAVPAGKVSTLMHDGVEEGAIVEVTAPMGEFSLKRGVDTPVVLISGGVGLTPMVSMASTLVAEGSKRDVRFVHACRSGAVHAFRDWLNDTVREHANFKRTVLYELVGPNDRAGVDHDLEGRLTPERVQQYALVPDADYYICGPIAFMKAQRDALVALGVAPERINTEIFGSGALE

SEQ ID NO: 8662 - protein, 650 aa, Burkholderia vietnamiensis G4
MGKIIGIDLGTTNSCVAIMEGNQVKVIENSEGARTTPSIIAYMDDNEVLVGAPAKRQSVTNPKNTLFAVKRLIGRRFEEKEVQKDIGLMPYAIIKADNGDAWVEAHGEKLAPPQISAEVLRKMKKTAEDYLGEPVTEAVITVPAYFNDSQRQATKDAGRIAGLEVKRIINEPTAAALAFGLDKAEKGDRKIAVYDLGGGTFDVSIIEIADVDGEMQFEVLSTNGDTFLGGEDFDQRIIDYIIGEFKKEQGVDLSKDVLALQRLKEAAEKAKIELSSSQQTEINLPYITADASGPKHLNLKITRAKLEALVEDLVERTIEPCRIAIKDAGVKVSDIDDVILVGGQTRMPKVQEKVKEFFGKEPRRDVNPDEAVAVGAAIQGQVLSGDRKDVLLLDVTPLSLGIETLGGVMTKMITKNTTIPTKHSQVYSTADDNQSAVTIKVFQGEREMAAGNKLLGEFNLEGIPPAPRGVPQIEVTFDIDANGILHVGAKDKATGKENKITIKANSGLSDAEIDQMIKDAEANAAEDHKLRELADSRNQGDALVHSTKKALTEYGDKLDAGEKEKIEAALKSLEDVLKDTSADKAAIDAKVEELGKASQKLGEKMYADMQAQQAGAAGAAGAAEGAAHAGGAQQAADDVVDAEFKEVKKD

SEQ ID NO: 8663 - protein, 332 aa, Burkholderia vietnamiensis G4
MRVILFSSRQYDEESFTAANRQFGYRLHFQPSHLDAETAILAHGYDVVCPFVNDTVDAAVLQRLADGGTRLIALRSAGFNHVDLAAAERLGIAVVRVPAYSPHAVAEHAVALILALNRRLPRAVARTREGDFSLNGLLGFDLHGKTVGVVGTGLIGSVFAKIMMGFGMRVLAHSLPPHDDELIAFGARYVELDELLHQSDIVSLHCPLLPSTHHLINAQTLARMKHGAMLINTGRGGLVDAQALVEALKSGQLGHLGLDVYEEESGLFFEDHSDLPLQDDVLARLLTFPNVIVTSHQAFFTREALAEIAHTTLLNVDAWRAGAPTNVVTGGR

SEQ ID NO: 8664 - protein, 398 aa, Burkholderia vietnamiensis G4
MNTTADSLVTLAARVDAIQPFYVMELMKEAQRLESSGRDVIHMGIGEPDFTAPEPVVEAAAAALRRGVTQYTSALGIAPLREAIAAHYARAYGLTISPERIVVTAGASAALLLACLALVGRDDEVLMPDPSYPCNRHFVAAAEGRPVLVPSGPEACFQLTADDVRTRWGNRTRGVLLASPSNPTGTSLEPDELKRIVEAVRARGGFTIVDEIYQGLSYDAAPVSALSYGDDVVTVNSFSKYFSMTGWRLGWLVVPPALVGTFEKLSQNLFICPSALAQHAALACFEPATLDIYEARRLEFKRRRDFIAPALERLGFKVPVMPDGAFYVYAHCGGVAHPAAGDSAALTHAMLHDAGVVLVPGMDFGVHAPRDYIRLSYATAYSRLEEAVERLAKLFGHH

SEQ ID NO: 8665 - protein, 67 aa, Burkholderia vietnamiensis G4
MDTGIVKWFNDAKGFGFITSDNGGEDLFAHFSEIRMEGFKTLKENQRVSFEVKVGPKGKQAANIQAA

SEQ ID NO: 8666 - protein, 228 aa, Burkholderia vietnamiensis G4
MNRRPIIDPEVLPVEGTGAGLPSIDSRLLTPSGLRERFARTLEWSVEPGEARLQEGVDPRSAAVLVPLVVRETGLTVLLTQRADHLNDHAGQISFPGGRREPYDRDAVATALREANEEIGLAAEPVEILGALPDYLTGTGFCVTPIVGLVHPPFIVQADTLEVAEIFEVPLAFLMSPANHQVRVFRWEGGERRFFAMPYPSVEAAGHYFIWGATAGMLRNLYRFLAAG

SEQ ID NO: 8667 - protein, 329 aa, Burkholderia vietnamiensis G4
MQKILVARPIFTDVIERLEQYFEVDWNNGDALAPDALAARLADKDGALTAGDPIGAAALAAAPRLRVVSNMAVGYNNFDMAAFNAANVLGTNTPDVLNESTADFGWALMMAAARRIAESEHWLRAGLWRKWAYDGFLGSDIYGSTLGVIGMGRIGQALARRARGFGMQVIYHNRSRVAPEIEAELAAQYVSKDELLARADHVVLVLPYTKENHHTIGAAELAKMKRTATLTNIARGGIVDDAALAVALRDGTIAAAGLDVFEGEPSVHPALLEVPNVVLTPHIASATEKTRRAMANLAADNLIAALGEGPRAGQPPNPINPDVIGKPRA

SEQ ID NO: 8668 - protein, 299 aa, Burkholderia vietnamiensis G4
MNTPAPTGFRCGMIAIVGRPNVGKSTLMNALVGQKISITSRKAQTTRHRITGINTFDDAQFIFVDTPGFQTRHSTALNRSLNRAVTSTLTSVDLILFVIEAGRFGPDDQKVLDLIPPGAPTLLIANKVDRVGDKATLFPFMQKMSALREFTELVPLSAQRPEDIKHLLDTIKPHLPEGQPIYGEDELTDRSSRFLAAEILREKVFRWTGDELPYTSTVLIDKFEEEGRLKRIFATILVERDMHKAMVIGKKGEKLKQISTEARLDMEKLFDGPVYLETFVKVKSGWADNEAGLRAYGYE

SEQ ID NO: 8669 - protein, 458 aa, Burkholderia vietnamiensis G4
MSRLIIVSNRVAPISEGEPAAGGLAIGVYDALKETGGMWFGWSGEVVASGAPQIRIEERGPVTFATVGLSRRDYDQYYRGFSNATLWPAFHYRADLIQYDRHEFEGYGRVNVWLAQQLVPLLQDDDVIWVHDYHLIPFARALRASGVKNRIGFFLHIPFPAAQVLVNVPPHRELVESLCAFDLLGFQTEPDLRAFCDYVEFEAGGEVTRDGRTVRVSAFGSTLRAAAYPIGVYPDEIASLAQAGEHGKAARMATSLRGRQLIMSVDRLDYSKGLVERFRAFEKLLEHQASIRNRVSFLQIAPSTRADLRAYQDIRLQLEAESGRINGRYAELDWAPILYIHRQYDRQVLAALYRLARVGFVTPLRDGMNLVAKEYVSAQNPDDPGVLVLSRFAGAARELTGALIVNPIDIDGMADALSQALTMPLAERRARYADMIAQLRENNVSVWRDNFLRDLQRA

SEQ ID NO: 8670 - protein, 631 aa, Burkholderia vietnamiensis G4
MNNNMFSKAAVWLVIALVLFTVFKQFDKPRVQEGVSYSQFMDDAKNGKVKNVVVQGRNLTVTPADGQKYQIVSPGDIWMVGDLMKYGVQVSGKADDEPNALMSALYYLGPTILIIVFWFYMMRQMQGGGKGGAFSFGKSRARLIDENNNAVNFSDVAGCDEAKEEVSELVDFLRDPQKFQKLGGRIPRGVLLVGPPGTGKTLLARAIAGEAKVPFFSISGSDFVEMFVGVGAARVRDMFEQAKKHAPCIVFIDEIDAVGRHRGAGMGGGNDEREQTLNQMLVEMDGFEANSGVIVIAATNRSDVLDKALLRPGRFDRQVYVGLPDIRGREQIMRVHLRKVPIANDVDAAVIARGTPGFSGADLANLVNEAALFAARRGKRIVEMQDFEDAKDKIFMGPERKSAVIREEAKRATAYHESGHAVIAKLLPKADPVHKVTIIPRGRALGVTWQLPEHDNETYSKDYLLDRLAILFGGRVAEELFLNLISTGASDDFNKATQTARAMVARFGMTDALGPMVYVDDESDNGPFGRGFTRTISEATQQKVDGEIRRVLDEQYNLARRLLEENRDKVEAMTAALMEWETIDADQINDIMEGRPPRSPKSSPAVGGDSSGGGTTAEVKTGNAPAPASPA

SEQ ID NO: 8671 - protein, 569 aa, Burkholderia vietnamiensis G4
MSTERNDAPAASNFIRNIIDDDNRTGKWGGRVETRFPPEPNGYLHIGHAKSICLNFSVARDYGGVCHLRFDDTNPEKESVEYVDSIVDAVRWLGFDWRKDAVDHQYFASDYYDKLYEFAELLIQRGKAYVDSQSADEMRANRGSLTEGGKPSPYRDRSPEENLDLFRRMKAGEFKEGEHVLRAKIDMASPNMNMRDPVIYRIRYAHHYRTGDAWCVYPMYDYTHCISDALEGITHSLCTLEFEDHRPLYDWVLNELAEAGVFTRPLPQQIEFSRLNLTYAITSKRKLLQLVTEGHVEGWDDPRMPTIVGIRRRGFTPESIQLFCERIGVTKVDSWIDMSVFEGALRDDLDDKAARTVGVLDPLKLVIDNYPEDLEEACTAPVHPHHPDRGVRTFPISRELWIERDDFAEAPPKGYFRLFPGNKVRLRYGYVVECTGFDKDADGNVTAVHCNYFPDSKSGTDGANNYKVKGNIHWVSAKHAQPAEVRIYDRLFKEPHPDAGGANFLDALNPNSKKVTQAYVEPGAGDVAPETRLQFERHGYFVADRIDSKPGKPVFNRIVGLRDSWGKPA

SEQ ID NO: 8672 - protein, 276 aa, Burkholderia vietnamiensis G4
MQAALMKFHTLATWLVGAALVTAGTLAHADRLDDIKKAGVLRVATFDSNPPFGFVDAKSHHIVGLDVDYAKALADKLGVKLQLQPTNPANRIPFLTSGKVDLVLANFTITDERAKQVDFSIPYFSSGQQFLAKKGVLKSADQLNGLRVGADKGTTNEITLRDKFPGATIVAYDDTPFAFAALRAGNVQAITQDGPKLIGLLANVPDKQNYEIPAFTISNDYMGVGVPKGEARLLGFVNDTLKGLEANGRAAQIYDAWFGPTTRTPLTRIFRIGDRT

SEQ ID NO: 8673 - protein, 463 aa, Burkholderia vietnamiensis G4
MRPSACPGLMRVVAAADGGLCRIKLPGGRLAAAQARAIADAARRYGSGLIDATNRANLQLRGIRDGAAAPLAGALLDAGLGPNSAAYSGACCGADAAGASDADDARAASDDVRNLLLSPLAGLDRAALVDSRALARPLLDMLTHEPRRGELSPKFSIQLDGGEAVAALDHPHDIWLAAWRRDDGAPRIAAGLAGCPPVAPGDRPASFDVAPHQAAELVRALLLAFLDLAPAGVTRMRVLLADGGERALVARAQHYAPFPLAADPALAGWRRPPADAALRFGARPTRDADRCSVGAQFVLGRLDAALLERLAALADADGDGTLSMTPWQGVFVHGVRAARAHAVLATLASLGLVCTPLDPLATLVACTGSAGCAKARADTKGDALALAARVGRPLDVHLSGCERHCALPHPAAYTLIAVAPARYDLYRRDTTVGPGAPLARHLTIDQVAARLTGARHSQDTTDA

SEQ ID NO: 8674 - protein, 446 aa, Burkholderia vietnamiensis G4
MQASSTHEPLQLKRTLGLPSVLLFGLAYMAPLIVYGTYGVLAKASGDTAALAYLLALVAIAFTALSYGKLARLYPTAGSAYTYTRKTFNPHLGFMIGWATLLDYFFLPMVIWLIGAAYLNAAFPHVPTWIWIVAFIVLTSGLNIVGIELAARFNIVLMVVQLAIVAMFVVLCWHYASAAAGAGGIAMAEPFFKPHVPFGATMAGAAIAAYSYLGFDAVSTLTEETIDPKRNMPRAILLIALIGGAIFVIAAYAMQLAHPGVEFKDTDSAAFEVAKMIGGDLFVTVFLAGLILAQFASGISAQASVGRLLYAMGRDEILPKRIFGVIHPRFKTPAVNIALAGIVGLIALKLDVATSTSFINFGAFLAFTAVNLCVIRLYLSGRHGERRIGVFGGLVFPAIGAVADLWLLASLEKTAIVLGLVWFGLGLVYLCWITRLFRQAPPEVAI

SEQ ID NO: 8675 - protein, 376 aa, Burkholderia vietnamiensis G4
MTSSLQRILVIGGGFAGMTTAIQCAKLGLSVDLVEIDTGWRSYGAGISIGGPTLRALRTVGVLDAFFEHGHGGDGVNLFTAAGHPIGTLPTPRVAGDDVPGGGAIMRPALAGILADATRAAGVHVRLGCTFSQIAQRDDGVDVTFTDGTHGRYDLVVGADGLYSKVRDAVFPDAPKPRYTGQGVWRAVVPRPAEIACATMWLGQKVKVGVNPVSQEEMYVFVTEDRPTNERVDPAHWPRMLADLLAPFGAPLVQSIRAQVGPQSHCIYRPLESLLLPQPWFSARVVLVGDAVHATTPHMAAGAGIGIEDGIVLAEELGRGATVQAALQAFQARRWERCRMVVENSGRLGEIEISGGDKAEHTRIMHETHQRLAQQI

SEQ ID NO: 8676 - protein, 321 aa, Burkholderia vietnamiensis G4
MKPRIVAYKPLPDDVLVYLREHAEVIRADGADALADALGEADGAIGASLKITPQMLDRAPRLKAWSTISVGYDNFDVADLTRRGIVLAHTPDVLTESTADTVFSLILASARRVVELAEWVKAGHWQRSIGPELYGTNVQGKTLGIVGLGRIGGAVARRAALGFRMQVLYTNRSAHAEAEQQYGARRVTLDELLAQADFVCLQVPLSPQTHHLIGAAEFAKMKRGAILINASRGPVVDEAALIDALRAGTIRGAGLDVFEKEPLSADSPLLRMSNVVALPHIGSATHETRHAMARCAAQNLVGALAGTLRTNLVNPDALAHA

SEQ ID NO: 8677 - protein, 393 aa, Burkholderia vietnamiensis G4
MTDVVIVSAARTAVGKFGGSLAKVAAPELGATVIRAVLERAGVQPDQVSEVIMGQVLAAGSGQNPARQSLIKAGLPTAVPGMTINKVCGSGLKAVMLAANAIAAGDAEIVIAGGQENMSAAPHVLPGSRDGFRMGDAKLVDTMIVDGLWDVYNQYHMGITAENVAKEYGITREEQDAFAALSQNKAEAAQKAGRFADEIVPVSIPQRKGEPLQFATDEFVRHGVTAESLAGLKPAFAKDGSVTAANASGLNDGAAAVLVMSARKAQSLGLTPLARIKAYANAGVDPSVMGMGPVPASRRCLERAGWTPGDLDLMEINEAFAAQALAVHKQMGWDTSKVNVNGGAIAIGHPIGASGCRILVTLLHEMVKRDAKRGLASLCIGGGMGVALAVERA

SEQ ID NO: 8678 - protein, 865 aa, Burkholderia vietnamiensis G4
MRIDKLTTKFQEALADAQSLAAGRDNQYIEPVHVLAALVAQQDGSARSLMSRAGVHVQALQGALNEAIARLPQVTGTGGDIQIGRELAGLLNQADKEAQKLNDTFIASEMFLLAVSDDKGEAGKLARQHGLTRKALEAAIAAVRGGSQVHSQDAESQREALKKYTVDLTERARAGKLDPVIGRDDEIRRSIQILQRRTKNNPVLIGEPGVGKTAIVEGLAQRIVNGEVPETLKGKRVLSLDMAALLAGAKYRGEFEERLKSVLNDIAKDEGQTIVFIDEIHTMVGAGKAEGAMDAGNMLKPALSRGELHCIGATTLDEYRKYIEKDAALERRFQKVLVDEPSVEATIAILRGLQEKYELHHGVDITDPAIVAAAELSHRYITDRFLPDKAIDLIDEAASKIKMEIDSKPEEMDKLDRRLIQLKIEREAVKKEQDEASQKRLQLIEEEIERLGREYADLEEIWTAEKAAVQGSAQLKEEIEKVRADIVRLQREGKLEKVAELQYGKLPQLESQLKQVTQAEAQEQHAPTRPRLLRTQVGAEEIAEVVSRATGIPVSRMMQGEREKLLHIEEKLHERVVGQDEAISAVADAIRRSRAGLADPNRPYGSFLFLGPTGVGKTELCKALASFLFDSEEHLIRIDMSEFMEKHSVARLIGAPPGYVGYEEGGYLTEAVRRKPYSVILLDEIEKAHPDVFNVLLQVLDDGRMTDGQGRTVDFKNTVIVMTSNLGSQVIQSLTGSPQEEIKDAVWIEVKQHFRPEFLNRIDDVVVFHALDRSNIESIAKIQLARLHDRLAKLDMALDVSPAALEQIGKVGYDPLFGARPLKRAIQQEIENPVAKLILAGRFGPKDVIPVDVSDGQFVFDRVVH

SEQ ID NO: 8679 - protein, 412 aa, Burkholderia vietnamiensis G4
MKPIQKSNKLLNVCYDIRGPVLEHAKRLEEEGHRIIKLNIGNLAPFGFDAPDEIIQDMIRNLPASSGYSDSKGVFSARKAVMHYTQQKGVVGVGLDDIYIGNGASELIVMATQALLNDGDEVLLPAPDYPLWTAAVSLSGGTPVHYVCDEQNAWMPDPDDIRRKITPNTKALVVINPNNPTGALYSDELLLELLEIARQHGLIVFADEVYDKIVYDGLEHTALGSLSEDVITVTFNSLSKSYRSCGYRAGWMSVSGLGGDNRRRANDYLEGLGILSSMRLCANVPGQFAIQTALGGYQSINELIVPSGRLYKQRELAYDMLTSIPGVTCVKPQAALYMFPRLDPKLYPIQNDQQFILDLLLEERVLLVQGTGFNWAQPDHFRVVFLPNLDDLADSISRIARFLDGYRKRHSV

SEQ ID NO: 8680 - protein, 392 aa, Burkholderia vietnamiensis G4
MTEAVIVSTARTPLAKSWRGAFNMTHGATLGGHVVAAALERAKLDPARIEDVIMGCANPEGATGANIARQIALRAGLPVSVPGMTVNRFCSSGLQTIALAAQRIIAGEGDVYVAGGVESISCVQNEMNRHMIQEGWLVEHKPEIYWNMLQTAENVAKRYGIAKERQDEYGVRSQLRAAAALEAGRFRDEIVPITVRAGIADKATGRLYTQEVTVSADEGIRPDTTLEGVSKIRSAVPGGVITAGNASQFSDGAAACVVMNADVAQREGLQPLGVFRGFAVAGCEPDEMGIGPVFAVPKLLKQTGLKIDDIGLWELNEAFAVQVLYCRDTLGIPDERLNVNGGAIAVGHPYGVSGARLTGHALLEGKRRGVKYVVVTMCIGGGQGAAGLFEIV

SEQ ID NO: 8681 - protein, 417 aa, Burkholderia vietnamiensis G4
MALIVHKYGGTSMGSVERIKNVAKRVAKWHQAGHQMVVVPSAMSGETNRLLGLAKEISSQPSPRELDMIASTGEQVSVGLLSIALQEIGVEAVSYAGWQVPIKTDSAFTKARIHSIDDERVKADLNAGKVVIITGFQGVDPDGHITTLGRGGSDTSAVAVAAALGAEECLIYTDVDGVYTTDPRVVEEARRLDRVTFEEMLEMASLGSKVLQIRSVEFAGKYQVKTRVLSSLTDPLIALDEEMRSGTLITFEEDETMEKAVISGIAFQRDEARIAVMGVPDKPGIAYQILGPVADANVDVDMIIQNQSVEGKTDFTFTVGRGDYQKAMDILTNQVKGHVNAERVQGDPKVSKVSVVGVGMRSHVGVASKMFRTLSEEGINIQMISTSEIKISVLIDEKYMELAVRALHKAFELDQAP

SEQ ID NO: 8682 - protein, 624 aa, Burkholderia vietnamiensis G4
MVLPHLLNPANAHEAAIALAAALGVQMASVALYTAAIQLVDGSLRARSREKGNMRGFRNTALLAVGVEFFAFGASLATFAMLAPIMIAMGPAVGVRMLLACFALATVCSIGVWVFPLRQSGCRSKRGWLAVAGARVLVEAPISFAIDALLVYVIVNSPIVDSQRFVHSQRLLWPWLSSNGWQLGALAAMAIVLTCSRKRANAIKSWLETSAAELWSKSPTAKAVFAAAASGDIAQLQNLAKANIDWSATDRETKAALTLAAEMGHAQAVAWLLQRAPQLARQGDLVGRTPLMFAADKGHLDCVNLLLPHSDLLSESAFGFSSLVCAALEGHVDCVEAILAAAGPAAAAPNDKGFTALMGAAMGGSAAAVNALLPVSDAKLADHEEGMTALMFAARAGQAEAVEALLPQSDPQAVDSTGRTALLWAVDDECATLFKIGEVVGQQRAWVNKGAGQLTAAQSIRSIVEILRGENIARARCVRALLTASAVDAQDADGDTALHVAARLGRRACVNALLEAADASLRNADGQTALSCATVASFRHPMLMEEGLFPSDAAQEALREYLRDEVDDYQRALLALMAKTPQESQESEADASDGVVDGLAPLPASFKAQLVKALATAQGAQGLA

SEQ ID NO: 8683 - protein, 407 aa, Burkholderia vietnamiensis G4
MTQQTLHLPIYMDYSATTPVDPRVVDKMVPYLRERFGNPASRSHAYGWDAEHAVEEAREQVAALVNADPREIIWTSGATESDNLAIKGAAHFYKGKGKHIITVKTEHKAVLDTCRELEREGFEVTYLDVKEDGLLDLDVFKAALRPDTILVSVMHVNNEIGVIQDIATIGEICREKGIVFHVDAAQSTGKVEIDLAKLKVDLMSFSAHKTYGPKGIGALYVRRKPRVRIEAQMHGGGHERGMRSGTLATHQIVGMGEAFRIAREEMATENERIRMLRDKLLRGLSQIEETYVNGDMEHRVPHNLNISFNFVEGESLIMAIKDVAVSSGSACTSASLEPSYVLRALGRNDELAHSSIRFTVGRFTTEEEVDFVIDLLNSKIAKLRELSPLWEMHQEGIDLSTIEWAAH

SEQ ID NO: 8684 - protein, 390 aa, Burkholderia vietnamiensis G4
MNAPSDMPTAPVFPSRLPNVGTTIFTVMSALAAEKGAVNLGQGFPDFDCDPRIVDAVAAAMRNGHNQYPPMAGVASLRDAIADKIEHLYGRRYDAATEITVTAGATQALLTAILCAVHPGDEVIVIEPTYDSYLPSIELAGGKPVFVTLDAPDYAIPFDRLAAAITPKTRMILINTPHNPTGTVWREADLRRLEEIVRGTNVLILSDEVYEHMVYDGARHESVARYPELAARSFIVSSFGKTFHVTGWKIGYVAAPAALTAEFRKVHQFNVFTVNTPMQVGIADYLRDPAPYLTLPDFYQKKRDFFRAGLERTRFKLLPCTGTYFQCVDYSAISDVSEAEFAKWLTAEIGVAAIPVSAFYHAPHESGVVRFCFAKQESTLASALERLARL

SEQ ID NO: 8685 - protein, 587 aa, Burkholderia vietnamiensis G4
MNMPSAEFSTSEPLSPPDSDSIGATVLMKALADEKVEFIWGYPGGSVLYIYDELYKQDKIQHVLVRHEQAAVHAADAYARSTGNVGVCLVTSGPGVTNAVTGIATAYMDSIPMVVISGQVPTAAIGQDAFQECDTVGITRPCVKHNFLVKDVRDLAETVKKAFYIARTGRPGPVLIDIPKDISKTPCPYEPVKSVSLRSYNPVTKGHSGQIRKAVSLLLSAKRPYIYTGGGIILADASRELNQFADLLGYPVTNTLMGLGGYRASDKKFLGMLGMHGTYEANMAMQHCDVLIAIGARFDDRVIGDPAHFASRPRKIIHIDIDPSSISKRVKVDIPIVGDVKEVLKELIEQLQTAEHGPDTEALAQWWKDIEGWRGKNCLKFDRESEIIKPQYVVEKAWELTDGNAFVCSDVGQHQMWAAQLYRFNKPRRWINSGGLGTMGFGLPAAMGVKMAHPDDDVLCITGEGSIQMCIQELSTCLQYDTPVKIISLNNRYLGMVRQWQQIEYSKRYSHSYMDALPDFVKLAEAYGHVGMRIEKTSDVEPALKEALRLKDRTVFLDFQTDPTENVWPMVQAGKGITEMLLGSEDL

SEQ ID NO: 8686 - protein, 593 aa, Burkholderia vietnamiensis G4
METQNTLRKPMDGASTSPVTVLKRLWPYIRPLIGIVVLAVMTMGVVAATEAGIPALLKPLLDHGFGSHGSDRAKWYVPIAVIGLALVRGVSQYASNYLLNYVSNRILLQLRLEMFQRMIHTGASFFQRETASTVINAIVFEVNQILSVLTGVMVTLVRDSLTVVFLLGYLFILNWRLTLIVAVILPGIGWLVSKINRRLRRLNREHQTLTNELSYIVEETVGGYKVVKVHNGEAYELDRFTSMSKRLRGYAMRMTISGGLAQPLTQFLASIALAVVITIAVVQSTNDQTTVGGFVAFVTSMLLVISPLKHLIDVNQPLQRGMTAAELIFGLIDEPAEPQGGGRELPHARGEIEFRDVSFDYGAAERPTLDRISFKVAPGEMIALAGPSGSGKTTLVNLLPRFFDPTGGTILVDGVPVRDFDIHALRGQMAMVSQDVVLFNDTIAANVAYGQTPDRARVQAALEAANLADAVAAMPDGLDTLVGGNGMRLSGGQRQRLAIARAIYKDAPILILDEATSALDSESERHVQAALERLMEGRTTLVIAHRLSTIERADRILVLEAGKIVESGSHDELLRHGGLYAHLHRIQYQQQAA

SEQ ID NO: 8687 - protein, 516 aa, Burkholderia vietnamiensis G4
MNLGATFVFVLLFIGVTILGFLAANWRRGDLAHLDEWGLGGRRFGTIVTWFLLGGDLYTAYTFVAVPALVFGAGAMGFFALPYTILIYPFAFVVFPKLWSIAKRHGYVTAADFVHARYGSRMLALAIAVTGIVATMPYIALQLVGIEVVIGALGFDTTGFVGDLPLIIAFAILAAYTYTSGLRAPAMIAIVKDILIYITIAAAIIVIPAKLGGFGHIFATVPPAKLLLKAPDATSLNGYSAYATLAIGSALALFLYPHSVTAILSSSSGNTIRRNMAMLPAYSFVLGLLALLGYMALASGVKDMPQYAPYFKAFGPNFAVPALFLNYFPSWFVGVAFAAIGIGALVPAAIMSIAAANLYTRNIHREFVNRNMTHHQETHVAKLVSLIVKVGAVAFILGLPLTYAIQLQLLGGIWIIQTLPAIVLGLYTRVLDHRGLLAGWAAGIVCGTWMAISLKLASSIFTIHLFGLAIPGYAAVWSLIVNLVVSVVVSVLVRAMGVAHAEDRTRPEDYLDVIEG

SEQ ID NO: 8688 - protein, 473 aa, Burkholderia vietnamiensis G4
MSRLIVVSNRVAAGEDTRPSAGGLAVGVMDALKQTGGVWFGWNGEIVGTPDAAPAVRRDGNVTYATLGLTRRDYDQYYRGFSNATLWPVFHYRSDLARFDRQEYAGYLRVNAMLARQLAALLRPDDLIWVHDYHLLPFAHCLRELGVKNPIGFFLHIPFPSPDMLRVVPPHDELVKFMCAYDIAGFQTDADKRAFSDYIERRGIGTASDDGMLHAHGRVVKVAAYPIGVYPDAIAEAAVQYGGRKPVKMLRDALGGRKLVMSVDRLDYSKGLVERFQSFERMLAGAPDWQGRVSFVQIAPPTRSDVQTYQRIRETLEREAGRINGRFAQLDWTPIQYLNRKYERNLLMAFFRMSQVGYVTPLRDGMNLVAKEYVASQDPADPGVLVLSEFAGAAAELGGALLVNPYDHAQMADALARALAMPLAERQARHEENLAQLRNNDLSVWRDTFVADLRSVAAAASVTQRAGRRTAHV

SEQ ID NO: 8689 - protein, 241 aa, Burkholderia vietnamiensis G4
MTTQILIVDDDQELRDLLRDYLVRQGMEVSVLHDAATLEKRLERERPDLIVLDLMMPGVDGLTALRQLRAAGDDIPVIMLTARADDVDRIVGLELGADDYLGKPFNPRELLARVQAVLRRRRATPSAAAPEQREPFAFGRFVLDFQARTLSVDGKPATLSSSEFALLKIFVNHALRTLTRERLLELLHGPEYDGTDRGIDVQVWRLRRILETDPSTPRFIQTVRGRGYVFVPDGEAHAQTH

SEQ ID NO: 8690 - protein, 128 aa, Burkholderia vietnamiensis G4
MQRHMLKSKIHRAAVTHCELHYEGSCAIDEDLLEAAGLIENERIDIWNINNGERFSTYAIKGERGSGMISLNGSAARRAQLGDLVIIAAFAMVDEAELQAGWKPKLVFIDEGNKIKGHRDHVPTQSWT

SEQ ID NO: 8691 - protein, 559 aa, Burkholderia vietnamiensis G4
MYQYDQYDQTIVDERVAQYRDQVRRRLSGELSEDEFRPLRLQNGLYMQRHAYMHRIAIPYGNLRSNQLRMLARIAREHDRGYGHFSTRSNIQFNWVELEDTPEILAKLASVQMHAIQTSGNCIRNITADQFAGVAQDEEIDPRPWAEILRQWSTFHPEFAWLPRKFKIAVSGSHDDRAAVQIHDLGVYLKKNAQGEVVASILAGGGLGRTPIVGAVIKEDLPWQHLLTYCEAVLRVYNRYGRRDNLYKARIKILVKALSPAKFAQQVEEEWQHLKDGPSTLTQAELDRVSQYFAPPVYEKLADTDASFEQHLLENKAFARWVERNVAPHKVAGYAAVTLSLKDHRVAPGDASAEQMDQVAEWADAYSFGEVRVSHEQNLILANVKKRDLFALWEKAKAAGFATPNIGLLTDIIACPGGDFCSLANAKSIPIALAIQQRFDDLDYVYDLGDLSLNISGCMNSCGHHHVGNIGILGVDKDGAEWYQVSLGGEQGTGQNGARLGRVIGPSFSADEVPDVIAKLIDTFVDARADGERFIDTYDRIGIAPFKERVYAARQAVNA

SEQ ID NO: 8692 - protein, 343 aa, Burkholderia vietnamiensis G4
MAFNVTLKQSGRQFQVESDETVLAAALRQNVHLPYGCKNGACGSCKGQIVSGQIEQGPHAASALSSDERTRGLALLCCSKAQCDLEIDVREIAGVDGVQVKKLPCRVAALERRGDDVMIVKLQLPANERLQYLAGQYVEFILKDGSRRSYSMANAPHEEGPIELHIRHMPGGKFTDHVFGAMKERDILRFEGPLGTFFLREDSDKPIVLLASGTGFAPIKAIIEHVKHAGITRPMTLYWGARRKQDIYLGELAEQWAREIPNFKYVPVLSEPEDADQWTGRTGFVHRAVIEDLPDLSGYQVYACGAPVMVESAQRDFTQHHALPADEFYADSFTSAADLVNPV

SEQ ID NO: 8693 - protein, 459 aa, Burkholderia vietnamiensis G4
MTQQQRSFDNIVAREQGLRHALTSGQMAMIAIGGAIGTGLFLGSGFAIGLAGPSVLVSYAIGALIALLLMGALAEMTVAHPTAGSFGAYAEHYVGPLAGFLVRYAYWFAVVFAIGTEISAIAVFMKYWFPAVPGWYWVIGFSALLIAVNLASVTLYGSVEYAFSLLKIAAIIVFIVLGAYLVWSAPPASGIGFANYTGHGGFMPKGPWGTWVAVIVAIFSYMSIEAVAIAAGEARDPQHAVTRAFRSTVFRLVLFYLLTLALMLAIVPWTQAGTDESPFVKVMAATHVPYAAGVINFVLLIAALSAMNSQLYVTTRMMFSLSRARLAPAVFGRVGDNGVPRAALWISTSGVAVAAVLVALSPGTAFTVMMAIAMFGALFTWLMIFVTHLRFRARYSGPALAFRMWAHPFGSLLGAALVGAILLTTAFTHEFRMTMVVGVVFVVLLTLAYALHYRHQHAR

SEQ ID NO: 8694 - protein, 486 aa, Burkholderia vietnamiensis G4
MSFESLGLAEPLVKAVNELGYTSPTPIQQQAIPAVLGGGDLLAGAQTGTGKTAGFTLPILQRLHTFYTEHRGAKRAVRALILTPTRELAAQVEESVRAYSKYVKLRSTVMFGGVSINPQIDALKRGVDIVVATPGRLLDHMQQKTIDLSDLDILVLDEADRMLDMGFIHDIKRVLAKLPPRRQNLLFSATFSDEIKALADSLLDSPALIEVARRNTTAETVAQKIHPVDRDRKRELLTHLIREHNWFQVLVFTRTKHGANRLAEQLTKDGISAMAIHGNKSQSARTRALAEFKNNTLQVLVATDIAARGIDIDQLPHVVNFDLPNVPEDYVHRIGRTGRAGATGEAVSLVCVDEKQLLRDIERLIKREIPQEVIAGFEPDPNVKPEPIQQRRGQQPRGGGNGGGGGGGGGNRQPRAGGSGQAGAKRDANAQPKAAKAAKPRAAGGASGNANGGGRPAGGGNGARPANGNAAHPNRNRSSRSGQRGH

SEQ ID NO: 8695 - protein, 187 aa, Burkholderia vietnamiensis G4
MPTSPNRKLVVLDRDGVINVDSDAFIKTPDEWVALPGSLEAIARLNHAGYRVVVATNQSGIGRGLFDMATLNAMHLKMHRAAAAVGARIDAVFFCPHTAEDQCDCRKPKPGMMQMIAERFEIDPGHTPAVGDSLRDLQAGVASGFRPHLVLTGKGKKTLAAGNLPAGTKVHDDLRAFALDFLSHEHE

SEQ ID NO: 8696 - protein, 399 aa, Burkholderia vietnamiensis G4
MSKQLQDAYIVAASRTPIGKAPRGVFKNTRPDELLVHAIKSTIAQVPGFDTKLIEDAIIGCAIPEAEQGLNVARMGALLAGLPQTVGGVTVNRFCASGITALAMAADRIRVGESEALLAGGCESMSMVPMMGNKPSMSPHIFDRSEDFGIAYGMGLTAERVAEQWKVSREDQDAFSVESHRKALAAQQAGEFGDEIAAYTITERFPNLATGEVDVKTREIALDEGPRADTSLEGLAKLRTVFANKGSVTAGNSSQTSDGAGALLVVSEKVLKEFNLTPLARFVSFAVRGVPPQIMGIGPKEAIPAALKAAGLKQDDIDWIELNEAFAAQSLAVIRDLGLDPSKVNPVGGAIALGHPLGATGAIRAATVVHGLRRRNLKYGMVTMCVGTGMGAAGIIERL

SEQ ID NO: 8697 - protein, 327 aa, Burkholderia vietnamiensis G4
MIAKINDDRALALARDVLDIEADAVRALRDQLDGDFVQAVALLLGCRGRVVVSGIGKSGHIARKIAATLASTGTPAFFVHPAEASHGDLGMVTADDVFIGISYSGESEELVAILPLVKRIGAKLIAITGRAESSLGKLADVHLNAAVSKEACPLNLAPTASTTAALALGDALAVAVLDARGFGSEDFARSHPGGALGRRLLTHVRDVMRSGADVPRVGLDATLSDALFQITEKRLGMTAVVDPDGRVAGIFTDGDLRRVLARDGDFRTLPIVDVMTRAPRTIGPDQLAVEAVELMERHRINQMLVVDTNGMLIGALNMHDLFSKKVI

SEQ ID NO: 8698 - protein, 320 aa, Burkholderia vietnamiensis G4
MSSHSHDGLMVFTGNANPALAQEVVNILGIPLGKAMVSRFSDGEIQVEIQENVRGKDVFVLQSTCAPANDNLMELMIMVDALKRASAGRITAAIPYFGYARQDRRPRSARVAISAKIVANMLEIAGVERIITMDLHADQIQGFFDIPVDNIYATPILLGDLRKQNYSDLLVVSPDVGGVVRARALAKQLNCDLAIIDKRRPKANVAEVMNIIGEVEGRTCVIMDDMVDTAGTLCKAAQVLKDRGAKQVFAYATHPVLSGGAAERIAASALDELVVTDTIPLSAESLACSKIRSLTSASLLAETFSRIRRGDSVMSLFAES

SEQ ID NO: 8699 - protein, 468 aa, Burkholderia vietnamiensis G4
MSLFRKKNVDRMIAGAHAAGLKKALGAIDLTFLGIGAIIGTGIFVLTGTGAVQAGPALMLSFVIAAIACGLAALSYAEFASTIPVAGSIYTYSYATLGELVAWIIGWDLMLEYGLAASAVSVGWSGYLQSLLQGFGLSLPTVLTAAPGAIPGTVTWFNLPAFLVMLVITTLLSIGIRESTRINNVMVFIKVSVVLLVIAVGLFHVTPANWKPFMPHGWNGVFGAAAVMFFAFIGFDAVSSAAEEVKNPKRDLPIGIIASLAVCAVLYVTVAAVATGIVPSAQYANVSHPISYALQIAGEKWVAGFIDLGAVLGMLTVILVMSYGQTRIIFAMSRDGLLPAMLSRVHPRYATPFLTTWLVGLFFGLIAALVPLNVLAELINIGTLAAFSMVSIAVLVLRRTHPELPRAFRCPGVPVVPILAVGACLFLMLNLQPITWAAFGIWLVIGLVIYFLYSRHHSKLARGQHDAH

SEQ ID NO: 8700 - protein, 554 aa, Burkholderia vietnamiensis G4
MDIKRTVLWVIFFMSAVMLYDNWQRDHGRPSMFFPSATQTAPAAASGASGTGATTTAGEAPAAAAAGAAPATTAPAAQAQLVKFSTDVYDGEIDTRGGTLAKLTLKKQGDGKQPDLYITLFDHTAGHTYLARTGLLGGDFPNHNDVYTQLNPGATSLTGDQNTLKLSFESPVKGGVKVVKTYTFTRGSYVIGVDTKIDNVGTAPVTPTVYMELVRDNTAVETPMFSHTFLGPAVYTDAKHFQKINFSDLDKNKADYVNSADNGWVAMVQHYFASAWIPQQGVKRDIYAEKIDPSLYRVGVKQPVAAIAPGQSADVQARLFAGPEEERMLEGIAPGLELVKDYGWVTIIAKPLFWLLEKIHGVVGNWGWAIVLLTILIKAVFFPLSAASYKSMARMKEITPRMQALRERFKSDPQKMNAALMELYKTEKVNPFGGCLPVVIQIPVFISLYWVLLASVEMRGAPWILWIHDLSQRDPFFILPVLMAVSMYVQTSLNPTPPDPVQAKMMKFMPIAFSVMFFFFPAGLVLYYVVNNVLSIAQQYYITRKLGGVKKKPA

SEQ ID NO: 8701 - protein, 1126 aa, Marchantia paleacea var. diptera
MSTTKVTYSSGSSAKSKHSVRIVQTTADAKLQAVFEESGESGDSFDYTKSINASKSTGESVPAQAVTAYLQRMQRGGLTQTFGCMLAVEELTFRVLAYSENAPEMLDLMPQAVPCVGQQDVLGIGTDARTLFNSASAVALEKAAGALDVSMFNPISVQCKSSGKPFYAIVHRIDAGLVIDIEPVRPSDPSVSAAGALQSHKLAAKAISRLQSLPGGDIGLLCDTVVEEVRELTGYDRVMAYKFHEDEHGEVVAEIRRSDLEPYLGLHYPATDIPQASRFLFMKNRVRMICDCCAQPVQVIQDKELRQPLSLAGSTLRAPHGCHAQYMGNMGSIASLVMAVIINVNDEEYSSRGYHHKGRKLWGLVVCHHTTPRSVPFPLRSACEFLMQVFGLQLNMEVELAAQLREKRILRTQTLLCDMLLRDAPIGIVSQSPNIMDLVKCDGAALYYGKRYWVLGTTPTELQIKDIADWLLEYHKDSTGLSTDSLADAGYPGAASLGDAVCGMAAARITSKDFLFWFRSHTAKEIKWGGAKHDPDDKDDGRKMHPRSSFKAFLEVVKRRSLPWEDVEMDAIHSLQLILRGSFQDIDDSDTKTMIHARLNDLKLQGMDELSTVANEMVRLIETATAPILAVDSSGFINGWNAKVAELTGLPVSEAMGRSLVKDLALEESVETVERLLYLALQGEEEQNVEIKLQTYGAQKDKGAVILIVNACSSRDVTENVVGVCFVGQDVTGQKVVMDKFTRIQGDYKAIVQNPNPLIPPIFGSDEFGYCSEWNPAMEKLAGWKREEVIGKMLVGEIFGTQMMCCRLKGQDAMTKFMIVLNSAMDGQDSEKFPFAFFDRQGKFVEALLTANKRTDSEGAFTGVFCFLQIASMELLQALTVQRATEKVAFSKLKELAYIRQEIKNPLYGIMFTRNLVEDTNLTEEQKQFIETSALCERQLRRILDDMDLESIEDGYLELDTAEFIMGTVMDAVISQGMITSREKGLQLIWDTPRDTKNLCLFGDQVRLQQVLADFLLNAIRFTPSSEGWVGIKGVSSRHRQGGGVHVVHFEFRVTHPGAGLPEELVQEMFDRGRGMTQEGLGLNMCRKLLKLMSGDVQYIREAGKCYFLVNVELPIAQRDDAGSVK

SEQ ID NO: 8702 - protein, 631 aa, Rhodopseudomonas sp. No.7
MGKVIGIDLGTTNSCVAVMDGKSAKVIENAEGMRTTPSIVAITDDGERLVGQPAKRQAVTNPERTFFAVKRLIGRRYDDPMVEKDKGLVPYKIVKASNGDAWVEADGKTYSPSQVSAFILQKMKETAEAHLGQKVDQAVITVPAYFNDAQRQATKDAGKIAGLEVLRIINEPTAAALAYGLDKAKTGTIAVYDLGGGTFDVSILEIGDGVFEVKSTNGDTFLGGEDFDMRLVNYLADEFQKEQGIDLRKDKLALQRLKEAAEKAKIELSSTTQTEINLPFITADQSGPKHLTMKLTRAKFEALVDDLVQKTIEPCRKALKDAGLTAGEISEVVLVGGMTRMPKVQEVVKQLFGKEPHKGVNPDEVVAIGAAIQAGVLQGDVKDVLLLDVTPLSLGIETLGGVFTRIIDRNTTIPTKKSQVFSTAEDNQNAVTIRVFQGEREMAADNKMLGQFDLMGIPPAPRGMPQIEVTFDIDANGIVNVSAKDKATGKEQQIRIQASGGLSDSEIDKMVKDAEANAAEDKKRREAVDAKNHADALVHSTEKALAEHGSKIDEGERRSIEDALSDLREALKGDDAEAIKTKSNTLAQASMKLGEAMYKQAEAGGAAQQAGKDDVVDAEFTEVDDDKKKSA

SEQ ID NO: 8703 - protein, 631 aa, Mannheimia haemolytica
MGKIIGIDLGTTNSCVAVMDGDKPRVIENAEGARTTPSIIAYTDKETLVGQPAKRQAITNPKNTLFAIKRLIGRRFTDAEVQRDIEIMPFEISKADNGDAWVTVKGDKLAPPQISAEILKKMKKTAEDFLGEPVTEAVITVPAYFNDAQRQATKDAGRIAGLDVKRIINEPTAAALAYGLDSKKENQTIAVYDLGGGTFDISIIEIDNFDGEQTFEVRATNGDTHLGGEDFDNRVINYLVEEFKKQGVDLRNDPMAMQRVKEAAEKAKIELSSAQETEVNLPYITADATGPKHLNIKVTRAKLESLVEDLVNRSLEPLKTALADAGLSVGDINDVILVGGQTRMPLVQKKVADFFGKTRKDVNPDEAVMAIGAAVQGGVLSGSVTDVLLLDVTPLSLGIETMGGVMTTLIEKNTTIPTKKSQVFSTAEDNQSAVTIHVLQGERKRAADNKSLGQFNLEGINPAPRGMPQIEVTFDIDANGIINVSAKDKNTGKEQQIKIQASSGLSDAEVEQMVRDAEANAEADKKFEELVQVCNQADGIAHATRKQITEAGDALNADDKAKIEAAISELETAAKGEDKAEIEAKIEALIKASEPLMLAAQAKAQGGEQPQQSQKDDGVVDAEFEEVKDNK

SEQ ID NO: 8704 - protein, 636 aa, Neorickettsia sennetsu
MAGEIAIGIDLGTTNSCVAIKDKVIENAEGARTTPSVVAFTSDGQTLVGAPAQRQAVTNAKNTIVASKRLIGRRFKDNVIKGIQKDYPYKIVEAKNGDAWIEAGGKSYSPSQVGANVLIKLKEAAETYTGKKVTKAVITVPAYFDDAQRTATKDAGRIAGLEVLRIINEPTAAALAYGLDKTATTKNIAVFDLGGGTFDVSILELGDGVFEVKATNGDTHLGGEDFDRMILNFLVEEFKKENGMDLKNDPLALQRLKEAAEKAKKELSSTQETDINLPYITADAAGPKHLNVKFTRAKLESLVSDLIDRTIEPCKKALKDSGLKREEINEVVLVGGMTRMPAVVKKVTEFFGKEPHKGVNPDEVVAIGAAIQANILAGGSDAQDIVLLDVTPLSLGIETLGGVFTKLIDRNTTIPTKRSQTFSTAEDNQSAVTIRVFQGERQMASDNKLLGQFSLGGIPPAPRGMPQIEVTFDIDANGIVHVSAKDKGTGKEQTVKIQASGGLTEEEIKKMVDEAASKADEDKKRRELVEAKNSAESLIHSTEKSLSEYGSKISSSDKQSIDDAISDLKSVLAKDDASLIKEKTDALSKVSMKLGEAMYKESQSASNDSSPKNDSTEEGERVVDPEYEEVKDEDSK

SEQ ID NO: 8705 - protein, 605 aa, Aquifex pyrophilus
MAGKGKIIGIDLGNETNSVVAVMMGDEAVVIQNQEGSRLTPSVVSWTKEKEVLVGDPAKRRAILDPENTVYESKRFIGRKFEEVKEEAKRVSYKVVPDEKGDAAFDIPNAGKLVRPEEVGAHVLRKLKEAAEAFLGEPVKKAVITVPAYFNERQRQATKDAGKIAGLEVVRILNEPTRAAMAYGLHKKENVRILVYDFGGGTFDVSILEGGDGVIEVKATAGDTHLGGANIDERIMEWLIEEFKKEHGIDLRQDRTALQRLKEAAEQAKKELSFKMETEINLPFITIDPNTNQPLHLQKKLTRARLEEMINDLIDRTIDIVKQALEDANVKPSDIDEVVLVGGSTRIPLVQQKIKEFFGKEPHKGLNPDEVVAMGAAIQAGVLAGEVKEIVLVDVTPLELGVETYGGVMTVLIPRNTPIPVKKSKVFTTAHDYQTEVEIHVLHGERPLAKDNKSLAKFYLTGIPPAPRGVPKIEVCFDIDADGILHVTAKDLGTGKEQSVRVEISSGLTPEEIERIIKEAEETREEDRKKKELIEAKNQLDHLVYQLEKTLKEAGDKVPADVKQEAEKVIEEAKKTIETATDINEAKELQKEFSRYPQSSEQPFT

SEQ ID NO: 8706 - protein, 640 aa, Vibrio harveyi
MGKIIGIDLGTTNSCVAVLDGDKPRVIENAEGERTTASVIAYTDGETLVGQPGGNVNAVTNPTRYTLFAIKRLIGRRFEDEEVQRDIEIMPYKIVKADNGDAWVEAKGQKMAAPQVSAEVLKKMKKTAEDFLGEEVTGAVITVPAYFNDAQAQATKDAGRIAGLEVKRIINEPTAAALAYGLDKSGGDRTIAVYDLGGGTFDISIIEIDEVEGEKTFEVLATNGDTHLGGEDFDNRLINYLVDEFNKEQGINLKNDPLAMQRVKEAAEKAKIELSSTSQTDVNLPYVTADATGPKHMNIKVTRAKLESLVEDLVQRSLEPLKVALADADLSVNDITDVILVGGQTRMPMVQAKVAEFFGKEARRDVNPDEAVAMGAAVQGGVLAGEVKDVLLLDVTPLSLGIETMGAVMTKLVEKNTTIPTKANQVFSTAEDNQSAVTIHVLQGERKQASFNKSLGQFNLEGIQAAPRGMPQIEVTFDLDADGILHVSAKDKQTGKEQKITIQASGGLSDDDIEKMVQEAEANKEADKKFEELATARNQADQMIHGTRKQVEEAGEALPAEEKEKIEAAISELETARKGDDKEAIDAKVQALMTAAQKLMEIAQQQAQAQQAQGGYAGAQQSQEDDVVDAEFEEVKDDKK

SEQ ID NO: 8707 - protein, 607 aa, Geobacillus thermoglucosidasius
MSKIIGIDLGTTNSCVAVLEGGEPKVIPNPEGSRTTPSVVAFKNGERLVAKRQAITNPNTIISIKRHMGTDYKVEIEGKKYTPQEISAIILQYLKSYAEDYLGEPVTRAVITVPAYFNDAQRQATKDAGRIAGLQVERIINEPTAAALAYGLDKEEDQTILVYDLGGGTFDVSILELGDGVFEVKATAGDNHLGGDDFDQVIIDYLVEQFKQEHGIDLSKDKMALQRLKDAAEKAKKELSGVTQTQISLPFISANETGPLHIETTLTRAKFEELSAHLVERTMGPVRQALQDAGLTPADIDKVILVGGSTRIPAVQEAIKRELGKEPHKGVNPDEVVAIGAAIQGGVIAGEVKDVVLLDVTPLSLGIETMGGVFTKLIERNTTIPTSKSQIFTTAADNQTTVDIHVLQGERPMAADNKTLGRFQLTDIPPAPRGVPQIEVTFDIDANGIVHVRAKDLGTNKEQSITIKSSSGLSEEEIQRMIKEAEENAEADRKRKEAAELRNEADHLVFTTEKTLKEVEGKVDEAEVKKAREAKDALKAALEKNDIDDIRKKKEALQEIVQQLSVKLYEQAAKQAQAQQQTGAGDAAKKDDNVVDAEFEEVKDDNK

SEQ ID NO: 8708 - protein, 637 aa, Vibrio proteolyticus
MGKIIGIDLGTTNSCVAVLDGDKPRVIENAEGERTTASVIAYTDGETLVGQPAKRQAVTNPTNTLFAIKRLIGRRFEDEEVQRDIEIMPYKIVKADNGDAWVEAKGQKMAAPQVSAEVLKKMKKTAEDFLGEEVTGAVITVPAYFNDAQRQATKDAGRIAGLEVKRIINEPTAAALAYGLDKKGGDRTIAVYDLGGGTFDISIIEIDEVEGEKTFEVLATNGDTHLGGEDFDNRLINYLVDEFKKEQGIDLKTDPLAMQRVKEAAEKAKIELSFTSQTDVNLPYVTADATAPKHMNVKVTRAKLESLVEDLVQRSLEPLKVALADADLSVNDITDVILVGGQTRMPMVQAKVAEFFGKEARRDVNPDEAVAMGAAVQGGVLAGDVKDVLLLDVTPLSLGIETMGGVMTKLVEKNTTIPTKANQVFSTAEDNQSAVTIHVLQGERKQAMYNKSLGQFNLEGIQPAPRGMPQIEVTFDLDADGILHVSAKDKQTGKEQKITIQASGGLSDDEIEKMVQEAEANKEADKKFEELATARNQADQMIHGTRKQVEEAGDALPAEDKEKIEAAVSELEDARKGDDKEAIDAKVQALMTASQKLMEIAQQQAQAQAAQGGDEAAQSKDDDVVDAEFEEVKDDKK

SEQ ID NO: 8709 - protein, 610 aa, Methanosarcina thermophila
MGKILGIDLGTTNSCMAVMEGGEAVVIPNAEGARTTPSVVGFSKKGEKLVGQVAKRQAISNPENTVYSIKRHMGEPNYKVTLQGKHNTPQEISAMILQKLKADAEAYLGEEIKQAVITVPAYFNDAQRQATKDAGTIAGLEVLRIINEPTAASLAYGLDKGEVEQTILVYDLGGGTFDVSILEIGGGVFEVKATSGDTHLGGDDFDQRIVNYLLAEFKKTEGIDLSKDRAVLQRLTDAAEKAKIELSGVASTNINLPFLTVGPDGEPKHLDIDLTRAQFQKMTEDLLEKTLVSMRQALSDAKLTPNDIDKVILIGGATRMPAVVELVENFTGKKPYKNINPDEAVAIGAAIQAGVLGGEVKDILLLDVTPLTLGIETLGGIATPLIPRNTTIPTRKSQIFSTAADNQPSVEIHVLQGERGIASENKTLGRFTLDGIPPAPRGVPQIEVTFDIDANGILHVSAKDLGTGREQSISIQKPGGLTDAEIERMIKDAELHAEEDRKRKEEVETRNNAETLINAAEKTLKEAGDVATEDQKSKVNAAIDDLKKALEGKDAEEIKAKTEALQEAIYPISTAMYQKAAQQAQQAAGGAAGRTDAKGPEETVVDAIMR

SEQ ID NO: 8710 - protein, 638 aa, Pseudomonas syringae pv. glycinea
MDRIIGIDLGTTNSCVSILENGNVKVIENAEGTRTTPSIIAYANDGEILVGQSAKRQAVTNPHNTLYAVKRLIGRKFEEDVVQKDIQMVPYKIVKADNGDAWVEVNGQKMAPPQISAEILKKMKKTAEDYLGEAVTEAVITVPAYFNDSQRQATKDAGRIASVDVKRIINEPTAAALAYGMDKAKGDHTVIVYDLGGGTFDVSVIEIAEVDGEHQFEVLATNGDTFLGGEDFDIRLIDYFVHEFKKESGMNLKGDPLAMQRLKEAAEKAKIELSSSTQTEVNLPYITADATGPKHLVVKISRSKLESLVEDLVQRTIAPCEMALKDAGIDRSKINDVILVGGQTRMPLVQKLVTEFFGKEARKDVNPDEAVAMGAAIQGAVLAGDVKDVLLLDVSPLTLGIEAMGGVMTALIKKTPRFLPRNPSVLTADDNQENAVAIHVLQGERKQAGQNKSLGKFDLAEIPPAPRGVPQIEVTFDIDANGILHVGAKDKATGKQQSIVIKANSGLSEEEIQQMVRDAEVNSEEDRKFEELASARNQGDALVHSTRKMIADAGDKVTAEQKTAVEAALVALEAAIKGDDKAAIEAKVEELSKVSAPIAQKMYAEQAENPEAAAKPAEENAKADDVVDAEFEEVKDHK

SEQ ID NO: 8711 - protein, 640 aa, Rhodothermus marinus
MGKIIGIDLGTTNSVVAVMEGGEPKVIINPEGSRVTPSVVAFTADGEPLVGAPAKRQAITNPKNTIFSIKRFMGRFYDEVTEEISMVPYKVVRGENNTVRVEVEVGGEKRLYTPQEISAMILQKLKQTAEEYLGVPVTEAVITVPAYFNDAQRKATKEAGEIAGLKVRRILNEPTAAALAYGLDKKDKELKIAVYDLGGGTYDISILELGDGVFEVKATNGDTHLGGDNFDQRLIDYIADEFQKQEGIDLRKDPMALQRLKEAAEKAKIELSSAMKTTVNLPFITATAEGPKHLVMEITRAKFEQLIEDLVARTIPPMEQALKDAKLRKEDIDEVILVGGSTRIPLVQRTVEEFFGKKANKSVNPDEVVAIGAAIQAGVLSGEVQDVLLLDVTPLNLGIETLGGVMTVLIPANTTIPTRKSEIFTTASDNQTSVEIHVLQGNREMAADNRSLGRFILDGIPPAPRGVPQIEVTFDIDANGILHVSARDKATGKEQSIRIEASSGLTPEEIERMREEARRHAAEDRKRREQIEKLNQADSLIYMTEKNLREYGDKLPADKRAKIESALERLKEVHKARNFDELDSAIAQLNQAWNEASQDLYRAQQAAGAQTSDGASAQADSGGVREADYEVIDEDDKDKQ

SEQ ID NO: 8712 - protein, 641 aa, Methylovorus sp. SS1
MAKIIGIDLGTTNSCVAVMEGGKPRVIENAEGTRTTPSIVAYQDDGEILAGAPAKRQAVTNPKNTLYAVKRLIGRRFEEKEVQKDIGLMPYTITKADNGDAWVEVRGQKMAPPPNSAEVLRKMKKTAEDYLGEEVTEAVITVPAYFNDSQRQATKDAGRIAGLEVKRIINEPTAAALAFGLDKQEGDRKIAVYDLGGGTFDISIIEIAEIDGEHQFEVLSTNGDTFLGGEDFDNRLIDFLADEFKKEKRLDLRNDLLAKQRLKEAAEKAKIELSSAQQTEVNLPYITADATGPKHLVVKITRTKFESLVEDLIERSIKPCEVALKDAGVKPSDIQDVILVGGQTRMPKVQEKVKEFFGKEPRKDVNPDEAVAVGAAIQGGVLQGDVKDVLLLDVTPLSLGIETLGGVMTKLIKKNTTIPTKASQVFSTAEDNQNAVTIQVLQGEREMAAGNKSLGQFNLSDIPPAPRGMPQIEVTFDIDANAILHVSAKDKATGKENKITIKANSGLSEEEIKRMEEDAAAYADEDRKLRELVDARNSADGMVHSVKKSLSEHGDKLEAGEKEKIEAAIKDVEDAIKGDDKEAIEAKTNALMEASQKLGEKVYAEQQAQQGGAEEAQPQGEKTVDADVVDAEFEEVKDDKK

SEQ ID NO: 8713 - protein, 382 aa, Archaeoglobus fulgidus
MPYFDYASTKPVDERVVEAMLPYMTEHFGNPSSVHSYGFKAREVIEEARGKISELINGGGGDIVFTSGATESNNLALIGYAMRNARKGKHVLVSSIEHMSVINPAKYLQKQGFEVEFIPVDKYGTVDLEFIEEKIREDTILVSVQHANNEIGTIQPIKEISEIINGRAALHVDATASLGQIEVDVEKIGADMLTISSNDIYGPKGVGALWVRQGVRLQPIILGGGQEKGLRSGSENVPAIVGFGKAAEITAKEWGEEAGRLRRLRDRIIDNVLKIEESYLNGHPEKRLPNNVNVRFSYIEGESIVLSLDMAGIQASTGSACSSKTLQPSHVLMACGLKHEEAHGTLLLTLGRYNTDEDVDRLLEVLPGVIERLRSMSPLYRR

SEQ ID NO: 8714 - protein, 404 aa, Azotobacter vinelandii
MKLPIYLDYSATTPVDPRVAQKMCECLTMEGNFGNPASRSHVFGWKAEEAVENARRQVAELVNADPREIVWTSGATESDNLAIKGVAHFNASKGKHIITSKIEHKAVLDTTRQLEREGFEVTYLEPGEDGLITPAMVAAALREDTILVSVMHVNNEIGTVNDIAAIGELTRSRGVLYHVDAAQSTGKVAIDLERMKVDLMSFSAHKTYGPKGIGALYVRRKPRVRLEAQMHGGGHERGMRSGTLATHQIVGMGEAFRIAREEMAAESRRIAGLSHRFHEQVSTLEEVYLNGSATARVPHNLNLSFNYVEGESLIMSLRDLAVSSGSACTSASLEPSYVLRALGRNDELAHSSIRFTFGRFTTEEEVDYAARKVCEAVGKLRELSPLWDMYKDGVDLSKIEWQAH

SEQ ID NO: 8715 - protein, 396 aa, Ruminococcus flavefaciens
MEKRFIYADNAATTAVSEEVLSAMLPYFRTAYGNASSIYKLGRDAQRDVELAREKVAKALGAEPREIYFTSCGSESDNWAIKGTAELMAKKGKKHIVTSVFEHHAVLHTCEYLEKHGYEVTYVPVNDKGLIDPEDVRKAVREDTALVTIMYANNEIGTIQPIEEIAAVCREKGVLFHTDAVQAVGHVDIDVHKQGIDMLSLSGHKIHAQKGIGAIYIRKGIVLPNLVHGGGQERGKRAGTENVPAIVGLGVAIEAAVRNTAEKAAIIIPRRNRIIDELLKIPYTRLNGDREKRLPGNINISFEGIEGESLLLMLDLNGICASSGSACTSGSLDPSHVLLSIGLKHAVAHGSLRLSIEEDVSDEDVEYIIETIPKVVQRLRSMSPVWERMMKGEKYD

SEQ ID NO: 8716 - protein, 404 aa, Methanosarcina thermophila
MAIHNCEGENVSTENKAVYMDNSATTPVRKEVVEAMLPYMTENFGNPSSIYEIGKTSKHAINLARKKAADALGAEENEIYFTSGGTESDNWAIKGIAFANRDKGKHIITSSIEHHAVLHTCAWLEGQGFEVTYLPVDKYGMVSPDELRNAIRDDTILISIMFANNEIGTIQPIKEIGEIAKENQIYFHTDAVQAIGHVPIDVKKLNIDLLSLSGHEFEGPKGCGALYIRKGVKIDPLLHGGAQERKRRAGTENVPGIVGLGKATELATAEIEESNRTLLKLRDRLIEGLLKIPKTHLNGHPTQRLANNVNVTFEYIEGESLLLLLNAKGIYASTGSACNSSSLEPSHVLTACGVPHEIIHGSLRLSLGRMNTSEDVDRVLEVVPEIVQKLRNMSPLTPKEYRTL

SEQ ID NO: 8717 - protein, 419 aa, Frankia sp. EuIK1
MIYLDHNATTPVDPRVVEVMLPLFTERFANPASKHAPGQEATRIVERARREVASLAGARPREIVFTSGATEAANLAIGGVLATAEPGRRRILVGATEHPAVLGAADAAVSAGSAVSADGTTAAERIAVHPDGTVDVDDLRRRLGPDVALVAVMAANNETGAVNDPRPLVEAARSAGRCCCADVTQALGRVPVEFERTGVDLAVSSAHKLYGPKGVGALIASKDAWSRLAPRVHGGGQERGLRAGTLNTAGIAGFGAAARIAAESMADDGTRQRALVALLTELLVKRLGPGAVELNGPVRARLPNTVNLRFVGAGADEVQACAPRVAISAGSACSGGGDEPSHVLRAMGRTATEARESLRFSLGRATTTEEIRTAADLVARAVLRVRSLSQSTPIQDEVRDDNRASSNSLNRGSAASKES

SEQ ID NO: 8718 - protein, 626 aa, Oryza sativa Japonica Group
MALLSATAPAKTRFSLFSHEEAQHPHPHALSACCGGGASGKRQRARARVAAAMRPADAAASVAQAASPGGGGEGTRRPRVLVAGGGIGGLVLALAARRKGYEVTVFERDMSAVRGEGQYRGPIQIQSNALAALAAIDMSVAEEVMREGCVTGDRINGLVDGISGSWYIKFDTFTPAAERGLPVTRVISRMTLQQILARAVGDDAILNDSHVVDFIDDGNKVTAILEDGRKFEGDLLVGADGIWSKVRKVLFGQSEATYSEYTCYTGIADFVPPDIDTVGYRVFLGHKQYFVSSDVGAGKMQWYAFHKEPAGGTDPENGKNKRLLEIFNGWCDNVVDLINATDEEAILRRDIYDRPPTFNWGKGRVTLLGDSVHAMQPNLGQGGCMAIEDGYQLAVELEKSWQESAKSGTPMDIVSSLRRYEKERILRVSVIHGLARMAAIMATTYRPYLGVGLGPLSFLTKLRIPHPGRVGGRFFIKYGMPLMLSWVLGGNSTKLEGRPLSCRLSDKANDQLRRWFEDDDALEQAMGGEWYLLPTSSGDSQPIRLIRDEKKSLSIGSRSDPSNSTASLALPLPQISENHATITCKNKAFYVTDNGSEHGTWITDNEGRRYRRTSELPCPFPSLGCH

SEQ ID NO: 8719 - protein, 223 aa, Leptolyngbya sp. PCC 73110
MVVTKDKPLAAMFRQIGGGAYPPVVETFERGKTIFFPGDPAERVYFLVKGAVKLSRVYEAGEEITVALLRENSVFGVLSLITGQRADRFYHAVAFTPVELLSVPIEQVEKALKDNPELSMLMLKGLSSRILQTEMMIETLAHRDMGSRLVSFLLILCRDFGVPSQEGIMIDLKLSHQAIAEAIGSTRVTVTRLLGDLRQDKMISIHKKKITVHNPVTLSQQFT

SEQ ID NO: 8720 - protein, 409 aa, Laccaria bicolor
MSIQQASTSSAKAAILQKNDNDVVIVCAVRSAITKGRKGGFKDTKPELILSHVLRAAYSKISLDPKLIEDIAVGNVLPPGGGASAARMAALHAGIPVETSINTVNRQCSSGLTAINQIANQIRAGQIDIGIGAGVESMTHGFGSRAAPEVSDEVLSNQDAEDCLLPMGITSENVAADYHIPRSTQDAFSAKSFQKAAAANKAGKFKSEIVPILAKWIDPKTEEVKEVLVNEDDGIREGVTAESLAKIKPAFKKDGVTHAGNASQVSDGAAAIILARRSVATRLGLPILGKFVNASTIGVPPRIMGVGPAYAIPRVLKLTGLSLDDVDFFEINEAFASQALFSIDTLKIAHEKVNLNGGAIALGHPLGCTGARQVATGLNIAKQTGGRVFVTSMCIGSGMGMAAVFVSEQ

SEQ ID NO: 8721 - protein, 283 aa, Paucimonas lemoignei
MKPLVKYRGGKSKEIPYLIKHIPEFKGRYIEPFFGGGALFFYIEPEKSIINDINKKLIDFYRDVKDNFVQLRHELDEIECIYEKNRVEYETRKKLNPTERVDDGNEDFYYFMRNEFNKDFSDRYLSSTLYFYINKTAYSGMIRYNSKGEFNVPFGRYKNLNTKLVANEHHLLMQGAQIFNEDYSEIFKMARKDDFIFLDPPYDCVFSDYGNEEYKDGFNVDAHVKLSEDFKKLKCKAMMVIGKTELTDGLYKKMIIDEYDKSYSVNIRNRFKSVAKHIVVANY

SEQ ID NO: 8722 - protein, 666 aa, Solanum lycopersicum
MAACSRRGNSLVVLAIVLLGCLSALSNAKEEATKLGTVIGIDLGTTYSCVGVYKNGHVEIIANDQGNRITPSWVAFTDNERLIGEAAKNLAAVNPERTIFDVKRLIGRKFEDKEVQRDMKLVPYKIVSKDGKPYIQVKIKDGEVKVFSPEEISAMILTKMKETAEAFLGKTIKDAVVTVPAYFNDAQRQATKDAGVIAGLNVARIINEPTAAAIAYGLDKKGGEKNILVFDLGGGTFDVSILTIDNGVFEVLATNGDTHLGGEDFDQRIMEYFIKLIKKKHGKDISKDNRALGKLRREAERAKRSLSSQHQVRVEIESLFDGTDFSEPLTRARFEELNNDLFRKTMGPVKKAMDDAGLQKNQIDEIVLVGGSTRIPKVQQLLKDYFDGKEPSKGVNPDEAVAYGAAVQGGILSGEGGDETKDILLLDVAPLTLGIETVGGVMTKFIPRNTVIPTKKSQVFTTYQDQQTTVSIQVFEGERSLTKDCRNLGKFDLTGIPPAPRGTPQIEVTFEVDANGILNVKAEDKGTGKAEKITITNDKGRLSQEEIERMVREAEEFAEEDKKVKEKIDARNALETYVYNMKNQINDKDKLADKLESDEKEKIETATKEALEWLDDNQSAEKEDYDEKLKEVEAVCNPIITAVYQRSGGAPGGGASEEEDDSHDEL

SEQ ID NO: 8723 - protein, 649 aa, Blastocladiella emersonii
MTTKLDSPAVGIDLGTTYSCVGVWQNDRVEIIANDQGNRTTPSYVGFTDSERLIGDAAKNQVAMNPHNTVFDAKRLIGRRFDDDVVQADMKHWSFTVVNKNSKPLFQVEFKGETKTFTPEEFSSMILTKMKETAEAYLGTKVNHAVVTVPAYFNDSQRQATKDAGAIAGLNVLRIINEPTAAAIAYGLDKKAEAGEKNVLIFDLGGGTFDVSLLTIEDGIFEVKATAGDTHLGAEDFDNRLVNHFVQEFKRKHKKDLSGKARPRRLRTACERAKRTLSSSAQTSIEIDSLFEGIDFYTSITRARFEELCADLFRSTLDPVEKVLRDAKMAKNEVHEIVLVGGSTRIPRIQKLVSDFFNGKEPNKSINPDEAVAYGAAVQAAILAGDQSEKVQDLLLLDVAPLSLGIETAGGVMTPLIKRNTTIPAKKSETFSTYADNQPGVLIQVYEGERARTKDNNLLGKFELTGIPPAPPRVPQIEVSFDVGADGILNVSAVDKSTNRSNKITITNDKGRLSKEEIERMVAEAEKYKKEDEEAASRIQAKNGLESYAYNLRNTLNDDKVAGKMDAADKETLNKAIDETISWLDGNQEGAKDEYEHKQKELEGVANPIMTKLYSAAGGAPGGMPGGFDPSGAPPPAADTTGPTIEEVD

SEQ ID NO: 8724 - protein, 387 aa, Mesorhizobium loti MAFF303099
MAAKRAYLDYNASAPLLPAAREAMVVALDVAANPSSVHAEGRAARRLIETARREVAALVSARPEHVVFTSGATEAASTLLSPEWQMGRGSVRMSRLYVCEADHPCLLNGGRFPAAQVTRIGVDANGIADLAALAAALGDHDKADGLPLVAIHAANNETGVIQPIDRIAEIVKAAGGILVVDAVQAAGRVSIDMSAGYADYLIQSSHKIGGPKGVGAIVAAADLMMPKPLINGGGQEKGHRGGTENLAAISGFGAAAREALAGLLAIDAVRQRRDEIEAIVKMLVPDAEIFGTGAPRLANTTFFAIAGIKAETAQIAFDLAGVALSAGSACSSGKVGPSHVLKAMGYGDSLGALRVSIGSATGAEDIELFRTALAGIAQRRAGREQAA

SEQ ID NO: 8725 - protein, 251 aa, Mesorhizobium loti MAFF303099
MLEIRNLHARIVDDGTEIIRGLNLTVKAGEVAAIMGPNGSGKSTLSYILAGREDYEVTEGDILYNGQSILEMDPAERATSGIFLAFQYPMEIPGVATMEFLKVAMNEQRKARGEEPLKIPEFLKRVKEAAASLNMDMAMLKRPLNVGFSGGEKKRAEILQMKLLEPKLCVLDETDSGLDIDALKIVSDGVNALRAPDRAFLVITHYQRLLEHIVPDSVHVLYRGQVIKSGDKSLALDLEANGYAGVIGEAA

SEQ ID NO: 8726 - protein, 111 aa, Mesorhizobium loti MAFF303099
MSGINDYIDNEVKGNDVVLFMKGTPGFPQCGFSGQVVQILDYIGADYKGVNVLDSAELRQGIKDYSNWPTIPQLYVKGEFVGGCDIVREMFQAGELQTFLVEKGVSVKGAA

SEQ ID NO: 8727 - protein, 527 aa, Mesorhizobium loti MAFF303099
MSSDTTIAPEALTFSDLGLSPKVLSAVTDAGYTVPTPIQAGAIPHALLGKDILGIAQTGTGKTASFVLPMLTRLEKGRARARMPRTLILEPTRELAAQVEENFVKYGKNHKLNIALLIGGVSFDEQDKKLERGADVLIATPGRLLDHRERGKLLLNGVEILVIDEADRMLDMGFIPDIERICEMIPFTRQTLFFSATMPPEITKLTEKFLHAPVRVEVSKAASAATNITQRLVKSGSKPWDKRETLRNLIKAEDAELKNAIIFCNRKVEVSELFRSLLKYDFDAGALHGDMDQRARMQMLANFRDGKLRYLVASDVAARGLDIPDVSHVFNYDVPIHAEDYVHRIGRTGRAGRSGKSFTIATKSDTKYIDAIERLIGNKIEWHDGDLSTVVASEGEDDAPRRGKGAPRRAGRKDDDRKDRGERKKGGERRARHSEEDAAVAQQEQPDVAETAVADISERRARKEAIRSENTERKSSDRNEPRAPERGDTRPQRDNSRPARHRHQEDNDTTVGFGDDMPAFMRIVAKV

SEQ ID NO: 8728 - protein, 305 aa, Mesorhizobium loti MAFF303099
METIGFIGLGIMGAPMAGHLLDAGYKVIASDHRSKPLADLVAKGLKTVSGHAAVAKAADIIITMVPDTPQVADVLFGDNGVASGLTRGKLVIDMSSISPIETKVFAGKINELGCDYLDAPVSGGEVGAKAASLTIMVGGEEKAFERAKPVFEKMGKNITLVGPNGVGQTTKVANQIVVALTIEAVAEALVFASKAGADPARVRQALMGGLAASRILEVHGERMVKRTFAPGFRIELHQKDLNLALEGAKALGVSLPNTSTTQQLFNSCAANGGAREDHSALVRALERMANFEVGGAVAEVKGKAA

SEQ ID NO: 8729 - protein, 346 aa, Mesorhizobium loti MAFF303099
MTKYKLEYIWLDGYTPVPNLRGKTQIKEFAEFPTLEQLPLWGFDGSSTMQAEGRSSDCVLKPVALYPDPARTNGILVMCEVMMPDGVTPHESNSRATILDDEDAWFGFEQEYFFYKDGRPLGFPESGYPAPQGPYYTGVGYKNVGDVARKIVEEHLDQCLAAGINHEGINAEVAKGQWEFQIFGKGSKKAADQIWMARYLLLRLTETYGIDIEFHCKPLGDTDWNGSGMHCNFSTKFMREVGGKAYFEALMAQFDKNLMDHIAVYGPDNDKRLTGKHETAPWNKFSYGVADRGASIRVPHSFVKNDYKGYLEDRRPNSQGDPYQIASQVLKTISQVATDAKVSAAA

SEQ ID NO: 8730 - protein, 371 aa, Mesorhizobium loti MAFF303099
MRVGCPKEIKNHEYRVGLTPGSVREYVAHGHEVLVEAGAGAGIGADDNAYRAAGATIAKTAADVFAKSDMIVKVKEPQPNEWVQLRDGQILYTYLHLAPDPEQTKGLLASGVTAIAYETVTDDRGGLPLLAPMSEVAGRLSIQAGATALQKANGGRGVLLGGVPGVLPGKVTVLGGGVVGLHAARMAAGLGADVTIIDRSIPRLRQLDDLFAGRVHTRYSTVEALEEECFSADIVVGAVLIPGAAAPKLVTREMLSGMKKGSVLVDVAIDQGGCFETSHATTHAEPTYEVDGVIHYCVANMPGAVPVTSAHALNNATLHYGLQLADKGLKALVDDHHLRNGLNVHKGKITNRAVAEALGYELVEPKAVLAA

SEQ ID NO: 8731 - protein, 310 aa, Mesorhizobium loti MAFF303099
MTASPSFLGLPDRLDGRTPRAVIFGAGHGSTYPGKDSSGHALAADAIRAASQDDASLVEHWDFDLGGPLFNGKPASCVDAGDISTILHDNAENRVRIEAKTREVLALPAVPILLGGDDSVVIPFLAGFADHGPIWVLQIDAHIDWRDEVLGERHGYSSPMRRASEMPHVAGIVQVGLRSVGSARLAEIEAARHYGSRFVTAREVHAQGVDAALRHIPEGARVVATFDCDSLDPGIMPGVAARTPGGLTYTQAIDLIAGLGKRARIAGFDLVELYPPADIDGLSALTAARLLVNVIGTIASMTVSQSSSTA

SEQ ID NO: 8732 - protein, 289 aa, Mesorhizobium loti MAFF303099
MASVAFLGLGVMGYPMAAHLRNKGDHDVTVYNRTKTKAEQWVDQHGGSLAVTPADAAKDKDFVFSCVGNDDDLRSVTTGPEGAFKSMKKGSVFIDNTTASAEVARELAAAAEAGGFSFLDAPVSGGQAGAENGVLTVMVGGDQAAYDRARPVIDAYARMVGLMGSAGAGQLTKMINQICIAGLVQGLSEGIHFGKKAGLDIEKVIEVISKGAAGSWQMENRHKTMNAGKYDFGFAVDWMRKDLGICLAEADRNGAKLPVTALVDQFYKDVQAMGGKRWDTSSLLARLEK

SEQ ID NO: 8733 - protein, 520 aa, Mesorhizobium loti MAFF303099
MQWSPETLRHILATELPDAQVIVVSNREPYIHNREGDDIQLVVPASGLVSALEPITRACAGTWIAYGGGSADKLVVDKNDRIEVPPDNPSYTLRRVWLSEEEQQGYYLGFANEGLWPLCHIAFTRPIFRASDWEAYEAVNRKFADTVVAEARNERPIVLVQDYHFALLPRMIRERLPEAIIITFWHIPWPNSEVFSICPWREKILDGLLGSSIVGFHTQFHCNNFIDSVDRFLESRIEREDSAISYGGQISLVHAYPISIEWPPAQLGKLPDVAQCRRQVREKFGLAENVKLCVGVERLDYTKGILDRFNALDELLTLHPEWIGKVAFLQIAAPSRGTLPAYQQLYEECLRHAEDLNQRYGREGYTPVLMITEHHSQQQVYEIYRAADVCMVTSLHDGMNLVAKEFVAAREDEQGVLLLSMFAGASKELLDALIVNPYDAAMMGDALLQALTMSQEEQSQRMRRMREIVRDNNVYRWAGSMLLDAARLRKRDAVDRAVSAAPAAPANVISLLDRRRVAAL

SEQ ID NO: 8734 - protein, 567 aa, Mesorhizobium loti MAFF303099
MSWRRWLPLQALSGWQFSDLNGDLIAGLTLAAIAIPEQMATARLGGFAPEIGFFAFVAGSVAFALFGANRHLSVGADSTITPLFAGSLALLATSGSPHYLALAAMLALLVGLIVTLSGIFRLGWIADLLSVPVTTGFLAGIAVHIIVSQMPGLLGLPAESGETLRRVGEIAGNLHLTNPWSLGLGLGVFAIVFCSERISARIPGALIGMVLATLAVVVFGLRDHGVEVLGALPNGLPGAYLPVASLGDVQALVPLALLIAIVVMVQTAATSRSFASQPDASPDVNRDFVGVGAGSILSSLFGAFAVNASPPRTAIVSQSGGRSQLSGLIAAAIVLALGAFGGALLANVPQAALAGVLMFVAQHILRWKVFAGVYRQAPVEFVLILVTTAAIVVLPIATGVAVGIGLSLLHGIWSATRTEPIELEQVPGTSVWWPPAKPSAGEQLPGVLVAAFQAPLSFVNADRFKRGVCDLVDARDETVKLVVLEASNIVEIDYTAAQALIDTITHCRKAGAIFAIARMESLRAQAALARFGIAEMVGTQHIFHSVDAAIKSLGPGKQQQQEQDGVP

SEQ ID NO: 8735 - protein, 774 aa, Mesorhizobium loti MAFF303099
MEGENKKTARSDLDEAALYFHKHPTPGKLEIQATKPLGNQRDLALAYSPGVAAPCLEIRDNPATAADYTARANLVGVVSNGSAVLGLGNIGPLASKPVMEGKAVLFKKFAGIDVFDIEIDAPEIERMVETVAALEPTFGGINLEDIKAPECFEVEERLKARMSIPVFHDDQHGTAIIVAAAVLNGLEFAGKTISDIKVVTSGAGAAALACLNLLVSLGVRIENIWVTDRFGVAYKGRTEEMDRWKDPYVKDTEARTLADVIPGADVFLGLSAAGVLKPELLQHMAPKPLILALANPNPEIMPEVARAARPDAMICTGRSDFPNQVNNVLCFPYIFRGALDCGASAINEEMKMAAVRAIAALAREEPSDVAARAYSGETPIFGPDFLIPSPFDPRLILRIAPAVAKAACDTGVATRPITDFAAYIDKLNRFVFRSGLVMKPVFSSAKASSAKRVIYADGEDERVLRAAQVVLEEGIAEPILIGRPHVIEVRLKRYGLRIKPGVDFGLINPEDDPRYRHYVDLLIELAGRRGVTTEAARTMVRTDNTVIAALALKRGDADAMVCGLEGRFERHLRNVTLIIGPRAGIKDYDLSTLSMLISQRGIIFLTDTHVSVDPTAEEIAEMTVLAAEEIQRFGIEPKAALLSHSDFGSRDSPSALKMRQAAAILARIAPELQCDGEMHADSALSEHLRQRVYPHSRLKGEANLLVFPNLDSANITLTALRAMMDALHVGPILLGTDKPAHILTPSVTSRGVVNMTALAVVEAAHKAQAIANLD

SEQ ID NO: 8736 - protein, 341 aa, Mesorhizobium loti MAFF303099
MSAQGLPSVLAFERYDPTDASLDWLRERGVNVIFGNALWEMPFKRFTEDELIAKAHGCIALMGASGTRITRRVMQALPDLRYISKYGIGVDSIDIDAATEHGILVSSTPNDFQIFTVSEHAVALMLAVAKQLGTWTPEFMRRGGWRGLTHGATLRGATVGIVGLGRIGRGVAQRLSGWEARILAYDPFLKEAPPGIELVDFPTLVEQSDFLTLHATPSPDNHHILNAAAFAKMKPSAIVVNTGRGSLIDYTALRAALANGQIAGAALDVFDQEPPKTDDPLFSLPNVLCTPHVAAWTTEGTQAIGWHAAKNLWAMMSGEGHADIVNPQARQRRSAALLGDV

SEQ ID NO: 8737 - protein, 393 aa, Mesorhizobium loti MAFF303099
MPRPSSRISGIVPSGKDGWEVHFAAWTRKEAGEDIIMLSVGDHDFDTPSQTIEACVTAVRGSNHHYTPLPGLPRLRQAMAAASSACTGIETTPDQVIATPGGQAALYAAVQAVLDQGDHAIVVAPYYATYPNTFSAAGASFTVVETPAEDGFQPRADMIRAALRPNTRAILINTPNNPTGAVYSRERLEQLAQICREHDLWLLSDEVYWTLGGGEHVSPRSLPGMAERTLVINSMSKSHGMTGWRMGWLTGPQDMITLLINLNLVTTYGLPAFISIACAEALENRYGVKEIAERYAARRTVLLDAVRGMNNVSVRGSEGGMYVMLDISDVEPDDEKFAWALLDQEKVGVMPGSSFGEAAAGHIRISLCQPEPVLQEAAARLRRFASTYRREAA

SEQ ID NO: 8738 - protein, 593 aa, Mesorhizobium loti MAFF303099
MSNGQSERREMTGAEMVVQALKDNGVKHVFGYPGGAVLPIYDEIFQQDDVEHILVRHEQGAGHAAEGYARSTGKAGVMLVTSGPGATNAVTPLQDALMDSIPLVCLTGQVPTSLIGSDAFQECDTVGITRPCTKHNWLVKDVNELAATIHEAFHVATTGRPGPVVVDIPKDVQFAKGFYVPPQIAPRTSYQPKVQGDLEKIKAAVELMASAKKPIIYSGGGVINSGPEASHLLRELVDLTGFPITSTLMGLGAYPASGKNWVGMLGMHGTYEANMAMHDCDVMICIGARFDDRITGRLNAFSPNSKKIHIDIDPSSINKNVHTEVPIIGDVGRVLEDMVRLWRATAKADKKALYPWWEQIAKWRGRDSLAYKMNHDVIMPQYAIQRLYELTKDKDTYITTEVGQHQMWAAQHYHFEKPNRWMTSGGLGTMGYGLPAALGVQIAHPDALVIDIAGDASVQMTMQEMSAAVQYKAPIKIFILNNQYMGMVRQWQQLLHGNRLSHSYTEAMPDFVKLAEAYGGHGIRCEKPDELDDAIKEMISVRKPVLFDCRVANLANCFPMIPSGKAHNEMLLPDEATDEAVANAIDAKGRELV

SEQ ID NO: 8739 - protein, 498 aa, Mesorhizobium loti MAFF303099
MEPIVRLENVTKNYRGVPAVKNVSFDLRKGEIHALLGENGAGKSTLTKIIAGVVDATSGKMFHKGREIAYASPHAALEAGIAMVFQETSLVPSMTVAQNLYLGTEKFLNRLRGTYIAAQQFLQSLNFPVDPNAMVATLGAAKRQMVEIARAVHHNAEIIIFDEPTATLTPEEKRHFFALIRRLKASGVSIVFISHALEEALAIADRITILRDGELVITDDTSAFDRDKIVAAMVGRTLSGQIYRQRDEARLRKAGKKVLSVQDISMSNVVRNNSFSIFEGQITGVFGLIGSGRTETFKIVSGIYKRDFLRGGAIELDDRPVRYLVPSEAVADGIVYVTEDRKSEGIFETMGIAENLFGGLLAAGREKAWVINQQEMRQLSAQWTKTLNIKAINDNARVVELSGGNQQKVVIGKGLVQQPRIVIFDEPTRGVDVGAIAEIHQIINRLADEGLAVVVISSYLPEIMNLSDRILVCRQGRIVEEYSPAEATEEKIMYAAVH

SEQ ID NO: 8740 - protein, 70 aa, Mesorhizobium loti MAFF303099
MATGTVKWFNATKGFGFIQPDAGGADVFVHISAVERAGLSTLVEGQKINFEIEQDRRTGKSSAGSLSKAA

SEQ ID NO: 8741 - protein, 400 aa, Mesorhizobium loti MAFF303099
MAFLADTLSRVKPSATIAVTQKARELKNAGRDIIGLGAGEPDFDTPDNIKNAAIEAIRRGETKYPPVSGIVPLREAIAKKFKRENNLDYKPEQTIVGTGGKQILFNAFMATLNPGDEVIIPRPYWVSYPEMVAICGGTSVFADTSIENGFKLTAEVLEKAITPKTKWLLMNSPSNPSGAAYTQAELRALADVLLKHPHVWTLTDDMYEHLTYGDFAFKTIAEVEPKLYERTLTMNGVSKAYAMTGWRIGYAAGPVQLIKAMDMIQGQQTSGACTIAQWASVEALNGPQDFIARNKAIFQGRRDLVVSMLNQARGITCPSPEGAFYVYPSCAQLIGKKTKAGKVIDTDEAFCSELLEAEGVAVVFGSAFGLGPNFRISYATSDALLEEACTRIQRFTASLT

SEQ ID NO: 8742 - protein, 217 aa, Mesorhizobium loti MAFF303099
MADKTGTPHPLTEPGVWIERIGGRVFPPHLPALFLDRDGTINVDTDYPSDPAEIVLRPQMLPAIATANRAGIPVVVVTNQSGIARGYFGWSAFAAVNGRVLELLREEGVFVDMVLACAYHEAGVGPLAIPDHPMRKPNPGMLVEAGKRLALDLQRSLIVGDKLADMQAGKRAGLAQGWLVDGEAAVQPGFAIRPLRDSSELGDLLAAIETLGRDNRS

SEQ ID NO: 8743 - protein, 305 aa, Mesorhizobium loti MAFF303099
MSESYAFIGLGHLGGNLAPSLIRNGFAITVFDRDPAAVERLVTLGATAANSPAEAAARAGNAITCLPSPKISEAVLAGPGGLLEGLPKGGTWIEMSTNGRDEIMRLAALASAEGVETLECPVTGGVHLAAVGKITALVGGDAALYERHRAAIEAMCARSFLMGPIGSAAVIKVITNMLAFIHLVAAGEALMLAKQGGLDLAQSYHAIVASSGNSFVHETESQLVLNGSYDIGFTMDLALKDLGFALGMGKDFGVPLELASRVNAIFEKGKAAYGGGAWSTQIVKLLEDAVGTDLRAPGFPARLEI

SEQ ID NO: 8744 - protein, 68 aa, Mesorhizobium loti MAFF303099
MTTGIVKFYNGQKGFGFIQPADGGKDVFVHVSALERAGFPGLAEGQKLQFDLERDGKGRESAANLQLI

SEQ ID NO: 8745 - protein, 70 aa, Mesorhizobium loti MAFF303099
MAQTGTVKFFNATKGFGFITPDGGAKDVFVHISAIEASGLRTLVDGQKVTFDVEPDRMGKGPKAVNLRAA

SEQ ID NO: 8746 - protein, 70 aa, Mesorhizobium loti MAFF303099
MPQTGTVKFFNHAKGFGFITPDDGAKDVFVHISAVQASGLPGLEDGQKVTFDTEPDKRGKGPKAVNLSVG

SEQ ID NO: 8747 - protein, 311 aa, Mesorhizobium loti MAFF303099
MKLFAGNSNRVLAEAVARYLNIPLGKATVRRFADQEIFVEIQENVRGEDVFILQSTSFPTNDHLMELLIMIDAFMRSSAKRITAVIPYFGYARQDRRASGRTPISAKLVANMITRAGVDRVLTLDLHAGQIQGFFDIPTDNLFSVPVMARDVKAKYKQLGNVVVVSPDIGGVVRARALAKRFDAQLAIVDKRRERPGESEVMNIIGAVAGKDCLLIDDIVDSGGTLCNAADALLANGATSVTAYITHGVLSGGAVARISGSKLQELVITDSIQPTQGVLDAPNIRVISIADLMGEAISRTATEESVSSLFD

SEQ ID NO: 8748 - protein, 204 aa, Mesorhizobium loti MAFF303099
MPFSSADFRARFAAQPDAHAGDDYGDHRFNPGHPRLNQGKPLRNAAVLIPVIDHEGEATVLLTKRAEKLRNHSGQVAFPGGTIDATDASPEAAALRETFEEIGLDQHRIEIIGRMPDYVAGSGYRIAPVLGIVRPGFQLDLNADEVDAAFEVPLRFLMDPVNHKRDSRMWNDLEWFFYDMPYGDRRIWGVTAGIIRTLYERLYA

SEQ ID NO: 8749 - protein, 425 aa, Mesorhizobium loti MAFF303099
MTRRDFLVSSAMTAGLFMAARKLFPSGAYAATAAPEVTGAKLGFIALTDAAPLMIAKEKGLFAKFGMPDVEVLKQASWGATRDNLMLGGAANGIDGAHILTPLPYLMHTGKVTQNNQPMPMAIVARLNYDCQGISVAQEYAGTGVGLDASKLKDAFAAKKAAGKEVKAAMTFPGGTHDLWLRYWLAAGGIDPDKDVSTIVVPPPQMVANMKVGNMDVFCVGEPWNEQLVHQGVGFTAATTGELWKGHPEKALGLRAEFIEKNPNATKAILMAVMEAQQWCEAKENKDEMAAIIGKRQWMNVPVADIIGRLKGDINYGNGRVANGTDFYMKFWKGGVSYPFKSHDAWFLAENIRWGKFAPTTDVKALVDQVNREDLWREAAKDLGVAAADIPASSSRGVETFFDGKTFDPANPSAYLDSLKIKASA

SEQ ID NO: 8750 - protein, 394 aa, Mesorhizobium loti MAFF303099
MLHTISAFDRLGEENAFAVLARATALAQQGRDIVNLGIGQPDFKTPQHIVEAAIKALRDGHHGYTPANGLLATREAVVRRTLTTTGVEVSPEAVMILPGGKPTMFAAILMFGEPGAEILYPDPGFPIYRSMIEFTGAAPIPVPMREENGFAFSAEETLALITSKTRLLILNSPANPTGGVTPRAEIEKLVKGLEKHPDVAILSDEIYDAMTYDGETHCSLLGYPEIRDRLIVLNGWSKTWAMTGWRMGWSIWPNGDRGAHLYDKVRKLAVNCWSCVNAPSQFAGIAAIDGPQDDVDTMMRAFDRRRKVVVEGLNALPNISCITPKGAFYAFPNVSKTGWKAKKLASALLDDAGVALIGGPDFGILGEGYVRLSYANSEENILRALERIGAFLSK

SEQ ID NO: 8751 - protein, 333 aa, Mesorhizobium loti MAFF303099
MHARSLDKKPLDRQASIDSALRTVATEQAGIAALAEALENGLAAPFAQAVDMISKIEGRLIVTGVGKSGHIGSKIAATLASTGTPAFFVHPVEANHGDLGMIAKDDAIIAISWSGESKEMLGIVAYSRRFSIPLIAVTSGETSALARAADVVLLLPRTPEACPHGLAPTTSTLLQLVIGDALAIALLEARGFTPDHFRTFHPGGQLGANLTMVSEIMRVGDQMPLAVLGTKMPEAVMTLSQKKVGCVLIVDANGELAGIITDGDVARNLHRNLADVIVDEVMTRTPKTVDPQTLAGTAIALLNEHNIGALVVTRNNMPLGVVHFHDLLRIGAA

SEQ ID NO: 8752 - protein, 556 aa, Mesorhizobium loti MAFF303099
MYRYDEFDHDFVQARVAEFSDQVQRRLSGEISEDQFRPLRLMNGVYLQLHAYMLRIAVPYGTLNGKQLRMLGHIARKYDKGYGHFTTRQNIQFNWPALSDIPAILADLASVEMHAIQTSGNCIRNVTADHFAGAAADEVADPRPYAEILRQWSSVHPEFSFLPRKFKIAVTGAERDRAAIQTHDIGLHLKKNAAGELGFAVYVGGGQGRTPMVARKIRDFLPEADLLSYCTAILRVYNLYGRRDNKYKARIKILVHETGVEEITRQVEAEWQDLKDAELKLPDADIRAIQAYFAPPELADRPEGDQAVKLARLDSKGFSEWLDQNVVTHRHPDYAAVTISLKGIGEVPGDASDSQMEAIADIAEKYAFDELRVSHEQNLILPHVARADLKAVYDALVDIGLATANSNLISDIISCPGLDYCALATARSIPIAQEISQRFASLERQREIGELKLKISGCINACGHHHVGHIGILGVEKKGSELYQVTLGGSADENTSVGEIIGRGFSSEEITDAIEQIVETYLGLRLNPQEKFIDAYRRVGPAPFKEALYAGETKAA

SEQ ID NO: 8753 - protein, 330 aa, Mesorhizobium loti MAFF303099
MARTVPKILSTHPLHPRASAKLAGAGQLVIASALDPATLTGEAKNADIVIVRAPLPPALFEGAWKLRAAIRHGAGLDMIPMEAATAAGVLVANVPAVNARSVAEHVMFTALALLRQFRRVDRDLRAKGWLAGREHANANIELAGKTIGIVGLGAVGQAVGHIAAHGFDLKVVATTRSMQPAPEKVGFLSIDALVEQSDIIVLCCPLTPETRGLISRERIARMKPNALLINVSRGPVVDDDALIEALREGRIGGAALDVFSTQPLSYNHPYFGFDNVIITPHMAGITEESMMRMGVGAVGEALLVLAGKLPVNLRNPEAVDHYRQRFPLDL

SEQ ID NO: 8754 - protein, 417 aa, Mesorhizobium loti MAFF303099
MARIVMKFGGTSVADIARIRNVARHVKREVDAGHEVAVVVSAMAGKTNELVGWTREASPMHDAREYDAVVASGEQVTAGLLAITLQNMGVHARSWQGWQIPIKTDNAHGAARILDIDGAFLIKRFGEGQVAVIAGFQGIGPDNRIATLGRGGSDTSAVAIAAAVKADRCDIYTDVDGVYTTDPRIEPKARRLAKISFEEMLEMASLGAKVLQVRSVELAMVHRVRTFVRSSFDDPDAPGMGDLLNPPGTLICDEEEIVEQQVVTGIAYAKDEAQISLRRVGDRPGVAAGIFGPLAEANINVDMIVQNISEDGKFTDMTFTVPSGDVDKALAVLDRLKAEVGYDVVQSEAGMSKVSVIGIGMRSHAGVAATAFKALADKAINIRAITTSEIKISILIDGPYTELAVRTLHSVYGLDKQ

SEQ ID NO: 8755 - protein, 276 aa, Mesorhizobium loti MAFF303099
MAGLATAGVLATVDAQKAAAQAASDSLLRTVLDRGKLIVGTGSTNAPWHFENDAGELVGMDITMGRILAKGLFDDPTKVEFVMQDPAQRIPNVTTNKVDITIQFMTMTAQRSQLINFSRPYYVEGVALLTLPTAENKTFDKLLAGGSATRISILQNVDAESSVHYALPQAQVLQIDTQANVLQALESKRADAAAVDLSTVRWLASRNPDKYFDAGKSWYSMLYGAALRQGDLDWLTFVNQTFTIAMFGHESALYDAAFKDYFGQEPPARHPGFPVI

SEQ ID NO: 8756 - protein, 392 aa, Mesorhizobium loti MAFF303099
MSDSIVIASAARTAVGSFNGAFAATPAHELGAVVIKELLSRAGVEAAEVDEVILGQVLTAAQGQNPARQASIIAGLPKETTAWGLNQVCGSGLRAIALGMQQIATGDAKVIIAGGQESMSLSPHAEHLRAGVKMGDYKMIDTMIKDGLWDAFNGYHMGNTAENVARQFQITRDDQDQFALASQNKAEAAQKAGKFKDEIVAFTIKGKKGDTIVDQDEYIRHGATLDAMTKLKPAFDKDGTVTAANASGINDGAAGALLMSEAEAARRGITPLARIASWATAGVDPAIMGTGPIPASRKALEKAGWSAGDLDLVEANEAFAAQACAVNKGMGWDPSIVNVNGGAIAIGHPIGASGARVFNTLVYEMRRRGAKKGLATLCIGGGMGVAMCVEAL

SEQ ID NO: 8757 - protein, 533 aa, Mesorhizobium loti MAFF303099
MAPRVLVSDKLSPTAVQIFKDRGVEVDYLPDLGKDKEKLLEVIDQYDGLAIRSATKVTEKLINAATRLKVIGRAGIGVDNVDIPAASRKGIIVMNTPFGNSITTAEHAVAMIFALARQIPEANASTHAGKWEKNRFMGVEITGKTLGVIGCGNIGSIVATRGVGLKMHVVAFDPFLSDKRAEELGVEKVELDELFARADFITLHTPLTDKTRNIIDAGAIAKMKNGVRIINCARGGLIVEADLIAALKSGKVAGAGIDVFEVEPAEQNALFGMENVVATPHLGASTAEAQENVALQVAEQMSDYLIKGAVSNAINMPSITAEEAPRLKPFVKLAEVLGAFVGQVTEDPIMEVEILFDGSTATMNTRALISATLAGLIRPQVSDVNMVSAPIMVKERGIIVAEVKRDKSGVFDGYIKLTVKTEHRTRSIAGTCFSDGKPRFIQIKGINLDAEVGQHMLYTTNADAPGIIGLLGTVCGENGVNIANFQLGRNRPGGDAIALLYLDAPFPEKVLEQVRAHKSIDSAKRLQFDVGGI

SEQ ID NO: 8758 - protein, 642 aa, Mesorhizobium loti MAFF303099
MNPNYRNLALWAIIAVLLIALFNLFQTPQTRGASSDVPYSQFLQDVAAGRVKTVTIAGARITGTYTDNSTGFQTYSPGDPQLVSRLQDKNVTINARPEADGSNSLFGYLISWLPMILILGVWIFFMRQMQSGSGRAMGFGKSKAKLLTEAHGRVTFQDVAGVDEAKEDLEEIVEFLRDPQKFQRLGGKIPRGVLLVGPPGTGKTLLARSVAGEANVPFFTISGSDFVEMFVGVGASRVRDMFDQAKKNAPCIIFIDEIDAVGRHRGAGLGGGNDEREQTLNQLLVEMDGFESNESIILIAATNRPDVLDPALLRPGRFDRQVVVPNPDIVGREKILKVHVRNVPLAPNVDLKVVARGTPGFSGADLMNLVNESALMAARRNKRLVTMAEFEDAKDKIMMGAERRSSAMTQAEKELTAYHEAGHAILALNVPSADPLHKATIIPRGRALGMVMQLPEGDRYSMSYKYMISRLAIMMGGRVAEEFKFGKENITSGASSDIEQATKLARAMVTRWGFSDKLGHVAYGDNQEEVFLGHSVARTQNISEETAQIIDAEVRRLIDEAYSTAKSILTKKKKEWIALAQGLLEYETLSGDEIKQLIAGEKPARDLGDDTPPSRGSAVPKSGGRRKKGPEPEGGMEPQPSS

SEQ ID NO: 8759 - protein, 599 aa, Mesorhizobium loti MAFF303099
MAQSSSADERRRSLKPLRRLFPYIAGYRTLVVGALISLAIAAATTLTLPLAVRRMIDHGFSSSSTTFIAEYFAALVAMAAVLAAASAGRYYFVITLGERVVADIRRDVFAHVTTLSPAFFDTAQSGEIVSRLAADTTQIKSAVGATASVALRNVILGLGAVGMMVVTSPKLSGLVIAAIPVIVLPLVAFGRSVRRKSRQAQDTLAEATAYASEQIGAVRTLQAFTNEKLVTGRFSGAVEAAFEAARASIFARSFLTFFAIFTIFSSVVAVLWFGSRDVLEGTISPGTLGQFLLYSVFAAGALGALSEVWGELAQAAGAAERLTEILAENPAIQAPAEPKPLPTVAKGAIVFDDVSFSYPARPDRAAVHGLSFQVMPGETVAIVGPSGAGKSTVFSLILRFYDPETGKILIDGVDVREADPVSVRERIAIVPQDVTIFAASARDNIGFGRPGAGNTEIEAAAKDALADEFILKLEHGYDSQVGERGVTLSGGQRQRVAIARAILRDAPILLLDEATSALDAESETLVQTALERLMQGRTTIVIAHRLATVLKADRILVMDGGRIVEEGTHQSLVAKGGIYARLAKLQFETGASAFRGAAE

SEQ ID NO: 8760 - protein, 531 aa, Mesorhizobium loti MAFF303099
MAVTVSRESDSVATPTQRALKEAFYAGAIALGLFVLFIGLKTGQNMSNELVLTQRWGLLAAVVIATAVGRFLYVAYGQPFMANQKIANVATGLLPASVGSRFFTLPAFIVAVVAAVVLFVFNNSLAGWVGAEPAGYLQFLRALAIIYLLACVIYYFRAFIHANFTKLGITALVLYPILVVAVLSLNAWSIAGGLQGSLKWVDNFGIQILIYVMLAWGLNIVVGLAGLLDLGYVAFYALGAYAYALLATHYGLSFWILLPAAGCMAALWGVLLGFPVLRLRGDYLAIVTLAFGEIIRLVLINWREVTNGSAGISGIPKVSFFGLMTFNVSDPNYIAKVLHLATSSAYYKIFLYYLILGLCLLTAFVTIRLRRLPVGRAWEALREDEIACRSLGINTTTTKLTAFATGAMFGGFAGSFFAARQGFVSPESFVFLESAIILAIVVLGGMGSLVGIAVAAMVMIGGTEALRELDFLKQIFGPDFTPELYRMLLFGMAMVIVMLWKPRGFVGSREPTAFLKERRAVSSSFTKEGHG

SEQ ID NO: 8761 - protein, 343 aa, Mesorhizobium loti MAFF303099
MKFLDQAKVYVRSGDGGAGSVSFRREKFIEFGGPDGGDGGRGGDVWLEAVDGLNTLIDYRYQQHFKAKTGVHGMGRNMTGAKGADVTLKVPAGTQVFEEDNETLICDLTVVGQRFLLAKGGNGGFGNQHFKTSTNQAPRRANPGLPGEELNIWLRLKLIADAGLVGLPNAGKSTFLAAVTAAKPKIADYPFTTLHPGLGVARIDAREFVIADIPGLIEGAHEGVGIGDRFLGHVERTRVLLHLVSAQEENPGKAYKTVRAELDAYGNGLIEKVEILALSQVDTLDADARRKKVASLKRAAGRAPMLLSAVTGEGVEAVLRALMTVIAEARAEAAPVVETRWEK

SEQ ID NO: 8762 - protein, 223 aa, Mesorhizobium loti MAFF303099
MFAVIKTGGKQYRVAANDLLKIEKVEANVGDIVEIGHVLAHGEGENVTFGAPFVDGALVTAEVVEQGKNRTVIAFKKRRRQNSRRKIGHRQLLTTVRISEILLGGAKPAKKAAVKAEAKAEVAAEAAPKEAKAKKEAAPKADVTAETAAAPLFKAPKGEPDDLTVIKGIGPVAAKDLNEQGIITFAQLAKLTDKDVAKIDEHMPFSADQIKDWREQAKELAKK

SEQ ID NO: 8763 - protein, 218 aa, Mesorhizobium loti MAFF303099
MKFFVDTADIKDIRELNDLGLLDGVTTNPSLILKSGGKIADVTKQICDIVQGPVSAEVVATEYKDMMAEAEVLAKIAPNVCIKVPLTLDGLKACKTIRTQMNRMVNVTLCFSANQALLAAKAGASFISPFVGRIDDTGSDGMELIQEIRQIYDNYDYQTEILTASVRTVNHVKQAALIGADVITAPPATLKALVNHPLTDKGLAAFLADWAKTGQKIG

SEQ ID NO: 8764 - protein, 401 aa, Mesorhizobium loti MAFF303099
MAEAYICDYIRTPIGRFGGSLSSVRSDDLGAIPLKALAERNAGIDWQAVDDVVYGCANQAGEDNRNVARMALLLAGLPKEIPGSTVNRLCGSGMDALTIAARAIKAGEAELMIAGGVESMSRAPFVMPKADTAFSRNAEIYDTTIGWRFVNPLMKKQYGVDSMPETGENVAEDFAVSRADQDAFAVRSQDKAVAAQANGRLAKEITAVTIPQRKGDPVVVSKDEHPRAGTTVEALAKLPTPFRQGGTVTAGNASGVNDGAAVLIVASEAAVKKYGLTPIARILGGAAAGVAPRIMGIGPAPATQKLCARLGLTPQQFDVIELNEAFASQGIAVLRQLGIAEDAEHINPNGGAIALGHPLGMSGARISGTAALELRERGGRYALATMCIGVGQGIAIALERA

SEQ ID NO: 8765 - protein, 407 aa, Mesorhizobium loti MAFF303099
MSKTKDVKKVVLAYSGGLDTSIILKWLQTELGAEVVTFTADLGQGGELEPARKKAEMMGIKDIRIVDVREEFVADFVFPMFRANTVYEGTYLLGTSIARPLISKHLVDIARETGADAIAHGATGKGNDQVRFELSAYALNPDIKVIAPWRDWSFKSRTDLINFAEQHQIPVAKDKRGEAPFSVDANLLHSSSEGKVLEDPWSEPPEFVHQRTVSPMDAPDKVTEIEIEFLKGDPIALNGKKLSPATMLAALNDLGRDNGIGRLDLVENRFVGMKSRGVYETPGGAILIVAHRAIESITLDRGAAHLKDEFMPRYAELIYNGFWFSPERLMLQAMIDKSQEDVEGTVRLKLYKGNVMVTGRKSKKTLYSDALVTFEDDRGAYDQKDAAGFIRLNALRLRTLAARNRKG

SEQ ID NO: 8766 - protein, 638 aa, Mesorhizobium loti MAFF303099
MAKVIGIDLGTTNSCIAIMDGKEPKVIENAEGARTTPSIVAISGDGERLVGQPAKRQAVTNPENTIFAVKRLIGRRYDDPVTEKDKKLVPYKIVKGDNGDAWVEAGGKKQSPSQISAMILQKMKETAEAYLGEKVEKAVITVPAYFNDAQRQATKDAGKIAGLEVLRIINEPTAAALAYGLDKKDGKTIAVYDLGGGTFDISVLEIGDGVFEVKSTNGDTFLGGEDFDMRLVEYLAAEFKKEQGIDLKNDKLALQRLKEAAEKAKIELSSTTQTEINLPFITADATGPKHLTLKLTRAKFESLVEDLVQRTIDPCKAALKDAGLKAGEIDEVVLVGGMTRMPKIQEIVKQFFGKEPHKGVNPDEVVALGAAIQAGVLQGDVKDVLLLDVTPLSLGIETLGGVFTRLIERNTTIPTKKSQVFSTAEDSQSAVTIRVFQGEREMAADNKALGQFDLVGIPPAPRGVPQIEVTFDIDANGIVNVSAKDKGTGKEHQIRIQASGGLSDADIEKMVKDAEANAETDKKRRAVVEARNQAEALVHSSEKSLKEYGDKVSEAERTAISDAIAALKTAAEGDDAADIEAKSQALAEASMKLGQAMYEASQKEAAEADAKADAAKDSDVVDADFEEIDEDDDKKKSA

SEQ ID NO: 8767 - protein, 603 aa, Mesorhizobium loti MAFF303099
MENNRNFFITIALSVLILAVWQYFYVLPRSEAQREAARVEQQRVEEQKKAAEAANPGAGTPAPAPGTIPNAPGGDTVTVAGRDQALAASKRVKIDTPSLEGSINLTGARLDDLKLKHYTETVDKNSPEIELLNPQALPTGYFAEIGFVGNDKTGAVPGAETVWNVDGNPTLSPSTPVTLTYTNDKGLTFKRTFSVDANYMFTVSDTVQNSGSSAVSLFNYGRVTRYDKPAVASTYVLHEGLIGFTGTEGLQEHKYASIEKDKQYQPGKATDGWLGITDKYWAVTLVPTEKQPFQPRYAFFEDGRHRYQSDFLTDAINVEAGQSATVETEVFAGAKEVAKINAYAEDRHIKRFDLLIDWGWFHFITKPMFWLIDTLYKFLGNFGLAILATTVIVKALFFPLANKSYASMANMKKVQPKMLEIREKYADDKMKQQQAMMELYKTEKINPLAGCWPVALQIPVFFSLYKVLYITIEMRHAPFFGWIQDLAAPDPTSLFNLFGLIPVTLPHMLMIGVWPLIMGVTMFLQMRMNPTPPDPTQAAIFTWMPVIFTFMMAGFPAGLVIYWAWNNMLSILQQGVIMKRQGAKIELWDNLMALFKKKPSPAE

SEQ ID NO: 8768 - protein, 331 aa, Mesorhizobium loti MAFF303099
MFDPKFRKVADKIFSKSGTRLAPYSGIPTFLAAPYREIAAENPNFGDLQVAIIGVPMDLGVTNRPGSRFGPRALRAIERIGPYNHVLECAPTHELRVADIGDTPFRSRYRLETSHEDIERRTNQIVDAGVIPLSVGGDHSISHPILKAVGKKAPVGLIHIDAHCDTSGLFDMTKFHHGGPFRNAVLDGVLDPTRTIQIGIRGSAEYLWEFTYESGMTVVHAEEVTGLGIPAIIEKARKIVGDGPTYVSFDIDSVDPAFAPGTGTPEVGGLTTREVLELLRGLKGLNIVGGDVVEVAPQYDATTNTAHAGAQVLFEILSLMVFSPAITGKGA

SEQ ID NO: 8769 - protein, 365 aa, Mesorhizobium loti MAFF303099
MTDLGLYRHLDQMAPWNDRLQVLEVIGVSDEAPDVKTFTFRSDNQTWFRYKPGQFVTLELPTPDGPLMRTYTLSSSPSRPFSIAVTVKAQAGSIGTRWMFDHLVPGSHVKAYGPSGDFSLHSHPAAKYLFISAGSGVTPMMSMLRWLNDCAPWTDVGFVNCARRPEEIIFRKELELLGGHMPGLSLGFMIEERSSREGWYGHMGRIDAIRLPLLAPDFREREIFCCGPDPFMRAVRGMLEAAGFDMTKYHQESFAAPAVEEVPAPFVSPGEDGVTVPVEATPIRFALSVVDAECVAGQTVLQTARASGVRIPAACEFGLCGTCKVKKVSGAVEMSHNGGILDHEIDDGFILACCSKPLSALEIEA

SEQ ID NO: 8770 - protein, 327 aa, Mesorhizobium loti MAFF303099
MTKAEQLQAVAILVPADFSDHAVRRIDRTFKQVSIERADPALVTDEMRRMVRGIASFAGISAAMMDALPNLELIASFGVGYDSVDVGHAAAKNIMVTNTPDVLTEEVADTAIGLLINTIRDLPRAENWLRDGSWVRKGNYPLSRLTLRARRVGIFGMGRIGQAIARRLEAFGLPIAYHNRRRVEGLAYQYHPTLRGLAEAVDTLISVAPGGASTQKAVNAEILSALGANGVFVNIGRGSTVDEAALAAALADGTIAAAGLDVFADEPNVPKALLDAPNASLLPHVGSASEHTRRAMADLCVDNLVSWFTERQPLTPVPETAHVKARG

SEQ ID NO: 8771 - protein, 429 aa, Mesorhizobium loti MAFF303099
MGQTVFIPRELDANEPRVAASPDTVKRLAGLGFDVIVETGAGTRSRIPDEEFAKAGAVISKAADVGKADVVLKVRRPTEAELKSYKSGAAVIAIMDPYGNDAAVAALAKAGVTAFSMEFMPRITRAQSMDVLSSQANLAGYQAVIDGASEYDRALPMMMTAAGTVPAAKIFIMGVGVAGLQAIATARRLGAVVTATDVRPAAKEQVASLGAKFLAVEDEEFKAAETAGGYAKEMSKEYQAKQAALTAEHIAKQDIVITTALIPGRPAPTLVSAAMVASMKPGSVLVDLAVERGGNVEGAQPGRVVTTANGVKIVGHLNVPGRVAASASLLYAKNLFAFLETLVDKTTKTLAIKRDDELVKATMLTDGGKVVHPAFAKADQQPHVEPAAIPATTMVADASAAPKKPAPKKTAASKSSSPKSSSPKSKGTA

SEQ ID NO: 8772 - protein, 526 aa, Mesorhizobium loti MAFF303099
MTTLGEALITLLEAHGVDTVFGIPGVHTVELYRGLARSKIRHVTPRHEQGAGFMADGYARASGRPGVAFVITGPGLTNTITAMGQARADSVPMLVISGVNATPTLGKGLGFLHELPDQRGMMEKVALLSRRVTEASELPDALAQAFALFSSSRPGPVHIEIPTDVMVKPADDIAALLSNAAPPTPDGAAIASAAKLITAARRPLILAGGGAKRAEMALRRLAETLGAPVVETTNARGLLHRHPLCVPASPSLKAVRALMAEADLVIAAGTEFGPTDYDGYGDGGFVLPSNLIRIDIGADQLARRPVTVGIQADCAEAIEALLAAIGTAHPAAPDGEARATAARKAAFAELSPAYLAQVHAVEMIRDALPGAIVVGDSTQPVYAANLYYDHDRPGGWFNAATGFGALGYGPPAAIGAALAVPDAPVVCLTGDGGFQFTLPELGAALDAKAPVIFVVWNNRGYREIETSMLDVGVEPVGVSPAPPDFCKLAEAYGIGAERLADIGALPQALKRARATGLPCVIEITVD

SEQ ID NO: 8773 - protein, 759 aa, Mesorhizobium loti MAFF303099
MARKTENNGPSVSAQEALEFHAMGRPGKLEIVATKPMTTQRDLSLAYSPGVAVPVRAIAEDPSRAFDYTTRGNMVAVISNGTAILGLGNLGALASKPVMEGKAVLFKRFADVDSIDLEVDTEDADEFINCVRFLGPSFGGINLEDIKAPECFIIEQRLRELMDIPVFHDDQHGTAIISAAGLINALEITGRDMKTTRLVCNGAGAAGIACIELMKAMGFAPENIILCDTKGVVFQGRTEGMNQWKSAHAVKTEARSLADALDGADVFLGLSAKGALTTAMVQSMAKNPIIFAMANPDPEITPEEVAEIRTDAIMATGRSDYPNQVNNVLGFPYIFRGALDVRATTINEDMKIAAARALAELARQDVPDDVAAAYQGNRPKFGPNYIIPVPFDPRLISAIPLAVAKAAMESGVARKPILDLDRYAQELSARRDPIASTLQRIYDRVRRQPKRIVFAEGEEEQVMRAAVSYVNQRLGTAILLGRDDVIKENAKHAGIDLNKQGIEIINARLSRRNGIYTDYLYERMQRKGFLFRDCQRLINNDRNHFAACMVALGDADGIVTGVTRNYSTALDDIRRVIDAKPGHRVIGVSIVLARGKTVLVADTAVHDMPNAEQIADIAEEAAGFARRMGYEPRLAMLAYSTFGHPQGERSERVQEAVRILDKRRVDFEYDGEMAADVALNARAMAQYPFIRLTGPANVLIMPAFHSASISTKMLQELGGSTVIGPLLVGLNKPVQIVSLNAKDSDIVNMAAIAAYTAGT

SEQ ID NO: 8774 - protein, 333 aa, Mesorhizobium loti MAFF303099
MVGKKKPLVVITRKLPDPVETRMRELFDARLNVEDRPMTQPELVAAVKEADVLVPTVTDQIDAALIAQAGDNLKLIANFGNGVDKIDVAAAAKKGITVTNTPNVLTEDTADMTMALMLAVPRRLAEGANVLTGDKKWAGWSPTWMLGRRIWGKRLGIVGMGRIGTAVARRAKAFGLSIHYHNRHRVLPAVEDGLEATYWESLDQMLARMDIISVNCPSTPATFHLLSARRLALLQPTAYVVNTARGDIIDEEALVKLIQDGKIAGAGLDVYEHEPALNAKLLKLAARHKVVLLPHMGSATLEGRIDMGEKVIINIRAFVDGHRPPDRVLPLRT

SEQ ID NO: 8775 - protein, 388 aa, Mesorhizobium loti MAFF303099
MSLIDSFRAEARAAPESGIVAVVNYGRLREGLIPLWAGEGDLPTPAFITDAASKALAGGETFYTWQRGIPDLRQALARYYARHFGKTFPEEQFIVTGSGMHAIQMSLTALAGAGDEVIYLSPAWPNFDAAAALSGAVPVPVTLDHSGNGWSCDVEKIAAAITPRTRALFINTPSNPTGWTADHETLQAILDLARAKNVWIIADEIYSLFHYGHGRAPSFLDIATEEDRILFVNSFSKNWAMTGWRVGWIKTHPSLQQVFENLIQYSNSGVAQFMQRGAVAALDEGDGFVAEQVERARKARDLVCGILGATGRARFTVPQGAFYLFFTVDGITDSRTAAFDIVDKANVGLAPGTAFGPGGEAFLRLCFHRRLDQLEEAAHRLAKWMKSI

SEQ ID NO: 8776 - protein, 150 aa, Mesorhizobium loti MAFF303099
MRKLVAGKLHGIHVTEANLNYHGSITLDPDHCEAAGILPMEFVEIWNKNSGARISTYVILGERGSRCCILNGAAARTCQPDDPIIVCNSIYLDEAHITSLKPRIVTFDQDNHILDRLSYSVDIDTDGRYSFAILDEADEPLVIPALVSGA

SEQ ID NO: 8777 - protein, 418 aa, Mesorhizobium loti MAFF303099
MRPVYLDNNATTRVDPEVVQAMLPLFTDQFGNPSSSHDFGASAGAAVRKTRLQVQTLIGAEFDDEITFTSGGTESDNAAILSALEVMPERTEIVTSAVEHSAVLTLCAHLEKTRAIKVHRIPVDRHGRLDLDTYKAALTPRVAIVSIMSANNETGTIFPVVELAELAKEVGALFHTDAVQAVGKLAIDLKSTAIDMLSLSGHKLHGPKGIGALYIKRGVRFCPLIKGGGQEGNRRAGTENTPGIVGLGVAADLALNFMDDANTRVKALRDRLEKELLQSIPDAFVAGDLLKRLPNTANIAFGDIEGEGILHFLNREGIACSSGSACACGSLEPSHVLVAMNIPNNAAHGAIRFSFSRNNGEEDVDRVLEVMPGIVKKLRELSPSASQARELQSTPGLGDKANPTTVSGPGECNAQLFR

SEQ ID NO: 8778 - protein, 396 aa, Mesorhizobium loti MAFF303099
MLAHRTNLFGTSGTAAARAAAKAAADAGKEIIDLTAGEIWSELAPTIRDGAIDAINKGVNRYTDTVGMVELREALARKISLDTGQIWKAEEVAVTSGAKQALFNAAMVLLNPGDEVIIPAPYWTTFPAQVLIAGGTPVFVDTRSNGYVPRPEHIKEAVTERTRAIVVNTPSNPAGAVYDVETLMAIAQLAVSHNLWIIFDECYGDFVHEDHTHHPIVSVAPEIRARALIVSSFSKSLALTGWRIGYLAGPKEVINAVNALQSHTTSNPNVIAQHAVLAHLQRGGSDYEGKLRSRLTSARRIGLDVLAWLTRVPVPRAQGGFYFYLDLSHLLRSASEDGASTTADDIVTALLAETGVAAVSGAAFGDPAGLRLSYGIPSEKLATGLARLVEFLNSWK

SEQ ID NO: 8779 - protein, 630 aa, Mesorhizobium loti MAFF303099
MCGIFGIVLKNEGTPVCAAAVERCADALAHRGPDASGLYINQSVAFAHRRLSIVDAHSRANQPYRDANTGVVVTYNGEIFNYREIRTELRDMGFFFSTVSDTEVLILSYIAWGKSFLNRLDGIFAFALFDPRNSLVLIARDRLGVKPLYYTICDVGLLFASQPNALIRWPGVMRGPDMIGALSFLSYRAVVGARTLFAGISKLEPGHLLEIRNGRHTSERWWNLSERISRCKPDYSDIRRLLGSAVERQLVADVPVAALLSGGLDSSILAYEASARSQIRPICYTGKVETADYDETAYAMEVAAEFGLTHRVVPIGEPSDIYAVSELVRLRGHPLGMHNEIAMFTLAKAISKEHKVVLTGEGADEIFAGYSRLFRTPYDYNRSKIIAALPRALAQVARRRLGLDVHGSQLQFFLARYSYFPTDEIRSLVIDGRVRREHEMALFDHFSTQFAEAGGDFFSKISYVLVSTHLPALLEMVDNTTMAAGLEARVPYTDHQLVTAAMAMPGSQRLRWRSPIASVQALWHPVASFSERLDVSKFPLRREYRSVLPRSVLSRKKMGFPLPLGQWAVGEGATEYRRLLFDKDSPLGDLFDPAALRRWFEAGRRNPSDSFGRKFWLLANLGIFFKEVFS

SEQ ID NO: 8780 - protein, 68 aa, Mesorhizobium loti MAFF303099
MESEGTVKWYNPQKGFGFIAPENGEKDIFVHATALTRSGLSMLMEGQKVFVQCGQGKKGLEVRSIRLA

SEQ ID NO: 8781 - protein, 70 aa, Mesorhizobium loti MAFF303099
MAIGTVKWFNSTKGFGFIQPDNGGQDVFVHISAVERAGLSTLTDGQKINYEVEQDRRTGKSSAGNLSKAG

SEQ ID NO: 8782 - protein, 401 aa, Mesorhizobium loti MAFF303099
MTDAILVLNGGSSSLKFAVFERHGELALLLRGNVSSLGQQPRLRVDAAAGRSKIDRSLDEAPIGMGKAFAAVASVLAENDLLRRIDRVGHRIVHGGRDFTEATLLDERTLKALRLLEPLAPIHQRINLEIVALAAELLPQALQIGCFDTAFHSTRPELAKIYGLPRAMTEAGIVSYGFHGLSYSHIAAKLHDRYGAGAGGRTIVAHLGSGASLCAMDAGRSVATTMGFSTLDGLVMSTRCGALDPGVILHLLRERRLSGDELVTLLYEQSGLLGVSGVSGDMRTLIASDDPAAAEAVDLFVYRIGREIGSLAAAMGGLDTLVFTAGIGENAPLVRERICVAAAWLGIGLDEERNQGGGELVSNATSRVDVLVIPADEESAVAAEMLVFRSAAPPSTGEGLR

SEQ ID NO: 8783 - protein, 503 aa, Mesorhizobium loti MAFF303099
MIKTIDRFLDHLTMYRLVLYYLMALVGAAFVLGFVRLVPHDPIALAFTTALALAACWITNKVFARIFAVPANKESVYITALILALILDPVAVTDIKGIAAVAFASVWAISSKFILAIGRKHLFNPAALGVALSALLLDQPATWWVGGNLPLLPLVLVGGMLIVRKLRRLYLVSTFVVVALATILATTDPSQYWTALAETLGSSPLLFFAFVMLTEPLTAPTMRWPRIAFAAIVGFLFAPNIHIGSFYFTPELALLAGNLFAYAAGPKGRFVLTLERIEQSAVDSFDFVFRSPRKLAFEAGQYLEWTLGLDRADNRGNRRFFTVASAPTEETVRLGVKFYPQSSAFKRELMTMKPGSTIHAAQLAGNFTLPARRETKIAFLAGGIGITPFRSMLQYLLDRKERRPIVILYGTEGQQDIAYREVLGAARQELGIKTIHAVASGGERGQYPGYIDERLIRLAIPDYLERTFYISGPQAMVKALRQKLLAMGVRRPKIKVDYFPGFA

SEQ ID NO: 8784 - protein, 675 aa, Mesorhizobium loti MAFF303099
MCGIAGIVALNAAAASPSREALMRMVGTLAHRGPDEHGLYRDKRAGLAHARLSVVDLSSGQQPLADTGDTSWIVFNGEIFNYVELREKLIALGHRFRTRSDTEVALHAYRAWGEAAFERMNGQWAIAIWDSIAGRLVLSRDRFGICPLHFCEHAGRLYFASEVKAIFAADPTIPRAFDPAGLDQTFTLWTVVPPQGVFQGIHELVPGHVRIYQDGTVREQVFWQPSYPENIGALQGEFTGSCDDAVDRVRDALEAATALRMVRADVPVGCYLSGGLDSSLVATLGRRFAGRRFQTFSLRFADAEYDETRFQRLVAEATGSEHHEVVVSRGDIAAIFPEVIHHTERPILRTAPAPLFLLSRLVRERGIKVVLTGEGADEMFAGYDLFREAKVRRFWGRQPASTRRSRLLERLYPYLTRSPVQQQAMARQFFGRGIEAYDAPGFAHDTRWRSTGAIKRLFSADLRAESQRRDAVSELLARLPAAFSRWSHLAQDQYLEVQTLMSGYLLSSQGDRMLMAHSVEGRFPFLDDELVRLANSLPPSYKLRVLDEKHVLKRVAQPIVPSEIVTRKKQPFRAPNALCFAADAAPEYIREALSETAIRKANVFDPVSVTRLLDKCQARTGDGDLSNADNMALVGVLSTQLLHQQFVASCPSATHVRGLSVDVDREHREERLHVA

SEQ ID NO: 8785 - protein, 665 aa, Mesorhizobium loti MAFF303099
MCGIAGILLAPDAANTNALRAIGPMMMALRHRGPDGEAFWMSREAGIAFGHRRLAIVDLSEAGRQPMHSASGRYVITFNGEIYNFRDLRRELEGAGHHFRGTSDTEVMLCAIESWGLEAALARFAGMFAFGLWDLKNRTLHLARDRMGKKPLYVASTPEALVFASELKAITCFPGFTPELDVDAAATMLSKGWVPDDRCIWQGVFKLPPGSVLSVTAADFANARGAGSLAHRIRRWWSLADVACKAQRDPIAGSDEDLTTELDSLLRLAVKERMVADVPLGAFLSGGIDSSTVVALMQAQSPTPVRTFTIAFGESGFDEAPHAAAVARHLGTDHTELHLSPAAALEVIPELPRIWDEPFADESQIPTLLVSRLARRHVTVALSGDGGDECFAGYSRHFLATRLRRQHELPSSFRRMLAAGAGLLAQASQKDIFGSLPLSANMRHGLRGDRLNRLARLFAAANEDQLLQRLTESSTNKLIHHKPAASNASATQLDGLLSRLLFDDMTGYLPGDILVKLDRATMANSLEGRCPILDHRVVEFAWRLPTDAKVRSGKGKWILRQLLDRYVPRRLVDRPKQGFDVPVGAWLRGPLRDWATDIIATTRLSGDGVIDCAKVDACWRDHLHGNQDHFRDLWPLLMFQAWRNDAMRPSAPATHASYDIELTGD

SEQ ID NO: 8786 - protein, 310 aa, Mesorhizobium loti MAFF303099
MRCKIVGAPVQDGAGRMGCEMGPSALRTAGLAEVLSGLGHTVEDMGAVQPMPARRVVHGNLALKALPEISAWTSAIAAAAYAASEDAMPIFLGGDHSISAGTVSGLARRAAEAGRPLFVLWLDAHPDFHTLDTTASGNLHGVPLAYASGQPGFSGYFPDLPAAVDPKRICTMGLRSVDPAERSALNQAGVTVHDMRAIDEHGIAPLLRAFLARVSDEDGLLHVSLDVDFLDPSIAPAVGTTVPGGATFREAHLVMEMLSDSGLVSSLDLVELNPFLDERGRTATLMVDLTASLMGRRIMDRPTRSHSGSF

SEQ ID NO: 8787 - protein, 631 aa, Mesorhizobium loti MAFF303099
MMSTRDDDEKDDKSGRPTKAVVGSHRDEEEVFGKAYDPRIIRRIWSFVRPYQGRIFISVAAVLVFTLTQLAIPLVIRYAIDHGMAPGRLDRSVMISAIITFTVIILINYAASYVQESVVGKVAENVLSDLRRAMFSHLQLVSLSFMDKTEVGRLMSRLQGDVNSMQEFLETSVMSVGDIVLLFGIVTVLLWLDFRLGLLTLSTMPMLFIVRLFWLPRAKVAFMAAHETNSIANGALAEGIHGVRTVQSLERQHVNFDLYDEKVLANLNAHLRSARYAQVMVPIVDTLTGMAMATVIVVGGSMVLSHSLDVGVMVAFLFYIQRFFDPIRSLTMQYSVMQRAMASGQRISEVLDVPVDVSDKDNAVALSRETDGSVEFRNVTFGYRPNQPVLKNISFRVNPGETVALVGPTGSGKSSSMALVHRFYDVWSGQVLVGGHDVRDLTQDSLGDQVAMVLQEPFLFSGTVLENIRYHKTGASRDEVVRAAQAVGAHDFIEQLPDGYDTQLEQRGGNLSLGQRQLISFARALVADAKILVLDEATASIDSYTEMLIQKALIKLLEGRTGLVIAHRLATIRGADRIIVLQNGEIVESGNHEQLMQRKGLYARLYNMNYASFDDISEEEMGMDAALGKAT

SEQ ID NO: 8788 - protein, 548 aa, Mesorhizobium loti MAFF303099
MTKGSDLFVAALENEGVDRIFGIPGEENLDIVESIRRSSIQLILTRHEQAAAFMAATYGRLTGKAGVCITTLGPGALNLTTGAAYALLGAMPMIMITGQKGILSSRQARFQIVDIVAAMKPLTKLSRQIVSPKMIPSLVREAFRVAQEERPGPVHLELPEDIAAAECEPVALVPTHPVELPLASPGALDRAARMIMEAKHPLLMFGAAASRPRVTPDVAQFVLRTQIPYFTTQMGKGTVPGGTELYMGTAALSERDYVHEAIEQADLIITIGHDTVEKPPFIMGANGPKVIHVGYHSADVEQVYFPQAEIVGDLGPSLALLADRIEGKIPNAQALLPLRENILSRIAARATEDRFTPQRIVHDVRAVMPADGILALDNGMYKIWFARNYRTRMANTLLLDNALATMGAGLPSAMMASLLFPTRRVMAICGDGGFMMNSQELETAVRLKLNLVILLLEDHAYGMIRWKQAVDEFPDFGMTFGNPDFVKYAEAYGAKGTRVTEIADLRPALERAFTGGGVHLVVVPIDYSENTRVLVDELRERLPAPRTP

SEQ ID NO: 8789 - protein, 327 aa, Mesorhizobium loti MAFF303099
MIDLIGYGAFFLTTALIFSLVTLGLNLQWGLTGLFNVGLAGFVAIGAYTSALLTTPDDAARLGGFGLPILVGWLGAMVVGGIAAALTGMATLRLRSDYLAITTFGVAVVVQLVALNAQKLTGGPFGIGFIPRPFGSLAETPLLFNLSNLAVVCAVTLIAYLALEHLSRSPWGRVLKALREDERAAISLGKSARFYRVQAFAVGGAIMALAGALQAHFTGFIAPDNYLPILTFQVWVMLIVGGSGSNFGAVIGSILVWGIWAGSGTLTSVLFAPEQQARAASLQIVAIGVMLCVILLIRPNGLFGDRPRRPRFGKRAKAAAIKSSSGS

SEQ ID NO: 8790 - protein, 472 aa, Mesorhizobium loti MAFF303099
MGTDMTAAVETAQTTTIHGDRVSLLRVLGPAHVWALGVGIVLVGEFTGWNFAADKGGALAALIVCWVVGLLYTSVAMIDSEVTSTVAAAGGQYAQAKHIVGPLMAFNVALFLVFAYTMLEVSDAILLGDTIVSKAGVEGLTHNSFIAATIVVLAWLNYRGVLMTLNVNFVITAIAYVSIVILFFSVSPWTQGAVLKLNELVTPENALPYGWIGVIAAFQFGIWYYLGIEGTTQAAEEVRSPARSLPYGTMAGMITLLIAAAMTWYVCASLMPWEYLGITYYPLWDAGKLTGSPLLENLLFIATLLAALASANGCINDAARAWFSLGRDRYLPSWFSAVHPKYRTPYRSILFLLPIALAFAFIADLNQAITFSILSGVLQYTFMSINIMMFRKKWPLDTIRRGYTHPFHPLPAIVLFCLCVVTFFAIFLGFGSQLIAMTIFYFLISLWFHFYRYKFVRRGDQFTMPWPKPQGY

SEQ ID NO: 8791 - protein, 310 aa, Mesorhizobium loti MAFF303099
MERGMTDIETAETPATHSGFVALIGAPNAGKSTLVNQLVGAKVSIVTHKVQTTRAIVRGIATHDNAQIVFVDTPGIFKPKRRLDTAMVTTAWGGAKDADIVLLLIDAERGIRGDADAILERLKDVRQPMALILNKVDRVKHETLLALSAAANEKVPFKRTFMVSALTGSGCKDLLDYLAQALPAGPWYYPEDQISDLPMRQLAAEITREKLYLRLHQELPYSSHIETEKWEEKPDGSVRIDQTIYVERDSQKKIVLGHKGETIRAIGQAARMEIAGILEQKVHLFLFVKVRENWGDDPERYREMGLEFPH

SEQ ID NO: 8792 - protein, 344 aa, Mesorhizobium loti MAFF303099
MTETLATDDDREELDLLLRGFQVSRMLRLIADLGVADKIPTDGQVTVKDIAAACAVLPEPMLRVLRALAAFRIFEVTADGSVAHTPRSRLLRTDTLNSLHHAARFWTGPGSWGAWNKLDVAMTGGTPHEAAWSTGRFAYLKQHPDEARLFDAMMANFPDNRHAAVAAAYDFSGASLIADIGGGNGAALRQILARFSTPRGLVFDREDVITAVTSNDLMQGRITVQGGSFFDQVPCGADIYMLIRVLHDWPDEDCLRILRACRAAMGPQARLLLGEQILEPDPARGRATGYLIDVQMMTMFGDARARSEAEFRGLFDQSGFSLRQVIPTASPVSIIEAAPIAGPF

SEQ ID NO: 8793 - protein, 69 aa, Mesorhizobium loti MAFF303099
MSTGTVKWFNATKGFGFIQPDDGSADVFVHISAVERAGMRDIVEGQKLGYEMVRDNKSGKMSADQLKAA

SEQ ID NO: 8794 - protein, 436 aa, Mesorhizobium loti MAFF303099
MSAMSNIWSNWSGFVTAEPRLIASPADAGELGDLVRTAPGPVRVVGAGHSFTPLVKSQGTILSLEKLEGLVSHDPQKHQARVKAGTRLGPLMHILQGIGQGLPNMGDIDRQAIGGALGTATHGSGPTLGAYHTQLETVQIVDGLGKVRDFTRAGDQDMIHAIGVALGAFGVLSEVTLNNIATYRLRRRKWVLPIGDMLRDFEKMMTAHRSAEFYYIPFSGYAQFIASDFSTEATTTRPTDDDEGSLRTLRRLRTGLAWLPSLRRRLILGAVAKVPSEDYVQDWLNVYASDRQTKFNEMEYHLPFEEGPKALAEIIELTEKRFPEVYFPMEVRSVAPDKFWLSPFYNRPTCSIAIHHDAASDPLPFMQAAEPIFRRYGGRPHWGKMHSLKAADFKKLYPRWDDAMAVRRDIDPQNRFVSPYMAGLFGIEPSPFGIDP

SEQ ID NO: 8795 - protein, 335 aa, Mesorhizobium loti MAFF303099
MATKNIDHAFTARSKTGGALEPTYSGALSFMRRKYTKDVKGADAVVWGIPFDAAVTNRPGARFGPQAIRRASAILDNDPQYPFSRDLFEHLAVVDYGDCLLDSGNHQKTPGTIEREAAKILKSGAFLLTLGGDHFVTWPLLKAHAAIHGPLALVQFDAHQDTWEDDGKRIDHGSFVGRAVKEGIIDPDRSIQIGIRTHAPDTFGIKILYGHEIEEMRASDIAYAIVDRTGGKKTYLTFDIDCLDPAYAPGTGTPVAGGPSSAKILSTLRQLNQVDIVGADVVEVAPAYDHADITAIAGSMVAMQYLGLLAERKARQEEMNNGNHNGAAVNHGNGI

SEQ ID NO: 8796 - protein, 254 aa, Mesorhizobium loti MAFF303099
MSEPLLVLDNVTKNYGAIEALKGISFSIGKGEVVALLGDNGAGKSTLVKIIAGGLEPTSGRMLFEGREFLARSPAEAKAAGIETVYQDLSLCTNVDVVANFFMGREITRKVFGIPVLDERAMEAVVGKALASAGTRIPSLRTNVEHLSGGQRQAIELNRFVHWGGKLVLLDEPFAALGVEQTRRGLDMIRQVASQGIGVVIITHIMQQAFQVADRIVVIRQGVVAGDVARNKTSPDAVINMITGETLAGAGPAG

SEQ ID NO: 8797 - protein, 371 aa, Mesorhizobium loti MAFF303099
MRVGCPKEIKNHEYRVGLTPGSVREYVAHGHEVLVETGAGAGIGADDNAYRAAGATIAKTAADVFAKSDMIVKVKEPQPNEWVQLRDGQILYTYLHLAPDPEQTKGLLASGVTAIAYETVTDDRGGLPLLAPMSEVAGRLSIQAGATALQKANGGRGVLLGGVPGVLPGKVTVLGGGVVGLHAARMAAGLGADVTIIDRSIPRLRQLDDLFAGRVHTRYSTVEALEEECFSADIVVGAVLIPGAAAPKLVTREMLSGMKKGSVLVDVAIDQGGCFETSHATTHAEPTYEVDGVIHYCVANMPGAVPVTSAHALNNATLHYGLQLADKGLKALVDDHHLRNGLNVHKGKITNRAVAEALGYELVEPKAVLAA

SEQ ID NO: 8798 - protein, 150 aa, Mesorhizobium loti MAFF303099
MRKIVAGKLHGIHVTEANLDYHGSITLDPDHCEEAGILPMEFVEIWNKNSGARISTYVILGERGSRCCILNGAAARTCQPGDQIIVCNSIYLDEAHITSLKPRIVTFDQDNNILDRLSYSVDLDPDGRYCFSILDEADEALAIPALVSGA

SEQ ID NO: 8799 - protein, 415 aa, Mesorhizobium loti MAFF303099
MLSQRMSLLSGPGTVAAQEPAELAQLAAAAGRQIIDLAAGEIIIETPLSVREGAIAAINAGTNRYTDAIGLTLLRKAVAEKLAAQTHVGWNLEDIVITAGAKQALLNAALAVLDPGDEVIIIRPSWPTFASQILLAGAKPVFVDSRPSTYIPNIGAVRDALTQRTKAIIVNSPNNPTGIIYDPTTLRAIGDLAIDHHLWIVSDECYSCFVFAGRHESIVTAHPGVRSRTILVNTFSKELAITGWRLGYLAGPPEIVAAAKKLQSDMTSNANVIAQHAVLHHLEVGDCSFERKMHQRLSKARHTGLRILAGLEGVTVPRADGTFFFYLDLKRLISELSAEGPVRSADDIARLLLDETDVATVAGGFFGDMNGLRLSFGVPQDLLELGLKRVVETLNSLKTRQPSKGRVTKAHDPEK

SEQ ID NO: 8800 - protein, 368 aa, Mesorhizobium loti MAFF303099
MEIVDLTAGEIWSELARMIRQGAIEAINKGVNRYTDPVGTTELREALARKVSLETRQIWKAEEIAVTCGAKQALFNAAMVLLDPGDEVIIPVPYWTTFPAQVLIAGGKPIFVDTRSNGYVPRIEDIEAAITERSRAIVINTPNNPTGSVYDTQTLTGIAQLAIARDLWIIFDECYADFVHGDEAHRPIVFLVPEVRSRTLIVNAFSKSLALTGWRIGYLAGPKEVIDAVKALQSHTTSNPNVVAQHAVLAHLQRSDGSYEAGLRAQLASARQVGLSMLSSLTQVPIPRAQGGFYFYLDISKLVWSARRENVTRAPDEIVSALLTDAGVGVVSGSVFGDPAGLRLSYGIPTDQLVSGLARLTRLLNSWN

SEQ ID NO: 8801 - protein, 520 aa, Mesorhizobium loti MAFF303099
MTGIALSPIGALWGIVGAKTHGTVEMGAALTHRGCYMAMEEGPTFSFGARHSAEIWPISVDDDIAVVYSGFPFVVDEETRTPRYLSAEDIRTEFLRFGADFFRVLCGHYAIAVYCYTRHRLILVRDAFGVQSLSWASSNENFAFSTEYKALLSLPWVERNLDHDAARGFVDDGWAPAGRTFLRHISMVLPGSILIWQNGNLETIHLRQDLCKTRPPFRPISVRHVEMTVRETIGWQANDFSPRYGVMLSSGVDSAVIAATLRRIRRDSEIHTFTVGYGYDDPEIIGASATASVLGTQHHEIIVRPDALTALLTDTIVAVDNPGGYEEFPCLYALHQEARQFVDIIFSGNAADTLFAGMPYHRDLLSTDDAIYRRLCNDLTVRDERLAAQELLAGRHGLNFRMPYAERILIDLALEIPDFQKLSPENDKIIFREAARQILPDEITMRPKRIQHLLYDDSMCSWLAERIEWICSSSLLRTHSLGELEGAAILPPRNLELTEESFKAAWNVVALATWASIYLA

SEQ ID NO: 8802 - protein, 69 aa, Mesorhizobium loti MAFF303099
MTTGTVKWFNSTKGFGFIQPDSGGADAFVHISAVERAGMREIVEGQKIGYEMERDSKSGKMSACNLQAV

SEQ ID NO: 8803 - protein, 275 aa, Mesorhizobium loti MAFF303099
MLGFQTATDVTNFRRSVRATGSTTFDINGAAKSNGRTVLSRSFPIGIDVDAFARMANDAASDVQIDSMRRQILGLKQIIGVDRLDYSKGLPGRIQAFARLLERHPEHERTVTYLQIAPPTREEVGAYAEIRAQLEATAGSVNGKYADLTWTPIRYIHRTVPRSRLAGLLRASQVGLVAPLRDGMNLVAKEYIAAQDPADPGVLVLSRFAGAAEELAHSLIVNPYVVDEVADAIAKALGMPLEERIARHGALIERIRRNDAAQWRKSFLEALADSS

SEQ ID NO: 8804 - protein, 152 aa, Picea glauca
MAMDPSLITVQHLLGVPDDLEKLLNAPTHSYMRDTKAMASTPVDVKEYPNSYVFIIDMPGLKSNDIKVQVEDENVLNISGERKRNEKDEEGEVKYIRMERRVGKFMRKFTLPADCNLEAISAACQDGVLTVTVPKLPPPEPKKPKTIEVKIG

SEQ ID NO: 8805 - protein, 669 aa, Cronartium ribicola
MSRTGPLRGSGFNRPLWAGLLSTAIMLAFGTQTYAQSNSTANLGSVIGIDLGTTYSCVGVQERGRVEILTNDQGNRITPSYVAFTTDGDRLIGDAAKNQAPSNPTNTIFDAKRLIGRKFNDPDVQRDIKLYPFKVVKKGDKPAIQVEVKGEKRTFTPEEVSAMVLGKMKETAEAYLGRKVSNAVVTVPAYFNDAQRQATKDAGTIAGLNVLRIVNEPTAAAIAYGLDKTKGERQIIVYDLGGGTFDVSLLSIDEGVFEVLATAGDTHLGGEDFDNRLIEHFIKLWKRKHDGEDITTNLRTMGKLKRDVEKIKRTLSSQQSARIEIESFFNGKDLSETLTRAKFEELNIDLFRKTMKPVEQVLKDANVKKDAIDDVVLVGGSTRIPKVQELLKEYFNGKEPSKGINPDEAVAFGAAVQGGILAGEEGNEDLVLIDVCPLTLGIETTGGVMTKLIDRNTVVPTEKSQIFSTASDNQPTVLIQVFEGERTMTKDNHQLGKFELTGIPPAPKGVPQVEVTFEVDANGIMKVSAADKGSGRVESITITNDKGRLSQDEIDRMVKEAADFADQDEALKKKIEARNAFENFIYTMKNQVADKEGLGGKLESDDKKTIQDELKKAQEWLDENTTTATAEDFDEQREALQAVISPITSKLYASGGGGGDDPLGSHDEL

SEQ ID NO: 8806 - protein, 388 aa, Mycoplasma pneumoniae M129
MRLNKLRHAKSKKDFPLFHLKCSLKMAKLKWKSGWPNLRKNLINVKPSKVKRSSANCANNMDRHNHVVFSLSKTHDLVSRICQKLKMPMGLITHNEFADGETYIRFEESVRNKDVFIFQSTCAPVNDSLMELLIAIDALKRGSAKSITAILPYYGYARQDRKTMGREPITSKLVADLLTTAGVSRVALTDIHSDQTQGFFNIPVDTLRTYHVFLTRTVELLGKKDLVVVSPDYGGVKRARLIATSLELPLAIIDKRRPAHNVAESINVLGEVANKNCLIVDDMIDTGGTVIAAAKLLREHHAKKVCVMATHGLFNGEAPQRFQKAFNEGLVDYLFVSNSIPQTKFDQCPQFQVIDLAPLFEEVLLCYANNSSISAIYTRHIEWIKKHV

SEQ ID NO: 8807 - protein, 100 aa, Mycoplasma pneumoniae M129
MHAIVVCGSKQYLVHENDTFFVEKLEAPVGKEIQLDKVLMLDEKIGAPYLEKARVVCVVEKHGLQRKVNVIKHISQKHHLKKYGHRQPYTKLKVVRFVHD

SEQ ID NO: 8808 - protein, 320 aa, Mycoplasma pneumoniae M129
MSVIDLLKQRVQSAGKKPVIIFPEGWSPTVMEAVNQLQQAGILTPPVIFRTRSEVPAGFNTAIKHYVIEEMDLTKYANFVYEKRKHKGMEMREAQKFVRDASSLAATLVALNEVDGEVCGKEYATKDTLRPALQLLGTGNFVSSVFIMEKNEERLYFTDCAFAVYPSPQELAVVAENTFKFAQSMGEPELKMVFLSYSTLGSGKGEAVDKVVSATQIFLEKHPELKANVCGELQFDSAFVEKVRKQKAPNLTWNGSANIYVFPNLDAGNIGYKIAQRLGGYEAIGPIVLGLARPFNDLSRGASVSDVFNVGIITAAQTLK

SEQ ID NO: 8809 - protein, 715 aa, Mycoplasma pneumoniae M129
MDFSFTPTPDKRDFLKEMGRSINDEVLKNKVDPIIGRDNEIRRLIEILSRKNKNNPVLIGEPGVGKTAIVEGFVRRVVNNDVPLNLRDVEIYELSLSGLIAGTQYQGEFEKRVNGILKQVKESNGKIILFIDEIHQIVGLGRNSSSGAMDIANILKPMLARGEIKVIGATTLKEYREYVEKDGALERRFQKILVSEPSQQEALTIMRGLKTRWELFHNLTIFDSALVAAVEMSARYIPDRNLPDKAIDLIDEASAKIKTEMASEPVVIDTLKREIINLETEYAALKQDKENADNKKKQGHLDNLKQQLDELKKKRDSLTAEWKKEKTNFESINKLKKEIEDLQTRLELYQTEGNYEAASKILYYDIPKLKNQLEQAQKKYVDSKHDLFKTEVSENEVAEVVSQATGIPLKKLLETEKEKLLHLGDEIKKRVKGQDAAVETVVNTVMRGRVNLNDPNRPIGSFIFLGSTGVGKTELAKSLAEVLFDNEKAMIRFDMSEYMEKHSVAKLIGAPPGYVGYEQSGLLTEAVRRKPYCVLLFDEIEKAHPDVTNILLQVLDDGTLKDSQGRLVNFKNTMIIMTSNLGSNYIMENKRDLAMEALKKHFRAEFINRIDEIVFFSVLQKTTVLEIITNLLDQLNQRLAKQNLKFTFDPKLNEFIYKSSFDEQFGARPIKRFIDRQIATLIAKQILEGIITKDVSYNVIVEKDKVAIVANKVKS

SEQ ID NO: 8810 - protein, 390 aa, Mycoplasma pneumoniae M129
MNDNKILVVNAGSSSIKFQLFDYHKKVLAKALCERIFVDGFFKLEFNEQKVEEKVAFPDHHAAVTHFLNTLKKHKIIQELSDIILVGHRVVQGANYFKDSVIVDAEALAKIKEFIKLAPLHNKPEADVIEIFFKEVPSAKNVAVFDTTFHTTIPQENYLYAVPRSWEQKHLVRRYGFHGTSYKFINNYLEKHLNKQNLNLIVCHLGNGASVCAIKNGKSFNTSMGFTPLEGLIMGTRSGDLDPAIIGYVAEQENMSASDVVNALNKKSGMLALTGASDMRDVFAKPQENAVAIKMYVNRVADYIAKYLNQLEGNIDGLVFTGGIGENASDCVELFINAVKSLGFATDLKLFVKYGDSCVVSTPQSKYKIYRVRTNEELMIVEDSIRLTQK

SEQ ID NO: 8811 - protein, 433 aa, Mycoplasma pneumoniae M129
MGLTDYCECRFSAGNGGNGIIAWRREAHYDKGGPGGGNGGNGGNVVLQADHNCDSLFFLKNKKHLFAESGGNGKPDLAHGKNGEDLVIKVPVGTTVRDLDTNQILMDFVHDQQSFILCYGGKGGKGNAAFKSPIMRAPNLYENGDKGQSLHVSLEIKYLANVGIVGFPNTGKSTLISKLSNAKPKIANYRFTTLVPVLGVVKHNDQSLVFADIPGLIENASEGSGLGHYFLRHIERCEILIHLISLDPVDHDDPCQAYEQIMRELSKYSQLLVKKKMLVVANKTDVDLDGTRFQKLAQYLENKGIPLFKISALKQELGDLVAQVFALHQKTLAQFGANKFHLPMEMEKHYVFEQASETDHDPLNIERDALGRWHVECKRLHYWFDKIPQTTLDNIRRLGNKIKEVGIEDQLKVAGAKKGDVIVFAGQEFVIND

SEQ ID NO: 8812 - protein, 586 aa, Lotus japonicus
MCGILAVLGCSDFTQAKRVRVLELSRRLKHRGPDWSGLHQHGDCYLAHQRLAIVDPASGDQPLFNEDKSIIVTVNGEIYNHEELRKQLPNHQFRTGSDCDVIAHLYEEHGENFMDMLDGIFSFVLLDTRDNTFIVARDAIGVTSLYIGWGLDGSVWISSEMKGLNDDCEHFEVFPPGHLYSSRERAFRRWYNPTWFSESIPSAPYDPLAVRHAFEKAVIKRLMTDVPFGVLLSGGLDSSLVASITSRYLATTKAAEQWGSKLHSFCVGLEGSPDLKAAKEVADYLGTVHHEFTFTVQDGIDAIEEVIYHVETYDVTTIRASTPMFLMSRKIKSLGVKWVISGEGSDEIFGGYLYFHKAPNKEEFHTETCRKIKALHQYDCLRANKSTFAWGLEARVPFLDKEFINVAMNIDPEYKMIKRDEGRIEKYILRRAFDDEEKPYLPKHILYRQKEQFSDGVGYSWIDGLKDHAAKHVTDKMILNAGNIFRHNTPLTKEAYYYRMIFERFFPQNSARLTVPGGPTVACSTAKAVEWDAAWSNNLDPSGRAALGVHLSAYDDKQNNLINNKPVEFEKLIPMEAPSLGVAIHS

SEQ ID NO: 8813 - protein, 586 aa, Lotus japonicus
MCGILAVLGCSDDSQAKRVRVLELSRRLKHRGPDWSGLHQHGDNFLAHQRLAIVDPASGDQPLFNEDQSIIVTVNGEIFNHEELRKQLPNHKFRTGCDCDVIAHLYEEHGENFVDMLDGIFSFVLLDTRDNSFLVARDAIGVTSLYIGYGLDGSVWIASELKGLNDDCEHFELFPPGHLYSSKEKEFRRWYNPPWFSEAIPSAPYDPLALRQAFEKAIIKRLMTDVPFGVLLSGGLDSSLVASVTARYLADTKAAKQWGSKLHSFCVGLEGAPDLKAAREVADYIGTVHHEFQYTIQDGIDAIEDVIYHVETYDVTTIRAGTPMFLMSRKIKSLGVKMVLSGEGSDEIFAGYLYFHKAPNKEELHQETCSKIKALHKYDCLRANKSTYAWGLEARVPFLDKKFIDVAMGIDPENKMIKRDEGRIEKWVLRKAFDDEENPYLPKHILYRQKEQFSDGVGYGWIDGLKDHAAKHVTDKMMLNASNIYPFNTPNTKEAYYYRMIFERFFPQNSARLSVPGGASIACSTEKAIEWDAAWSNNLDPSGRAALGVHDSAYDDQLNKSVSKGVEPEKIIPKMEVSPLGVAILS

SEQ ID NO: 8814 - protein, 586 aa, Brassica oleracea
MCGILAVLGCSDDSQAKRVRVLELSRRLRHRGPDWSGIYQNGFNYLAHQRLAIIDPDSGDQPLFNEDKSIVVTVNGEIYNHEELRKGLKNHKFHTGSDCDVIAHLYEEHGENFVDMLDGIFSFVLLDTRDNSFMVARDAVGVTSLYIGWGLDGSLWVSSEMKGLHEDCEHFEAFPPGHLYSSKSGGGFKQWYNPPWFNESVPSTPYEPLAIRSAFEDAVIKRLMTDVPFGVLLSGGLDSSLVASITARHLAGTKAAKRWGPQLHSFCVGLEGSPDLKAGKEVAEYLGTVHHEFHFTVQDGIDAIEDVIYHVETYDVTTIRASTPMFLMSRKIKSLGVKMVLSGEGSDEIFGGYLYFHKAPNKQEFHQETCRKIKALHKYDCLRANKATSAFGLEARVPFLDKEFINTAMSLDPESKMIKPEEGRIEKWVLRRAFDDEERPYLPKHILYRQKEQFSDGVGYSWIDGLKAHAAENVNDKMMSKAAFIFPHNTPLTKEAYYYRMIFERFFPQNSARLTVPGGATVACSTAKAVEWDASWSNNMDPSGRAAIGVHLSAYDGSKVALPLPAPHKAIDDIPMMMGQEVVIQT

SEQ ID NO: 8815 - protein, 642 aa, Francisella tularensis
MGKIIGIDLGTTNSCLAIMDGKTAKVIENAEGHRTTPSVVAYTDSGEILVGQAAKRQAVTNPDNTFFAIKRLIGRKYDDKAVQEDIKKKVPYAVIKADNGDAWVATKEGKKMAPPQVSAEVLRKMKKTAEDYLGEPVTEAVITVPAYFNDSQRQATKDAGKIAGLEVKRIINEPTAAALAYGVDSKKGEQTVAVYDLGGGTFDISIIEISDVDGDNQIEVLSTNGDTFLGGEDFDLALMNYLIDEFKKEQGIDLHNDKLALQRVREAAEKAKVELSPAQQTDVNLPYITADATGPKHLNIKVTRAKFESLVSDLVMRSLEPCKKALEDAGLSKSDITEVLLVGGQTRMPLVQEKVKEFFGKEPRKDVNPDEAVAVGAAIQGGVLAGDVKDVLLLDVTPLSLGIETMGGVMTKLIERNTTIPTKKSQVFSTAEDNQPAVTIHVLQGEREMASANKSLGRFDLADIPPAPRGMPQIEVTFDIDANGILNVSAKDKATGKEQNIVIKSSSGLSEEDIEKMVQDAEANAEADKKFHDLVTARNTADNLIHSSRKAIQELGDKVTAAEKEKIEEACKELEAATKGDDKQAIEAKTKALEEAFAPIAQKAYAEQAQAAGAQGGAKAEEPKKEEDVVDADFEDVEDDKK

SEQ ID NO: 8816 - protein, 521 aa, Chlamydomonas reinhardtii
MRKEATRLVSALLRAGNNGVSTSWAVGGTRLKSAMPQPDEKKDEDLHAKEGKVLHPHLLNENVVKTQYAVRGELYLRAEQLRKEGKEIIFTNVGNPHALGAKPLTFTRQVLALCAAPFLLDHPKVEDMFPADAIARAKKILASFKGGVGAYTDSRGNPLVREEVARFIEKRDGVPSNPDHIFLTDGASVAVRLCLNAMIRHDRDSVLVPIPQYPLYSASIRLYGGTLVGYFLDERRGWGLSVEELQRALQESREEGKLVRGLVFINPGNPTGQCLSKENLQELIKLAYQEKIVLMADEVYQENVYQDERPFVSAKKVMWEMGEPYRSHVELLSFHTVSKGTAGECGLRGGYVEMTNIHPGAIEEVYKCASINLSPNTMGQIALSVLVNPPKPGDPSYDQYTKEKASELVSLRRRRHMVTDGFNALDGVTCNFTEGAMYSFPQIKLPAKALEAAKAAGKAGDVFYCLKLLEATGISTVPGSGFGQEEGTFHLRTTILPREEVMTTFVEKFDKFHKDFMKQYS

SEQ ID NO: 8817 - protein, 184 aa, Lilium hybrid division I
MDRKVGTNEDVEVRKGPWTMEEDLILINYIANHGDGVWNTLARSAGLKRTGKSCRLRWLNYLRPDVRRGNITPEEQLLIMELHDRWGNRWSKIAKELPGRTDNEIKNFWRTRVQKKSKNGESSEGQISMLSDETSAMQMEDVDVGVSQTSYDQGQTSNNLDAFEIPFEPGDNLLSVEELWAMQY

SEQ ID NO: 8818 - protein, 418 aa, Solanum tuberosum subsp. andigena
MVRNRREELYVTVPSLFRCPISMDVMKSPVSLCTGVTYDRSSIQTWLSQGHNTCPATMQILPSTDFIPNLTLRRLINVWIQHQPSSSPGYTTPSSSSVTKSEVVEIVKNLNGEVDRLSSLAKIVEFVKCSGENRRFFVNSSDAIVSVVGVLVDCDVGEVCEAVVAVLDLVVSENGVKEQLNKEILKSDRKFLPKFLLILRKGKLSSRIQTARILEFIALDADSQRKMIEEQGLLYELHVFTSTETNRFAIEAGLSTLIAVSTTRPAKKELVRFGIVQTIGKILSGSETARAVVEKSLKLLETVATCTEGRAAIVKGEECMSAIVTRLMKSSKAATEHGVTVLWSVCCLFRDTAARDVVGKANGLTKVLLVMQSDCSAAVRQMCGELVKALRVVNNKHKNYSKSCLASYDTKTTHIMPY

SEQ ID NO: 8819 - protein, 614 aa, Thermoplasma volcanium GSS1
MYEDRSYQNEAIDFIASKLANYPGVALEAPTGSGKTMMALLGSLKYAYNGHLKILYLVRTNSQEEQVIRELRTISKNRKIRALPMQGRINLCILYKTADDLKEATAESLSKFCNSRKRQVMEGHQEACPYYTIKVRSKETKDFLFENLPTAEEFYEYAFTNNLCPYESIKASLSDADIVVAPYMYFLNKTVADRFLSHWGVSREQLIIVLDEAHNLPDIGRSLGSFRISIESLNRSEKEAQSFGDPELDRGVHVTDFIEMIRSTLERTIKERVKEDDVRIRFQEFKEYLMIMNKKSEKSIRDLNNYLYLFGEYVENEKEKAGKVPVSYCSSLAQRLEAMMDEDDAMYAAILSKSESGYIQASCLDPSSILSSLKESKTIHMSGTLEPFEFYSDVTGFDIPFRRIENVFPIENRFVSYYEGVSTKYDTLDENEIRKLASIIENIVNGVKRNTIVYFPSYAVMDKVIGSGLDFDFLQEKKNLDQTEFYDVVKKFRNGGKPLLAVSGGRLSEGMNFPGRELELILIAGIPFPRPDATNRALYDYYEMKYKKGWEYAVLAPAIIKIRQEIGRLIRGKDDHGACVILDKRAKQFRRFIPDLVKTDDPVNDINTFFSNFK

SEQ ID NO: 8820 - protein, 302 aa, Thermoplasma volcanium GSS1
MTLIECVPNFSEGRDKSKVDQIKSAISAIPTVRILDVEMDSNHNRSVITFVCDDGKAVEAAFAGIKKAAELIDMDKHTGEHPRFGAADVIPFVPLDDTKMSRCVQLARELGKRVGDELNIPVFLYAEAATRPERADLAAIRNKSFQYEQLKGAIKEEKWKPDFGPSEVGKAGASIIGARDFLIAYNVNLNISDVEIGKKIASALRARDGGLTFVKALAFYLKDRNIVQISMNLTNFRKTPIYRAYELVKLEASRYGAYPIESEIVGLVPEQALIDAAKFYLQLNGFDEHNLIERKINENVSE

SEQ ID NO: 8821 - protein, 533 aa, Thermoplasma volcanium GSS1
MNGATKNVSFENSITNSNLIENEERKFRRKLGLLDLFMIGITGVIGSGWLFSPLYAANAAGPASIASWVLGGALVLMVGLVFSQLMRFKSEAGGITRYPYYTNGALAGTITGWTLWLAYSMNPPSESSGLVQYMSSYVPGLYINGALTPVGLAIAISFMGLFVLVNYFGVVIFSKIINAITALKLVVPTITMVTLFLVSFKLRNFSAYGVAPYGPFSVVSAIVTSGIVYSYLGFQAVINLAGESRNPKRDGPLSLILVIIFSVVFYVVLQIAFIGSVPASDISKGWAFLSLPSPFADIAVSFNMFWLYTLIIADSIYSPSGSSMAAVASNSRNLYALSKNGTLPSFFLRVDNNTGIPRRALLFNFVISLIVLVTLKSWHQIIETLGILLLISFIGSAVSSGVIGSIKRYSSIKMPFIVIVSAIVFVFSGLIISISSFSKVLVVSLLLVPSLLLFAVSSGRGNRVIADVKAGLWFIIYVMEIAILSFIYNEHYVSGYIFLGAYLLSSTITFILARRSGVKFMHQAGEYDIAEIP

SEQ ID NO: 8822 - protein, 287 aa, Thermoplasma volcanium GSS1
MEKKVVLIGLGIMGYRIAANFKKAGMLNGVFDRKIEKAEAFSKQFGSEFYKDIESAVKSNDVIVTMLYDDSSVIDVYSKAMDYAAGKIFVDMSTISPETSIRVSKDIESKGGEMYDAPVIGTSVVVEKKGLTVLIGGPRDNVGLIEELMGATATSVVYVGPNGSGLYAKLVNNLFLGSYMEALAEAVRFGRSTGLDDNVISSVLIKYSSARSPTSELKVPKMMAGDHSTQFSVKNMLKDLEIIEDTARRKSVPIPSASIALQFYRYLASSGHSEEDISSIYKVLTGS

SEQ ID NO: 8823 - protein, 375 aa, Thermoplasma volcanium GSS1
MSDDVQNKIEKATKLLHAGIKEEENGHKDKAKEYYLVAYRVMLEAANDSPSDLKKKRLDQCALILNAYKRVSGERTDFTVKKQNDDEIVEGEALLEEIGIEKPEIPKVTFEDVAGLDDVKNEILGKIIYPMKFKELSQEYNIQFGGGMLLYGPPGTGKTFIVKAIANEVKARFINVNPSTLYSEWFGVFEKNISKLFRAASLLSPAIIFFDEIDALVPKRDTSNSDAAKRGVAQLLNEVGGINSQKNKNIFIIAATNNPWEVDEAMLRPGRFDIKIYVPPPDIVARKKIFQLNLAKIKQVGNVDYDLLAEETEGYSGADIEFICKKAAQNVFMEAVKTGKSRPVETRDVIDVIGSIKPSIDYELLEKYSKYGSAF

SEQ ID NO: 8824 - protein, 340 aa, Thermoplasma volcanium GSS1
MRLLDKDEKLGRYTLRIENLDDLWYLKNIIAPGDKISAVTFRRIEESSDMQRSREKERIPIRVTIEVEKIEFQDFENRLRILGKVTNGPEDTIGKYQSITVSEETELDVIKVWDDDSINMLKEATEQEHAAVYLAIALDDDEANVFIIHPYGIQQMGTIYSGRSGKYSESSYSETSYFSAIENAIKQFKYPIIVIGPGFAKNGLSAFLKERNYKVVAVSSSNRTDQGAIYEFISSEDGKKLISKEQISRDNEIVSAFLSSLRRGSGIYGSEEIRKYLEMGALSDLIITDKKFRSETGRELLSLARSVGTDIHIVSTSNDMGEIIEKFGGYAGILRYKVQQ

SEQ ID NO: 8825 - protein, 129 aa, Thermoplasma volcanium GSS1
MSWQEAEVRELKVGRYILIDDVPCKIVEITMSKPGKHGEAKGRIVAIGVFDNQKRSVVYPVKHKVKIPIIEKKNAQVLSVMNNEAQLMDSETFETFVLPLDPEIADKVKPGMEVPYWEAMGVRKIMLQN

SEQ ID NO: 8826 - protein, 303 aa, Thermoplasma volcanium GSS1
MGGNGREKDHASELRSIFSLKKIADAVNGYEEAKYVVFGIPFDNTSSYRRGSKYAPDSIRGAYVNLESYEYSYGIDLLASGMADLGDMEESEDVEYVIDTVESVVSAVMSDGKIPIMLGGEHSITVGAVRALPKDVDLVIVDAHSDFRSSYMGNKYNHACVTRRALDLLGEGRITSIGIRSVSREEFEDPDFRKVSFISSFDVKKNGIDKYIEEVDRKSRRVYISVDMDGIDPAYAPAVGTPEPFGLADTDVRRLIERLSYKAVGFDIVEFSPLYDNGNTSMLAAKLLQVFIASREKYYKEHI

SEQ ID NO: 8827 - protein, 157 aa, Thermoplasma volcanium GSS1
MKIIYKTDKEEMKTLFIDRDGTINKDCPYCHNPSDLFIYPDAVDLLQRYQDDGFRIIIVTNQSGIGRGYFTESQFKEFSDFMNDKLKENGIVISAIYYCPHKPEDSCNCRKPETGLFSEVLEDYKVDIPSSIVVGDRNEIDGEFARRIKLPFRLLRH

SEQ ID NO: 8828 - protein, 388 aa, Thermoplasma volcanium GSS1
MNDVYIVSAKRTAIGKFGRSFSKIPAPQLGGAAIKAVIEDSGIDKSAIQEVIMGNVIQAGVGQNPAGQAARAAGLADEITKYTVNVVCASGMLAVESAAREIKLGEREIVIAGGMENMSNAPFLLPSDLRWGPKHLLHKNYKIDDAMLVDGLTDAFYFEHMGVSAERTAKKYGITREMADEYSVQSYERAIRATNTGEFSKEITVFSNLSQDEGIRKTTMEDLAKLPPAFDKNGILTAGNSAQLSDGGSALLLASEKAINEYGLKPIAKITGYESASLAPLDFVEAPIPATRKLLERQGKSIDYYDIVEHNEAFSIASIIVRDQLHIDNERFNVNGGAVAIGHPIGNSGSRIIVTLINALKERHMKTGLATLCHGGGGAHTLTLELVD

SEQ ID NO: 8829 - protein, 223 aa, Thermoplasma volcanium GSS1
MKIFLDTANISEIKEGIDLGLVDGVTTNPTLISKEAGGSKKYAEIIKEILKIVDGPVSVEVVSTKSDGMVEEARKIHALGDNAVVKIPMTDEGLKAIRKLSQENIETNCTLVFNPIQALLAAKSGATYVSPFVGRLDDIGQDGMQIIDEIKTIFNNYIIKTQILVASVRNPIHVLRAAIIGADVVTIPFSVLKLLIKHPKTDEGLTRFLEDWKKVSPDGKFII

SEQ ID NO: 8830 - protein, 590 aa, Thermoplasma volcanium GSS1
MNDNSNLVSGKLRKSLNSTDLFFLAVTGMIGSGWLFAALDTASYVGPGSIFTWMIAALFFFVIALAFAELSSIIPYSGSIVRFNQYSHGSISNFMIGWAYLIGAVSTVTVEAISLVTYTSTYMPQLYNSSVGVLTPLGIIVSIFLILFFFFIQFMGVNVYGKLNTVLTTWKIAIPVITVVLLMSFSFHPGNFKVAHGFLPYGTSAIFAALIPSGVVYAFEGFRQGIEYAGEAKNPQRDVPMSLIAALLVTIAIYVALQIAFIGSIRWSDLSLSPGDWTLLSKSTWASGPFYYATKYSGVAILAIFAIVILIDAFISPLASLGVYEGTSARSFYGLSRLNVLPEFFGSIHPKFRTPWVGLIFTLIISSLFLAPFPSWYLIVGINASFTVYAYLSAGTTNSVLRKLAPDLNRPFKLPFATVLSPVAFVAASMLVYWSGWSIIDFLILIVYAGLPLLILSKFRESLDITSREAIALSAVYWILLSIVGYFGYISYIPFEVYWPILNSIPAITFAFLYIRSRSNEVVSSVWIIVYNSILGTMSYFGSLGTNAIAYPYDYLIFAALSFFIFFVSVKTGIETNELTELKRSGPVPE

SEQ ID NO: 8831 - protein, 386 aa, Thermoplasma volcanium GSS1
MKQSTIGRNIVDEISFGAIVKIRDQLLEMQRQGKKVYRLESGDPSFSLPPHVKEAIKQAIENNKTHYTDSTGIPELRKAIAEKLVRKNKIKDATPENVIVSNGGMNALYVTFRSLLSPGDEVIIPDPMWTEIAEIIKLAEGVPIRLPVENYIEEMQKYEDDDKVKAVFVNSPHNPTGLVFTPKQIDGIISFAESKGIFIVSDEAYEDVIFDGREHVSPGSKYDNTISLFSMSKTYAMSGLRIGYAHTNSEILYDRMKKLLRCTINGVNSATQYGAVAALTGPQEFVGQMRSEYQKRRDIIFNAVSKSRYLEPVKPGGTFYLWAKIKEYPKEVKDSWDMTYYLLDKTGVGSSPGPVFGPAGDGYIRFAFSADTEHVREASELIEKFE

SEQ ID NO: 8832 - protein, 277 aa, Thermoplasma volcanium GSS1
MEYSKACCKPVLKWAGGKRQLIPYIMRYVPERFKTYYEPFLGGAAVLIHLYSKGRISKAVVSDVNRDLYMLYKEIKERPIELISVMRSLNFQNKREDYYRARDLFNETSDYKLRSALLIYLNKHGYNGLYRLNSLGLFNVPFGRHRNTSFPSDQDILSLSNMLSSCTILNEDFEKAVAGAESGDFVYFDPPYVPLSKTSNFTSYTESGFTHKDQVRLKDVFIELSNRGVFVMETNSDTENVRDLYKAFEIIGVPARRNINSNASRRNGATELIIRNY

SEQ ID NO: 8833 - protein, 397 aa, Thermoplasma volcanium GSS1
  misc_feature (62)..(62): Xaa can be any naturally occurring amino acid
  unsure (1)..(397): unsure at all Xaa locations
MKELLLLYSGGLDTSVMIKWMNENLGYDVSTLTLDIGNNDLKSIREKAEAIGAVETFVEDVXQEFSYEYISKSILANGSYEGYPLSTALARPLMAKKAVELAEKHGFEAIAHGSTGRGNDQVRFELGIKALNPSLEMLAPVRDWNMLRSEEIEYAKKNNIIVPSDGKYSVDENLWGRSIEGSEIENMSLPVPEDAYEWLVPPWEAGPGEVIKLEFSNGLPVAINDSDFELQNLIANLNIIGGRNSIGLIDHVEDRITGIKSREVYECPAAEIITYAHGYLESLILNKHEISIKSFLDSKFSQFVYNGLWYDPAMKPLIAGEEILNSEINGSISLKLYKGKIYFNGSKGANFSYNSNVANYSTYEFDQKSSKGFIDIFKNDTVYSILARQKAKEEALS

SEQ ID NO: 8834 - protein, 745 aa, Thermoplasma volcanium GSS1
MDNSSGIILRVAEANSTDPGMSRVRLDESSRRLLDAEIGDVVEIEKARKTVGRVYRARPEDENKGIVRIDSVMRNNCGASIGDKVRVRKVRTEIAKKVTLAPIIRKDQRLKFGEGIEEYVQRALIRRPMLEQDNISVPGLTLAGQTGLLFKVVKTMPGKVPVEIGEETKIEIREEPASEVLEEVSRVSYEDIGGLSEQLGKIREMIELPLKHPELFERLGITPPKGVILYGPPGTGKTLIARAVANESGANFLSINGPEIMSKYYGQSEQKLREIFSKAEETAPSIIFIDEIDSIAPKREEVQGEVERRVVAQLLTLMDGMKERGHVIVIGATNRIDAVDPALRRPGRFDREIEIGVPDRNGRKEILMIHTRNMPLGMDEEQKNKFLEEMADYTYGFVGADLAALVRESAMNALRRYLPEIDLDKPIPTEILEKMVVTEEDFKNALKNIEPSSLREVMVEVPNVHWDDIGGLEDVKREVKETVELPLLKPDVFKRLGIRPSKGFLLYGPPGVGKTLLAKAVATESNANFISIKGPEVLSKWVGESEKAIREIFKKAKQVAPAIVFLDEIDSIAPRRGTTSDSGVTERIVNQLLTSLDGIEVMNGVVAIGATNRPDIMDPALLRAGRFDKLIYIPPPDKDARLSILKVHTKNMPLAPDVDLDSIAQRTEGYVGADLENLCREAGMNAYRENPDATQVSQKNFIDALKTIRPSIDEEVIKFYKSISETMGKSVSEKRKELQDQGLYL

SEQ ID NO: 8835 - protein, 381 aa, Thermoplasma volcanium GSS1
MLSQRLQYVNESATVSASNYVEKLKKQGIKVYNFGIGEPDFTTPQHIIEYAFEMAKEGKTHYTPSNGIHELREKVSEKLKNRNNINASPDEVLITPTKFGINLAMMVILNPGDEVLIPEPYYVSYPDIVRLAGGKPVTVSTLEDYSLDFDLMRKYVTPKTKAIIFNNPTNPTGKVYDEKEIKSLVDFALEYGLYIVSDEIYEDLIYNGKLISPASYSEMWGKSITLNGFSKGYAMTGWRIGYMAAPREIVEAANVIQQQTITCVSSISQYAALRALDDTESPKKMKDEFKRRRDLILSILDSSDKLNVTEPDGAFYVFPEYNSDISSNKVSEDLLEKYQVVVTPGSAFGRQGEHHFRISFATSEDIIKEGAERIIKFFASV

SEQ ID NO: 8836 - protein, 563 aa, Thermoplasma volcanium GSS1
MGDLNSASTDANISYSENQDRKLRKALSTWDLLMLSVGGIIGSGWLFAAYAASVLSGPASILAWVLGGIIVIFIALVYAELGAMIPRSGAIVRYGHLSHGSFAGFLFGWAYFLSAVSVPAIEAEAVVTYAASYVTKPALIANGIMTVFGTLIAMLLMIAFFFLNYAGIHLMGKTNQGITWIKVIIPVITVIVLIAVHFNPSEIVPPNGFLPYGWAPVFAAISSTGIVFSYFGFRQAIDYGGEAKNPQRSIPIATIGSVLIGILLYSLLQVVFVGGIDWSKMGLEPGQWTLLNAYATAAHASTEHPLAYQLMNAPFATIALSAGLVWLTYTLYASAYIAPSGTLNVYLGTSTRTLYGMAVNGHLPKIFAKVADRNKIPVIPLITTLLVGFLFFLPFPSWYKMVGFISGATVFTYIVGGAALMNLRKQAPELKRPFKLWSANVLAPIAFILASEAVYWTGWPTTLYLAIAIFLGLVLYGALVGLHKIEQTFDKKNVKAGLWVPVFIVILTILSYLGEYGGINVLHFPLDLIVVAIASAIIYVWAIKSGIKTEEIAAMIANEDQYV

SEQ ID NO: 8837 - protein, 435 aa, Thermoplasma volcanium GSS1
MIQLLNNLWVLFSAFLVFLMTIAVGFLEYGELGIALKRSLYKTILITGIAFVVMAVIGFNTAFAPTLYGIIGNPLYKPGFVLGYLNSPTAMFSTIWWATSASYFNTGLLGITYFLFETAFASVTLALVSVVILRKVKMSVFVVFSIVYFIVIYNLPAAWIWNPTGWLYLLGMRDFAGGLVVHGAAGFAGLAIIIRIWQEERKKGIVRSPGEIIKVNDGFLTLAILLLMMGWFGFNPGSVLAFNYDTLIVVMTTFMAALTSMLSTLTVSYLLYKDAGGIMNAVNGILMGLIIVTPLAGFVSPLSAAILGILGGPIFIFANRFFSKRKWFSDPVGLFSGHFTGGIFGVLMIGFFTQHSYAVLSGNSILPNGLFFGGGYLALHTLGIEIMGICAVGLAVFAISYATMYFLSLGFHGILEEPEWKKEERKSLPSSETSK

SEQ ID NO: 8838 - protein, 548 aa, Thermoplasma volcanium GSS1
MYEEEIKKIALLNAYQHNGKAELKSVIGKVMAEIADLRKNPKLVSELAKAAVDSVNSMSKDDIVNIVEKQFPEALKKDKKPEEHRLPDLQGVNGHVVMRLAPSPSGPLHIGHTRMAILNDEYVKRYGGDLILRIEDTNPTNIDPEAYAMIPEDLEWLGVNVTKTVIQSERFDLYYSVAKKLIENGHLYICTCDREEFKRKKLASIPCKDRDNPPETNLYLFEKMLDGEIKAGAAVAVMKTDLNHPNPSVRDWIAFRIIDAKHPRTGDKYRVFPMMSFSVAVDDHYLGLTHVLRGKDQLTNTEKQRYVFEYNGWNKPYYYHYGMIRFPGTRLKTSLMKKGIQAGQYDGWSDVRLGTVRAMARRGYQPETFRRYWINSGLREIDAVFSWEIFNSLNREFVDPKAYRFSFTKDPVEIKMEGSNGLTARLPYHPSHPEYGVRKYEIGDTVYISKGDADKIADGERFRLKDLCYVVRKGDRFLFDGTEMKEKTKIINWCPPNSREFQVLKPDGSIDKGLIEPASKGYRGISQLERYGYVNFYDSDEKAYFTHD

SEQ ID NO: 8839 - protein, 309 aa, Thermoplasma volcanium GSS1
MKVSAVLPNFLPVGEIRKLAASVLPDINIITDLDFKSDESDILIVTAFTKVDKALLDKFPRLKFIQVASTGYDNVDVTEVKSRNILMCNSPSSNKESVAEHVIGMALYFLKDFGHLDREIRNGNWPILTFSRDLMGKVFGIIGMGAIGRKLAERLIQFGVGIIYYDVKRLPEEVEDELGITYVTLDELISSADIISIHVPLTETTKGMIGRKEFEKMKDGCIFINTSRAEVVVTKDLVWALKQGKIKAGIDVYDREPPDFSSELFQMDNALFSPHIAGVTVESQRRFIEETVANVIRYMQGVDPLNRVL

SEQ ID NO: 8840 - protein, 352 aa, Thermoplasma volcanium GSS1
MEFQKYRTMHFPRDVYIGHDVLNRVLDVVDQNSRTRDVIIVTGNTTYELAGKKIVEILASSPYEVHLSFAGEANYENLKKIEEETNDVNAGIIIGVGGGTKIDLAKKLAYDKNLPFISIPTSPSHDGIASPRASLRRNGISYSEEGAMPIGVIADTSVMIKAPYRYLAAGAADVISNISAVKDWKLAHRLRGEEFSSSAAAMSEYSAQEVISQVGEIRKYDESSVWLVTKNILASGTAMAIAGNSRPGSGSEHLFAHALEAAGVNNMLHGEMCAMGTIVSLYLHDDNWQKIRDVFESLGVSVKARDYGLKEEVVIEALRRAHAIRPERYTILGESDMSYDAAVKALELTGII

SEQ ID NO: 8841 - protein, 566 aa, Thermoplasma volcanium GSS1
MRSCFMDSRVSDRKLRRELTTWDLLMLSLGGIIGSGWLFAAFGAATTAGPGSIFAWIIGGVIIIFIALVYAELGAMIPRSGAIVRYGHLSHGSFAGFVLGWAYFLSAVSVPAIEAEGVITYAASYSSKYGIVLLTNTGVMSVLGTFLAMLLMLGFFFLNYAGIKIMGKTNTGLTWWKFVIPTLTVILLLVVSFRPSNIIVGGIVPYGWAPVFSAVATSGIVFSYLGFRQGIDYGGEAKTPQRSIPLATVFSVLIGILLYTALQIVFIGGIDWGKLGLVPGSWAQIYSLATSNSNPEAVALYDAPFAHIAQAAGLVFLTYILFADAYISPSGTLNVYLGTSTRTLYGMAANGHMPKKLLEIMDKNRIPFIPLLATLLIGYIFFLPFPSWYKMVGFITSATAFTYIVGGAALMSLRRTAPELKRPFKLPYARVLSPIAFIGAGEVVYWSGWPLVLYLAIAIFLGFAVYFVLLLLGAIENSFTKENIKAGLWVPIFIIVLTVLSYIGDTSLGGIGVIKFPFDLVTVAVISFIFYMWSVRSGIRTEDITEMIESGSQYVFEESAREAVGK

SEQ ID NO: 8842 - protein, 446 aa, Thermoplasma volcanium GSS1
MRYVIASSRCPFSHDVVMGRELVKENVGGVATALKRAISKHGGTWICWGDGKADNRYVNEDVGTYKIKRIILTPQEKRGYYDMYSNRTLWPLFHYFRERVQYTDNGYETYRKVNEKFAEEILNNTSQEDIVWVHDYQLSLVPGILRQKGLKNRIIFTWHIPWVSREMFETLTESDEIKESVGSADFITFHTDLYRKNFESLFENRKHGKSIAVPLGIDYRYFEKAKSSQIKSYALKDKIMLFSIDRLDYTKGLTNRVLSIERLIRNHPETSGKFVYVMIVTPSRTSVSDYVSMKRELEMNIGRVNGEFGTISWMPILYMYRKISDHSLVSYYKSADIALITPLIDGLNLVSKEFIASTEKGILVLSKFAGASNCLRGALIVNPNSPDEVADAIYKAMNMERKEADERLLKMKAIVKARDTDWWIKRIYRLAIAKEHDRRVTNNRIE

SEQ ID NO: 8843 - protein, 507 aa, Thermoplasma volcanium GSS1
MIDTVEISVFLVFFIVFIAIGFLAKNFRKGNLNQLPEWALGGRRLGTFLVWFLVGADLYTAYTFIAVPSSMYSVGSVYFFAVPYVSLAFAIAMLTMPKLWAIAKEKGYVTAGDFVKDRFNSESLAIVIALTGIVAELPYIALQIVGMRAILTALLHPVGGNVTLISNIALVLAFLALIAFTYTSGLRGASLTAVMKDIIIFTTVIVVIVVALVAYHSAFTTAFTVKPVYADLPPKLYNAYWSLFLMSAAALYLYPHAINGSLSSMSAKKLRLSTALLPIYGIGLAFLALFGVIVYGIPAAESALKIYPSSIQGALVVPTIIASVTPQWFTGFAFLGIFIGGLVPAAIMSMSQATLLTRNVIRYVNRNLEEKRETFIAKLSMVFFQLLALGFVFIVPETYAISLQLIGGIIILQTLPAVFLGMYVKHLEKYAIAAGWLAGIASGVYFEIYSNFVYLHYSIIKTTLMPSAFGLIFVGLTALVINLVVVVIGTAIVYAMHKQPNISKEKA

SEQ ID NO: 8844 - protein, 396 aa, Thermoplasma volcanium GSS1
MENENVYLVDFKRTAFSRSRPNDPERDVFNSLRMDEAMAKLINIVIDETGIRPEEINDVITGCALQQDENWTYGGRHPILLANLPDNVPGMALDRACSSSLNAITIGAMEIMTGNADIVMAGGYEHMTHVPMSNSPFLKPNVKLLVRPEYMHYDMNTGYSMGLTAEKLASLHHIGREEMDQYALRSHQLASKALDDGYFKGEIVPMEVEIGGETKIIDSDQSIRKNTSLEEMQKLRPAFKDDGVITAGNSSPLNAGASLTLLMSEKKVKEYGLKPLSRIVSFGWAGVDPSIMGEGPVPATQKALAKAGMKVEDIDYWEINEAFAVVVLNAMKELGIEENKVNIHGGGISIGHPLGATGARIAGTLSRILNEKQAEYGVATLCVGGGQGYSVIFERY

SEQ ID NO: 8845 - protein, 246 aa, Thermoplasma volcanium GSS1
MILEINNLSASVEGKEILKNVNLTVKGGEIHALMGPNGAGKSTLGNVLIGHPDYKVTGGNVLLDGKDITFATPEERARAGLFLAFQSPVAVEGVRISTFLRIAYSNLHPGEKIVISEFNKKVKSLMKTVGLDESFISRSVNDGFSGGERKRFEILQMMILKPKIIILDEIDSGLDVDALRMVAEQIRSYLNNDVGFLIITHYQRILKDIPPQFVHVLVNGTIVMNGDKSLSDKIEEEGYDWLKEVA

SEQ ID NO: 8846 - protein, 396 aa, Danthonia spicata
  misc_feature (124)..(124): Xaa can be any naturally occurring amino acid
  misc_feature (181)..(181): Xaa can be any naturally occurring amino acid
  misc_feature (354)..(354): Xaa can be any naturally occurring amino acid
  unsure (1)..(396): unsure at all Xaa locations
TGYDRVMVYKFHEDEHGEVVAESRRPDLEPYLGLHYPATDIPQASRFLFQQNRVRMIHDCHATAVRVIQDPGLQQALCLVGSTLRAPHGCHAQYMANMGSIASLVMAVIISSGSDDEQMARGGXSSAMKLWGLVVCHHTSPRFIPFPLRYACEFLMQAFGLQLNMELQLAHQMSEKHILRXQTLLCDMLLRDSPTGIVTQSPSIMDLVKCDGAALYYHGKYYPLGVTPTESQIKDIIEWLTVCHGDSTGLSTDSLADAGYLGAAALGDAVCGMAVAYITPSDYLFWFRSHTAKEIKWGGAKHHPDDKDDGLRMHPRSSFKAFLEVVKSRSLPWENAEMDAIHSLQLILRDSFRXAAEGTSNSKAIVBGQVQLGELELRGINELSSVAREMVRLIET

SEQ ID NO: 8847 - protein, 542 aa, Medicago sativa
MGCLLSKDKDSEQEHNNGGYRYAESSGMHNHRNNHEQVNTSRTAPTSSYQPQIPTKPSSISAPSPKPLIKQDTNTILGKGLEDVKQFYTLGKELGRGQFGVTFLCTENSTGLLYACKSISKRKLVSKSDREDIKREIQIMQHLSGQPNIVEFKGAYEDRNSVHVVMELCAGGELFDRIIAKGHYSEKAAASICRQIVNVVNICHFMGVMHRDLKPENFLLASKDENALLKATDFGLSVFIEEGRVYRDIVGSAYYVAPEVLRPRCGKEIDIWSAGVILYILLSGVPPFWAETEKGIFDAILEGHIDFESEPWPKISDSAKDLVRKMLIQEPKKRITAAQVLEHPWIKGGNASDKPIDSAVLSRMKQFRAMNKLKKLALKVIAENMSEEEIRGLKAMFTNMDTDNSGTITYEELKAGLQRLGSKLSEAEVKQLMEAADVDGNGTIDCIEFITATMHRHKLERDDHLYKAFQYFDKDSSGFITRDELETAMKEYGMGDDATIKEIISEVDTIISEVDTDHDGRINYEEFCAMMRSGNQQQVKLF

SEQ ID NO: 8848 - protein, 391 aa, Pseudomonas fragi
MSLNPRDVVIVDFGRTPMGRSKGGMHRNTRAEDMSAHLISKVLERNSKVDPGEVEDVIWGCVNQTLEQGWNIARMASLMTQIPHTSAAQTVSRLCGSSMSALHTAAQAIMTGNGDVFVVGGVEHMGHVSMMHGVDPNPHMSLYAAKASGMMGLTAEMLGKMHGISREQQDAFAVRSHQLAHKATVEGKFKDEIIPMQGYDENGFLKIFDYDETIRPDTTLESLAALKPAFNPKGGTVTAGTSSQITDGASCMIVMSAQRAKDLGLEPLAVIRSMAVAGVDPAIMGYGPVPATQKALKRAGLNMADIDFIELNEAFAAQALPVLKDLKVLDKMNEKVNLHGGAIALGHPFGCSGARISGTLLNVMKQNGGTFGLSTMCIGLGQGIATVFERV

SEQ ID NO: 8849 - protein, 398 aa, Saccharomyces bayanus
MSQNVYIVSTARTPIGSFQGSLSSKTAVELGAAALKGALAKVPELDASKDFDEIIFGNVLSANLGQAPARQVALTAGLGNHIVATTVNKVCASAMKAIILGAQSIKCGNADVVVAGGCESMTNAPYYMPAARGGAKFGQTVLIDGVERDGLNDAYDGLAMGVHAEKCARDWDITRDQQDSFAIESYQKSQQSQKEGKFDNEIVPVTIKGFRGKPDTQVTNDEEPARLHVEKLKSARTVFQRENGTVTAANASPINDGAAAIILVSERVLKEKNLKPLAIVKGWGEAAHLPADFTWAPSLAVPKALKHAGIEDINSVDYFEFNEAFSVVGLVNTKILKLDPSKVNVYGGAVALGHPLGCSGARVVVTLLSILQQEGGKIGVAAICNGGGGASSVVIEKL

SEQ ID NO: 8850 - protein, 392 aa, Zoogloea ramigera
MSTPSIVIASARTAVGSFNGAFANTPAHELGATVISAVLERAGVAAGEVNEVILGQVLPAGEGQNPARQAAMKAGVPQEATAWGMNQLCGSGLRAVALGMQQIATGDASIIVAGGMESMSMAPHCAHLAGGVKMGDFKMIDTMIKDGLTDAFYGYHMGTTAENVAKQWQLSRDEQDAFAVASQNKAEAAQKDGRFKDEIVPFIVKGRKGDITVDADEYIRHGATLDSMAKLRPAFDKEGTVTAGNASGLNDGAAAALLMSEAEASRRGIQPLGRIVSWATVGVDPKVMGTGPIPASRKALERAGWKIGDLDLVEANEAFAAQACAVNKDLGWDPSIVNVNGGAIAIGHPIGASGARILNTLLFEMKRRGARKGLATLCIGGGMGVAMCIESL

SEQ ID NO: 8851 - protein, 400 aa, Escherichia coli
MSSKLVLVLNCGSSSLKFAIIDAVNGEEYLSGLAECFHLPEARIKWKMDGNKQEAALGAGAAHSEALNFIVNTILAQKPELSAQLTAIGHRIVHGGEKYTSSVVIDESVIQGIKDAASFAPLHNPAHLIGIEEALKSFPQLKDKNVAVFDTAFHQTMPEESYLYALPYNLYKEHGIRRYGAHGTSHFYVTQEAAKMLNKPVEELNIITCHLGNGGSVSAIGNGKCVDTSMGLTPLEGLVIGTRSGDIDPAIIFHLHDTLGMSVDAINKLLTKESGLLGLTEVTSDCRYVEDNYATKEDAKRAMDVYCHRLAKYIGAYTALMDGRLDAVVFTGGIGENAAMVRELSLGKLGVLGFEVDHERNLAARFGKSGFINKEGTRPAVVIPTNEELVIAQDASRLTA

SEQ ID NO: 8852 - protein, 714 aa, Escherichia coli
MSRIIMLIPTGTSVGLTSVSLGVIRAMERKGVRLSVFKPIAQPRTGGDAPDQTTTIVRANSSTTTAAEPLKMSYVEGLLSSNQKDVLMEEIVANYHANTKDAEVVLVEGLVPTRKHQFAQSLNYEIAKTLNAEIVFVMSQGTDTPEQLKERIELTRNSFGGAKNTNITGVIVNKLNAPVDEQGRTRPDLSEIFDDSSKAKVNNVDPANVQESSPLPVLGAVPWSFDLIATRAIDMARHLNATIINEGDINTRRVKSVTFCARSIPHMLEHFRAGSLLVTSADRPDVLVAACLAAMNGVEIGALLLTGGYEMDARISKLCERAFATGLPVFMVNTNTWQTSLSLQSFNLEVPVDDHERIEKVQEYVANYINADWIESLTATSERSRRLSPPAFRYQLTELARKAGKRIVLPEGDEPRTVKAAAICAERGIATCVLLGNPAEINRVAASQGVELGAGIEIVDPEVVRESYVGRLVELRKNKGMTETVAREQLEDNVVLGTLMLEQDEVDGLVSGAVHTTANTIRPPLQLIKTAPGSSLVSSVFFMLLPEQVYVYGDCAINPDPTAEQLAEIAIQSADSAAAFGIEPRVAMLSYSTGTSGAGSDVEKVREATRLAQEKRPDLMIDGPLQYDAAVMADVAKSKAPNSPVAGRATVFIFPDLNTGNTTYKAVQRSADLISIGPMLQGMRKPVNDLSRGALVDDIVYTIALTAIQSAQQQ

SEQ ID NO: 8853 - protein, 588 aa, Helianthus tuberosus
LFEEAKARYEKAVFKVVDLDDYAADDEEYAEKFKKETFAFFFLATYGDGEPTDNAARFYKWFTEGDDKGVWLEKLHYGVFGLGNKQYEHFNKIALVVDEGLTEQGAKRFVPVGLGDDDQSIEDDFSAWKELVWPELDQLLLDEDDKTAATPYTAAIPEYRVVFHDKPDTFSENHSQTNGHTVHDAQHPCRSNVAVKKELHTPESDRSCTHLEFDISHTGLSYETGDHVGVYCENLIEVVEEAEKLIGLPADTYFSLHIDNEDGTPLGGPTLQPPFPPCTLRKALTNYADLLSSPKKSTLLALAAHASDATEADRLQFLASREGKDEYAEWIVANQRSLLEVMEAFPSAKPPLGVFFAAIAPRLQPRYYSISSSPKMVPNRIHVTCALVYEKTPGGRIHKGICSTWMKNAVPLTENQDCSSAPIFVRTSNFRLPADPKVPVIMIGPGTGLAPFRGFLQERLALKESGTELGQSILFFGCRNRKVDFIYENELNNFVENGALSELDMAFSREGASKEYVQHKMSQKASDIWNMLSEGAYLYVCGDAKGMAKDVHRTLHTIVQEQGNLDSSKAELYVKNLQMSGRYLRDVW

SEQ ID NO: 8854 - protein, 234 aa, Nicotiana tabacum
LPLPFFNMDTSHWPQGIGLAKAVEPSKPVPVTERKPRPQKEQAINCPRCNSTNTKFCYYNNYSLSQPRYFCKTCRRYWTDGGSLRNVPVGGGSRKNKRSNSSSNNSSSSTSSSYKKIPDLTIPTSSSTQNPKIINEPHDLNLTFNPSTTSNFSNISEFMALPLMNPNSTTSFMSSIMPQISDSNNIMYSSSSTGLPNLHDLKPTLNFSLDGFDNNNGYGSLQGETAGAKLFFPL

SEQ ID NO: 8855 - protein, 465 aa, Solanum berthaultii
MSTKPTPLELPEMSTMSLEETFHPSKVSESTESSSSSTTPLSPHTGGDVRWDAINSATGRGGPPLNLSNFRLLKRLGYGDIGSVYLVELRGTNAFFAMKVMDKGSLASRNKLLRAQTEREILSLLDHPFLPTLYSHFETDKFYCLVMEFCSGGNLHQLRQKQPNKHFTEEASRFYASEVLLALEYLHMLGIVYRDLKPENVLVRDEGHIMLSDFDLSLRCSVNPTLVKSSSVHGGGGNPSSGSGILDNDNAVQGCIQPSTFFPRNILPTKKNRKSKSDFGLFVGGSLPELMAEPTNVRSMSFVGTHEYLAPEIIRGEGHGSAVDWWTFGIFLYELLHGTTPFKGAGNRATLFNVVGQPLRFPETPQVSAIARDLIRGLLVKEPHKRIAYKRGATEIKQHPFFEGVNWALVRSAVPPSIPEPVDFAQYASKEASAPCSDKKMPDTESHDKSKNTSNDSSYMDFEYF

SEQ ID NO: 8856 - protein, 453 aa, Saccharomyces pastorianus
QTAKVIADVTSRYPEGDTTITGPIIATTLALLCGIISAAVGFLRLGFLVEFISLNAVAGFMTGSAFNILWGQVPALMGYNKLVNTRVATYKIVIDSLKHLPDTTLDAVFGLIPLFILYTWKWWCGTYGPKLNDRFNSKRPRLHKIVKWTYFYAQASRNGIIIIVFTCIAWAITRGKSAADRPISVLGSVPSGLKEVGVFHVPPGLMSKLGPNLPASIIVLLLEHIAISKSFGRVNDYKVVPDQELIAIGVSNLLGTFFNAYPATGSFSRSALKAKCNVRTPLSGLFSGSCVLLALYCLTGAFFYIPKATLSAVIIHAVSDLLASYQTTWNFWKMNPLDFVCFIVTVLITVFSSIENGIYFAMCWSCAIFILKVAFPAGKFLGRVEIAEVTDAYVRADSDSVSFTSENNNRILTLEEDTTDGEKEGRTGYIINSSKKLDTKVQTKGFESPSPSI

SEQ ID NO: 8857 - protein, 245 aa, Zea mays
VFSHPDVAAEVPWYGIEQEYTLLQKDVSWPLGWPVGGYPGPQGPYYCAAGADKAFGRDVVDAHYKACLYAGINISGINGEVMPGQWEFQVGPSVGISAGDEIWVARYILERITEMAGIVLSLDPKPIKGDWNGAGAHTNYSTKSMREAGGYEVIKEAIEKLGKRHREHIAAYDGGNERRLTGRHETADINTFKWGVANRGGSIRVGRDTEKEGKGYFEDRRPASNMDPYVVTGMIADTTILWKGN

SEQ ID NO: 8858 - protein, 755 aa, Agrobacterium vitis; identical to SEQ ID NO: 341

SEQ ID NO: 8859 - protein, 557 aa, Pseudomonas savastanoi
MYDHFNSPSIDILYDYGPFLKKCEMTGGIGSYSAGTPTPRVAIVGAGISGLVAATELLRAGVKDVVLYESRDRIGGRVWSQVFDQTRPRYIAEMGAMRFPPSATGLFHYLKKFGISTSTTFPDPGVVDTELHYRGKRYHWPAGKKPPELFRRVYEGWQSLLSEGYLLEGGSLVAPLDITAMLKSGRLEEAAIAWQGWLNVFRDCSFYNAIVCIFTGRHPPGGDRWARPEDFELFGSLGIGSGGFLPVFQAGFTEILRMVINGYQSDQRLIPDGISSLAARLADQSFDGKALRDRVCFSRVGRISREAEKIIIQTEAGEQRVFDRVIVTSSNRAMQMIHCLTDSESFLSRDVARAVRETHLTGSSKLFILTRTKFWIKNKLPTTIQSDGLVRGVYCLDYQPDEPEGHGVVLLSYTWEDDAQKMLAMPDKKTRCQVLVDDLAAIHPTFASYLLPVDGDYERYVLHHDWLTDPHSAGAFKLNYPGEDVYSQRLFFQPMTANSPNKDTGLYLAGCSCSFAGGWIEGAVQTALNSACAVLRSTGGQLSKGNPLDCINASYRY

SEQ ID NO: 8860 - protein, 513 aa, Capsella rubella
MSDFDGNFNESTSCWAPPFSPSPRAILAMIDQAEDDGLDLISEMFPHTNLPRDHSAQSSEQRSGLGQRLAARVGFSPPPLDTENISPSAASLRSSTTVPPPVSAIPPGFIPSTLLQSPNMVTDSSQMIPAPSSDTNYGPQGMVETSGEGNAPTLIFNNDHPYQPVNADLPLLDVFDDVPTEESVYLPTYETDHVEPIGDSLVPNSFEHEFVGDANVNFISNEGTESVKDSESDDELDFDFEFEDEDEAEAEAEDNDEDKAEDEDEDNDEDGNEDEDEDDEEDENDEEEADHDDEADFDDAEPSSPKRRKFEASSNMIGATRTNKAQRVILQMESDEDNPEDGFRWRKYGQKVVKGNPNPRSYFKCTNNDCNVKKHVERGADNFKILVTSYDGIHNHPPPPARCRINSGPRNRSGTTTTTQNQSYRTDRLGRFPAPSSVITPMEMMPLSSFTPPLDMSKVYMTGLNKLPNFSVFQNPGYMYRNDEPMMNVVPNGSGIYGGIRHRLFAEFGVNLM

SEQ ID NO: 8861 - protein, 1166 aa, Capsella rubella
MKQKWLFVLILCFFTALGIHGKRLINSDFDETALLMAFKQFSVKSDPNNVLGNWIYESGRGSCSWRGVSCSDDGRIVGLDLRNGGVTGTLNLANLTALPNLQNLYLQGNYFSSSSGGDSSSGSYCYLQVLDLSSNLISDYSLVDYVFSKCSNLVSVNFSNNKLVGKLGFAPSSLKSLTTVDFSYNILSEKIPESFISEFPASLKYLDLTHNNFSGDFSDLSFGMCGNLSFFSLSQNNISGVKFPISLPNCRFLETLNISRNNLAGKIPGGEYWGSFQNLKQLSLAHNRFSGEIPPELSLLCKTLETLDLSGNALSGELPSQFTACVWLQNLNIGNNYLSGDFLSTVVSKITRITYLYVAFNNISGSVPISLTNCTNLRVLDLSSNGFTGNVPSGLCSQQSSPVLEKLLIANNYLSGTVPVELGKCKSLKTIDLSFNELTGPIPKDVWMLPNLSDLVMWANNLTGSIPEGVCVKGGKLETIILNNNLLTGSIPQSISRCTNMIWISLSSNRLTGKIPTGIGNLSKLAILQLGNNSLSGNVPRQLGNCKSLIWLDLNSNNLTGDLPGELASQAGLVMPGSVSGKQFAFVRNEGGTDCRGAGGLVEFEGIRAERLERFPMVHSCPATRIYSGMTMYTFSANGSMIYFDISYNAVSGLIPPGYGNMGYLQVLNLGHNRITGNIPDSLGGLKAIGVLDLSHNDLQGYLPGSLGSLSFLSDLDVSNNNLTGPIPFGGQLTTFPVSRYANNSGLCGVPLRPCGSAPRRPITSSVHAKKQTLATAVIAGIAFSFMCLVMLFMALYRVRKVQKKELKREKYIESLPTSGSCSWKLSSVPEPLSINVATFEKPLRKLTFAHLLEATNGFSAETMVGSGGFGEVYKAQLRDGSVVAIKKLIRITGQGDREFMAEMETIGKIKHRNLVPLLGYCKVGEERLLVYEYMKWGSLETVLHEKSSKKGGIFLNWTARKKIAIGAARGLAFLHHSCIPHIIHRDMKSSNVLLDEDFEARVSDFGMARLVSALDTHLSVSTLAGTPGYVPPEYYQSFRCTAKGDVYSYGVILLELLSGKKPIDPGEFGEDNNLVGWAKQLYREKSGTEILDPELVTEKSGDAELFHYLKIASQCLDDRPFKRPTMIQVMAMFKELKADTEEDESLDEFSLKETPLVEESRDKEP

SEQ ID NO: 8862 - protein, 1192 aa, Solanum lycopersicum
MSHKRCHEYFSLNGVLKNVVFMIILLSSSFLVVVSNARKLAENDQVGRLLAFKKSSVESDPNGFLNEWTLSSSSPCTWNGISCSNGQVVELNLSSVGLSGLLHLTDLMALPTLLRVNFSGNHFYGNLSSIASSCSFEFLDLSANNFSEVLVLEPLLKSCDNIKYLNVSGNSIKGVVLKFGPSLLQLDLSSNTISDFGILSYALSNCQNLNLLNFSSNKIAGKLKSSISSCKSLSVLDLSRNNLTGELNDLDLGTCQNLTVLNLSFNNLTSVEFPPSLANCQSLNTLNIAHNSIRMEIPVELLVKLKSLKRLVLAHNQFFDKIPSELGQSCSTLEELDLSGNRLTGELPSTFKLCSSLFSLNLGNNELSGDFLNTVISSLTNLRYLYLPFNNITGYVPKSLVNCTKLQVLDLSSNAFIGNVPSEFCFAASGFPLETMLLASNYLTGTVPKQLGHCRNLRKIDLSFNNLVGSIPLEIWNLPNLSELVMWANNLTGEIPEGICINGGNLQTLILNNNFISGTLPQSISKCTNLVWVSLSSNRLSGEIPQGIGNLANLAILQLGNNSLTGPIPRGLGSCRNLIWLDLNSNALTGSIPLELADQAGHVNPGMASGKQFAFVRNEGGTECRGAGGLVEFEGIREERLAILPMVHFCPSTRIYSGRTMYTFTSNGSMIYLDLSYNSLSGTIPDNLGSLSFLQVLNLGHNNFTGTIPFNFGGLKIVGVLDLSHNSLQGFIPPSLGGLSFLSDLDVSNNNLSGTIPSGGQLTTFPASRYENNSGLCGVPLPPCGSGNGHHSSSIYHHGNKKPTTIGMVVGIMVSFICIILLVIALYKIKKTQNEEEKRDKYIDSLPTSGSSSWKLSTVPEPLSINVATFEKPLRKLTFGHLLEATNGFSSESMIGSGGFGEVYKAQLRDGSTVAIKKLVHVTGQGDREFMAEMETIGKIKHRNLVPLLGYCKIGEERLLVYEYMKWGSLESVLHDGGKGGMFLDWPARKKIAIGSARGLAFLHHSCIPHIIHRDMKSSNVLLDENFEARVSDFGMARLVNALDTHLSVSTLAGTPGYVPPEYYQSFRCTAKGDVYSYGVILLELLSGKRPIDPRVFGDDNNLVGWAKQLHNDKQSHEILDPELITNLSGDAELYHYLKVAFECLDEKSYKRPTMIQVMTKFKEVQTDSESDILDGISVKGSILEESQEREP

SEQ ID NO: 8863 - protein, 437 aa, Streptococcus pyogenes M1 GAS
MSMFLDTAKISVQAGRGGDGMVAFRREKYVPNGGPWGGDGGKGGSVIFRVDEGLRTLMDFRYNRKFKAKSGEKGMTKGMHGRGAEDLIVFVPQGTTVRDAETGKVITDLVEHGQEVVIAKGGRGGRGNIRFATPRNPAPEIAENGEPGEERQLELELKILADVGLVGFPSVGKSTLLSVVSSAKPKIGAYHFTTIVPNLGMVRTKSGDSFAMADLPGLIEGASQGVGLGTQFLRHIERTRVILHVIDMSASEGRDPYEDYVSINNELETYNLRLMERPQIIVANKMDIPEAQENLKAFKKKLAAQYDEFDDLPMIFPISSLAHQGLENLLEATAELLAKTDEFLLYDESDLVDEEAYYGFAETEKDFEITRDDDATWVLSGEKLERLFVMTNMERDESIMKFARQLRGMGVDEALRERGAKDGDPVRIGKFEFEFVD

SEQ ID NO: 8864 - protein, 69 aa, Pseudomonas sp. 30/3
MSNRQTGTVKWFNDEKGFGFITPQSGDDLFVHFKAIPSDGFKSLKEGQQVSFIATRGQKGMQAEEVQVI

SEQ ID NO: 8865 - protein, 398 aa, Lactococcus lactis subsp. lactis
MMGNKKIVLAYSGGLDTSVAVKWLTDKGFDVIADCMDVGEGKDLNFIHDKALQVGAVESVVLDCKEEFAKIFVGAALKGNLMYENKYPLVSALSRPLIAQKLVEVAKEKGATAIAHGCTGKGNDQVRFEVAIHSLAPELEVIAPVREWHWAREEEIEYANQNGVPIPADLDNPYSIDMNLWGRAIEAGVLENPWNTCPEDAFFMTNSVENAPNEAEFIEVEFKEGLPIALNGKSLELHEIIKKVNIIAGKHGIGRIDHIENRLVGIKSREFYECPAAITLLKAHKDLEDLTFVRELAHFKPVLENELANLIYNGLWFNPATKALIAYLDETQKVVNGIVKIKLYKGLATPVGRKSTNSLYSEKLATYTAADEFDQAAAVGFIKLWGLPTQVNAQVNLK

SEQ ID NO: 8866 - protein, 323 aa, Pantoea agglomerans
MKPEVLLYKSLPDDLRARLDEHFTVTAINGLSPETIAEHGGAGARRRHDRLQQHGGSSAAGENAKLRAASTISVGYDNFDVEALNQRGIVLIDTPTVLTETVADTMMALVLSSARRVVEVAERVKAGEWRRSIGPDWFGIDVHHKKMGILGMGRIGLALAQRAHHGFGMPILYNARKHHEEAESRFNAQYCDLDTLLRESDFLCISLPLTEQTHHMIGREQLAKMKPSAILINAGRGPVVDEQALIAALKDKTIHAAGLDVFEQEPLPVDSELLTLPNVVALPHIGSATHETRYGMARDAVDNLIAALAGKVEKNCVNPQVLR

SEQ ID NO: 8867 - protein, 631 aa, Caulobacter vibrioides
MSKIIGIDLGTTNSCVAIMDGKTPKVIENAEGARTTPSVVAFLEDGERLIGQPAKRQAVTNPTNTLFAIKRLIGRTASDPVVEKDKGMVPYEIVKGPTGDAWVKAHGKDYSPQEVSAFILQKMKEAAEAHLGEPVTKAVITVPAYFNDAQRQATKDAGKIAGLEVLRIINEPTAAALAYGLDKNDGKKIAVYDLGGGTFDVSILEIGDGVFEVKSTNGDTFLGGEDFDLRIVDYLADEFKKEQGVDLRKDKLALQRLREEAEKAKKELSSTAQYEVNLPFISMNASGPLHLNIKLSRAKLEALVDDLIARTIGPCEQALKDAGLKKSDIDEVILVGGMSRMPKVQQAVQDFFGREPHKGVNPDEVVALGAAVQAGVLQGDVKDVLLLDVTPLTLGIETLGGVFTPLIERNTTIPTKRSQTFSTADDNQSAVTIRVFQGERPMAQDNKMLGQFDLVGIPPAPRGVPQIEVTFDIDANGIVQVHAKDKATNKEQSIRIQANGGLSDSDIERMVKEAEANKAADEKKKQLVEAKNQGEAILHSTEKALAEHGDKVGAAEKTAIETGITELKTALEGEDVEAIQAKTQALIQASMKLGEAMYAAQQGSAEGGDAKADDGVVDAEFEEVDDNKPAA

SEQ ID NO: 8868 - protein, 1292 aa, Mucor racemosus
MKESKSTQPDDTLLRDDTADQPATQDTKSKKKETVSIFRLFQFATTRDLLLICIAGFCSCTTGAIQPISILFFGNVLKKLGEAIVEGNDLMEATMPIIKLYVYLGTGVMTAAYISNCLWVLTGENQARRIRQLYVHSILRQEMSWFDKSEEGSLTTRLSADVQLIQDGISEKFGQFLMCFAQFIAGCSVAFSKGWRLSIVMIAVTPAIACTGGVMGILVTKYTVETQDAYADAGSISEQVFAGIRTVYSFSLQNRFAKRYEEKLDKAMRAGIKRGIILGTGLGIFMFCLFAMYGLSFWYGSRLVHDHIMDGSTVLVVFLSMMMGEFSLLQLPTNLAAVSSASAAAYKIFETIKRVPDIDTSSPDGVIPSQVLGELEFKHVKFRYPTRPDTIILKDLSLKIKPGMTVAFVGPSGSGKSTSVQLLQRFYDPMSGSVSLDGKNLKELNVKWLRQQIGVVSQEPVLFNTSIRQNLMMGSENRNISMEEITAACKKANCHSFIKQLPKGYSTLVGEHGGMLSGGQKQRIAIARAILKNPAILLLDEATSALDTQSERLVQKALDEAAANRTTIVVAHRLSTVRNADLIVVMQHGDLIEQGTHDDLIAKGGVYSELVKKQQIQTSSNNTHNRKTKQEEEQEDEILLRNEAMEVNRKSCIELNRASNNASIISVPAARKSRFSVLDGFGREAASRKEAQEKHAKMKAPVWKVFMQMRPQWGWCMLGSIGACIAGTVFPLYALFFAKVITMLNENDDKDYGPMEGPNMYSFLFVILGMFAFLGFALQTVSFEIAGAKYTKTLRSMLFVSFMKQEIGYFDRDENNVGSLTSKLAVDAKNVNEMITRAWPDVVQIAFTSAIGMTIAFMHSWKLTLIIMCMTPLIVGAAGWNSKVQEGFEGSTKEANEQSAEVASEAIKEIRTVTALNKQSYFEERYYNATERPHRLAQRKAYTSSIGFALLQGTSLYTNAVAFYAGSKLITQGNLDLSDMVITMMSIMIMADGVGRSSIFVSTFAKAKIAAITTFEVLNRQPAIDSELEGIEPEGEDIDGDIDFSSIAFRYPARPDIPIFDGEFNLKGKQGQTIALVGPSGSGKSTTIGMLQRWYDPLSGTVRVDNHNVKSYTLGNLRSHMALVSQEPTLFDMTIGENIRFGVDDSKEVTQEEVEAVCKSANIHNFIVSLPKGYDQRVGDKGSQLSGGQKQRIAIARALIRKPKILLLDEATSALDSESEKLVQKALDNIIQEGGRTTITIAHRLSTITNADLICVIKDGKVIEQGNHWQLLKLDGVYKSLVQQQSLSSSSG

SEQ ID NO: 8869 - protein, 377 aa, Bilophila wadsworthia
MRVGIPTEIKVQEFRVGITPAGVHALKEAGHTVLVQKGAGLGSMITDEEYVAAGAQMVATAKECWDCDMVVKVKEPLAPEYDLFHEGLILYTYLHLAPEPALTKALLEKKVIGIAYETVQFDNGFLPLLAPMSEVAGRMATQVGAQMLTKIEGGMGLLMGGTAGVQAAHVVILGAGTVGLSAAKVAMGMGARVTILDSNLFRLRQIDDLFGGRIQTLASNAFNIAAATKDADLLVGSVLIPGALTPKLVTEAMVKTMKPGSAIVDVAIDQGGCIEPTAKHGATYHDKPTFKYPVNGGEVVCYSVGNMPGAVARTSTFTLTNATMPYMVDLANKGWKKACQDDKALARGINTYDGKVYFKGVSDALGYELHCTCDILK

SEQ ID NO: 8870 - protein, 536 aa, Buchnera aphidicola
MELQRNFFIFAFLFVSFLLWQAWQSQSLKKNKKNEETNSFFHLNHKKEDKNQIIIKNDVLRLVINMYGGDIEEASLLDYKTQLNSPENLKLLETKSDFVYQAQSGLIGKDGLDNSINKIRPLYSAKKNFFELGHNEKELRVPITFIAKNGITYIKNFILKPGKYNVEVEYDINNLSNKKLELNIFGQLKQTVKLPKNRDIYSGNFALQTFRGAAYSSSDAKYEKYKFDNIANHEHLHIITHHGWIAMLQQYFVVAWVPDTNISSSNIIYTSYLDNDGIAIIGYKSSLINIPSNSRYIIKSKLWIGPEKQQEMALVAPNLDLTVDYGFLWFLSQPLFKLLSTIHNFIGNWGFSIILITFMMKAITYPVTKAQYTSMSKMRELQPKINELKKNFGHDKQRMSKEIMALYKKEKINPLGGCLPVFIQMPIFLSLYYMLIGSVELRHAPFLFWIKDLSDQDPYYVLPIFMGLTMFFIQRTSSNNISDPFQQKIMHFMPFIFTVFFLWFPSGLVLYYIVSNLVTIIQQKYILSNFKKNQKR

SEQ ID NO: 8871 - protein, 2144 aa, Saccharomyces cerevisiae
MPVLKSDNFDPLEEAYEGGTIQNYNDEHHLHKSWANVIPDKRGLYDPDYEHDACGVGFVANKHGEQSHKIVTDARYLLVNMTHRGAVSSDGNGDGAGILLGIPHEFMKREFKLDLDLDIPEMGKYAVGNVFFKKNEKNNKKNLIKCQKIFEDLAASFNLSVLGWRTSRRFYYLGDVALSREPTILQPLLVPLYDEKQPEFNETKFRTQLYLLRKEASLQIGLENWFYVCSLNNTTIVYKGQLTPAQVYNYYPDLTNAHFKSHMALVHSRFSTNTFPSWDRAQPLRWLAHNGEINTLRGNKNWMRSREGVMNSATFKDELDKLYPIIEEGGSDSAALDNVLELLTINGTLSLPEAVMMMVPEAYHKDMDSDLKAWYDWAACLMEPWDGPALLTFTDGRYCGAILDRNGLRPCRYYITSDDRVICASEVGVIPIENSLVVQKGKLKPGDLIPSDTQLGEMVDTKKLKSQISKRQDFKSWLSKVIKLDDLLSKTANLVPKEFISQDSLSLKVQSDPRLLANGYTFEQVTFLLTPMALTGKEALGSMGNDAPLACLNENPVLLYDYFRQLFAQVTNPPIDPIREANVMSLECYVGPQGNLLEMHSSQCDRLLLKSPILHWNEFQALKNIEAAYPSWSVAEIDITFDKSEGLLGYTDTIDKITKLASEAIDDGKKILIITDRKMGANRVSISSLIAISCIHHHLIRNKQRSQVALILETGEAREIHHFCVLLGYGCDGVYPYLAMETLVRMNREGLLRNVNNDNDTLEEGQILENYKHAIDAGILKVMSKMGISTLASYKGAQIFEALGLDNSIVDLCFTGTSSRIRGVTFEYLAQDAFSLHERGYPSRQTISKSVNLPESGEYHFRDGGYKHVNEPTAIASLQDTVRNKNDVSWQLYVKKEMEAIRDCTLRGLLELDFENSVSIPLEQVEPWTEIARRFASGAMSYGSISMEAHSTLAIAMNRLGAKSNCGEGGEDAERSAVQENGDTMRSAIKQVASARFGVTSYYLSDADEIQIKIAQGAKPGEGGELPAHKVSKDIAKTRHSTPNVGLISPPPHHDIYSIEDLKQLIYDLKCANPRAGISVKLVSEVGVGIVASGVAKAKADHILVSGHDGGTGAARWTSVKYAGLPWELGLAETHQTLVLNDLRRNVVVQTDGQLRTGFDIAVAVLLGAESFTLATVPLIAMGCVMLRRCHLNSCAVGIATQDPYLRSKFKGQPEHVINFFYYLIQDLRQIMAKLGFRTIDEMVGHSEKLKKRDDVNAKAINIDLSPILTPAHVIRPGVPTKFTKKQDHKLHTRLDNKLIDEAEVTLDRGLPVNIDASIINTDRALGSTLSYRVSKKFGEDGLPKDTVVVNIEGSAGQSFGAFLASGITFILNGDANDYVGKGLSGGIIVIKPPKDSKFKSDENVIVGNTCFYGATSGTAFISGSAGERFGVRNSGATIVVERIKGNNAFEYMTGGRAIVLSQMESLNAFSGATGGIAYCLTSDYDDFVGKINKDTVELESLCDPVEIAFVKNLIQEHWNYTQSDLAARILGNFNHYLKDFVKVIPTDYKKVLLKEKAEAAKAKAKATSEYLKKFRSNQEVDDEVNTLLIANQKAKEQEKKKSITISNKATLKEPKVVDLEDAVPDSKQLEKNSERIEKTRGFMIHKRRHETHRDPRTRVNDWKEFTNPITKKDAKYQTARCMDCGTPFCLSDTGCPLSNIIPKFNELLFKNQWKLALDKLLETNNFPEFTGRVCPAPCEGACTLGIIEDPLGIKSVERIIIDNAFKEGWIKPCPPSTRTGFTVGVIGSGPAGLACADMLNRAGHTVTVYERSDRCGGLLMYGIPNMKLDKAIVQRRIDLLSAEGIDFVTNTEIGKTISMDELKNKHNAVVYAIGSTIPRDLPIKGRELKNIDFAMQLLESNTKALLNKDLEIIREKIQGKKVIVVGGGDTGNDCLGTSVRHGAASVLNFELLPEPPVERAKDNPWPQWPRVMRVDYGHAEVKEHYGRDPREYCILSKEFIGNDEGEVTAIRTVRVEWKKSQSGVWQMVEIPNSEEIFEADIILLSMGFVGPELINGNDNEVKKTRRGTIATLDDSSYSIDGGKTFACGDCRRGQSLIVWAIQEGRKCAASVDKFLMDGTTYLPSNGGIVQRDYKLLKELASQV

SEQ ID NO: 8872 - protein, 820 aa, Saccharomyces cerevisiae
MKTYVLLYGKLIMTTMILNTGRFEEWYKVCIIALKEKEIYVPSSPIAMLNGRLPLLRLGICRNMLSRPRLAKLPSIRFRSLVTPSSSQLIPLSRLCLRSPAVGKSLILQSFRCNSSKTVPETSLPSASPISKGSARSAHAKEQSKTDDYKDIIRLFMLAKRDWKLLLTAILLLTISCSIGMSIPKVIGIVLDTLKTSSGSDFFDLKIPIFSLPLYEFLSFFTVALLIGCAANFGRFILLRILSERVVARLRANVIKKTLHQDAEFFDNHKVGDLISRLGSDAYVVSRSMTQKVSDGVKALICGVVGVGMMCSLSPQLSILLLFFTPPVLFSASVFGKQIRNTSKDLQEATGQLTRVAEEQLSGIKTVQSFVAEGNELSRYNVAIRDIFQVGKTAAFTNAKFFTTTSLLGDLSFLTVLAYGSYLVLQSQLSIGDLTAFMLYTEYTGNAVFGLSTFYSEIMQGAGAASRLFELTDRKPSISPTVGHKYKPDRGVIEFKDVSFSYPTRPSVQIFKNLNFKIAPGSSVCIVGPSGRGKSTIALLLLRYYNPTTGTITIDNQDISKLNCKSLRRHIGIVQQEPVLMSGTIRDNITYGLTYTPTKEEIRSVAKQCFCHNFITKFPNTYDTVIGPHGTLLSGGQKQRIAIARALIKKPTILILDEATSALDVESEGAINYTFGQLMKSKSMTIVSIAHRLSTIRRSENVIVLGHDGSVVEMGKFKELYANPTSALSQLLNEKAAPGPSDQQLQIEKVIEKEDLNESKEHDDQKKDDNDDNDNNHDNDSNNQSPETKDNNSDDIEKSVEHLLKDAAKEANPIKITPQP

SEQ ID NO: 8873 - protein, 421 aa, Amycolatopsis lactamdurans
MALVVQKYGGSSLESADRIKRVAERIVATKKAGNEVVVVCSAMGETTDELLDLAQQVNPVPAGAEMDMLLTAGDGISNALVAMAISAQGAQAWSFTGSQAGVVTTAVHGNARIIDVTPSRVSERLEQGYVALVAGFQGVAQDTKDITTLGRGGSDTTAVALAAALNADVCEIYSDVDGVYSADPRIVPDARKLDSVPYEEMLELAASGSKILHLRSVESARRYGVPIRVRSSYSDKPGTTVTGSIEEIPVEQALITGVAHDRSEAKITVTGVPDHAGAAARIFRVIADAEIDIDMVLQNVSNTSSGRTDITFTLSKANGPKAVASLEKIKEELGFSSVLYDDHVGKVSLVGAGMRSHPGVTATFCEALCKVGVNIEIINTSEIRISVLIRDAQLDDAVRAIHDAFELGGDEEAVVYAGSGR

SEQ ID NO: 8874 - protein, 759 aa, Hordeum vulgare subsp. vulgare
MGIAAPPCQATRQHVSTPKSSAAIQDDGRPATASSMSHSQGFHQGSSGVYGFSSDGFDRPGSSQDQQHQEHDHVAQQSRRDKLRVQGFDPAAAGLLPIDGDQHVEPGAMYDHAAAAGASNMLAEMFNFSAQTPSGPSATELLASQMNANYRFGFRQQAPGAVAGLPGDGGWFGSAGPGRAGVVLGGANLLGETSSPKQQGGMAGLATDPAAAMQLFLMNPQQQQQSRSSPTSPPPSDAQSAIQHHEAFQAYGNAASSFGGGGAGVVEGQGLSLSLSPSLQQLEMAKQAEELRVRDGVLYFNRQQQQQQQQQAASVQQLPMALHGQVGSMGQQLHVGYGPAGVAGVLRNSKYTRAAQELLDEFCSVGRGQTIKGGGRGGSSSNPNASKGGPSSSGAAQSPSSASKEPPQLSPADRFEQQRKKAKLISMLDEVDRRYNHYCDQMQMVVNFFDSVMGFGAATPYTALAQKAMSRHFRCLKDAIAAQLRHTCELLGEKDAGTSSGLTKGETPRLRAIDQSLRQQRAFHHMGMMEQEAWRPQRGLPERSVSILRSWLFEHFLHPYPSDADKHLLARQTGLSRNQVSNWFINARVRLWKPMIEEMYQQETKELEGSSAAAGGGGGVGGPESGNDPSGADDLHSPTTTGSQQQLVIHHGGGRYGQQEHGMSGVHPHKLDPGAGPSVADAAFVGLDPAELLGGDAHVGAADDLYGRFEPGVRMRYGPATTGAVSGDVSLTLGLQHAGAGNQGPDGSGRFSLRDYNGC

SEQ ID NO: 8875 - protein, 364 aa, Aminobacter ciceronei
MATYHLKIVGKRDEGNDAASLWLEVPQDLRGAFSYRPGQFLTVERDGDGGRIARQYSLSSTPEAHRDLRITVKKIDGGAVSPWLVQDVGEGQALEVQPPRGRFFRGFDEPRHVLMLACGSGIAPILSIARHLLAQDAGHRVTIIYGNRTPDAVILGDEVGALAESHPTACHVEQVMSRAGESWHGARGRIDKTFIETRWKDWQAASHGLSTSIFLCGPQEFMDDAERAFVDLGLALADIHRESFDLVLNDDDGEPGLTLVGVNDPGESGPCERIVAVVGGEEYETVPEEGESILAALIRAEADVPFSCQEGTCASCISKLTEGSASVRPGVLQTLRQDDLDEGLTLACLSRPTTRSVRIDFDEI

SEQ ID NO: 8876 - protein, 347 aa, Psophocarpus tetragonolobus
GGELFDRIVQKGHYSERQAATLIKTIVEVVEACHSLGVMHRDLKPENFLFDTLHEDAKLKATDFGLSVFYKPGESFCDVVGSPYYVAPEVLRKLYGPESDVWSAGVILYILLSGVPPFWAETEPGIFRQILLGKIDFQSEPWHSISDSAKDLIRRMLDQNPKTRLTAHEVLRHPWIVDDNLAPDKPLDSAVLSRLKQFSAMNKLKKMALRVIAERLSEEEIGGLKELFKMIDTDNSGTITFDELKDGLKRVGSELMESEIKDLMDAADIDKSGTIDYGEFIAATVHLNKLEREENLVSAFSYFDKDGSGYITLDEIQQACKDFGLDDVHIDDMIKEIDQDNDGQIDY

SEQ ID NO: 8877 - protein, 415 aa, Phaseolus vulgaris
MNFKSFGNEAGGDGGGRPPGNFSLTRQSSVYSLTFDEFMNTMGGSGKDFGSMNMDELLKNIWTAEEVQTMASAGVAADDGGAGISHLQRQGSLTLPRTLSQKTVDEVWKDISKDYGGHGEPNLAQTPRQPTLREMTLEEFLVRAGVVREDAKPNDGVFMDLARAGNNNGLGFEFQQMNKVAAATGLMGNRLNNDPLVGLQSSANLPLNVNGVRSSSQQPQMQSPQSQQQHHQQQIFPKQSAMSYAVAQMPQGMVRGGIVGFRGDQGLSVQGGGIGMVGLAPGSVHVATGSPAANQLSGDKMAKSNGDTSSVSPVPYVFNGGMRGRKSGGAVEKVIERRQRRMIKNRESAARSRARKQAYTMELEAEVAKLKEENQGLQKKQAEIMEIQKNQFKEMMNLQREVKRRRLRRTQTGPW

SEQ ID NO: 8878 - protein, 191 aa, Cucumis sativus
EFCSTSNMLKTLERYQKCSYGAVEVTKPTKELESSYREYLKLKSRFESLQRTQRNLLGEDLGPLNSKELEQLERQLESSLKQVRSTKTQYMLDQLSDLQNKEQMLIETNRALQIKLEEISSRNNIRLTWDGGDQSMSYGPQNAQTQGFFQPLECNPTLQIGYTSAVSDQITSTTTPTHAQQVNGFLPGWML

SEQ ID NO: 8879 - protein, 386 aa, Bruguiera gymnorhiza
MAKPVSIEVWNPRGRYRVVSTKPMPGTRWINLLVQQDCRLEICTEKKTILSVEDIIALMGDKCDGVIGQLTEDWGETLFAALSKAGGKAFSNMAVGYNNVDVNAANKYGVAVGNTPGVLTETTAELAASLSLAAARRIVEADEFMRAGLYDGWLPNLFVGNLLKGQTVGVIGAGRIGSAYARMMVEGFKMNLIYYDLYQATRLEKFVTAYGQFLKANGEQPVTWKRAATMDEVLREADVISLHPVLDKTTYHLINKESLASMKKEAVLVNCSRGPVIDEVALVEHLRRNPMFRVGLDVFEDEPYMKPGLADMKNAIVVPHIASASKWTREGMATLAALNVLGKIKGYPVWGDPNRVEPFLNENAPPPAACPSIVNSKALGLPVSKL

SEQ ID NO: 8880 - protein, 104 aa, Vernicia fordii
MAMIKAQELVSSNSVVVFSKTFCPYCTSVKQLLNQLGAQFKVIELDSESDGSDLQNALAEWTGQRTVPNVFIGGKHIGGCDKTTGMHQEGKLIPLLTEAGAVKA

SEQ ID NO: 8881 - protein, 108 aa, Solanum lycopersicum
MSLAKAKEIVSGNPVAVFSKTYCPFCVSVKDLLSKLGATFKAVELDSEKDGSEIQAALAEWTGQRTVPNVFIGRKHIGGCDATTALHREGKLLPLLTEAGAIAKTSTA

SEQ ID NO: 8882 - protein, 484 aa, Mycobacterium tuberculosis CDC1551
MKGSSVPRFVDRVVIHTRAGSGGNGCASVHREKFKPLGGPDGGNGGRGGSIVFVVDPQVHTLLDFHFRPHLTAASGKHGMGNNRDGAAGADLEVKVPEGTVVLDENGRLLADLVGAGTRFEAAAGGRGGLGNAALASRVRKAPGFALLGEKGQSRDLTLELKTVADVGLVGFPSAGKSSLVSAISAAKPKIADYPFTTLVPNLGVVSAGEHAFTVADVPGLIPGASRGRGLGLDFLRHIERCAVLVHVVDCATAEPGRDPISDIDALETELACYTPTLQGDAALGDLAARPRAVVLNKIDVPEARELAEFVRDDIAQRGWPVFCVSTATRENLQPLIFGLSQMISDYNAARPVAVPRRPVIRPIPVDDSGFTVEPDGHGGFVVSGARPERWIDQTNFDNDEAVGYLADRLARLGVEEELLRLGARSGCAVTIGEMTFDWEPQTPAGEPVAMSGRGTDPRLDSNKRVGAAERKAARSRRREHGDG

SEQ ID NO: 8883 - protein, 665 aa, Scherffelia dubia
  misc_feature (178)..(178): Xaa can be any naturally occurring amino acid
  unsure (1)..(665): unsure at all Xaa locations
RSVAAMAGRGRAFVVSAVCALALLCAVVRAEEEAKKIGTVIGIDLGTTYSCVGVYKNGRVEIIANDQGNRITPSYVAFTDNERLIGDAAKNQATSNPERPVYDVKRLIGRKFTDKDVQRDMKLVSYTIIDHNGKPYIQVDVKGEKKSFSPEEVSAMILVKMKETAEAFLGKTVKHAVXTVPAYFNDAQRQATKDAGVIAGLAVERIINEPTAAAIAYGLDQKGGEKNILVFDLGGGTFDVSVLAIDNGVFEVMSTNGDTHLGGEDFDQRVMEYFIKLIKKKYKKDISGDNRAKQKLRREPERAKRALSNQHQVRVEIEGLYEGVDLSEPLTRARFEELNNDLFRKTLGPVKKAMEDAGLEKSEIQEILLVGGSTRIPKVQELLKEYFDGKEPNKGVNPDEAVAFGAAVQGGILSGEGGEEVDGLLLLDVAPLTLGIETVGGVMTKLIPRNTVIPTKKSQTFTTYQDQQTTVSIQVFEGERTMTRDCHLLGKFDLNGIPPAPRGVPQIEVTFEVDANGILNVAAEDKGTGKKEKIVITNDKGRLSQEEIERMVQEAEEFADEDKKVKERIDARNSLETYCYNMKNTVEDSDKLADKLAEEDKEKVKEAVQEALDWMDENQTAEADEYKEKLKELEDVCNPIVSAAYQGGEGGGAGGEEDLGDHDEL

SEQ ID NO: 8884 - protein, 1122 aa, Physcomitrella patens
MSAPKKTYSSTSSAKSKAHSVRVAQTTADAALHAVFEKSGVSGDNFDYSKSVSKSTAGSLHTGAVTAYLQRMQRGGLTQSFGCMVAVEETGFRVIAYSENAPEFLDLMPQAVPNIGEINTLGIGTDVRTLFTPSSAASLEKAAETQEISLLNPITVYCRSKKPLYAIAHRIDIGIVIDFEAVNMNDVTISADGALQSHKLAAKAITRLQALPGGDIGLLCDTVVEEVRELTGYDRVMAYKFHEDEHGEVVAEIRRTDLEPYLGLHYPATDIPQASRFLFMKNRVRMIGDCSAPPVKIVQDPNLRQPVSLAGSTLRSPHGCHAQYMGNMGSISSIVMAVIINDNEDDSRGSVQRGRKLWGLVVCHHTSPRTVPFPLRSACEFLMQVFGLQLNMEVELAAQLREKHILRTQTLLCDMLLRDAPIGIVSQVPNIMDLVKCDGAALYYGKRFWLLGTTPTESQIKDIAEWLLEYHKDSTGLSTDSLADANYPAAHLLGDAVCGMAAAKITSKDFLFWFRSHTAKEIKWGGAKHDPGEKDDNRKMHPRSSFKAFLEVVKRRSLPWEDVEMDAIHSLQLILRGSFQDIDDSDTKTMIHARLNDLKLHDMDELSIVANEMVRLIETATAPILAVDSNGMINGWNAKIAQETGLPVAEAMGRSLVKDLVMDESLEVVERLLYLALRGEEEQGVEIKLKTFGAQTVKGAVILIVNACASRDVSENVVGVCFVGQDVTGQKMFMDKFTRIQGDYKTIVQNPHPLIPPIFGADEFGYCFEWNPAMEGLTGWKRDEVIGKLLVGEIFGMQKMCCQMKSQDAMTKFMISLNSAMDGQNTDKFSLSFFDREGRYVDALLSTNKRTNADGAITGVICFLQIASSELQQALRVQQATEKVAIAKLKELAYIRQEIKNPLCGITFTRQLLEDTDLSNDQKQFLDTSAVCEQQLQKVLNDLDLESIEDGYLELDTAEFEMRTVMDAVISQGMTISREKGLQIIRETPREIITMRLFGDQVRLQQVLSDFLLNAVRFTPSSEGWVKIKVVPTRKRLGGNEHVMHLEFRVSHPGAGLPEELVLEMFDKGKGMTQEGLGLNICRKLVRLMNGDVQYVREAMQCYFVLYVELPLAQQDDAASQM

SEQ ID NO: 8885 - protein, 620 aa, Campylobacter lari
MAKVIGIDLGTTNSCVSVYERGESKVIPNKEGKNTTPSVVAFTDKGEVLVGDSAKRQAVTNPEKTIYSIKRIMGLMINEEAAKEAKNRLPYHITERNGACAIEIAGKIYTPQEISAKVLMKLKEDAEAFLGEKVEDAVITVPAYFNDAQRKATKEAGQIAGLNVLRIINEPTAAALAYGLDKKESEKIVVYDLGGGTFDVTVLETGDNVVEVLATGGNAFLGGDDFDNKLIDFLANEFKDETGIDLKNDVMALQRLKEAAENAKKELSSANETNINLPFITADASGPKHLTKTLTRAKFESMIDGLVAETISKINEVVKDAGLDKSEVKEIVMVGGSTRVPLVQEEVKKAFGKELNKSVNPDEVVAIGAAIQGAVIKGDVKDVLLLDVTPLSLGIETLGGVMTKIIEKGTTIPTKKEQVFSTAEDNQSAVTINVLQGEREFSRDNKSLGNFNLEGIPPAPRGMPQIEVTFDIDANGILTVSAKDKATGKAQEIKITGSSGLSEEEINNMVKDAELHKEEDRKRKEAVEARNAADSLVHQVEKSLSELGDKVGDDDKANIQKALGELKETLKNANASKEEIESKMKALSEVSHKLAENMYKKEEPNAQKKKDDDVIDAEVE

SEQ ID NO: 8886 - protein, 620 aa, Campylobacter lari
MAKVIGIDLGTTNSCVSVYERGESKVIPNKEGKNTTPSVVAFTDKGEVLVGDSAKRQAVTNPEKTIYSIKRIMGLMINEEAAKEAKNRLPYHITERNGACAIEIAGKIYTPQEISAKVLMKLKEDAEAFLGEKVEDAVITVPAYFNDAQRKATKEAGQIAGLNVLRIINEPTAAALAYGLDKKESEKIVVYDLGGGTFDVTVLETGDNVVEVLATGGNAFLGGDDFDNKLIDFLANEFKDETGIDLKNDVMALQRLKEAAENAKKELSSANETNINLPFITADASGPKHLTKTLTRAKFESMIDGLVAETISKINEVVKDAGLDKNEVKEIVMVGGSTRVPLVQEEVKKAFGKELNKSVNPDEVVAIGAAIQGAVIKGDVKDVLLLDVTPLSLGIETLGGVMTKIIEKGTTIPTKKEQVFSTAEDNQSAVTINVLQGEREFSRDNKSLGNFNLEGIPPAPRGMPQIEVTFDIDANGILTVSAKDKATGKAQEIKITGSSGLSEEEINNMVKDAELHKEEDRKRKEAVEARNAADSLVHQVEKSLSELGDKVGDDDKANIQKALDELKETLKNANASKEEIESKMKALSEVSHKLAENMYKKEEPNAQKKKDDDVIDAEVE

SEQ ID NO: 8887 - protein, 620 aa, Campylobacter lari
  misc_feature (155)..(155): Xaa can be any naturally occurring amino acid
  unsure (1)..(620): unsure at all Xaa locations
MAKVIGIDLGTTNSCVSVYERGESKVIPNKEGKNTTPSVVAFTDKGEVLVGDSAKRQAVTNPEKTIYSIKRIMGLMINEEAAKEAKNRLPYHITERNGACAIEIAGKIYTPQEISAKVLMKLKEDAEAFLGEKVEDAVITVPAYFNDAQRKATKXAGQIAGLNVLRIINEPTAAALAYGLDKKESEKIVVYDLGGGTFDVTVLETGDNVVEVLATGGNAFLGGDDFDNKLIDFLANEFKDETGIDLKNDVMALQRLKEAAENAKKELSSANETNINLPFITADASGPKHLTKTLTRAKFESMIDGLVAETISKINEVVKDAGLDKSEVKEIVMVGGSTRVPLVQEEVKKAFGKELNKSVNPDEVVAIGAAIQGAVIKGDVKDVLLLDVTPLSLGIETLGGVMTRIIEKGTTIPTKKEQVFSTAEDNQSAVTINVLQGEREFSRDNKSLGNFNLEGIPPAPRGMPQIEVTFDIDANGILTVSAKDKATGKAQEIKITGSSGLSEEEINNMVKDAELHKEEDRKRKEAVEARNAADSLVHQVEKSLSELGDKVGDDDKANIQKALDELKETLKNANASKEEIEGKMKALSEVSHKLAENMYKKEEPNAQKKKDDDVIDAEVE

SEQ ID NO: 8888 - protein, 620 aa, Campylobacter lari
MAKVIGIDLGTTNSCVSVYERGESKVIPNKEGKNTTPSVVAFTDKGEVLVGDSAKRQAVTNPEKTIYSIKRIMGLMINEEAAKEAKNRLPYHITERNGACAIEIAGKIYTPQEISAKVLMKLKEDAEAFLGEKVEDAVITVPAYFNDAQRKATKEAGQIAGLNVLRIINEPTAAALAYGLDKKESEKIVVYDLGGGTFDVTVLETGDNVVEVLATGGNAFLGGDDFDNKLIDFLANEFKDETGIDLKNDVMALQRLKEAAENAKKELSSANETNINLPFITADASGPKHLTKTLTRAKFESMIDGLVAETISKINEVVKDAGLDKSEVKEIVMVGGSTRVPLVQEEVKKAFGKELNKSVNPDEVVAIGAAIQGAVIKGDVKDVLLLDVTPLSLGIETLGGVMTKIIEKGTTIPTKKEQVFSTAEDNQSAVTINVLQGEREFSRDNKSLGNFNLEGIPPAPRGMPQIEVTFDIDANGILTVSAKDKATGKAQEIKITGSSGLSEEEINNMVKDAELHKEEDRKRKEAVEARNAADSLVHQVEKSLSELGDKVGDDDKANIQKALDELKETLKNANASKEEIEGKMKALSEVSHKLAENMYKKEELNAQKKKDDDVIDAEVE

SEQ ID NO: 8889 - protein, 620 aa, Campylobacter lari
MAKVIGIDLGTTNSCVSVYERGESKVIPNKEGKNTTPSVVAFTDKGEVLVGDSAKRQAVTNPEKTIYSIKRIMGLMINEEAAKEAKNRLPYHITERNGACAIEIAGKIYTPQEISAKVLMKLKEDAEAFLGEKVEDAVITVPAYFNDAQRKATKEAGQIAGLNVLRIINEPTAAALAYGLDKKESEKIVVYDLGGGTFDVTVLETGDNVVEVLATGGNAFLGGDDFDNKLIDFLANEFKDETGIDLKNDVMALQRLKEAAENAKKELSSANETNINLPFVTADASGPKHLTKTLTRAKFESMIDGLVAETISKINEVVKDAGLDKSEVKEIVMVGGSTRVPLVQEEVKKAFGKELNKSVNPDEVVAIGAAIQGAVIKGDVKDVLLLDVTPLSLGIETLGGVMTKIIEKGTTIPTKKEQVFSTAEDNQSAVTINVLQGEREFSRDNKSLGNFNLEGIPPAPRGMPQIEVTFDIDANGILTVSAKDKATGKAQEIKITGSSGLSEEEINNMVKDAELHKEEDRKRKEAVEARNAADSLVHQVEKSLSELGDKVGDDDKANIQKALDELKETLKNANASKEEIEGKMKALSEVSHKLAENMYKKEEPNAQKKKDDDVIDAEVE

SEQ ID NO: 8890 - protein, 622 aa, Campylobacter lari
MSKVIGIDLGTTNSCVSVYERGESKVIPNKEGKNTTPSVVAFTDKGEILVGDSAKRQAVTNPEKTIYSIKRIMGLMINEDAAKEAKNRLPYHITERNGACAIEIAGKIYTPQEISAKVLMKLKEDAEAFLGEKVEDAVITVPAYFNDAQRKATKEAGTIAGLNVLRIINEPTAAALAYGLDKKESEKIVVYDLGGGTFDVTVLETGDNVVEVLATGGNAFLGGDDFDNKLIDFLASEFKDETGIDLKNDVMALQRLKEAAENAKKELSSANETNVNLPFITADASGPKHLTKTITRAKFESMIDGLVAETISKINEVVKDAGLDKSEVKEIVMVGGSTRVPLVQEEVKKAFGKDLNKSVNPDEVVAIGAAIQGAVIKGDVKDVLLLDVTPLSLGIETLGGVMTKIIEKGTTIPTKKEQTFSTAEDNQSAVTINVLQGEREFSRDNKSLGNFNLEGIPPAPRGMPQIEVTFDIDANGILTVSAKDKATGKAQEIKITGSSGLSEEEINNMVKDAELHKEEDRKRKEAVEARNSADSLVHQVEKSLSELGEKVSDEDKANIQKALDDLKETLKNANASKEEIESKMKALSEVSHKLAENMYKKDEKPSDDKKKKDDDVIDAEVE

SEQ ID NO: 8891 - protein, 243 aa, Synechococcus sp. PCC 7002
MMYNPDFNQPPFSSANPVPELPATQITDLATAFRQFHSGPFPPVVENYDRGKTIFFPGDPAERVYFLLKGAVRLSRVYEAGEEITVALLRENSVFGVLSLLTGQKSDRFYHAVAFTPVELLSAPIEQVQKALNEHPELAMLMLKGLSSRILQTEMMIETLAHRDMGSRLVSFLLILCRDFGVPTDEGIRIDLKLSHQAIAEAIGSTRVTVTRLLGELREQDMISIYKKKITVHDPVNLSQQFA

SEQ ID NO: 8892 - protein, 356 aa, Populus tremula x Populus alba
MSLLTDLINLKLSDITDKIIAEYIWIGGSGMDMRSKARTLSGPVTDPAQLPKWNYDGSSTGQAPGEDSEVILYPQAIFKDPFRRGNNILVMCDAYTPQGEPIPTNKRYAAAKIFSSPEVAAEEPWYGIEQEYTLLQRDVNWPIGWPVGGYPGPQGPYYCGIGADKAYGRDIVDAHYKACLYAGINISGINGEVMPGQWEFQVGPSVGISAGDHIWAARYILERITEQAGVVLSFDPKPIKGDWNGAGAHTNYSTKSMREDGGYEVIKKAIEKLGLRHKEHISAYGEGNERRLTGRHETADINTFSWGVANRGASIRVGRDTEKEGKGYFEDRRPASNMDPYVVTSMIAETTILWKP

SEQ ID NO: 8893 - protein, 585 aa, Hordeum vulgare subsp. vulgare
MCGILAVLGCADDTQGKRVRVLELSRRLKHRGPDWSGMHQVGDCYLSHQRLAIIDPASGDQPLYNEDKSIVVTVNGEIYNHEQLRAQLSSHTFRTGSDCEVIAHLYEEHGENFIDMLDGVFSFVLLDTRDNSFIAARDAIGVTPLYVGWGIDGSVWISSEMKGLNDDCEHFEIFPPGHLYSSKEGGFKRWYNPPWFSEVIPSVPYDPLALRKAFEKAVTKRLMTDVPFGVLLSGGLDSSLVAAVTVRHLAGTKAAKRWGTKLHSFCVGLEGSPDLKAAKEVANYLGTMHHEFTFTVQDGIDAIEDVIYHTETYDVTTIRASTPMFLMSRKIKSLGVKMVISGEGSDEIFGGYLYFHKAPNKEELHRETCQKIKALHQYDCLRANKATSAWGLEARVPFLDKEFINEAMSIDPEWKMIRPDLGRIEKWVLRKAFDDEEQPFLPKHILYRQKEQFSDGVGYSWIDGLKAHTESNVTDKMMSNAKFIYPHNTPTTKEAYCYRMIFERFFPQNSAILTVPGGPSVACSTAKAVEWDARWSGNLDPSGRAALGVHLSAYEQEHLPATIMAGTSKKPRMIKVAAPGVAIES

SEQ ID NO: 8894 - protein, 847 aa, Rosa hybrid cultivar
MEMPGRRSNYTLLSQVPDDHFAAATATSFYESEGKNNNNKAKGDSRGFDWETGGGEYRAAPANRIGNVYSSVGLQRQSSGSSFGESSLSGEYYAPTLSTTAANEIDGFGYVNDDGFKTGGGGGEFRGKGGGMDGGVGPPGGSSSGKSWAQQTEESYQLQLALALRLSSEATCADDPNFLDPVPDESSSRLSSSADAVSHRFWVNGCLSYFDKVPDGFYLIHGIDSYVWSMCTDVQESGRIPSIESLKSVDPGTGSSIEVVLIDRRSDPSLKELQNRVLSISYACITTTEIVDQLAKLVCSRMGGSASVGEAEFFSIWRESSDDLKDCLGSVVVPIGSLSIGLCRHRALLFKVLADTIDLPCRIAKGCKYCTRDDASSCLVRFGIDRELLVDLIGNPGCLCEPDSLLNGPSSISISSPLRFPRLRTVEPTIDFRSLAKQYFSDCQLLNLVFDEAPAGSAGDEDNKGFSMYPKQKFTDGNNLFLVSGLGDDTSMHVDDRNPQFLKSFNPSQNIVHQQTVLKDQIPLKRIPPIGHRDISRLDTSKDSRFGEGLQVVPSKPNKELTLDVDDLDIPWSDLVLKERIGAGSFGTVHRADWHGSDVAVKILMEQEFHAERFNEFLREVAIMKRLRHPNIVLFMGAVTKPPNLSIVTEYLSRGSLYRLLHKPGPILDERRRLYMAHDVAKGMNYLHRRNPPIVHRDLKSPNLLVDKKYTVKVCDFGLSRLKANTFLSSKSAAGTPEWMAPEVLRDEPSNEKSDVYSFGVILWELATLQQPWGNLNPAQVVAAVGFKNKRLEIPRDLNPQVASIIEACWANEPWKRPSFASIMESLRPLIKAPTPQPSHADMPILT

SEQ ID NO: 8895 - protein, 158 aa, Arabidopsis thaliana
MSDDEHHFESSDAGASKTYPQQAGNIRKGGHIVIKGRPCKVVEVSTSKTGKHGHAKCHFVAIDIFTSKKLEDIVPSSHNCDVPHVNRVDYQLIDISEDGFVSLLTDNGSTKDDLKLPTDEALLTQLKNGFEEGKDIVVSVMSAIGEEQMCALKEVGPK

SEQ ID NO: 8896 - protein, 398 aa, Lactobacillus pentosus
MAKILAINAGSSTLKWKLFSVPEETVIASGMVDRLGLPNSVFTIKKADGSKETETKDTIDAKEAAAMVLTRLKNDNIVDQLTDIKGVGHRVVAGGEDFKDSVVITPQTLKKIKDLSEYAPLHNPTQAYYIEVFRDLLPKAVQVAVFDTSLYADMPKVNYLYSIPYDYYEKFGARKYGAHGTSHRYVANRTAQLLGKPLDELKLVTLHLGSGASITAFDHGQAIDTSMGFTPLAGITMSTRSGDIDASIIPFLMRHLGISDVEDFIDILNHKSGLLGISGLSPDMRDLDKTQDTREQSKLAIEIFVNRVVKYVGSYIAEMNGIDALVFTAGMGENSWMIRERIAKSLSYFGITVDVDKNHMHGKEEVISKEGEPVKVMVVPTNEELMIVRDVERLSSAK

SEQ ID NO: 8897 - protein, 463 aa, Streptococcus pyogenes str. Manfredo
MTIFRKKKKYSNKTEMQRHFKVIDLVFLGLGSMVGTGIFTVTGIGAAKYAGPALTISIIISAITIGILALFYAEFASRMPSNGGAYSYVYATLGEFPAWLVGWYIIMEFLTAISSVAVGWGSYLKGLLANYNIVLPNALNGTFNLKNGTYIDILPVLVMFFVTGIVLMNSKLALRFNSFLVILKFSALALFIFVGIFFIDHNNWSHFAPYGVGQITGGKTGIFAGASVMFFAFLGFESISMAVDEVKEPQKTIPKGIILSLIIVTALYIVVTTILTGIVHYTKLNVPDAVAFALRNIRLYWAADYVSIVAILTLITVCISMTYALARTIYSISRDGLLPKSLYTLTKKNKVPQNATLVTGLLAMICAGIFPLSSLAEFVNICTLAYLIILSGAIIKLRRIEGEPKANEFKTPLVPFLPMLAIIICLSFMSQYKAFTWIAFAIATIIGILIYLAYGYTHSIENK

SEQ ID NO: 8898 - protein, 398 aa, Streptococcus pyogenes str. Manfredo
MSKTIAINAGSSSLKWQLYQMPEEEVLAQGIIERIGLKDSISTVKYDGKKEEQILDIHDHTEAVKILLNDLIHFGIIAAYDEITGVGHRVVAGGELFKESVVVNDKVLEHIEELSVLAPLHNPGAAAGIRAFRDILPDITSVCVFDTSFHTSMAKHTYLYPIPQKYYTDYKVRKYGAHGTSHKYVAQEAAKMLGRPLEELKLITAHIGNGVSITANYHGKSVDTSMGFTPLAGPMMGTRSGDIDPAIIPYLIEQDPELKDAADVVNMLNKKSGLSGVSGISSDMRDIEAGLQEDNPDAVLAYNIFIDRIKKYIGQYFAVLNGADALVFTAGMGENAPLMRQDVIGGLTWFGMDIDPEKNVFGYRGDISTPESKVKVLVISTDEELCIARDVERLKNTK

SEQ ID NO: 8899 - protein, 394 aa, Streptococcus pyogenes str. Manfredo
MTKEVVITSAYRTPIGNFGGVFKSLSAVDLGVTVVTKILADTGLKSDAIDEVIFGNVLHAGLGQNVARQVALNAGLSYDTPAFTIDMVCGSGLKAVELGAHKIQTGNADIVLVGGTENMSQAPYVLQGQRWGSRMGDSKVVDTMLKDGLSDAFAGYHMGITAENIVQQYGLTREEQDAFAADSQRKAQLAIEKGRFKEEIAPVTIPQRKGEPLLIDQDEYPKFGTTVDKLAKLRPAFIKDEGTVTAGNASGINDGAAAILLMSKEKAEELGLPILAKITSYASAGVDPSIMGCGPIPATKKALAKAQLTIDDIDLIEANEAFAAQALAVSRDLGFDNEKVNVNGGAIALGHPIGASGARILVTLLAEMAKRDVRHGLATLCIGGGQGQSIIVTR

SEQ ID NO: 8900 - protein, 404 aa, Streptococcus pyogenes str. Manfredo
MKIIEKSSKLEHVAYDIRGPVLDEANRMIASGEKILRLNTGNPAAFGFEAPDEVIRDLIVNARLSEGYSDSKGIFSARKAIMQYCQLKGFPDVDIEDIYLGNGVSELISMSLQALLDNGDEVLVPMPDYPLWTACVSLGGGKAVHYLCDEEAGWYPDIADIKSKITSRTKAIVVINPNNPTGALYPKEILEDIVALAREHQLIIFADEIYDRLVMDGKEHIAIASLAPDVFCVSMNGLSKSHRIAGFRVGWMVLSGPKDHVKGYIEGLNMLANMRLCSNVLAQQVVQTSLGGHQSVDALLLPGGRIFEQRNFIYEAINAIPGLSAVKPEAGLYLFPKIDRQMYRIDDDEEFVLQLLKQEKVMLVHGRGFNWKDPDHFRIVYLPSVEELEDVQEKITRVLYQYRR

SEQ ID NO: 8901 - protein, 395 aa, Streptococcus pyogenes str. Manfredo
MKNIVIVEALRTPIGAFGGSFKSVSAVELGTTVLKKILDKTQVKPEMVDEVILGNVLHAGLGQNVARQIAIHSGIPSDKTAFTLDMVCGSGLKAIQLATQSIMLGDADIVIAGGVENMSQAAYVSTQHRFGQRLGNSQLIDTLVHDGLTDAFNNYHMGITAENVAQKYGISREEQDQFALESQEKAAKALENHRFADEIVPVSVPQRRKDPLIVTTDEYPKVDTSLEKLQQLRPAFLPKEGTVTAGNASGINDGAALLMLMTEEKALELGLTPLVTIESYASAGVAPELMGTGPIPATQKVLKKAGLTISDLDLVESNEAFAAQSLAVLKDLKLNPEIVNVNGGAIALGHPIGASGARILVTLIHEMKKRQVTRGLATLCIGGGQGTAVIVKNNT

SEQ ID NO: 8902 - protein, 330 aa, Streptococcus pyogenes str. Manfredo
MKKSFIHQQEEISFVKNTFTQYLIAKLDVVEVQGPILSRVGDGMQDNLSGTENPVSVNVLKIPNATFEVVHSLAKWKRHTLARFGFNEGEGLVVNMKALRPDEDSLDQTHSVYVDQWDWEKVIPDGKRNLAYLKETVETIYKVIRLTELAVEARYDIEAVLPKKITFIHTEELVAEYPDLTPKERENAITKEFGAVFLIGIGGVLPDGKPHDGRAPDYDDWTTETENGYHGLNGDILVWNDQLGSAFELSSMGIRVDEEALKRQVEMTGDQDRLAFDWHKSLLNGLFPLTIGGGIGQSRMVMFLLRKKHIGEVQTSVWPQEVRDSYDNIL

SEQ ID NO: 8903 - protein, 437 aa, Streptococcus pyogenes str. Manfredo
MSMFLDTAKISVQAGRGGDGMVAFRREKYVPNGGPWGGDGGKGGSVIFRVDEGLRTLMDFRYNRKFKAKSGEKGMTKGMHGRGAEDLIVFVPQGTTVRDAETGKVITDLVEHGQEVVIAKGGRGGRGNIRFATPRNPAPEIAENGEPGEERQLELELKILADVGLVGFPSVGKSTLLSVVSSAKPKIGAYHFTTIVPNLGMVRTKSGDSFAMADLPGLIEGASQGIGLGTQFLRHIERTRVILHVIDMSASEGRDPYEDYVSINNELETYNLRLMERPQIIVANKMDMPEAQENLKAFKKKLAAQYDEFDDLPMIFPISSLAHQGLENLLEATAELLAKTDEFLLYDEADLVDEEAYYGFAETEKDFEITRDDDATWVLSGEKLERLFVMTNMERDESIMKFARQLRGMGVDEALRERGAKDGDPVRIGKFEFEFVD

SEQ ID NO: 8904 - protein, 331 aa, Streptococcus pyogenes str. Manfredo
MSIRSLFGGLREKILGKNMKIVFPEGNDERVVRAAARLKFEGLLEPIILGQSEEVRNLLTKLGFADQDYTIINPNEYADFDKMKETFVDIRKGKATLEDADKMLRDVNYFGVMLVKMGLADGMVSGAIHSTADTVRPALQIIKTKPGISRTSGVFLMNRENTSERYVFADCAINIDPTAQELAEIAVNTAETAKIFDIDPKIAMLSFSTKGSGKAPQVDKVREATEIAKGLNPDLALDGELQFDAAFVPETAAIKAPDSAVAGQANTFIFPDLQSGNIGYKIAQRLGMFDAIGPILQGLNKPVNDLSRGSSAEDIYKLAIITAAQAIESQG

SEQ ID NO: 8905 - protein, 375 aa, Streptococcus pyogenes str. Manfredo
MTYFDNAATTPLSPNVIRAMTAAMQDNFGNPSSIHFYGRRANKILRECRQAIARNLGASEQQIIVTSGGTESNNMAIKGYALAHQAKGKHLITTTIEHHSVLHTMAYLEERFGFEVTYLPCQNGQINLSDLKQALRDDTILVSVMYANNETGDLLPIKDIGNLLKDHQAAFHVDAVQAVGKLKIIPSELGIDFLSASAHKFHGPKGCGFLYSNGQPIDPLLHGGDQEGKRRASTENMLGIIGMAQALTDAMTCLDQSTDHIISLRHHLISLLEGLPYYINQGTHYLPHVLNIGFLGYQNTILLTQLDLAGIAVSTGSACTAGAVNPSHVLAAYYGDDSSRLKESIRISFSDQNSIEDVNQLAQTLKNILGGTDGF

SEQ ID NO: 8906 - protein, 380 aa, Streptococcus pyogenes str. Manfredo
MIYFDNAATTIPYGEALKTYQEVATKIYGNPSSLHQLGTNASRILEASRKQIAGLLGVKSEEIFFTSGGTESANWAIKGIAFEKTAFGKHIIISAIEHPAVSESVKWLLTQGFEVSYAPVTTQGVVDVNALAELIRPDTILISIMAVNNEMGAIQPIRAISNLLANQPTITFHVDAVQAIGKIPLCDYMTNRVDLASFSGHKFHSVRGVGFLYKKAGKRLNPLLSGGGQEQELRSTTENVAGIASMAKALRIVTEKQVSVLPKLTAMRDVIYKALSAYPDVTVFSAQEGFAPNILTFGIRGVRGEVIVHAFEKYEIYISTTSACSSKAGKPSGSLVAMGIPVKTAQTAVRISLDDDNDMGQVEQFLTIFKQIYDKTQKVR

SEQ ID NO: 8907 - protein, 397 aa, Streptococcus pyogenes str. Manfredo
MPKLSKRVLEMKESVTLAAGARAKALKAQGRDVLNLTLGEPDFFTPKHIQDKAIESIQNGTASFYTNASGLPELKAAIATYLKNQYGYHLSPDQIVAGTGAKFILYAFFMAVLNPGDQVLLPTPYWVSYSDQVKMAEGQPIFVQGLEENQFKVTVDQLERARTSKTKVVLINSPSNPTGMIYGAEELRAIGEWAVHNDILILADDIYGSLVYNGNQFVPISTLSEAIRRQTITVNGVAKSYAMTGWRVGFAAGEPEIISAMSKIIGQTTSNLTTVSQYAAIEAFCGSQSSLEEMRLAFEERLNITYPLLCQVPGFEVVKPQGAFYFFPNVKKAMEMTGFSDVTSFANAILEEVGLAVVSGAGFGAPENVRLSYATDIETLKEAVRRLHVFMESNEIN

SEQ ID NO: 8908 - protein, 436 aa, Streptococcus pyogenes str. Manfredo
MVLPTVAIVGRPNVGKSTLFNRIAGERISIVEDIEGVTRDRIYATGEWLNRQFSLIDTGGIDDVDAPFMEQIKHQAQIAMEEADVIVFVVSGKEGVTDADEYVSKILYRTNTPVILAVNKVDNPEMRNDIYDFYSLGLGDPYPVSSVHGIGTGDVLDAIVENLPVEEAEENDDIIRFSLIGRPNVGKSSLINAILGEDRVIASPVAGTTRDAIDTHFTDADGQEFTMIDTAGMRKSGKIYENTEKYSVMRAMRAIDRSGVVLMVINAEEGIREYDKRIAGFAHEAGKGMIIVVNKWDTIDKDNHTVAKWEADIRDQFQFLTYAPIIFVSALTKQRLNKLPDLIKRISESQNKRIPSAVLNDVIMDAIAINPTPTDKGKRLKIFYATQVSVKPPTFVVFVNEEELMHFSYLRFLENQIRAAFTFEGTPIHLIARKRK

SEQ ID NO: 8909 - protein, 67 aa, Streptococcus pyogenes str. Manfredo
MAQGTVKWFNAEKGFGFISTENGQDIFAHFSAIQTNGFKTLEEGQKVAFDVEEGQRGPQAVNITKLA

SEQ ID NO: 8910 - protein, 299 aa, Streptococcus pyogenes str. Manfredo
MAKIVECIPNFSEGQNQTVIDGLVATAKSIPGVTLLDYSSDASHNRSVFTLVGDDQSIQEAAFQLVKYASENIDMTKHHGEHPRMGATDVCPFVPIKDITTQECVEISKQVAERINRELGIPIFLYEDSATRPERQNLAKVRKGQFEGMPEKLLEEDWAPDYGDRKIHPTAGVTAVGARMPLVAFNVNLDTDNIDIAHKIAKIIRGSGGGYKYCKAIGVMLENRHIAQVSMNMVNFEKCSLYRTFETIKFEARRYGVNVIGSEVIGLAPAKALIDVAEYYLQVEDFDYHKQILENHLLG

SEQ ID NO: 8911 - protein, 447 aa, Streptococcus pyogenes str. Manfredo
MASNHMNEQEREQAKFSLSGATLYGINAVIGSGIFLLPRAIYKGLGPASIAVMFGTAILTIMLAVCFAEVSGYFGKNGGAFQYSKRAFGDFIGFNVGFLGWTVTIFAWAAMAAGFARMFIITFPAFEGWHIPLSIGLIILLSLMNIAGLKTSKIVTITATIAKLIPIVAFCACTLFFIKNGLPNFTPFVQLEPGTNLLGAISNTAVYIFYGFIGFETLSIVAGEMRDPEKNVPRALLGSISIVSVLYMLIIGGTIAMLGSQIMMTNAPVQDAFVKMIGPAGAWMVSIGALISITGLNMGESIMVPRYGAAIADEGLLPAAIAKQNQNGAPLVAILVSGAIAIVLLLTGSFENLAKLSVVFRFFQYIPTALAVMKLRKDAPDANVIFRVPFGPIIPILAVIVSLVMIWGDNPMNFVYGAVGVIIASSVYYLMHGRNHQMDQMPPEEQI

SEQ ID NO: 8912 - protein, 322 aa, Medicago truncatula
  misc_feature (219)..(219): Xaa can be any naturally occurring amino acid
  unsure (1)..(322): unsure at all Xaa locations
MAPLNCSRLTMISLVLSVLIIGSANAQLSTNFYSKTCPKLSTTVKSTLQTAISKEARMGASILRLFFHDCFVNGCDGSILLDDTSSFTGEKNANPNRNSARGFDVIDNIKTAVENVCPGVVSCADILAIAAADSVAILGGPTWNVKLGRRDAKTASQSAANTAIPAPTSNLNTLTSMFSAVGLSSKDLVTLSGAHTIGQARCTNFRARIYNETNINAAXASTRQSNCPKASGSGDNNLAPLDLQTPSSFDNNYFKNLVQNKGLLHSDQQLFNGGSTNSIVSGYSTSPSSFSSDFAAAMIKMGNIKPLTGSNGEIRKNCRKTN

SEQ ID NO: 8913 - protein, 336 aa, Acinetobacter sp. YAA
MNTLKFRVIDKIAETKESFSFVLKPLDGVLAEHSPGKYLPIKIRTEKGLLFRSYSLSSSASANEDFKITVKRERGGRGSNWLCDNVKVGDFIETLPPAGSFHPQNWDRDFVFFAGGSGITPVISIIKTALNRHKNRIKLFYANSSESSIIFHKELKDLCLQFPDRLDIQFWLDDEKGIPTSIAFEQYIDDALEVEYFLCGPAPFMGGVENFLIESKVPPGLITKESFAGSVSDDNGDTVESSAEKDVTVNFMLNGIKNSVMCSEDDFILNEIIKAGINVPSSCCAGNCGSCMCLLVSGDVILESNTVLDASDEEDGWILACRSKPRSKNIEISFDQ

SEQ ID NO: 8914 - protein, 508 aa, Coffea canephora
MALLLILLPVAFIFLAYSLYERLRFKLPPGPRPKPVVGNIYDIKPVRFKCYAEWSKLYGPIFSVYFGSQLNTVVNTAELAKEVLKDNDQQLADRYRSRPSARMSRNGQDLIWADYGPHYVKVRKLCNLELFTPKRLEGLRPLREDEVTAMVDSIFKDCTKPENKGKSLLMRNYLGSVAFNNITRLTFGKRFMNSEGVVDEQGQEFKGIVSNGIRIGAKLSVADHIPWLRWMFVGENEDLDKHNARRDKLTRMIMEEHTLARQKSGNTKQHFVDALLTLQKQYELSDDTVIGLLWDMITAGMDTTTISVEWAMAELVKNPRVQQKAQEELDRVIGSDRIMTEADFAKLPYLQCVAKEALRLHPPTPLMLPHRANANVKIGGYDIPKGSIVHVNVWAIARDPAAWKNPLEFRPERFLEEDVDIKGHDYRLLPFGAGRRICPGAQLALNLVTSMLGHLLHHFTWSPPPGVRPEEIDLEESPGTVTYMRTPLQAVATPRLPAHLYNRVPVEL

SEQ ID NO: 8915 - protein, 669 aa, Amaranthus retroflexus
MASTSSNPPFSSFTKPNKIPNLQSSIYAIPFSNSLKPTSSSSILRRPLQISSSSSQSPKPKPPSATITQSPSSLTDDKPSSFVSRFSPEEPRKGCDVLVEALEREGVTDVFAYPGGASMEIHQALTRSNIIRNVLPRHEQGGVFAAEGYARATGRVGVCIATSGPGATNLVSGLADALLDSVPLVAITGQVPRRMIGTDAFQETPIVEVTRSITKHNYLVLDVEDIPRIVKEAFFLANSGRPGPVLIDIPKDIQQQLVVPNWEQPIKLGGYLSRLPKPTYSANEEGLLDQIVRLVGESKRPVLYTGGGCLNSSEELRKFVELTGIPVASTLMGLGAFPCTDDLSLHMLGMHGTVYANYAVDKADLLLAFGVRFDDRVTGKLEAFASRAKIVHIDIDSAEIGKNKQPHVSICGDVKVALQGLNKILESRKGKVKLDFSNWREELNEQKKKFPLSFKTFGDAIPPQYAIQVLDELTKGDAVVSTGVGQHQMWAAQFYKYRNPRQWLTSGGLGAMGFGLPAAIGAAVARPDAVVVDIDGDGSFIMNVQELATIRVENLPVKIMLLNNQHLGMVVQWEDRFYKANRAHTYLGNPSNSSEIFPDMLKFAEACDIPAARVTKVSDLRAAIQTMLDTPGPYLLDVIVPHQEHVLPMIPSGAAFKDTITEGDGRRAY

SEQ ID NO: 8916 - protein, 669 aa, Amaranthus powellii
MASTSSNPPFSSFTKPNKIPNLQSSIYAIPFSNSLKPTSSSSILRRPLQISSSSSQSPKPKPPSATITQSPSSLTDDKPSSFVSRFSPEEPRKGCDVLVEALEREGVTDVFAYPGGASMEIHQALTRSNIIRNVLPRHEQGGVFAAEGYARATGRVGVCIATSGPGATNLVSGLADALLDSVPLVAITGQVPRRMIGTDAFQETPIVEVTRSITKHNYLVLDVEDIPRIVKEAFFLANSGRPGPVLIDIPKDIQQQLVVPNWEQPIKLGGYLSRLPKPTYSANEEGLLDQIVRLVGESKRPVLYTGGGCLNSSEELRKFVELTGIPVASTLMGLGAFPCTDDLSLHMLGMHGTVYANYAVDKADLLLAFGVRFDDRVTGKLEAFASRAKIVHIDIDSAEIGKNKQPHVSICGDVKVALQGLNKILESRKGKVKLDFSNWREELNEQKKKFPLSFKTFGDAIPPQYAIQVLDELTKGDAVVSTGVGQHQMWAAQFYKYRNPRQWLTSGGLGAMGFGLPAAIGAAVARPDAVVVDIDGDGSFIMNVQELATIRVENLPVKIMLLNNQHLGMVVQWEDRFYKANRAHTYLGNPSNSSEIFPDMLKFAEACDIPAARVTKVSDLRTAIQTMLDTPGPYLLDVIVPHQEHVLPMIPSGAAFKDTITEGDGRRAY

SEQ ID NO: 8917 - protein, 403 aa, Mycoplasma hyopneumoniae
MVKAKILVVNAGSSSIKWQIFQKENLELLGVGLIERIGLEDGLIKMSFGKKDYKYKDNFANHSQALAVQIAFWKENQLVENLEEFQLVGFRIVHGGASFKAPAKLDQMAISKIEAAAKFAPLHNPGALATIKAVKELIPNAKLAASFDTAFHGTIPKINYTYPIKAEIADKYGIRKYGFHGISHKFITTQVEKIYDSDKVNFVNMHIGNGISLCAIKNSQSLDTSMGMTPLAGVAMGTRSGDIDPSIIPYLANEASFSFSEIDHLLNKNSGLLGLSGVSSDLRDVISAKNSGNLEASFALEVYVQKIVDYLVNYINKVGKNIKALVFTGGVGENSAFIRSLVIEKVQIPGLNLVLDQEKNLKPIPEFGPIEKISAPESDLDIFVIKTNEELLIAKNTISVWEN

SEQ ID NO: 8918 - protein, 307 aa, Neisseria meningitidis serogroup B
MDIETFLAGERAAGGYRCGFVAIVGRPNVGKSTLMNHLIGQKISITSKKAQTTRNRVTGIYTDDTAQFVFVDTPGFQTDHRNALNDRLNQNVTEALGGVDVVVFVVEAMRFTDADRVVLKQLPKHTPVILVVNKIDKDKAKDRYALEAFVAQVRAEFEFAAAEAVSAKHGLRIANLLELIKPYLPESVPMYPEDMVTDKSARFLAMEIVREKLFRYLGEELPYAMNVEVEQFEEEDGLNRIYIAVLVDKESQKAILIGKGGERLKKISTEARLDMEKLFDTKVFLKVWVKVKSGWADDIRFLRELGL

SEQ ID NO: 8919 - protein, 317 aa, Streptomyces coelicolor
MSVRTQSSEEPAETVHRAGFACFVGRPNAGKSTLTNALVGQKVAITSNRPQTTRHTVRGIVHREDAQLILVDTPGLHKPRTLLGERLNDVVRTTWAEVDVIGFCLPANEKLGPGDRFIAKELAGIRKTPKVAIVTKTDLVDSKTLAEQLIAIDQLGKELGIAWAEIVPVSATANQQVDLLADLLTPLLPEGPALYPEGDLTDEPEQVMVAELIREAALEGVRDELPHSIAVVVEEMLPREDRPADKPLLDIHANVYIERPSQKGIIIGPKGKRLKDVGIKSRTQIEALLGTPVFLDLHVKVAKDWQRDPKQLRRLGF

SEQ ID NO: 8920 - protein, 300 aa, Mycobacterium leprae
MAEFRSGFVCLIGRPNTGKSTLTNALVGTKVAITSMKPQTTRHTIRGIVHREGNFQIVLVDTPGLHRPRTLLGKRLNDLVRDTYTEVDLIGLCIPADEATGPGDRWIVNQIRSVAPKTILVVIVTKIDKVPKDRLSAQLVAVSDLVADSAEIVPVSAVTGEQVDVLIDVLAAALPPGPAYYSAGELTDEPEELLMAELIREAVLEGVHDELPHSLAVVIDEVSPRAGRGDLIDVHAVLYVERPSQKGIVIGKSGARLREVGIAARRQIEKLLGTNIYLDLHVNVAKNWQRNPKQLGRLGF

SEQ ID NO: 8921 - protein, 341 aa, Escherichia coli K12
  misc_feature (23)..(23): Xaa can be any naturally occurring amino acid
  unsure (1)..(341): unsure at all Xaa locations
MKKMMIATLAAASVLLAVANQAXAGATLDAVQKKGFVQCGISDGLPGFSYADADGKFSGIDVDICRGVAAAVFGDDTKVKYTPLTAKERFTALQSGEVDLLSRNTTWTSSRDAGMGMAFTGVTYYDGIGFLTHDKAGLKSAKELDGATVCIQAGTDTELNVADYFKANNMKYTPVTFDRSDESAKALESGRCDTLASDQSQLYALRIKLSNPAEWIVLPEVISKEPLGPVVRRGDDEWFSIVRWTLFAMLNAEEMGINSQNVDEKAANPATPDMAHLLGKEGDYGKDLKLDNKWAYNIIKQVGNYSEIFERNVGSESPLKIKRGQNNLWNNGGIQYAPPVR

SEQ ID NO: 8922 - protein, 157 aa, Rosa hybrid cultivar
MDFRIMGLDAPILTALQHLADLPEETEKTFNNAPTRTYVRDAKAMAATPADVKELPNSYVFVIDMPGLKSGDIKVQVEDDNVLLISGERKREEEKEGAKYVRMERRVGKFMRKFVLPENANADTISAVCQDGVLTVTVEKLPPPQPKKPKTIEVKIG

SEQ ID NO: 8923 - protein, 476 aa, Apium graveolens
YFFSLFLVTVFVYKLLTLKKTPSKNLPPSPPRYPIIGNLHQIGPDPQHSLRDLALKYGPLMSLKFGTVPVLVVSSADAAREVLKTHDLIFADRPYSSVANKVFYNGKDMVFARYTEYWRQVKSICVTQLLSNKRVNSFQNVREEEVDLLVQNIENSCSKVINLTELLIEVTGNVVCKVSVGSGDKVDSYKILILEIMEMLGYSRSIEDFFPMFGWVDWLTGLRGKVAKAAKGVDDFLEGVLKEHLTARASNNASADNDFVSILLEIQEADAGSTMDNECIKSLIWDMLGAGTETISTALEWTLAALIKNPDAMLKLQNEVREIGKGKSKISEADLGKMTYLQAVMKESMRLYFTAPLLVPRESRQDVKFMGYDISAGTQVLINVWAIARDPSLWEKPEEFRPERFLNSHIDYKGFNYEYLPFGAGRRGCPGIQFAMAVNELVVANVIHKFNFELPDGERLEDLDMTAVSGITLRKK

SEQ ID NO: 8924 - protein, 484 aa, Oryza sativa Japonica Group
MAAPSVAVDNLNPKVVLNCEYAVRGEIVIHAQRLQQQLQTQPGSLPFDEILYCNIGNPQSLGQKPVTFFREVIALCDHPCLLEKEETKSLFSADAISRATTILASIPGRATGAYSHSQGIKGLRDAIAAGIASRDGYPANADDIFLTDGASPGVHMMMQLLIRNEKDGILCPIPQYPLYSASIALHGGALVPYYLNESTGWGLEISDLKKQLEDSRLKGIDVRALVVINPGNPTGQVLAEENQRDIVKFCKNEGLVLLADEVYQENIYVDNKKFNSFKKIARSMGYNEDDLPLVSFQSVSKGYYGECGKRGGYMEITGFSAPVREQIYKVASVNLCSNITGQILASLVMNPPKAGDASYASYKAEKDGILQSLARRAKALENAFNSLEGITCNKTEGAMYLFPQLSLPQKAIDAAKAANKAPDAFYALRLLEATGIVVVPGSGFGQVPGTWHIRCTILPQEEKIPAIISRFKAFHEGFMAAYRD

SEQ ID NO: 8925 - protein, 47 aa, Proteus vulgaris
DKGFGFITPKDGSKDDVFVHFSAIQSDSFKSLKEGQEVSFSIENGAK

SEQ ID NO: 8926 - protein, 182 aa, Leuconostoc mesenteroides subsp. mesenteroides
KSLKLITLHLGAGASITAIKDGKSLDTSMGFSPLAGVAMATRSGDVDASLVYYIQEREGLSNEEMLNILNKKSGLLGISTISSDMRDLLDVQDTNEHADMAIRIFINRVVKYVGQYVAEMGGVDAIVFTAGIGENSVPVRKMIIDKLNYFGVKLDEEKNNVRGKEVEISTNDSKVKALLIPT

SEQ ID NO: 8927 - protein, 511 aa, Cylindrotheca fusiformis
MAEFDNTFILDFCSGGNESSSDVQALCQVAGLANGTSASAAGLVEGINTFFLLFAGALVFLMQAGFAMLCAGSVRQKNVKNIMLKNMLDACGGAIGFWTIGYAFAYADNSSGDKTFIGGKNFFVNQLDESGGAWIGFFFQFAFAATAATIVAGTVAERCKMSAYLCYSVFLTGFVYPVVVHSIWSADGWLTAFRDDPWKGVGVIDFAGSGVVHMTGGATALVAAIVLGPRKGRFYDEDGNALETPASFPAHSVALQVLGTFLLWFGWYGFNPGSALVIDNAASASTSALCAVTTTLAAASGCVCAMFTDTIIEMMATGEASYDLTMAMNGALGGLVAITAGCSVVTPWASIIIGIIAGWVYIAFSKLLVKLKIDDAVDAVPVHFANGMWGVLAVGFFAEPDAMVTAGYNDVPGVFYKGDGKLLLCQFVAIIWICAWIFFLMTPFFVVLNILGMFRVDPLEEEVGLDISHHRGAAYDMTSAKKEDVEELMEHRSSKHGKVEVPKEVQKEDTA

SEQ ID NO: 8928 - protein, 229 aa, Rhizobium tropici
ILQPVTEAAKLVQAAGGLLVVDAVQAAGRIPLDIHAIGADFLIVSSHKIGGPKGVGALVSRGEILMPMPLIHGGGQEKGHRSGTENTLAIIGFGAAAEVTALDLDARNAAIASLRDRLEAGMELVAPDVIIHGKDGPRVPNTCFFTLPGLKSETGQIAFDLEGVAISAGSACSSGKVGESHVLAAMGCDPKLGALRISLGPTTTEADIDRAIAAFTRIAGRRKLAGAAA

SEQ ID NO: 8929 - protein, 532 aa, Prunus persica
GYWVLKEKFRGGINVQEKVKIQKEPMKLFMENGIEELAKTSFEELEKSKDSKDDIDVRLKWLGLFHRRKNHYGRFMMRLKLPNGVTTSAQTKYLASVIRKYGEDGCADVTTRQNWQIRGVVLPDVPEILKGLAEVGLTSLQSGMDNVRNPVGNPLAGIDPEEIVDTRPYTNLLSQYITANSLGNPTVTNLPRKWNVCVVGSHDLFEHPHINDLAYMPATKDGRLGFNLLVGGFFSPKRCAEAVPLDAWVSADDVIPLCKAVLEAYRDLGTRGNRQKTRMMWLIDELGIEGFRAEVAKRMPFQELERASSEDLVQKQWERRDYVGVHPQKQEGLSYVGLHIPVGRLQADDMDELAHVADKYGTGELRLTVEQNIIIPNVENSKLEALLKEPLLKNRFSPEPSILMRGLVACTGNQFCGQAIIETKARALKVTEEVERHVAVTRPVRMHWTGCPNTCAQVQVADIGFMGCMARDENGKPCEGADVFLGGRIGSDSHLGDVYKKSVPCKDLVPLVVDILVKHFGAVPREREEGED

SEQ ID NO: 8930 - protein, 285 aa, Methanothermus fervidus
MGLKFAYSKDPSSLKYLSNKKVFGLLGVPFDSTSTYKPGSRFGPLMIRQASYNFENYSLHYRKKLDVPIIDLGDIEVILGDFKNTCRNISEKVQEVLKKGMIPIVLGGEHSITYGVVKTFDLSDVTILHFDAHMDMANTYAGKKFSHATVMRRIYELHPKKIVQIGVRSCTKEEHEFVLNENIKYYTSRDIIEKFNMVLNEINKLDGPFYVTVDIDVLDPGYAPGVGNPTPVGITPYHMEKFIEKIARKKIIGIDIVEVATDRIGDPAAMNAAKILYDFLFAIKI

SEQ ID NO: 8931 - protein, 337 aa, Pseudomonas putida
MNHRIALNFEDGVTRFIHAAPGETVADAAYRQGINIPLDCRDAPCGTCKCLAEAGRYALGQDYIDDALSAEEAARGYVLTCQMRAESDCVLRVPASSTLCRTGQARYEARISEVRQLSPSTIGLSLRGEALASLAFLPGQYVNLQVPGSEQRRAYSFSSLAKDGEVSFLIRNVPGGLMSGFLSGTARAGDSLAMDGPLGSFYLREIHRPLLMLAGGTGLAPFTAMLERIAEQGSAHPLHLVYGVTHDVDLVGLERLEAFAERIPGFTWSACVASADSDYPRKGYVTEHIAAQHLHEGDVDIYLCGPPPMVEAVERYLREQGVRPANFYYEKFAASAA

SEQ ID NO: 8932 - protein, 340 aa, Pseudomonas putida
MNHKVALSFADGKTLFLPVGHDDLLLDAALRHGINLPLDCREGVCGTCMGRCEAGSYSLDYADEDTLSAADLEQRKVLACQTRVRSDAAFYFDFASTLCHAAAAQAHSGVVRELRLLSEDTALLRLDAGAAGRQLDFLPGQYARLQVPGSDCRRAYSFANRPNPQNHLQFLIRLLPGGAMSDYLRQGCRVGDEIRFEAPLGTFYLRQVARPLLLVAGGTGLSAFLGMLDELAERGCEWPVHLYYGVRRAADLCELQRIAGYAERLPGFRFVPVLSEADADWDGRRGYLHEHFDAARLRDEAFDLYLCGPPPMVEAVRQWLRERSLEHLRLYLEKFTESGD

SEQ ID NO: 8933 - protein, 360 aa, Pisum sativum
  misc_feature (272)..(272): Xaa can be any naturally occurring amino acid
  misc_feature (285)..(285): Xaa can be any naturally occurring amino acid
  misc_feature (290)..(290): Xaa can be any naturally occurring amino acid
  misc_feature (294)..(294): Xaa can be any naturally occurring amino acid
  misc_feature (302)..(302): Xaa can be any naturally occurring amino acid
  misc_feature (312)..(312): Xaa can be any naturally occurring amino acid
  unsure (1)..(360): unsure at all Xaa locations
MAAAVTAAVSLPYSNSTSLPIRTSIVAPERLVFKKVSLNNVSISGRVGTIRAQVTTEAPAKVVKHSKKQDENIVVNKFKPKEPYVGRCLLNTKITGDDAPGETWHMVFSTEGEVPYREGQSIGIVPDGIDKNGKPHKLRLYSIASSAIGDFGDSKTVSLCVKRLVYTNDAGEVVKGVCSNFLCDLKPGSEVKITGPVGKEMLMPKDPNATVIMLGTGTGIAPFRSFLWKMFFEKHEDYQFNGLAWLFLGVPTSSSLLYKEEFEKMKEKAPEXFRLDFAVSREQVXDKGEXMYIXTRMAQYAXELWELLKKDXTFVYMCGLKGMEKGIDDIMVSLAAKDGIDWIEYKRTLKKAEQWNVEVY

SEQ ID NO: 8934 - protein, 356 aa, Vitis vinifera
MSLLADLQNINLSDSTEKIIAEYIWIGGSGNDLRSKARTLSGPVTGPAQLPKWNYDGSSTGQAPGEDSEVILYPQAIFKDPFRGGDNILVMCDAYTPGGEPIPTNKRFNAAKIFSHPEVTAEEPWYGIEQEYTLLQKDVNWPLGWPVGGFPGPQGIIYCGIGADKAFGRDIVDSHYKACLYAGINISGINGEVMPGQWEFQVGPAVGISAGDELWVARYILERITEIAGVVVSFDPKPIKGDWNGAGAHTNYSTKSMRNTGGYDVIKKAIEKLGLRHKEHISAYGEGNERRLTGRHETADINTFCWGVANRGASIRVGRDTEKEGKGYFEDRRPASNMDPIVVTSMIAETTILWKP

SEQ ID NO: 8935 - protein, 356 aa, Nicotiana tabacum
MSPLSDLISLNLSDSTQKIIAEYIWIGGSGMDLRSKARTLSGPVTDPSELPKWNYDGSSTGQAPGEDSEVILYPQVYFKDPFRRGNNILVMCDAYTPAGEPIPTNKRHAAAKIFSNPDVVAEEPWYGIEQEYTLLQRDINWPLAWPIGGFPGPQGPYYCGTGADKAFGRDIVDSHYKACLYAGFNISGINGEVMPGQWEFQVGPSVGISAGDEVWVARYILERIAEIAGVVVSFDPKPIPGDWNGAGAHTNYSTKSMREDGGYEVILKAIEKLGLKHKVHIAAYGEGNERRLTGKHETANISTFKWGVANRGASVRVGRDTYKAGKGYFEDRRTASNMDPYAVTAMIADTNHICKS

SEQ ID NO: 8936 - protein, 356 aa, Nicotiana tabacum
MAHLSDLVNLNLSDSTQKIIAEYIWIGGSGMDVRSKARTLSGPVDDPSKLPKWNYDGSSTGQAPGEDSEEILYPQAIFKDPFRRGNNILVICDCYTPAGEPIPTNKRHSAAKIFSHPDVVVEEPWYGLEQEYTLLQKDINWPLGWPLGGFPGPQGPYYCGIGAGKVFGRDIVDSHYKACLYAGINISGINGEVMPGQWEFQVGPSVGISAADELWAARYILERITEIAGVVVSFDPKPIPGDWNGAGAHTNYSTKSMRNEGGYEVIKKAIENLGLRHKEHIAAYGEGNERRLTGRHETADINTFKWGVANRGASIRVGRDTEREGKGYFEDRRPASNMDPFVVTSMIAETTILSEP

SEQ ID NO: 8937 - protein, 396 aa, Ochromonas danica
YSIEDLAQLIHDLKNAQPTGEVSVKLVSEVGVGVVAAGVAKAKADHITISGGDGGTGAAAWTGIKGAGLPWELGLAEAQQTLVINNLRDRVRLQTDGQIKTGRDVVIAACLGAEEFGFATAPLITLGCIMMRKCHLNTCPVGIATQDPLLRKKFSGKPEYVINFFFLLAEEVREYMAELGVRSLDELVGRADLLEVDQQVLHEKNKGLDLSGLLTTSYELNPKSPLKKTTQQNHMLESALDQQIIADARPALEEGVPVTLEYPVTNLNRTVGTMLSYHISKKYGAAGLPEDTIQIKLHGHGGQSLGFALAKGVRIEVEGDSNDYVGKSLSGGCIAVYPEREALAGGFVAEENVIVGNVCLYGATSGRAFFRGKAGERFAVRNSGAIAVVEGCGDHG

SEQ ID NO: 8938 - protein, 400 aa, Nostoc sp. PCC 7120
MSVIYLDNNATTKVDPDVVEAIMPYLTDYYGNPSSMHTFGGQLGKAVRTAREQVAALLGADESEIVFTSCGTEGDNAAIRAALLAQPAKRHIITTQVEHPAVLNVCKQLETQGYTVTYLSVNSHGQLDLDELEASLTGNTALVTIMYANNETGTVFPIEEIGKRVKERGAIFHVDAVQAVGKIPLNMKTSTIDMLTISGHKIHAPKGIGALYVRRGVRFRPLLIGGHQERGRRAGTENVPGIVGLGKAAELELIHIETAIKKETRLRDRLEQTLLAKIPDCEVNGDITQRLPNTTNIGFKYIEGEAILLSLNKYGICASSGSACTSGSLEPSHVLRAMGLPYTTLHGSIRFSLCRYTTEAQIDRVIEVMPEIVERLRALSPFKNDEAGWLQAQEQTLAHR

SEQ ID NO: 8939 - protein, 434 aa, Stigmatella aurantiaca
MRPIGSARQAGRGTSALALIVQKYGGTSVGDTERIKNVAKRCIAAQKAGHDVVVVVSAMSGETNRLLKLVSQITERPNEREQDVVVATGEQVSIGLVALAIQTQKRKAVSFLGHQVRITTDSTFSKARIKSIDAERIVDALKKKNIVVVAGFQGQDEHGNVTTLGRGGSDTTAVALAAALKADACEIYTDVDGVYTTDPNMVPAARKLERIAYEEMLELASVGAKVLQIRSVEFAMKYKVPLWVKSSFTDDPGTLVCEEDAAMEDVLVSGIAYDKNEAKIAIRGVPDVPGVAAKIFGALDEQSIVVDLIVQNVSKDGRTDVTFTVGKADLTKAKDVVKKIAKSVKAEGVETDDQVSKVSIVGVGMRNHSGVAAKMFTVLAGAGVNVQMISTSEIKVSCVIHSNYTELAVRSLHTAFGLDKPEAGAVSEVVSLKG

SEQ ID NO: 8940 - protein, 402 aa, Azotobacter vinelandii
MADVYLDNNATTRVDDEIVQAMLPFFTEQFGNPSSLHSLGNQVGMALKKARQSVQKLLGAEHDSEILFTSCGTESDSTAILSALKAQPERKTVITTVVEHPAVLSLCDYLASEGYTVHKLPVDKKGRLDLEHYASLLTDDVAVVSVMWANNETGTLFPIEEMARLADDAGIMFHTDAVQAVGKVPIDLKNSSIHMLSLCGHKLHAPKGVGVLYLRRGTRFRPLLRGGHQERGRRAGTENAASIIGLGVAAERALQFMEHENTEVNALRDKLEAGILAVVPHAFVTGDPDNRLPNTANIAFEYIEGEAILLLLNKVGIAASSGSACTSGSLEPSHVMRAMDIPYTAAHGTVRFSLSRYTTEEEIDRVIREVPPIVAQLRNVSPYWSGNGPVEDPGKAFAPVYG

SEQ ID NO: 8941 - protein, 540 aa, Bacillus subtilis
MYLAFQVQKLMRYLTLYKIKDLKLSLPGTNKTQQFMAQAVGRLTGKPGVVLVTSGPGASNLATGLLTANTEGDPVVALAGNVIRAYRLKRTHQSLDNAALFQPITKYSVEVQDVKNIPEAVTNAFRIASAGQAGAAFVSFPQDVVNEVTNTKNVRAVAAPKLGPAADDAISAAIAKIQTAKLPVVLVGMKGGRPEAIKAVRKLLKKVQLPFVETYQAAGTLSRDLEDQYFGRIGLFRNQPGDLLLEQADVVLTIGYDPIEYDPKFWNINGDRTIIHLDEIIADIDHAYQPDLELIGDIPSTINHIEHDAVKVEFAEREQKILSDLKQYMHEGEQVPADWKSDRAHPLEIVKELRNAVDDHVTVTCDIGSHSIWMSRYFRSYEPLTLMISNGMQTLGVALPWAIGASLVKPGEKVVSVSGDGGFLFSAMELETAVRLKAPIVHIVWNDSTYDMVHFQQLKKYNRTSAVDFGNIDIVKYAESFGATALRVESPDQLADVLRQGMNAEGPVIIDVPVDYSDNINLASDKLPKEFGELMKTKAL

SEQ ID NO: 8942 - protein, 293 aa, Gossypium hirsutum
MDVYKRGFISETSRSEEEMELRKGPWTEEEDSMLRAYVNIHGEGRWNAVARLSGLRRTGKSCRLRWLNYMRPEIKRGNISLEEQLLILELHSRWGNRWSKIAQHLPGRTDNEIKNYWRTRVQKQAKQLNCDVNSKQFKDAMRYVWIPRLVERIRASSESPSSQPSTTTNTTYNDRISNISSSQMSYANASGSVQVDPSLLPELSGTSSDSLDTQVSSVSDLTDCYNPQSLSNYLHKGLGLEKEGAATWGRDEEFQATEEHSNGWLVGGGESSMDTVWNEENVWFLQQQLHDGI

SEQ ID NO: 8943 - protein, 293 aa, Gossypium hirsutum
MDVYKRGFISETSRNEEEMELRKGPWTEEEDSMLKAHVNIHGEGRWNAVARLSGLRRTGKSCRLRWLNYMRPEIKRGNISLEEQLLILELHSRWGNRWSKIAQHLPGRTDNEIKNYWRTRVQKQAKQLNCDVNSKQFKDAMRYVWIPRLVERIRASSESPSSQPSTTTKTTYNDCISNISSSQMSYANASGSVQVDPSLLPELSGTSSDSLDTQVSSVSDLTDCYNPQSLSNYLHKGLGLEKEGAATWGRDEEFQATEEHGNGLLVGGGESSMDTVWNEENVWFLQQQLRDGI

SEQ ID NO: 8944 - protein, 286 aa, Eubacterium acidaminophilum
MNKNYLTPAEIAEATINTGIAKCCRPFIPTLLLAILAGAFIAFASEGSNMAAFNLFAKPETYGLGKVLAGSIFGTGLMLVVVAGGELFTGNTMIILGVADKKTAIIDMLKNWGIVYLGNFIGSVFIAYMMVQSGLFNSGANVLGGVTIKIAAYKTSLPFMSAFYLGIMCNWLVCLAVWMAYGAKDMVGKLFAIFFPIWLFITSGFEHSVANMYYIPAGIMAKANPDWAAASHLEPAKLEALNWSSFFINNLVPVTLGNIVGGAGMVALVYYFSFIKPAREAEKKAA

SEQ ID NO: 8945 - protein, 408 aa, Bacillus subtilis subsp. subtilis str. 168
MGLIVQKFGGTSVGSVEKIQNAANRAIAEKQKGHQVVVVVSAMGKSTDELVSLAKAISDQPSKREMDMLLATGEQVTISLLSMALQEKGYDAVSYTGWQAGIRTEAIHGNARITDIDTSVLADQLEKGKIVIVAGFQGMTEDCEITTLGRGGSDTTAVALAAALKVDKCDIYTDVPGVFTTDPRYVKSARKLEGISYDEMLELANLGAGVLHPRAVEFAKNYQVPLEVRSSTETEAGTLIEEESSMEQNLIVRGIAFEDQITRVTIYGLTSGLTTLSTIFTTLAKRNINVDIIIQTQAEDKTGISFSVKTEDADQTVAVLEEYKDALEFEKIETESKLAKVSIVGSGMVSNPGVAAEMFAVLAQKNILIKMVSTSEIKVSTVVSENDMVKAVESLHDAFELSKHPSAV

SEQ ID NO: 8946 - protein, 388 aa, Pyrococcus horikoshii
ALSDRLELVSASEIRKLFDIAAGMKDVISLGIGEPDFDTPQHIKEYAKEALDKGLTHYGPNIGLLELREAIAEKLKKQNGIEADPKTEIMVLLGANQAFLMGLSAFLKDGEEVLIPTPAFVSYAPAVILAGGKPVEVPTYEEDEFRLNVDELKKYVTDKTRALIINSPCNPTGAVLTKKDLEEIADFVVEHDLIVISDEVYEHFIYDDARHYSIASLDGMFERTITVNGFSKTFAMTGWRLGFVAAPSWIIERMVKFQMYNATCPVTFIQYAAAKALKDERSWKAVEEMRKEYDRRRKLVWKRLNEMGLPTVKPKGAFYIFPRIRDTGLTSKKFSELMLKEARVAVVPGSAFGKAGEGYVRISYATAYEKLEEAMERMERVLKERKLV

SEQ ID NO: 8947 - protein, 523 aa, Perilla frutescens var. crispa
MISAAVSLIICTSILGVLVYFLFLRRGGGSNGRPLPPGPRPWPIVGNLPQLGPKPHQSMAALARVHGPLMHLKMGFVHVVVAASATVAEKFLKVHDTNFLSRPPNSGAEHIAYNYNDLVFAPHGPRWRLLRKICALHLFSSKALDDFRHVREEEVGILIRNLASVGEMPASIGQMMYVCATNAISRVMLGRHVLGDEHRGAAGGGDTTAEEFKAMVVELMALAGVFNVGDFIPPLKGLDLQGVVAKMKKLHQRFDAFFSGILHDHKINGSNAAEGHVDLLTTLISLKDVDNNGEGGKLTDTEIKALLLNLFTAGTDTTSSTVEWAITELIRNPNILARVRKELDLIVGKDKLVKESDLGQLTYLQAVIKENFRLHPSTPLSLPRVAQESCEINGYYIPKDSTLLVNVWAIGRDPNVWPDPLEFRPERFLMGGEKPNVDVRGNDFELIPFGSGRRICAGMNLGIRMVQLLIATMVHAFDFELANGQLAKDLNMEEAYGITLQRADPLVVHPRPRLARHVYQAQV

SEQ ID NO: 8948 - protein, 536 aa, Rhodococcus sp. 19070
MSFQVALSFEDGVTRFIKCGPNETVADASYKARINIPLDCRDGACGTCKALCESGNYDGGDYIEEALTDDEAEQGFCLPCQMVPESDLVLQIATTSDVAKTAAATYTATITDLQRFSPSTVGFTVEIPNRDDLVFLPGQYVNITVPGTEQTRSYSFSTGPNDPQLSFLVKITEGGLMSEYLSDRAQVGDTLQFTGPFGSFFLRERKRPALLLAGGTGLAPLLAILSKMQEEGSDLPVHLVYGVSFDQDLVELDKLEAYTRSLPNFTFDYCVSDPESTAPNKGYVTGLFEPKHLNDGDVDVYLCGPPPMVEAVRTHLSDEGISVTNFYFEKFNNSATPGAAEPAPRPTERELEAATRAAEETGLPVSLGAAEQVPVGNYEIGEEHPPVTESDAQFDARMALELGALELTIGRLTDAQLVEFRILAEASTASIDHDRFTDAGAFTDTNAAFHEFLFRCCGNPVLLEAYNRLEVTQLMRKVLRTAQWVDEQIPHDHLQIVRAFERKDRAAARDLIVSHAEHAKATMRRAIEESAKVELA

SEQ ID NO: 8949 - protein, 550 aa, Pinus sylvestris
PGEGGQLPGKKVSTYIARLRNSKPGVPLISPPPHHDIYSIEDLAQLIFDLHQVNPMAKVSVKLVAEAGIGTVASGVAKGNADIIQISGHDGGTGASPISSIKHAGGPWELGLTETHQTLIENGLRERVVLRVDGDFKSGVDVMLAAAMGADEYGFGSVAMIATGCIMARICHTNNCPVGVASQREELRARFPGVPGDLVNFFLYVAEEVRGILAQLGYAKLDDVIGRTDLLRPRHISLMKTQQLDLSYLLSSVGRPKWSSTKIRQQNVHTNGPVLDDILLADPQISDAIEKEREVKKTVQIYNVDRSVCGRIAGVIAKKYGDTGYAGRLEILFTGSAGQSFGCFLTPGMNIRLVGEANDYVAKGMAGGEIVITPSDKTGFVPEDATIVGNTCLYGATGGRLFVRGKAGERFAVRNSLAEAIVEGTGDHCCEYMTGGCVVVLGKVGRNVAAGMTGGLAYLLDEDDTLIPKVNKEIVKIQRVVAPVGQLQLKQLIEAHVDKTGSTKGTAVLKEWEKYLPLFWQLVPPSEEDSPEANPEFGDRTVERITVKSA

SEQ ID NO: 8950 - protein, 446 aa, Saccharomyces cerevisiae
MDDKVSEKESSPKQTEEDSEGKMAHVQPASYVNKKKYVFGKTLGAGTFGVVRQAKNTETGEDVAVKILIKKALKGNKVQLEALYDELDILQRLHHPNIVAFKDWFESKDKFYIITQLAKGGELFDRILKKGKFTEEDAVRILVEILSAVKYMHSQNIVHRDLKPENLLYIDKSDESPLVVADFGIAKRLKSDEELLYKPAGSLGYVAPEVLTQDGHGKPCDIWSIGVITYTLLCGYSAFRAERVQDFLDECTTGEYPVKFHRPYWDSVSNKAKQFILKALNLDPSKRPTAAELLEDPWIICTELKTHNLLPGLKEGLDARQKFRNSVERVRLNMKIQKLRDLYLEQTESDSDFDEGSQANGSVPPLKATDTSQLSKKLSEEEQSKLKSELTSKAFAQLVNTVLAEKEKFLNINRVCSSDSDLPGSDIKSLDEAKEKPEGKDTKTEE

SEQ ID NO: 8951 - protein, 514 aa, Petroselinum crispum
MSSSLGDLLAQPNNDDFGSNWGFENQKTKSFANQSLPFSPPPVSPSSYFSFLDSPIQNNNYTIVSSSGNGTMNAQSFKEENQNFSDFSFPAQTRPASSTSSSLIPANTNLVEDSLKRKQGGWNFEEPAKKNDFLMDNASVTSDIATLQRISPEMTMNQANMQSNAALQSNLNNYAQSSQSSQTNRDQSKLDDGYNWRKYGQKQVKGSENPRSYYKCTYLNCPTKKKVETTFDGHITEIVYKGNHNHPKPQSTKRSSSQSYQNSIGTMPESSLLENGRSEPVTTPENSSLSFGEDDLFEQGSMNKPGDDDGNEPDSKRWKGEYESNEPMSSLGSRTVREPRIVVQTTSDIDILDDGYRWRKYGQKVVKGNPNPRSYYKCTQVGCPVRKHVERASHDLRAVITTYEGKHNHDVPAPRGSGSYPAVNRPSDNTTSAPTAIRPTTNYLNPLQNPRAQPANGQAPFTLEMLQRPRSYEFSGFTNTSNTYAINQNQQASGQFSTAKDEPDVDSFFDSFLA

SEQ ID NO: 8952 - protein, 627 aa, Thermoplasma volcanium GSS1
MLINSEIISLSGSMYEDRSYQNEAIDFIASKLANYPGVALEAPTGSGKTMMALLGSLKYAYNGHLKILYLVRTNSQEEQVIRELRTISKNRKIRALPMQGRINLCILYKTADDLKEATAESLSKFCNSRKRQVMEGHQEACPYYTIKVRSKETKDFLFENLPTAEEFYEYAFTNNLCPYESIKASLSDADIVVAPYMYFLNKTVADRFLSHWGVSREQLIIVLDEAHNLPDIGRSLGSFRISIESLNRSEKEAQSFGDPELDRGVHVTDFIEMIRSTLERTIKERVKEDDVRIRFQEFKEYLMIMNKKSEKSIRDLNNYLYLFGEYVENEKEKAGKVPVSYCSSLAQRLEAMMDEDDAMYAAILSKSESGYIQASCLDPSSILSSLKESKTIHMSGTLEPFEFYSDVTGFDIPFRRIENVFPIENRFVSYYEGVSTKYDTLDENEIRKLASIIENIVNGVKRNTIVYFPSYAVMDKVIGSGLDFDFLQEKKNLDQTEFYDVVKKFRNGGKPLLAVSGGRLSEGMNFPGRELELILIAGIPFPRPDATNRALYDYYEMKYKKGWEYAVLAPAIIKIRQEIGRLIRGKDDHGACVILDKRAKQFRRFIPDLVKTDDPVNDINTFFSNFK

SEQ ID NO: 8953 - protein, 390 aa, Thermoplasma volcanium GSS1
MNCRMKQSTIGRNIVDEISFGAIVKIRDQLLEMQRQGKKVYRLESGDPSFSLPPHVKEAIKQAIENNKTHYTDSTGIPELRKAIAEKLVRKNKIKDATPENVIVSNGGMNALYVTFRSLLSPGDEVIIPDPMWTEIAEIIKLAEGVPIRLPVENYIEEMQKYEDDDKVKAVFVNSPHNPTGLVFTPKQIDGIISFAESKGIFIVSDEAYEDVIFDGREHVSPGSKYDNTISLFSMSKTYAMSGLRIGYAHTNSEILYDRMKKLLRCTINGVNSATQYGAVAALTGPQEFVGQMRSEYQKRRDIIFNAVSKSRYLEPVKPGGTFYLWAKIKEYPKEVKDSWDMTYYLLDKTGVGSSPGPVFGPAGDGYIRFAFSADTEHVREASELIEKFE

SEQ ID NO: 8954 - protein, 304 aa, Thermoplasma volcanium GSS1
MAKKAVELAEKHGFEAIAHGSTGRGNDQVRFELGIKALNPSLEMLAPVRDWNMLRSEEIEYAKKNNIIVPSDGKYSVDENLWGRSIEGSEIENMSLPVPEDAYEWLVPPWEAGPGEVIKLEFSNGLPVAINDSDFELQNLIANLNIIGGRNSIGLIDHVEDRITGIKSREVYECPAAEIITYAHGYLESLILNKHEISIKSFLDSKFSQFVYNGLWYDPAMKPLIAGEEILNSEINGSISLKLYKGKIYFNGSKGANFSYNSNVANYSTYEFDQKSSKGFIDIFKNDTVYSILARQKAKEEALS

SEQ ID NO: 8955 - protein, 578 aa, Thermoplasma volcanium GSS1
MIHENKIYDHVVNYSMGDLNSASTDANISYSENQDRKLRKALSTWDLLMLSVGGIIGSGWLFAAYAASVLSGPASILAWVLGGIIVIFIALVYAELGAMIPRSGAIVRYGHLSHGSFAGFLFGWAYFLSAVSVPAIEAEAVVTYAASYVTKPALIANGIMTVFGTLIAMLLMIAFFFLNYAGIHLMGKTNQGITWIKVIIPVITVIVLIAVHFNPSEIVPPNGFLPYGWAPVFAAISSTGIVFSYFGFRQAIDYGGEAKNPQRSIPIATIGSVLIGILLYSLLQVVFVGGIDWSKMGLEPGQWTLLNAYATAAHASTEHPLAYQLMNAPFATIALSAGLVWLTYTLYASAYIAPSGTLNVYLGTSTRTLYGMAVNGHLPKIFAKVADRNKIPVIPLITTLLVGFLFFLPFPSWYKMVGFISGATVFTYIVGGAALMNLRKQAPELKRPFKLWSANVLAPIAFILASEAVYWTGWPTTLYLAIAIFLGLVLYGALVGLHKIEQTFDKKNVKAGLWVPVFIVILTILSYLGEYGGINVLHFPLDLIVVAIASAIIYVWAIKSGIKTEEIAAMIANEDQYV

SEQ ID NO: 8956 - protein, 304 aa, Thermoplasma volcanium GSS1
MLPNFLPVGEIRKLAASVLPDINIITDLDFKSDESDILIVTAFTKVDKALLDKFPRLKFIQVASTGYDNVDVTEVKSRNILMCNSPSSNKESVAEHVIGMALYFLKDFGHLDREIRNGNWPILTFSRDLMGKVFGIIGMGAIGRKLAERLIQFGVGIIYYDVKRLPEEVEDELGITYVTLDELISSADIISIHVPLTETTKGMIGRKEFEKMKDGCIFINTSRAEVVVTKDLVWALKQGKIKAGIDVYDREPPDFSSELFQMDNALFSPHIAGVTVESQRRFIEETVANVIRYMQGVDPLNRVL

SEQ ID NO: 8957 - protein, 366 aa, Thermoplasma volcanium GSS1
MDERFISFVCLLFTMEFQKYRTMHFPRDVYIGHDVLNRVLDVVDQNSRTRDVIIVTGNTTYELAGKKIVEILASSPYEVHLSFAGEANYENLKKIEEETNDVNAGIIIGVGGGTKIDLAKKLAYDKNLPFISIPTSPSHDGIASPRASLRRNGISYSEEGAMPIGVIADTSVMIKAPYRYLAAGAADVISNISAVKDWKLAHRLRGEEFSSSAAAMSEYSAQEVISQVGEIRKYDESSVWLVTKNILASGTAMAIAGNSRPGSGSEHLFAHALEAAGVNNMLHGEMCAMGTIVSLYLHDDNWQKIRDVFESLGVSVKARDYGLKEEVVIEALRRAHAIRPERYTILGESDMSYDAAVKALELTGII

SEQ ID NO: 8958 - protein, 561 aa, Thermoplasma volcanium GSS1
MDSRVSDRKLRRELTTWDLLMLSLGGIIGSGWLFAAFGAATTAGPGSIFAWIIGGVIIIFIALVYAELGAMIPRSGAIVRYGHLSHGSFAGFVLGWAYFLSAVSVPAIEAEGVITYAASYSSKYGIVLLTNTGVMSVLGTFLAMLLMLGFFFLNYAGIKIMGKTNTGLTWWKFVIPTLTVILLLVVSFRPSNIIVGGIVPYGWAPVFSAVATSGIVFSYLGFRQGIDYGGEAKTPQRSIPLATVFSVLIGILLYTALQIVFIGGIDWGKLGLVPGSWAQIYSLATSNSNPEAVALYDAPFAHIAQAAGLVFLTYILFADAYISPSGTLNVYLGTSTRTLYGMAANGHMPKKLLEIMDKNRIPFIPLLATLLIGYIFFLPFPSWYKMVGFITSATAFTYIVGGAALMSLRRTAPELKRPFKLPYARVLSPIAFIGAGEVVYWSGWPLVLYLAIAIFLGFAVYFVLLLLGAIENSFTKENIKAGLWVPIFIIVLTVLSYIGDTSLGGIGVIKFPFDLVTVAVISFIFYMWSVRSGIRTEDITEMIESGSQYVFEESAREAVGK

SEQ ID NO: 8959 - protein, 447 aa, Thermoplasma volcanium GSS1
MMRYVIASSRCPFSHDVVMGRELVKENVGGVATALKRAISKHGGTWICWGDGKADNRYVNEDVGTYKIKRIILTPQEKRGYYDMYSNRTLWPLFHYFRERVQYTDNGYETYRKVNEKFAEEILNNTSQEDIVWVHDYQLSLVPGILRQKGLKNRIIFTWHIPWVSREMFETLTESDEIKESVGSADFITFHTDLYRKNFESLFENRKHGKSIAVPLGIDYRYFEKAKSSQIKSYALKDKIMLFSIDRLDYTKGLTNRVLSIERLIRNHPETSGKFVYVMIVTPSRTSVSDYVSMKRELEMNIGRVNGEFGTISWMPILYMYRKISDHSLVSYYKSADIALITPLIDGLNLVSKEFIASTEKGILVLSKFAGASNCLRGALIVNPNSPDEVADAIYKAMNMERKEADERLLKMKAIVKARDTDWWIKRIYRLAIAKEHDRRVTNNRIE

SEQ ID NO: 8960 - protein, 284 aa, Lactococcus lactis
MNLLQKNKINLRPFTKWTGGKRQLLPHIQYLMPEKYNHFFEPFIGGGALFFELAPQKAVINDFNSELINCYRQMKDNPEQLIELLTNHQRENSKEYYLDLRSSDRDGRIDKMSEVERAARIMYMLRVDFNGLYRVNSKNQFNVPYGRYKNPKIVDKELIESISEYLNNNSIKIMSGDFEKAVKEAQDGDFVYFDPPYIPLSETSAFTSYTHEGFSYEDQVRLRDCFKQLDSKGVFVMLSNSSSPLAEELYKDFNIHKIEATRTNGAKSSSRGKITEIIVTNYGN

SEQ ID NO: 8961 - protein, 899 aa, Candida albicans
MEDFTDNAIKIINNATELAKQQANSQLVPLHFLAAFIPSDDTEGSTQYLKTLVKRARYEWGDFERIVNRHLVKIPSQNPPPDEIRPSYQAGQVLTKANKIKQQQKDSYVAQDHILLALLEDQSIKDIFKEAGMSVDTIKTQAIELRGSQRIDSRQADSSSSYEFLNKYCEDFTEKAREGKIDPVIGREEEIRRVIRVLARRSKSNSVLIGDAGVGKTSIVEGVAQRIVDGDVPNVLAGSRLFALDLGALTAGAKYKGEFEERLKGVLNEIEKSKEFIILFIDEIHMLMGDGKSDAANLLKPMLARGALHCIGATTFAEYRKFISKDGAFERRFQKIDVPAATVQETVAILRGIQPKYEIHHGVRILDSALVTAAQLASRYLTYRALPDSAVDLVDESAAAVAVARDSKPEELDTLERQLHLVDVEINALERDKDADSASKERLNLAKKKKAELEEKIGPLNERYRQERASHEQLTAAKRKLDELEIKAQDAERRYDTATAADLRYFAIPDIQKQIEELEVKVAEEEASNLDSLLKNAVGPEQICETAARLTGIPVTKLSQAENNKLINMEAELSKEVVGQSEAVKAVSNAIRLRRSGLANPNQPPSFLFLGLSGSGKTELAKKLAGFLFADEKAIIRIDCSELGDKWSASKLLGAAPGYVGYEEGGILTEPLIRRPYSVVLLDEVEKAAPEVLTVLLQILDDGRVTSSQGKLVNCSNAIFIMTSNLGANYINAAKGSKIDANTKEHVMDAVRAHFRPEFINRISSIVVFNRLSRKAISKIVKIRLSEIENRFTANGKAIQLKLDDDAMEYLCKNGWSPDLGARPLNRLIQNEILNRLAVMLLKGQIQDKETARVVLGEKGLEILPNHEPEDVEMNDVDNWQDSEDEDDDEARFTSPGLD

SEQ ID NO: 8962 - protein, 899 aa, Candida albicans
MEDFTDNAIKIINNATELAKQQANSQLVPLHFLAAFIPSDDTEGSTQYLKTLVKRARYEWGDFERIVNRHLVKIPSQNPPPDEIRPSYQAGQVLTRANKIKQQQKDSYVAQDHILLALLEDQSIKDIFKEAGMSVDTIKTQAIELRGSQRIDSRQADSSSSYEFLNKYCEDFTEKAREGKIDPVIGREEEIRRVIRVLARRSKSNSVLIGDAGVGKTSIVEGVAQRIVDGDVPNVLAGSRLFALDLGALTAGAKYKGEFEERLKGVLNEIEKSKEFIILFIDEIHMLMGDGKSDAANLLKPMLARGALHCIGATTFAEYRKFISKDGAFERRFQKIDVPAATVQETVAILRGIQPKYEIHHGVRILDSALVTAAQLASRYLTYRALPDSAVDLVDESAAAVAVARDSKPEELDTLERQLHLVDVEISALERDKDADSASKERLNLAKKKKAELEEKIGPLNERYRQERASHEQLTAAKRKLDELEIKAQDAERRYDTATAADLRYFAIPDIQKQIEELEVKVAEEEASNLDSLLKNAVGPEQICETAARLTGIPVTKLSQAENNKLINMEAELSKEVVGQSEAVKAVSNAIRLRRSGLANPNQPPSFLFLGLSGSGKTELAKKLAGFLFADEKAIIRIDCSELGDKWSASKLLGAAPGYVGYEEGGILTEPLIRRPYSVVLLDEVEKAAPEVLTVLLQILDDGRVTSSQGKLVNCSNAIFIMTSNLGANYINAAKGSKIDANTKEHVMDAVRAHFRPEFINRISSIVVFNRLSRKAISKIVKIRLSEIENRFTANGKAIQLKLDDDAMEYLCKNGWSPDLGARPLNRLIQNEILNRLAVMLLKGQIQDKETARVVLGEKGLEILPNHEPEDVEMNDVDNWQDSEDEDDDEARFTSPGLD

SEQ ID NO: 8963 - protein, 462 aa, Bacillus subtilis subsp. subtilis str. 168
KKGAGMDPEFRQFIGENALSIDLINIEPLDDLHAPKGIIKQAQDLAAEAFGADHTFFSVQGTSGAIMTMVMAVCGPGDKIIIPRNVHKSIMTAIVFSGAVPIFIHPEIDNELGISHGITLESAKRALTEHPDAKGLLVINPTYFGVAADLKSIVELAHSFDVPVLVDEAHGVHIHFHDELPLSAMQAGADIAATSVHKLGGSLTQSSILNMREGLVSKDRVQSILSMLTTTSTSYLLLASLDVARKRLATEGRQLAEETLKLANQTRDRLNQIEGIYCVGSEILGSKAAYSYDPTKLIISVKSLGLTGHDVEKWLRESFNIEVELSDLYNILCIFTPGDSQNDADRLVEALTEIAQQMSEQDVTHQQTEVLLPEIPLLAMTPRDAFYANTEVIPLKEASGRIIAEFVMVYPPGIPIFIPGEIITEENISYIFKNLDAGLPVQGPEDSTLHMIRVIKEQKAIQ

SEQ ID NO: 8964 - protein, 279 aa, Daucus carota
MVSFQDAKRKNPYDGFFMRSYDEEEIGDEEYDEYFQQPEKKRRLKADQIQFLEKSFETDNKLEPERKVQLAKELGLQPRQVAIWFQNRRARWKTKTLEKDYDVLQNSYNSLKADYDNLLAEKEKLKAEVLDLTDKLLLKEDKGSKTVVFDKQKVSAAFQQERVSNDISVGEVLSNSVMDCKQEDHNSVKSDAVDSDSPHYSDEVYSSFMEPVDRSYVFEPAQSDISQDEEDDMGNNLFLPSYHVFSKTEDGSYSDQPSNSSYFGFPVEDHTFGFWGTEL

SEQ ID NO: 8965 - protein, 382 aa, Medicago sativa subsp. falcata
MCGGAIISGFIPAAAAVGGSRRVTADILWPNLRRKPSSRKPFLLDDDFEAGFREFKDDSDFDEDEDEDDDEGLLVGVKGFTFGSNKNNKSSKSFVRGSSAAKPVALNSNKLAEKDSKRKRKNQYRGIRQRPWGKWAAEIRDPRKGVRVWLGTFNTAEEAARAYDAEARRIRGKKAKVNFPEEAPVASSKRLKKSPETQLLNENLNSLKPNGNQMFNFGENMENYFSPMDQVEQKPLVNNQYADIGAFSGNGVQLTSADVNAYFSSEHSSNSFDYSDLCWGEQGPKTPEISSVFSAAAPMEGESQTNMLSDNTQDMLPMQNDSAKTLSEELADIESQLKFFENDNWSDASLAALLGGDTTQDGGNTMNLWNFDDLPSIAGDVF

SEQ ID NO: 8966 - protein, 637 aa, Brucella ovis
MAKVIGIDLGTTNSCVAVMDGKNAKVIENAEGARTTPSIIAFTDGDEGVAGQPAKRQAVTNPEGTLFAVKRLLGRRYDDPMVTKDKDLVPYKIVKGDNGDAWVEVHGKKYSPSQISAMILQKMKETAESYLGETVTQAVITVPAYFNDAQRQATKDAGKIAGLEVLRIINEPTAAALAYGLDKSEGKTIAVYDLGGGTFDVSVLEIGDGVFEVKSTNGDTFLGGEDFDIRLVEYLVAEFKKESGIDLKNDKLALQRLKDAAEKAKTELSSSQQTEINLPFITADQTGPKHLAIKLSRANVESLVDDAVHATVEPCKAALKDAGLKAGEIDEVVLVGGMTRMPEIQKCVKAFFGKEPHKGVNPDEVVAMGAAIQGGVLQGDVKDVLLLDVTPLSLGIETLGGVFTRLIERNTTIPTKKSQTFSTAEDNQSAVTIRVFQASVKLAADNKLLGQFDLVGIPPAPRGVRQIEVTFDIDANGIVNVSAKDGGVPKEHQIRIQASGGLSDADIEKMVKDAEANAEADKKRRESVEAKNQAESLVHSTEKSLAEYGDKVSADDKKAIEDAIAALKTSLEGEDAEDIKAKTQALAEVSMKLGQAMYEAAQAAEGAGAEGGEQASSSKDDVVDADYEEIDDNKKSS

SEQ ID NO: 8967 - protein, 630 aa, Caulobacter vibrioides
MSKIIGIDLGTTNSCVAIMDGKTPKVIENAEGARTTPSVVAFLEDGERLIGQPAKRQAVTNPTNTLFAIKRLIGRTASDPVVEKDKGMVPYRSSRARAGDAWVKAHGKDYSPQEVSAFILQKMKEAAEAHLGEPVTKAVITVPAYFNDAQRQATKDAGKIAGLEVLRIINEPTAAALAYGLDKNDGKKIAVYDLGGGTFDVSILEIGDGVFEVKSTNGDTFLGGEDFDLRIVDYLADEFKKEQGVDLRKDKLALQRLREAEKAKKELSSTAQYEVNLPFISMNASGPLHLNIKLSRAKLEALVDDLIARTIGPCEQALKDAGLKKSDIDEVILVGGMSRMPKVQQAVQDFFGREPHKGVNPDEVVALGAAVQAGVLQGDVKDVLLLDVTPLTLGIDTLGGVFTPLIERNTTIPTKRSQTFSTADDNQSAVTIRVFQGERAMAQDNKMQGQFDLVGIPPAPRGVPQIEVTFDIDANGIVQVHAKDKATNKEQSIRIQANGGLSDSDIERMVKEAEANKAADEKKKQLVEAKNQGEAILHSTEKALAEHGDKVGAAEKTAIETGITELKTALEGEDVEAIQAKTQALIQASMKLGEAMYAAQQGSAEGGDAKADDGVVDAEFEEVDDNKPAA

SEQ ID NO: 8968 - protein, 161 aa, Quercus petraea
MSTSEVITGFTEEQEALVVKSWTAMKKNSGELGLKFFLKIFEIAPSAQKLFSFLKDSNVPLERNPKLKSHAVTVFVMTCESAVQLRKAGKVTVRESTLKKTGGVHFKSGVVDEHYEVTKFALLEIIKEAVPEMWSPEMKIAWGEAYDQLVAAIKSESKPSS

SEQ ID NO: 8969 - protein, 509 aa, Nicotiana tabacum
MEGTNLTTYAAVFLGTLFLLLLSKFLRQRKLNLPPGPKPWPIIGNLNLIGNLPHRSIHELSLKYGPIMQLQFGTFPVVVGSSVEMAKVFLKSMDINFVGRPKTAAGKYTTYNYSDITWSPYGPYWRQARRMCLMELFSTKRLDSYEYIRAEELHSLLHNLNKISGKPIVLKDYLTTLSLNVISRMVLGKRYLDESENSIVTPEEFKKMLDELFLLNGVLNIGDSIPWIDFMDLQGYVKRMKFVSKKFDKFLEHVIDEHNVRRNGVENYIAKDMVDVLLQLADDPTLEVKLERHGVKAFTQDMLAGGTESSAVTVEWAISELLKKPEIFKKATEELDRVIGQNRWVQEKDIPNLPYIEAIVKETMRLHPVAPMLVPRECREDCKVAGYDVKKGTRVLVSVWTIGRDPTLWDEPEAFKPERFHEKSIDVKGHDFELLPFGAGRRMCPGYNLGLKVIQASLANLIHGFNWSLPDNMTPEDLDMDEIFGLSTPKKFPLATVIEPRLSPKLYSV

SEQ ID NO: 8970 - protein, 654 aa, Trichophyton rubrum
MAPAVGIDLGTTYSCVGIFRDDRIEIIANDQGNRTTPSFVAFTDTERLIGDAAKNQVAMNPINTVFDAKRLIGRKFNDAEVQADMKHFPFKVVEKSGKPIVQVEFKGEEKQFTPEEISSMVLTKMRETAEAYLGGTVNNAVITVPAYFNDSQRQATKDAGLIAGLNVLRIINEPTAGGIAYGLDKKADGERNVLIFDFGGGTFDVSLLTIEEGIFEVKSTAGDTQLGGEEFDNRLVNHFVNEFKRKNKKDLSTNARALRRLRTACERAKRTLSSAAQTSIEIDSLYEGVDFYTSITRARFEELCQDLFRSTMEPVERVLRDAKIDKSSVHEIVLVGGSTRIPKIQKMVSDFFNGKEPNKSINPDEGVAYGAAVQAAILSGDTSSKSTNEILLLDVAPLSLGIETAGGVMTPLIKRNTTIPTKKSETFSTFSDNQPGVLIQVFEGERARTKDNNLLGKFELTGIPPAPRGVPQIEVTFDVDANGIMNVSALEKGTGKTNKIVITNDKGRLSKEEIERMLAEAEKYKAEDEAETARIGAKNGLESYAYSLKNTLSDSKVDEKLDAADKEKLKSEIDKVVAWLDDNQTATKEEYESQQKELEGVANPIMMKFYGAGGEGGAPGGFPGAGAGGPGGFPGAGAGGAAAHDDGPTVEEVD

SEQ ID NO: 8971 - protein, 649 aa, Paracoccidioides brasiliensis
MAPAIGIDLGTTYSCVGIFRDDRIEIIANEQGNRNTPSFVAFTDTERLIGDAAKNQVAMNPQTVFEAKRLIGRKFADPEVQADMKHFPFKITDKGGNPKIQVEFRGEGKHFTPEGISSMFRRKKREIAESYLGGTVNNAVVTVPAYFNDSQRQVTKDAGLIAGLNVLRIINEPTAAAIAYGLDKKAEGERNVLILDLGGGTFDVSLLTIEEGIFEVKSTAGDTHFGGEDFDNRLVNHFVNEFKRKHKKDLSSNARALRRLRTACERAKRTLSSAAQTSIEIDSLYEGIDFYTSITRARFEELCQDLFRSTMDPVERVLRDAKIDKSSVHEIVLVGGSTRIPRIQKLVSDFFNGKEPNKSINPDEAVAYGAAVQAAILSGDSTSKSTNEILLLDVAPLSVGIETAGGVMTPLIKRNTTIPTKKSETFSTFADNQPGVLIQVFEGERARTKENNLLGKFELTGIPPAPGVPQIEVTFDVDANGIMNVSALEKGIGKTNKIVITNDKGRLSKEEIERMLAEAEKYKAEDEAEASRISAKNGLESYAYSLRNTISDSKVDEKLDASDKEKLKTEIDKTVSWLDENQTATKEEFEAQQKELESVANPIMMKFYGAGGAPGAGFPGAGGPGGFPGAGVGGAHSGGDDGPTVEEVD

SEQ ID NO: 8972 - protein, 705 aa, Ajellomyces capsulatus
MAPAVGIDLGTTYSCVGIFRDDRIEIIANDQGNRTTPSFVAFTDTERLIGDAAKNQVAMNPANTVFDAKRLIGRKFADPEVQADMKHFPFKITDKGGKPVIQVEFKGETKEFTPEEISSMVLTKMRETAEAYLGGTVNNAVVTVPAYFNDSQRQATKDAGLIAGLNVLRIINEPTAAAIAYGLDKKADGERNVLIFDLGGGTFDVSLLTIEEGIFEVKSTAGDTHLGGEDFDNRLVNHFVSEFKRKFKKISPAERARALRRSPTACERAKRTLSSAAQTSIEIDSLYEGIDFYTSITRARFEELCQDLFRSTMEPVERVLRDAKIDKSSVHEIVLVGGSTRIPRIQKLVSDFFNGKEPNKSINPDEAVAYGAAVQAAILSGDTSSKSTNEILLLDVAPLSLGIETAGGVMTPLIKRNTTIPTKKSETFSTFSDNQPGVLIQVFEGERARTKDNNLLGKFELTGIPRARGVPQIEVTFDVDANGIMNVSALEKGTRKTNKIVITNDKGRLSKEEIERMLAEAEKYKAEDEAEASRIRPKNGLESYAYSLRNSLRHSKVDEKLEAGDKEKLKSEIDKTVQWLDENQTATKEEYESQQKELEAVANPIMMKFYAGGEGAPGGFPGAGGPGGFPGGPGAGHASGGGDDGPTVEEVDLKFPMLPLPWQLSVRKMHRPFFLFLLFLIFLIFLILFLFYFFLPVRFNESCFS

SEQ ID NO: 8973 - protein, 503 aa, Penicillium citrinum
AYLGGTVNNAVITVPAYFNDSQRQATKDAGLIAGLNVLRIINEPTAAAIAYGLDKKTEGERNVLIFDLGGGTFDVSLLTIEEGIFEVKSTAGDTHLGGEDFDNRLVNHFVNEFKRKHKKDLTTNARALRRLRTACERAKRTLSSAAQTSIEIDSLFEGIDFYTSITRARFEELCQDLFRGTMEPVERVLRDAKIDKSSVHEIVLVGGSTRIPKIQKLVSDFFNKDANKSINPDEAVAYGAAVQAAILSGDTSSKSTNEILLLDVAPLSLGIETAGGVMTPLIKRNTTIPTKKSETFSTYSDNQPGVLIQVFEGERARTKDNNLLGKFELTGIPPAPRGVPQIEVTFDLDANGIMNVSASEKGTGKSNKITITNDKGRLSKEEIERMLAEAEKYKAEDEAEASRIQAKNGLESYAYSLKNTITEGKLQMSDDDKKKIEDKISEIISWLDNNQTAEKDEYESQQKELEAIANPIMQAAYGAAGGAPPQQRADGETEEKKDEEELD

SEQ ID NO: 8974 - protein, 392 aa, Azotobacter sp. FA8
MKEVVIVAATRTAVGSFQGSLANIPAAELGAAVIRHLLEQTKLDAAQVDEVILGQVLTAGVGQNPARQAVIKAGLPHTVPAMTLNKVCGSGLKALHLATQAIRCGDADVIIAGGQENMSLSPYVLPGARTGLRMGHANLLDSMIQDGLWDAFNNYHMGITAENLVEKFGISREEQDALAAASQQKAVAAIEAGHFRSQITPISIPQRKGDPIVFDTDEQPRAETTLEALSKLKPAFKKDGSVTAGNASSLNDGAAAVLLMSAEKAQSLGLPVLARIKAYANAAVDPAIMGIGPVSATRRCLEKAGWSLDDLDLLEANEAFAAQSLSVGKGVGWDASKFNVNGGAIAIGHPIGASGCRILVTLVHEMIRRDLKKGLATLCIGGGQGVALAVER

SEQ ID NO: 8975 - protein, 129 aa, Ageratina adenophora
GGRRSNIFDPLSFDVWDPFKDFPFPSSSIVSNETSGFVNARVDWKETPEAHVFKADLPGIKKEEVKVEVEDDRVLQITGERNVEKENKNDKWHRIERSSGKFTRRFRLPENAKLDQVKAAMEYGVLTIT

SEQ ID NO: 8976 - protein, 108 aa, Chenopodium rubrum
PMVDPDAPSPSNPHLREYLHWLVTDIPGGTGASFGQELFGYESPRPSVGIHRFIFVLFRQLGRQTVYPPGWRQQFNTRDFAEIYNLGLPVASVYFNCQREGGSGGRRL

SEQ ID NO: 8977 - protein, 167 aa, Chenopodium rubrum
MIQGKEANEISTHSGVAGIEDVLDPFDSCVTLRVSYNNRTVTTGGEFSPSQVVSQPRVEVGGDLGTFYTLVMVDPDAPSPSNPHLREYLHWMVTDIPGTSDASSDEEEMYCYESPQPSMGMHRYVFVLFQQSGRQTVYTPGWRINFETEAFAEIYNLKPVAAVYFNC

SEQ ID NO: 8978 - protein, 518 aa, Funaria hygrometrica
RSSTKKSRKERRPNPFAQDGYHGNLQILKNQPKARILDKYVLGRELGRGEFGITYLCTDKETQEIFACKSISKKKLRTAVDVEDVRREVAIMKHLPEHPHVVTLKGAYEDDNAVHLVMELCEGGELFDRIIARGHYTERGAAQVTRTIVEVVQACHRQGVMHRDLKPENFLFANKNENSPLKAIDFGLSVFFKPGEKFSEIVGSPYYMAPEVLKRNYGPEVDVWSAGVILYILLCGVPPFWAETEQGVAQAILRGILDFKRDPWPKVSDSAKSLVRHMLEPDPKARYIAQQVLDHPWLQNAKKNPNVPLDAVRSRLKQFSAMNKLKKRALQVIAEHLGGEEIDGLKEMFEKLDSDNTGAITFEKLKMGLIEIGSQLTEHEVRLLMEAADVDGNGTLDYGEFVAATVHLQRLDDDEHLRRAFDVFDVNESGFIEVEELREAVGQSLMGSPSESDVVQAILSEVDLDKDGRISYEEFAVMMRRGTDWRKASRQYSRDRFNSLSMRLLRDGSLNPPSYSMR

SEQ ID NO: 8979 - protein, 304 aa, Anabaena sp.
MTQAKAKHADVPVNLYRPNAPFIGKVISNEPLVKEGGIGIVQHIKFDLTGGNLKYIEGQSIGIIPPGVDKNGKPERLRLYSIASTRHGDDVDDKTISLCVRQLEYKHPESGETVYGVCSTYLTHIEPGSEVKITGPVGKEMLLPDDPEANVIMLATGTGIAPMRTYLWRMFKDAERAANPEYQFKGFSWLVFGVPTTPNILYKEELEEIQQKYPDNFRLTYAISREQKNPQGGRMYIQDRVAEHADQLWQLIKNQKTHTYICGLRGMEEGIDAALSAAAAKEGVTWSDYQKDLKKAGRWHVETY

SEQ ID NO: 8980 - protein, 304 aa, Anabaena sp.
MTQAKAKHADVPVNLYRPNAPFIGKVISNEPLVKEGGIGIVQHIKFDLTGGNLKYIEGQSIGIIPPGVDKNGKPESLRLYSIASTRHGDDVDDKTISLCVRQLEYKHPESGETVYGVCSTYLTHIEPGSEVKITGPVGKEMLLPDDPEANVIMLATGTGIAPMRTYLWRMFKDAERAANPEYQFKGFSWLVFGVPTTPNILYKEELEEIQQKYPDNFRLTYAISREQKNPQGGRMYIQDRVAEHADQLWQLIKNQKTHTYICGLRGMEEGIDAALSAAAAKEGVTWSDYQKDLKKAGRWHVETY

SEQ ID NO: 8981 - protein, 304 aa, Anabaena sp.
MTQAKAKHADVPVNLYRPNAPFIGKVISNEPLVKEGGIGIVQHIKFDLTGGNLKYIEGQSIGIIPPGVDKNGKPEQLRLYSIASTRHGDDVDDKTISLCVRQLEYKHPESGETVYGVCSTYLTHIEPGSEVKITGPVGKEMLLPDDPEANVIMLATGTGIAPMRTYLWRMFKDAERAANPEYQFKGFSWLVFGVPTTPNILYKEELEEIQQKYPDNFRLTYAISREQKNPQGGRMYIQDRVAEHADQLWQLIKNQKTHTYICGLRGMEEGIDAALSAAAAKEGVTWSDYQKDLKKAGRWHVETY

SEQ ID NO: 8982 - protein, 616 aa, Thermus thermophilus
MAKAVGIDLGTTNSVIAVLEGGKPVVLENAEGERVTPSVVAFRDGETLVGRMAKRQAVLNPEGTIFEIKRFIGRRFEEVQEEAKRVPYKVVPGPDGGVRVEVKGKLYTPEEISAMILRKLVEDASKKLGEKITKAVITVPAYFNNAQREATANAGRIAGLEVLRIINEPTAAALAYGLDKKGNETVLVFDLGGGTFDVTILEIGEGVFEVKATSGDTHLGGSDMDHAIVNWLAEEFKKEHGVDLKADRQALQRLIEAAEKAKIELSSTLETTISLPFIALDPASKTPLHLEKKLTRAKFEELIQPLLKRLRGPVEQALKDAGLTPAQIDEVILVGGATRVPAVQQVVRELLGKEPNRSVEPRTKVVAMGAAIQAGVLMGEVRDVVLLDVTPLSLGVETKGGVMTVLIPRNTTIPTRKCEIFTTAEHNQTAVEIHVLQGERPMAQDNKSLGRFRLEGIPPMPAGVPQIEVCFDIDANGILHVTAKERSTGREASITIQNTTTLSEEEIQRIIEEAKRHAEEDRRRREHAELKNALDSARVQAERVLQERQGAPEARARLEAAIGKAKELVERDAPDPELKAATEELLKAVEEYEKGAQAASGKGPDDVIDADYKPAD

SEQ ID NO: 8983 - protein, 483 aa, Amanita muscaria
MSSGGLVSALSGFKKSLNFTWIGWPGFFIPPKDRPLVNKRLMDQYSCQAVYLDDDVADKHYNGFSYSILWPLFHYHPGEMNFDEENWLAYRQANLQFAEAVLQQLTPGAMVWVQDYHLMLLPMLLRGLIEGRDLGADLSITELSEIGEGAEEGIQNAKNLHGVKMGFFLHTPFPSSEIYRILPVRREILLGILYCDLIGFHTYDYARHFLSSCTRILGLPTMPNGVEFEGRMAHVGTFPIGIEPSSFIENLKKDSVTARITQLEHRFNGVKVIVGVDRLDYIKGVPQKLHALELFLTQHPEWIGKVVLVQLAVPSRQDVEEYQNLRSTVNELVGRINGRFGTVEFMPIHFMHKSLPFDELCALYAVSDVCLVSSTRDGMNLVSYEYVACQQARQGVMILSEFAGAAQSLNGSIVVNPWDSQQVADAIHEAVTMDAPTRSENHKKLFKYVNKYSAAFWGSSFIKEMARIKAIEVNKGAKEDAAV

SEQ ID NO: 8984 - protein, 346 aa, Ginkgo biloba
MGRQPCCDKVGLKKGPWTAEEDRKLVNFITTHGHGCWREVPKLAGLLRCGKSCRLRWTNYLRPDLKRGLLSESEEKLIIDLHAAIGNRWSRIAAQLPGRTDNEIKNYWNTRIKKKLRQMGIDPVTHKPLNQMQMDYMIRPPAPMNAEENNKFEPPLKPENVAEASSPENIRGPDEEMRMNMPACSSLESLEIDLPLRMEDSMKLFNVCSPTSVISLSGRTEEVDSDDSNIVDQVNNPLSDSHKNNANNNMTTSCCSFNNGGNIHSRSSDIKAEPPSLWDDQMGVLGDPISDYLQWNDLELWSAGLDAASGWIQQLPECHWSEMQGDIEISSNCPELQRLASILDEM

SEQ ID NO: 8985 - protein, 353 aa, Ipomoea batatas
MCGGAIISDIKPPVRTSRRLTSELLWGSADRSSAGGKKKKNFAGSYYSGGLRSAAFDLDNELKADFQDFNDYDDDEGVELDVKPFAFGLSSGFGSKSKDFDQSMKRKRKNQYRGIRQRPWGKWAAEIRDPSKGVRVWLGTFDTAEEAAGAYDTEARRIRGNKAKLNFPAETQTKSSRRTVKVNPRKVVPNTVQPDASSMDNSYYDPMSVLEQKPQVKLYDSVGDMGLLSYPSSGGANLYFNFDGGSNNSLDCTEHGSRTPEISFALSAAVEADEIQFIQESNPQKKLKSTENPPVEKLFEELSAFEDQMKFFQIPYLEGNWDSSVDTYLNVDGGNALDLWSFDDVPSLMGGVF

SEQ ID NO: 8986 - protein, 731 aa, Dichelobacter nodosus
MQMSKKFTARFQEALSAAQSLAVGKDHAYIEPLHIFSALLDQEGSSIIAIAQRAGGQIGAVRQAVMQALERLPRVKNPTGDVNISPESMRLLNLCDKYAQQNGDEYISSELFLRAVYDAKGDLEQLLRANGLEKAAVVAAIDAVRGGEAVTDEYAEDKRGALKKYTLDVTQRPLDGKIDPVIGRDEEIRRAMQILQRRSKNNPVLIGEPGVGKTAIVEGLAQRIADRAVPESLKGKRLLSLDLAALLAGTKYRGEFEERLKAVLDEITKADGQIILFIDEIHTMVGAGKSEGSLDAGNMLKPALARGDLHCIGATTLDEYRQYMEKDAALERRFQKVIVDEPSVEDTIAILRNLQERYEVHHGINITDPALVAAAQLSHRYISGRKLPDKAIDLMDEAAAQIRMELDSKPEVMDKIDRRLIQLQIERMALEKETDAASKRRLSDLEAEIAAQEKEYADLEEIWLAEKAGNAGAAEIKEQLDKLRVELEAAKRRGDFARASEIQYGLIPAKEKQLLENEQQTEQRPHRLMRNKVTAEEIAEIVSRWTGIPVAKMMEGEKERLLHLETVLNERVVGQKTAVEAVANAIRRNRAGLSDPKRPIGSFLFLGPTGVGKTELCRTLAQFLFDSEENMVRIDMSEFMEKHSVARLIGAPPGYVGYDQGGYLTEAVRRKPYSVVLFDEVEKAHSDVFNTLLQVLDEGRLTDGQGRTVDFRHTVIIMTSNLGSDMIQLLA

SEQ ID NO: 8987 - protein, 247 aa, Solanum tuberosum
MYQLPISTELPPTFFPAEFPVYCRSSSFSSLMPCLTESWGDLPLKVNDSEDMVIYGLLQDAFSIGWTPSNLTSSEVKPEPREEIEPVMSTSVSPPTETAAAPAALQPKGRHYRGVRQRPWGKFAAEIRDPAKNGARVWLGTYESAEEAALAYDKAAFRMRGTKALLNFPHRIGLNEPEPVRVTVKRRLPEPASSSVSSASESGSPKRRRKGVAAKQAELEVQSRGPNVIQVGCQMEQFPVGEQLLVN

SEQ ID NO: 8988 - protein, 446 aa, Gossypium hirsutum
MEERHVLFGKYEMGRLLGKGTFAKVYYGKELATGESVAVKVISKDQVKKKGMMEQIKREISVMRLVRHPNIVELKEVMATKKKIFFVMEHVRGGELFAKVYKGKLKEHVARKYFQQLISAVDFCHSRGVSHRDLKPENLLLDEKEDLKISDFGLSALPEQLLNDGLLHTQCGTPAYVAPEVLRKKGYDGSRADIWSCGVVLYVLLAGFLPFQDENMMKMYRKVFKAEFEFPTWFSTESKRLISKLLVADPEKRITIPAIMRDPWFRKEFTRPLAFSIQEPIDDDESAPSKSAKLSSPKFFNAFEFISSMSSGFDLSGLFEDKRKSGTMFTSRCSASAIMSKVEAVAKGLNFRVGKAKDFKMRLQGSSEGRKGRLFVTAEVFEVAPEVAVVEFSKSAGDTLEYAKFCEEDVRPALKDIVWTWQGDSFNEAEEHEKQVQQDTAEPNTL

SEQ ID NO: 8989 - protein, 545 aa, Azospirillum lipoferum
MKLAEALLRALKDRGAQAMFGIPGDFALPFFKVAEETQILPLHTLSHEPAVGFAADAAARYSSTLGVAAVTYGAGAFNMVNAVAGAYAEKSPVVVISGAPGTTEGNAGLLLHHQGRTLDTQFQVFKEITVAQARLDDPAKAPAEIARVLGAARALSRPVYLEIPRNMVNAEVEPVGDDPAWPVDRDALAACADEVLAAMRSATSPVLMVCVRSAATGLEAKVAELAQRLGVPVVTTFMGRGLLADAPTPPLGTYIGVAGDAEITRLVEESDGLFLLGAILSDTNFAVSQRKIDLRKTIHAFDRAVTLGYHTYADNPLGGLVDALLEWLPRSDRTTRGKEPHAYPTGLQADGEPIAPMDIARAVNDRVRAGQEPLLIAADMGDCLFTAMDMIDAGLMAPGYYAGMGFGVPAGIGAQCVSGGKRILTVVGDGAFQMTGWELGNCRRLGIDPIVILFNNASWEMLRTFQPESAFNDLDDWRFADMAAGMGGDGVRVRTRAELKAALDSAFATRGRFQLIEAMIPRGVLSDTLARFVQGQKRLHAAPRD

SEQ ID NO: 8990 - protein, 283 aa, Pyrococcus abyssi GE5
MLLYTYRSFDMELPTVSIEEADYVIMGLPFDGTTSYKPGARFGPVLIRQATLNLESYILDYDVDIAELKIADAGDVALPVNVEDAIKVGIEAIKELRSVNRKALPIFLGGEHSMTYPPVAVLKPKSYVVFDAHLDLRDSYQGSRFNHACVARRIHENGVEVAIFGVRSGTREEVKYATENGIEWVHARDYNFDAFVDLVASLSEPIYVSIDIDVFDIPLVPETGTPEPGGLRFWDVVNALEWLTERKNVVGFDIMEVSGDKLGNVTSITAAKLLFHILGMSSR

SEQ ID NO: 8991 - protein, 193 aa, Cyclamen persicum
MSNTNVPGMCFVAVLSLLLFLAPRTSALMPYRAASLLDLIPSFEDPFRILEQGPLDIPKSPETVALARADWKETPTAHVVTVDVPGLGKGDVKIEVEDRVLRISGERKVEKEEDKESWHRVERAVGRFWRQFRMPGNADLERVKAHMENGVLVVTVPKLAEEKKTGPKVIGIEEGGAVEDVKATKSTSTKDEM

SEQ ID NO: 8992 - protein, 399 aa, Pyrococcus abyssi GE5
MNIMSGDEVQFHENYDDYITYLKRRIRQLELQVRMLEADKERLERELSRLRSEMSRLRQPPAFAGTVIEVLDDDRAIVQNYNGPRFVVRIAPWIERDKLRPGARVALDQRTMAIIELLPSSKDPTVLGFEVIERPNVTYNDIGGLKKQLQELREAIELPLKHPELFEEVGIDPPKGVLLYGPPGCGKTLMAKALAHEVNATFIRVVGSELVRKYIGEGARLVHELFELAKEKAPTIIFIDEIDAIGAKRMDETTGGEREVNRTLMQLLAEMDGFDPRGNVKVIAATNRPDILDPALLRPGRFDRLIEVPLPDFEGRLEILKVHTRRMKLKNVDLRVIAEITEGASGADLKAIATEAGMFAIRERRTYVTQEDFLKAVDKVLGNERKLLQQITSHEIIYG

SEQ ID NO: 8993 - protein, 580 aa, Pyrococcus abyssi GE5
MADKSSLSLLKRFIKEALSERRTLAIVVVSIVGSALANLASPYILRVAIDHYIIPGRYKELGFIAMLYLLSLVAQWFFTTLQTFYTEVFGQKVLRNLRSQLHEKILQSNLDFFKTKSTGDLVSRIINDTNVVNDVLVSGLLGGLGSILSLAGIIVAMLLLDVKLTLVTLTSVPLMVIIALYFGGKMRRAYRETRQKIAKISSVVEESVAGIETIRAFGKEKDVEKEFSKVSTETIKAYLRVAIYMGIFWPLMNIASLLSVIVVIAYGGYLAYKGAVSIGVVVAFIQYAQRFRGPINNVVSMYDSLQSALAALERIYEILDDENVEDYEGISVEKLKGEIEFRNVWFEYEKGRPVLKDVNLYIPPASKVAIVGKTGAGKTTIANLIMRFYDPTKGEILYDGIDGKKISRKSLRKRIGYVPQETYLFPGTIMENILMANPEAKEEDVIRVCKELGIHDFIMKLPKGYETSAGEAGKLLSVGERQLISLARAMLKDPDIVILDEALSSVDPKTEQLVQNAMIKLMEGRTSIIIAHRLSITRFADKVIVVDDGRIVEEGSPGELLSRKGYFYKLYTSQMQEVPG

SEQ ID NO: 8994 - protein, 579 aa, Pyrococcus abyssi GE5
MRKSINQLIRLLSYLRGHAVHFLIGLFLIILMSYTNSIVPVLIRNAIDKGVSTGAYKVAIRYGLLILLVGVLNGVFSLAGRYLLVKAAQYAVYYLRMDAFRAIQRHEMEFFDKTFSGQLISRITNDTERITRFLSFRVRMLLYSIFLIIISLYYMVRMNITLTMVALITIAIVVGLNTTYAMKVRPIYDKIRHQTGVIASIATGTIAGIKTIKSLSVEENVQTKFSQENEELYSLNVKAMKITALYGNAPFLVLGLAMSTMFYYGGKAIIQNTLTVGELVAFLTYMLTMMWPLRALGFTIGDIQRSLAAASRLFDVIDSAPKSIDPPDAVEISNPRGEIEFRDVWLTYHTGRTVLKGVSFKVKPGEKVLITGPPGSGKSSILKLIARFYKPTKGEVLIDGVNVAKIKTENLRKIVAYVPQEPFIFNRSIRENIALAKPNATQEEVERAAKIAKIHDFIASLPKGYDTVVGEKGITLSGGQRQRIALARAMLMNPKIVLLDDPVSNLDAETEKKLVEDLKEILQDKTALIVSQRLSLVKLVDRVIVMKDGKIVEDGKPEELIKKGGIFSEMMKAGGVYGG

SEQ ID NO: 8995 - protein, 795 aa, Pyrococcus abyssi GE5
MAEKKEVKLKVASAYQRDVGRGIVRLDRKTMRELGISPGDVVEIIGTKNTAAIAWPAYPEDEGLGIIRMDGTIRKNAGVGLGDEVTVRKAEVREAKKVTLAPTEPIRFGRDFVEWLHERLVGRPVVRGDYIKVGVLGQELTFVVTATQPSGVVQITEFTDFNISEKPVKEVEKRMTTGVTYEDIGGLKDVIEKIREMIELPLKHPELFEKLGIEPPKGVLLYGPPGTGKTLLAKAVANEANAYFIAINGPEIMSKYYGESEERLREVFKEAEENAPAIIFIDEIDAIAPKRSEVTGEVEKRVVAQLLALMDGLKSRGKVIVIGATNRPDAIDPALRRPGRFDREIEVGVPDRQGRKEILQIHTRGMPIEPDFRKDDVLKILEDFKREGKFTKIIDKAIEEVNKSKEEEIPQVLKKIDAELYDEVKTRLIDKLLDELADVTHGFVGADLAALAREAAMAALRRLIREGKIDFEAETIPREVLDELKVTRRDFYEALKMVEPSALREVLIEVPNVHWDDIGGLEDVKQELREAVEWPLKYPEAFKAYGITPPKGILLYGPPGTGKTLLAKAVATESQANFIAVRGPEILSKWVGESEKNIREIFRKARQAAPTVIFIDEIDAIAPRRGTDVNRVTDRIINQLLTEMDGIQENAGVVVIAATNRPDILDPALLRPGRFDRLILVPAPDEKARFEIFKVHTRGMPLADDVDLKELARRTEGYTGADIAAVCREAAMIAMRRALEKGIIKPGMKASEIRRLAKVTMKDFEEALRKIGPSVSKETMEYYRKIQEQFKQARG

SEQ ID NO: 8996 - protein, 498 aa, Pyrococcus abyssi GE5
MTAVEMSGIVKVYPDGVVALRGVNLKVEEGEIHGLLGENGAGKSTLMRILYGEIKPTKGEIKVFGKEVSFNGPWDAIREGIAMVYQHFTLVPTFTVLENLYLAMLSINPGIKISDVEKLAKEKMREVGFEVPLNEIVEDLPVGIQQRVEIIKALMLNAKILILDEPTSVLTPIEVKELFKTLRNLKERGITVIFITHKLKEVKEITDRVTVLRRGEVVGTVKTSEVSERELARMMVQRDVVMEISKGKSTPGNTILKVEDLWVKDDRGLDAVKGVSFELREGEILGIAGVQGNGQRELAEALAGIRIPEKGKIELLGKDVTKLPAHERYKSGLAYVPDSRRVGLVLDMNVVENVVLTNLSRVLHKGRISWDKANEMTNEVVEKFEVLLSSTKAPIKHLSGGNQQKVMVGREIIREPKVIVVSEPTQGLDIGATEFIRKTLLKLRDERKGILLISTDLDEILQLSDRVAVIYEGKIMSIGKTEEFTLEKLGLLMGGVNA

SEQ ID NO: 8997 - protein, 571 aa, Pyrococcus abyssi GE5
MEVERIALKYALINAIEHGGKANPKAVIGKVLGENPELRSKAREIVPIINKVVEEVNSLSLDEQKAKLMEIYPEYFEKKEEKKEEKKGLPPLPKAEKGKVVTRFAPNPDGAFHLGNARAAILSYEYAKMYGGKFILRFDDTDPKVKRPEPIFYEMIIEDLEWLGIKPDEIVYASDRLELYYKYAEELIKMGKAYVCTCKPEKFRELRDKGIPCPHRDEPVEVQLERWRKMLNGEYKEGEAVVRIKTDLNHPNPAVRDWPALRIVDNPNHPRAGNKYRVWPLYNFASAIDDHELGVTHIFRGQEHAENETRQRYIYEYFGWEYPVTVHHGRLSIEGVILSKSKTRKGIEEGKYLGWDDPRLGTIRALRRRGILPEAIKELIIEVGLKKSDATVSWDNLAAINRKLVDPIANRYFFVADPVPMEVEGAPEFIAKIPLHPDHPERGTRELRFTPGKPIYVSKDDLDLLKPGSFVRLKDLFNVEIVEVGEKIKAKFHSFEYEIARKNKWRMIHWVPEGRPCEVIIPEGDELIVRKGLLEKDANVKAGEIVQFERFGFVRIDKIEGEKVVAIYAHK

SEQ ID NO: 8998 - protein, 356 aa, Pyrococcus abyssi GE5
MEVLEEKPKEGKVKLKVETLDDLWHLYHVISPGDIVYAKTLRKQAQRSDSLRPEKVEAIPVFLGVRAEKINLHRFANQLRVTGPIVYASRDDVPLGKYHTIAVEPGMTITIQKERWRSHHVERIKEAVEASKRAKVMIVAMEDGEAEVAIVREYGLDFIASIRHNIGGKRYNVKREDEEKKFFHDVAKTIKDLIERENVQKVIVAGPGFYKENFYGFLRENYPELAGKVVLDDTSMGGRVGVYEVIKRGTVDKVYTETRVAQEIKLVEKVIERIAKDEPVAYGLKDVEEAVNYGAVDTLLVLDELLKGDDRERIEEIMEMARNLRANVVVVSSEHEGGDKLKALGGIAAILRFKIH

SEQ ID NO: 8999 - protein, 346 aa, Pyrococcus abyssi GE5
MHLMEFPREVILGKNLVPEVNNVIKRLKLESPGLVVYGPVTKKIAGESVKKAIRDEFDVYSITVKKAHIGEVEKVEAKIRDYNIKWAIAVGGGSIIDVTKLASYRSGIPFISFPTTASHDGIASANASIRGIEAKTSIKARPPIAVIADIEVIKTAPRRYLAAGVGDVISNITAVRDWKLAHKLKGEYFSEYAAALSLMSAKMVIRDAEIIRLGNDEGVRKVIKALISSGVAMSIAGSSRPASGAEHLFSHALDLLLDKPALHGEQTGIGTIIMAYLHGINWRKIKETLKTVGAPTSAYELGIDPEIIIEALTIAHKIRPERYTILGKEGLTREAAEKAAKITGVI

SEQ ID NO: 9000 - protein, 307 aa, Pyrococcus abyssi GE5
MIEVKVLVAAPLHEKAIQILKDAGLEVIYEEYPEEDRLVELVKDVEAIIVRSKPKVTRKVIESAPKLKVIARAGVGLDNIDVEAAKERGIEVVNAPAASSRSVAELAVALMFAVARKIAFADRKMREGVWAKKQAMGIELEGKTLGIIGFGRIGYQVAKIARALGMNLLLYDPYPNEERAKEVGGKFVDLETLLRESDIVTIHVPLLESTYHLINEERLKLMKKSAILINTSRGAVVDTNALVKALEEGWIAGAGLDVYEEEPLPKDHPLTKFDNVVLTPHIGASTVEAQERAGVEVAEKVVKILKG

SEQ ID NO: 9001 - protein, 247 aa, Pyrococcus abyssi GE5
MLKIEDLHVEVEGREILRGINLAVNDGEFHVIMGPNGSGKSTLALTIAGHPKYKVTKGKIIFNGEDITSSSPDERARKGILLAFQVPPEIEGVRILDFLIQVLTEIKGMKPEEAYDVVLNKAKELWFDDKDMRRFVNVGFSGGERKRLELLQALLLEPKLLLLDEPDSGVDVDSLSVISRKIEELHNRGVSIILITHYGRIFGHIDKEKLKVHVMKDGKIVKSGGSEIIDMIEREGFKAIFGGENVE

SEQ ID NO: 9002 - protein, 138 aa, Pyrococcus abyssi GE5
MGDKTKVQVSKLKPGRYIIIDDEPCRIVNITVSSPGKHGSAKARIEAVGIFDGKVRSIVKPTSAEVDVPIIDKKTAQVIAITPDTVQIMDMETYEMFEVPIDTGVAEEIRDQLKEGINVEYWETLGRVKIMRIKGEGE

SEQ ID NO: 9003 - protein, 389 aa, Pyrococcus abyssi GE5
MAMSDRLDLVNPSEIRKLFDIAAGMKDVISLGIGEPDFDTPQHIKEYAKEALDMGLTHYGPNIGLPELREAIAEKLKKQNNIEADPNKEIMVLVGANQAFLMGLSAFLKDGEEVLIPTPAFVSYAPAVILAGGKPVEVPTYEENEFRLNVDELKKYVTEKTKALIINSPCNPTGSVLKKKDLEEIADFAVEHDLIVISDEVYEHFIYDDVKHYSIASLDGMFERTITVNGFSKTFAMTGWRLGFVAAPSWIIEKMVKFQMYNATCPVTFIQYAAAKALRDERSWKAVEEMRKEYDRRRKLVWKRLNEMGLPTVKPKGAFYIFPRIKDTGLTSKEFSELMLMEAKVAVVPGSAFGKAGEGYVRISYATAYEKLEEAMDRMEKVLREKKLT

SEQ ID NO: 9004 - protein, 398 aa, Pyrococcus abyssi GE5
MVRASKRALSIEYAIRDVVLPARELEKKGIKVIRLNIGDPVKFDFQPPEHMKEAYCKAIKEGHNYYGDSEGLMELREAIVEREKKKNGVNITPDDVRVTAAVTEALQMIFGALLDPGDEILIPGPSYPPYTGLVKFYGGVPVEYRTIEEEGWQPDIDDLRKKITERTKAIAVINPNNPTGALYDKKTLEEIINIAGEHDIPVLSDEIYDLMTYEGKHISPASLTKDVPVIVMNGLSKVYFATGWRLGYMYFVDPEGKLSEVREAIDKLARIRLCPNTPAQFAAIAGLRGPMDYLEEYMKKLKERRDYIYKRLNEIPGISTTKPQGAFYIFPRIEEGPWKDDKEFVLDVLHNAHVLFVHGSGFGEYGRGHFRAVFLPPVEVLEEAMNRFEKFMREKLSS

SEQ ID NO: 9005 - protein, 363 aa, Pyrococcus abyssi GE5
MYRLQLLQVQKCQEEFERALSLGHYDKARLIALRCAELLRKIASENLSLSHILLEEAKKWEEKAKNVRKRREGKNEYFDKLKALIKRSTITWNDIGGLREAKKLIAQAIGLSIAKSPIEPPQGILLFGPPGTGKSLLASAVANSLNATFFSVKASDLLSKYFGESSKLISALFSLARQLSPSVIFIDEVDSLTMKRVSLDDAARRMIGTLLAEMDGFKERKDKVIVLTATNAPWDLDEAMLSRLPIRIYVPLPDVNSAVEIFKIHLRGIHYDVPLSRLAKEAVKRLYSGREIANVVKLATMKMLEEMNPELSDPLRVSTLKGRDLTTRPLTLDDFKYAMARIKSPITKSDVKKYERWAKEFAI

SEQ ID NO: 9006 - protein, 322 aa, Pyrococcus abyssi GE5
MALLDVRNLRVYYRTPVGYVRAVDGVSFEVGEGEVFGVAGESGCGKSTLVHSLILRKPPMEYKGGSAIFKGRDLMSLPRDELRKIQYSELSIIPQYAMNALNPTKRIKDIVWDLAREHGYADRREVEELLRERLSMVKLSPRVADMYPVELSGGMRQRATMVVSTLLNPDLLIADEITSALDVTTQRVVIELLHHFMQEGIVKSIIFVTHDLALLRQIADRVMVMYAGKVVEIGPMEEVLENPAHPYTQLLLNSLPRMGVHYKRERLSGIPGYPISLLNPPKGCRFYTRCPFAMEDCRDVEPKLVKVGRDHYAACHLLGGES

SEQ ID NO: 9007 - protein, 352 aa, Pyrococcus abyssi GE5
MVYKLLVVKFGGSSVRYAFEEALELVKYLSERIPIVVVVSALKGVTDELIRFANGDKGALPRIERIHEEFLNYHGLNTKISISFRKDMPPEALRDEIISLGERISAKIFAEGLELLGIKSKVVDPLEFLIAKGEFGDAYINIQESKRRAGKLIRLIKSGVIPVIPGFYGNLNGFRVTFGRGGSDYSATALARILDSRCVLIMSDVEGIFTADPKLVPSARLIPYLSYEEIKVAAKLGMKALHWKAVDPVVGDIPIIFGKTKDWKFGTIVLNARSNFPIIVHRVREDFAEIFVVGRNISLPGFLVEEEREDFVKIVVAREDLPEAIREIHREVVEREEKNLRTGNNSELWARI

SEQ ID NO: 9008 - protein, 368 aa, Pyrococcus abyssi GE5
MRKMIVLKFGGSSVKNDFHEAVSLTKSIFEEKEVAVVVSALKGITDMLIKYAKTFDSKYAIKIADSYVKFARTNGVDPNILSPHIQELFNPPSLPKDALTDYILSIGELLSAVIFAEVVEGQVIYPWELFSAYGKFGDGFIDLKKSKKNAKIIYEVIDSGKIPIVPGFVGGMDGYRVTLGRGGSDYSAVALGVILNSELVAIMSNVEGIFTADPKLVPSARLIPYLSYEEALIAAKHGMKAIQWKAAELAKEKKILMLFGRTNNWRMGTVISNRTSRMPLMTYKDGLLLINVEEELEYRVIDEGPFWKLYDVPGNEGIRIIRELHKAIFGNVLSMLQEPGKHIRINRHKVGKSFEHMTFNQSFSRKFY

SEQ ID NO: 9009 - protein, 661 aa, Pyrococcus abyssi GE5
MLKVVALVGNPNVGKTTIFNALTGMRQHVGNWPGVTVEKKEGIMEYKGKEYLVVDLPGIYSLTAHSVDELIARNFILEGNASVIVDIIDSTCLMRNLFLTLELFEMGVKNVIIALNKIDLLKKRGIHVNIKEMEKILGVPVVPTNAKSGEGLDELKRKISLMAEGKITTNPIVPRYDEDIEREIQHVSEVIKGTPLAEKYPIRWLAIKLIQRDEEVIKLVIKHVGQAKIEEILKHVSELEEKYKRSLDIVIASQKYEFLGELLRKFVRHPTEIKETLSDQLDKLLTHPVYGIVSMLVVFYILFQFVFSLGGPLQELLDNAFSSFGEWLGERIANETLRGLVVDGIIGGVGAVLSFFPLVFLLFVGMSILEDSGYLARVAAVMERYLRMFKLPGKAIIPMVLAFGCNVPAVMATRILEEEKDRILTMLVNPLIPCVARMTVITFLAGTFFPDKAALVAVSIYAIAIVLALISALILGKLVVKSEESPFIIELPEYSIPSWKTVVLHSWERSKEFLRKAATVILLGSILIWYLSSYPEPVGSGISYAEKLGRAFEPIARLMGLDWKAAVSLIFGIIAKENVIATYSVIYGVSEESLGSAMAHIMTPLQAYVLALVTTLYLPCIATIAAIRAEGGWKWAGVAVVYNLILATVVGIIAYHIGAVL

SEQ ID NO: 9010 - protein, 479 aa, Pyrococcus abyssi GE5
MCLIAGGFNVSREDAIKIINLGKHRGPDSFGFWSERQMLKSDNFSDVSEIEGGEIALIQCRLAMTGSKSYTQPFYNEIILVHNGEIYNHESLRKYLIERGVAFETDVDSEVILRLLEYLVFDRKLKVEEAIKLSMKMLRGDYAVAFFFNGKFYLFRDPLGVRPLYYSSRGHFASEKKVLWGLGEDAEPVLPGEIVSISKHGITRVRGFNVFSIRTQGKDYFNGLQNLLIDSVKVRASKKVGVLFSGGVDSSLIALIASRYSDVILYTSGTEDSKDVEWARRVAEELGLKLRESLFSREDIENEIERIMFAIEEPNPMNLAIAIPLYFSTKRAREDGVKVLLSGQGADELFGGYAKYLQNPGLMLKDVEELGERNLARDDKVAMLNGVETRYPYLDLPFAILALNVPLELKIRDGKRKFILREIAKSLGLPEWVAEREKKAAQYGSNAQKILEKIAKSRGVKLKGLADILFSKVFHGIQN

SEQ ID NO: 9011 - protein, 611 aa, Pyrococcus abyssi GE5
MCGINGFSWGDEELVKRMNDAIRHRGPDDEGVYVDDNVSLGHVRLAIIDLSPKGHQPMKYEKDGKEVWIVYNGEIYNFMEIRKELEEKGYTFTSNTDTEVILAAYLEWGFDCVERFNGMWAFVIYDKSKNILFLSRDRFGIKPLYYYYDGKNIIFSSEIKGILQHNIPRKPNDAVIFDFLYYNLLDHTEDTFFEGIKRLMPGYNAVFDLNTRKFEAWKYYDLRERIEKRKEISDPQGFKDLFLRAVKMRLVADVPVGSCLSGGLDSSSIVCAMRHLLPDGEIKVFSLVFPGKEIDESKYQRIVVDECRVSWYRTTFNVEDVLADIIDLIRTQEEPFSTLSIYGQYRVMKLARENGMKVLLDGQGSDEILAGYHYFFGYYFVELLRKFKWGKLLREILAYKRIHGSLVPLKNMVLYILPVWVTKRLWRRRFPYLREEFIEKFKKRPSKELIWKIKTLNEALLLAETYYSLPHLLRFEDKNAMRWSIESRVPFCDHELVEYVLSLPPESKVSAGITKVLLRKGLKGILPDEIRNRASKVGFATPDKDILKTNEGQKFALAVIDSESFKKRPYWDYRKVLRMFEEHVSGKKNWSQELWKVIIMELWLREWMDNG

SEQ ID NO: 9012 - protein, 379 aa, Pyrococcus abyssi GE5
MVSKPHGGKLIRRIAAPRTRERILSEQHEYPKVQIDHGRAIDLENIAHGVYSPLKGFLTREDFESVLDHMRLSDDTPWTIPIVLDVEKPEFEEGDAILLYHKETPIARMHVEDIYTYEKEEFALKVFKTKDANHPGVAKVYSMGKYLVGGEIELLNELPNPFAKYTLRPIETRVLFKEKGWKTVVAFQTRNVPHLGHEYVQKAALTFVDGLFINPVLGRKKRGDYKDEVIIKAYEVLFEHYYPKDVAVLATVRYEMRYAGPREAIHHAIMRKNFGATHFIVGRDHAGVGNYYGPYEAWDLFDEFPDLGITPMFIREAFYCKKCGGMVNEKICPHDEKYHVRISGTKLRNMIMRGEKPPEYMMRPEVYEVIRSFDNPFVE

SEQ ID NO: 9013 - protein, 390 aa, Pyrococcus abyssi GE5
MRQKRKYFIAERVILIKRSKIRELFERASKMENVISLGIGEPDFDTPKNIKEACKRALDEGWTHYTPNAGIQQLREAVVEYYKKFYDVDIDVENVIITAGAYEGTYLAFESLLESGDEVLIPDPAFVSYVEDAKLAEAKPVRIPLREENNFMPDPDELLELVTKKTRMIVINYPNNPTGATLDKEVAKAIADIAQDYNIYILSDEPYEHFIYDDAKHYPMLKFAPENTILANSFSKTFAMTGWRLGFVVAPSEIIKEMIKLHAYIIGNVASFIQVAGVEALRSEESWKAVKEMRKEYNERRKLVLKRLKEMPGIRVKEPKGAFYVFPSIKDTGMSSEKFSEWLLEKARVVVIPGTAFGKMGEGYVRISYATSREKLMEAMDRMEKALSEL

SEQ ID NO: 9014 - protein, 637 aa, Pyrococcus abyssi GE5
MFEYFPYKTLRPHQDEFIELVRDVVKRGEKVIIEAPTGFGKTISVLAGVLPHAISFGYKVIYLARTHKQMDRVIEELKRIREIAKVSGIEFRSRKDLCLHSYIRTFAQDAYTSMIVCKSLKRLGKCKYFENLKEKRDKVKEIVEFFLENPSYPWEVIEYSNLLELCPYEVTRKVGEKANVIVASYLYMVNPWIRQAFLDGLGLEYSDLIVIFDEAHNLPDQAISALSDRLSIRSVERAIKEANEYGEKDIENFLSIFLRGLEIIYKEKLENYEISEVPLSPASIFEHVSSILGLRERDLLRFLQEMVEVGDAIREDKIERNLPPRSYVGRVGEFLWNWISLADRSDYLHVFTREKGLALEIVALDPSVALEFLEDVHSAILMSGTLSPLEAFRDIIGVNARLKKFPRMVKSENAIVLVARDVSTRGEERSPVLYKKLAEYIFEAVKIIPKNVGVFTASYEVLEGLISTNVHIRIEEEIGKKVFIEKRDASSSENDALVAEFKAEAKGNGGVLFGVMGGRNSEGQDYSGDEMNGVILVGIPYARPTPRVQAQIRYYEKKFPGKGRYYGYLLPAHRKLAQAAGRVHRSEEEKGSIVILDYRVLWNTVKRDLPDWMVETMQPVTLPLMRIKLRKFWRAVK

SEQ ID NO: 9015 - protein, 562 aa, Pyrococcus abyssi GE5
MSGARALVKALEKEGVKHTFGIIGGSIMPVFDELLESSIRHITTRHEQGAAHAADGYARVSGKPGVAITTSGPGATNLVTGIANAYMDSSPIVAITGQVPTHMIGKMAFQETDIISITKPITKWNYQIRNPREVPKAVKMAFTIATLGRPGPTLLDFPKDAQTGEDEINFDVDVSRLVTPWRPPKLDACPEEVKKAVDMILSAERPVFIVGGGVVWSGATEEVLAIAEYLMIPIMSTFMGKGAVPENHPLYIGNLGMHGKIAANKLLPQTDLIIAVGMRWSDRTVSEFENFAPEAKIIHIDIDPKEVGKNVKVDLGIVGDAKRVLRSIYSEITRGVKKREDWPWLKKVREFQEKYKEELIPLDGNYLRPPEILKELRKILPEDAIVATEVGQNQMWVALYFPILKPRTFLTSGGLGTMGFGFPAAIGAKVAKPDKVVIDIAGDGSFMMSERELATAVNENLPVIVVILNNSSLGMVAQWQRMFFNRRYVATYFKKNPDFVKLAEAYGAQGFRAETMEELLKAVKEGMNSEVPTVIDVPIHPEDDVLPMVPPGEHISKVVTRY

SEQ ID NO: 9016 - protein, 840 aa, Pyrococcus abyssi GE5
MILGRSEPQKDEIKLRVAEALKRDVGRGIVRFDRKYQRMIGVEPGDIVEIEGERITAAIVANPHPDDRGLDIIRMDGYIRKNAGVTIGDFVTIRRAEVKEAKKVVLAPAQKGVIVQIPGDIVKNNLLGRPVVKGDIIVASGRSEMYYSSGTPFDEIFRGFFEAMSVGFGELKFMVVNTIPKGIVQITYNTEVEVLPQAVEVREEKIPEVTYEDIGGLKEAIEKIREMVELPLKHPELFERLGIEPPKGVLLYGPPGTGKTLLAKAVANEANAYFIAINGPEIMSKYYGESEERLREIFKEAEENAPAIIFIDEIDAIAPKREEVVGEVEKRVVSQLLTLMDGLKSRGKVIVIAATNRPDALDPALRRPGRFDREIEVGVPDKQGRKEILQIHTRGMPIEPDFEKETVIKALKELEKDDRFDKEKIKKIIEKVSKAKSEEEIKDILREDRNLYIEVRTKLIDKLLDELAEVTHGFVGADLAALAREAAMVVLRRLIKEGKINPEAETIPREVLEELKVTKADFYEALKMVEPSALREVLIEVPNVHWDDIGGLEDVKQELREAVEWPLKYPKAFKRLGITPPKGVLLYGPPGTGKTLLAKAVATESQANFIAIRGPEVLSKWVGESEKRIREIFRKARQASPAIIFIDEIDAIAPARGTAEGEKVTDRIINQLLTEMDGLVENSGVVVIAATNRPDILDPALLRPGRFDRLILVPAPDEKARFEIFKVHTRGMPLADDVDLKELARRTEGYTGADIAAVCREAAMNALRRAVAKLSPEELEEESEKFLKSLIVTRKDFEVALKKVKPSVTKYMMEYYRQFEESRKRMVGESTGREPDYFTG

SEQ ID NO: 9017 - protein, 335 aa, Pyrococcus abyssi GE5
MSKPRVFITREIPEVGIEMLEKEFEVEVWEDEREIPREILLEKVKDVDALVTMLSERIDREVFERAPRLRIVANYAVGYDNIDVEEATKRGIYVTNTPGVLTDATADLAFALLLATARHLVKGDKFTRSGEWKKRGVAWHPKWFLGYDVYGKTIGIIGFGRIGQAIAKRARGFDMRILYYSRTRKPEVEKELNAEFKPLDELLRESDFVVLAVPLNKETYHMINEERLKMMKRTAILINVARGKVIDTKALIKALKEGWIAGAGLDVYEEEPYYNEELFSLDNVVLTPHIGSATFGAREGMAKLVAENLIAFKRGEVPPTLVNREVLKVRKPGFQ

SEQ ID NO: 9018 - protein, 333 aa, Pyrococcus abyssi GE5
MKPRIGVLFKMKSKPLEELKKYTDVVLKPYPSEEELKEIIPELDGIIIAPVTRITKDILERAERLKVISCQSAGYDHVDVEEATKRGIYVTKVSGLLSEAVAEFALGLLISLMRKIHYADSFIREGKWESHTFVWREFKEVETLYGKEVGIVGMGAIGKAIARRLKPFGCEIYYWSRHRKEDIEREVNAKYLDLDELLEEVDIVILALPLTKETYHIINEERVKKLEGKYLVNIGRGALIDEKALVKAIKEGKLKGFATDVFEEEPVKEHELFRFKWETVLTPHYAGLGKDVLEDMGFRAVENLLKVLRGEIPEDLVNKEVLKVRPIDEVKML

SEQ ID NO: 9019 - protein, 322 aa, Pyrococcus abyssi GE5
MALLDVRNLRVYYRTPVGYVRAVDGVSFEVGEGEVFGVAGESGCGKSTLVHSLILRKPPMEYKGGSAIFKGRDLMSLPRDELRKIQYSELSIIPQYAMNALNPTKRIKDIVWDLAREHGYADRREVEELLRERLSMVKLSPRVADMYPVELSGGMRQRATMVVSTLLNPDLLIADEITSALDVTTQRVVIELLHHFMQEGIVKSIIFVTHDLALLRQIADRVMVMYAGKVVEIGPMEEVLENPAHPYTQLLLNSLPRMGVHYKRERLSGIPGYPISLLNPPRGCRFYTRCPFAMEHCPEVEPKLVKVGKEHYAACHLLGGES

SEQ ID NO: 9020 - protein, 627 aa, Rhodococcus sp. DK17
MATAVGIDLGTTNSVIASWQGGEPVVISNVEGARTTPSVVAFTESGERLVGQLARRQAILNPKGTIYSAKRFIGRHYDEISEEAKAVSFDVVAGDNGEARFDVRGKKYAPEEISALVLRKLVDDASKFLGEKVKEAVITVPAYFNDAQRNATKDAGRIAGLEVLRIINEPTAAALAYGMDKQTHETVLVFDLGGGTFDVSLLDVGEGVVEVRSTAGDSHLGGDDFDRRLVDYLADEFQRAENIDLRKDAQALQRLFEAAEKAKVELSSVTQAQVNLPFVTADANGPKHLTTTIMRSKFEDLTADLVERCLSPVKQAMSDAKVTANDIDEVILVGGSTRIPAVQALVRRLTGGKDPNMSVNPDEVVALGAAVQAGVLKGEVSDVLLLDVTPLSLGVETQGGVMTKIIERNTTIPARRSEVFSTAEDNQSAVDVVVLQGERERAADNRVLGRFRLEDIRPAPRGEAQVEVTFDIDANGILHVTARDKDTGKEQSITISEQGNLDQSEVERMLAEAERNRGEDEALRKAVDARNELDSVAYQVERRLAELGDSAPPHDKARAEMLIADARKAVKDGASPAEVQPLTSELQQLLYGLAPVPAGGGDGHQAGGGDAASSDDDDVIDAEFDRS

SEQ ID NO: 9021 - protein, 397 aa, Streptomyces lividans
MTYGTCRLTLKGGLGSMVTYLDAAATTRVDQRVADIVLHWMTAEFGNAGSRHEYGIRAKRGVERAREYLASTVSAEPDELIFTSGATESNNIALLGLAPYGERTGRRHIITSAIEHKAVLEPLEHLAGRGFEVDFLTPGPSGRISVEGVMERLRPDTLLVSLMHVNNETGVIQPVAELAQQLRATPTYLHVDAAQGYGKVPGDLTTPIDMISISGHKIGAPKGVGALVTRRREEMDDERVPLEPIMFGGGQERKLRPGTLPVPLIMGLAEAAKIFEAEHAQWQVAAQDLRSRLLAGLASTSFQVNGDQDHVVPHILNLSFEDVDAEAFLVTLKDLVAVATGSACTSASFTPSHVLRAMGLPEEAASKSLRFSWTPGQATDLDVEELARGVAKLKPSY

SEQ ID NO: 9022 - protein, 244 aa, Solenostemon scutellarioides
MMGRSPCCEKAHTNKGAWTKEEDDRLISYIRAHGEGCWRSLPKAAGLLRCGKSCRLRWINYLRPDLKRGNFTEDEDELIIKLHSLLGNKWSLIAGRLPGRTDNEIKNYWNTHIRRKLVSQGIDPTTHRPINEPAAAAAAPQEEAVSKTISFSQSERIDKCPDLNLDLRISPPSSSQQQNQEPLKTGTSSGSSSTLCFACSIGIQNSKDCSCRDGIMISVSGSSSGYDFLGLKAGVLDYRSLEMK

SEQ ID NO: 9023 - protein, 248 aa, Solenostemon scutellarioides
MGRSACCSKVGLRRGPWSAKEDSLLSSFIHQHGEGQWRSLPKKAGLLRCGKSCRLRWMNYLRPGIKRGNIGEDEEDLIVRLHALLGNRWSLIAGRLPGRTDNEIKNYWNTHLHKKLQTQKLSTTASAAADNKKKSKKKNLKPPKNLKADALSPVAEGRNIIDNGEETKPTKIYSPKPLRISSIFPRTDSFDSGTSSSGGGGGGGVRIAASCGGVRAGGPGGALPLLRRVRHVGESVRRVYAAALIKHD

SEQ ID NO: 9024 - protein, 559 aa, Nicotiana tabacum
MASSGGNMNTFMNSFTSNYSFSSFSDLLSDNDNNNNNMRNNNSSMNQEKNSLNWGFSDQRMHQQNKDEVPKFKSFPPCSLPMISSSSPASPSSYLAFPPSLSPSVLLDSPVLFNNSNTLPSPTTGSFGNLNSKEDDSRISDFSFQSRAATSSSMFQSSAPRNSLEDLMTRQQHANQQNEFSTAKTTGVKSEVVPIQSFSQEKMQSNPPPVHYTQPSQYVREQKAEDGYNWRKYGQKQVKGSENPRSYYKCTFPNCPTKKKVERNLDGHITEIVYKGNHNHPKPQSTRRSSSQSIQNLAYSNLDITNQPNAFLDNAQRDSFAGTDNSSASFGDEDIDQGSPVSKSGEDDGNEPEAKRWKGDNENEVISSASRTVREPRIVVQTTSDIDILDDGYRWRKYGQKVVKGNPNPRSYYKCTFTGCPVRKHVERASHDLRAVITTYEGKHNHDVPAARGSGSYAMNKPPSGNSNNSMPVVPRPSMLANNSNQGMNFNDTFFNTRVQTTQNQPPITLQMLQSSGSSSYSGFDTSSGSYMNQMQSMSNIKPITKEEPKDDFFSSFLN

SEQ ID NO: 9025 - protein, 378 aa, Nicotiana tabacum
KNYSDFSFQPQFASVSPSQTNPVPLGKQSWNYQESRKQNDENANGTSELQSLKNNGQSNQYNKQSSRSEDGYNWRKYGQKQVKGSENPRSYYKCTFPNCPTKKKVERCLDGQITEIVYKGNHNHPKPTQSTRRSSSLAIQPYNTQTNEIPDHQSTPENSSISFGDDDHEKSRSRGDDFDEEEEPDSKEPDPKRWKRESESEGLSAPGSRTVREPRVVVQTTSDIDILDDGYRWRKYGQKVVKGNPNPRSYYKCTSPGCPVRKHVERASQDIRSVITTYEGKHNHDVPAARGSAINRPVAPTITYNNAIPIRPSVTSQIPLPQQSPFTLEMLHKPSNYNGFSGYATSEDSYENQLQDNNVFSRAKDEPRDDMFMETLLC

SEQ ID NO: 9026 - protein, 309 aa, Helianthus annuus
MEDSTDSIAVDMETIYLGGKEHVIRTGHGCVSVILYGDEEKPPLITYPDVALNHMSCFQGLFFSPEAASLLLHNFCMGAMAGAYLLTLFAIRYRDRVTGLILISPLCKAPSWTEWLYNKLMSNLLYYYGMCSLSKECLLQRYFSKEVRGTPEIPESDIVQACRKLLDERQSINVLRFLQAIHRRPDITQELEKLKCRTLIFVGDNSLFHSEALHMSEKLDRRFSALVEVQGCGSMVTEEQPHAMLVSLEYFLIGFGLYRPSESDGSPRSPLSPFSISPELLSPESLGLKLKPIKTRVLSRGGDSTCYSS

SEQ ID NO: 9027 - protein, 340 aa, Helianthus annuus
MEDSTDSIAVDMETIYLGGKEHVIRTGHGCVSVILYGDEEKPPLITYPDVALNHMSCFQGLFFSPEAASLLLHNFCICPDVPVPSVDDLCDQILEVLNHFRLGAVMCMGAMAGAYLLTLFAIRYRDRVTGLILISPLCKAPSWTEWLYNKLMSNLLYYYGMCSLSKECLLQRYFSKEVRGTPEIPESDIVQACRKLLDERQSINVLRFLQAIHRRPDITQELEKLKCRTLIFVGDNSLFHSEALHMSEKLDRRFSALVEVQGCGSMVTEEQPHAMLVSLEYFLIGFGLYRPSESDGSPRSPLSPFSISPELLSPESLGLKLKPIKTRVLSRGGDSTCYSS

SEQ ID NO: 9028 - protein, 206 aa, Helianthus annuus
MEDSTDSIAVDMETIYLGGKEHVIRTGHGCVSVILYGDEEKPPLITYPDVALNHMSCFQGLFFSPEAASLLLHNFCIYHITPPGHELGAASICPDVPVPSVDDLCDQILEVLNHFRLGAVMCMGAMAGAYLLTLFAIRYRDRVTGLILISPLCKAPSWTEWLYNKLMSNLLYYYGMCSLSKECLLQRYFRSPWYSGNTRIGYCSSM

SEQ ID NO: 9029 - protein, 177 aa, Helianthus annuus
MEDSTDSIAVDMETIYLGGKEHVIRTGHGCVSVILYGDEEKPPLITYPDVALNHMSCFQGLFFSPEAASLLLHNFCIYHITPPGHELGAASICPDVPVPSVDDLCDQILEVLNHFRLGAVMCMGAMAGAYLLTLFAIRYRDRVTGLILISPLCKAPSWTEWLYNKLVEGVLATKILQ

SEQ ID NO: 9030 - protein, 147 aa, Helianthus annuus
MEDSTDSIAVDMETIYLGGKEHVIRTGHGCVSVILYGDEEKPPLITYPDVALNHMSCFQGLFFSPEAASLLLHNFCIYHITPPGHELGAASICPDVPVPSVDDLCDQILEVLNHFSVICFLVVQARCSDVHGGDGGCISSYTICDKI

SEQ ID NO: 9031 - protein, 172 aa, Helianthus annuus
MEDSTDSIAVDMETIYLGGKEHVIRTGHGCVSVILYGDEEKPPLITYPDVALNHMSCFQGLFFSPEAASLLLHNFCIYHITPPGHELGAASICPDVPVPSVDDLCDQILEVLNHFSVICFLVVQARCSDVHGGDGGCISSYTICGILKQTIMFMVHGSLLVTLDLVYAADKI

SEQ ID NO: 9032 - protein, 130 aa, Helianthus annuus
MEDSTDSIAVDMETIYLGGKEHVIRTGHGCVSVILYGDEEKPPLITYPDVALNHMSCFQGLFFSPEAASLLLHNFCIYHITPPGHELGAASICPDVPVPSVDDLCDQILEVLNHFRLGAVMCMGAMAGKI

SEQ ID NO: 9033 - protein, 547 aa, Arabidopsis thaliana
MVSHKVLEFGDDGYKLPAQARAPRSLRKKRIYEKKIPGDDKMCAIDLLATVAGSLLLESKSPVNACLVVQNTVKNEYPADENPVKAVPYSESPSLFDNGKCGFSSVITNPNHLLVGDKVGKEVEGFSSLGVSGDVKPDVVASIGSNSSTEVGACGNGSPNESRDDVNLFSRNDDDENFSGYIRTRMTRPVPRIGDRRIRKILASRHWKGDAKPWYCSKRSYYLHHHQRSYPIKKRKYFDSVYDSNSDDYRLQGKTHKGSRTISSMKSRNASFVSRDHHVKLRIKSFRVPELFVEIPETATVGSLKRMVMEAVTTILGDGLRVGLMVQGKKVRDDGKTLLQTGISEENNHLDSLGFSLEPSLETTPQPLLSSYLSDHACDDVTLCHDNALDSSHEPEPSPADSFGKLGTSDHSRALIPVASAAMLAPRPPNRKFKRTEQQLAAQRRIRRPFSVTEVEALVQAVEKLGTGRWRDVKVRAFEDADHRTYVDLKDKWKTLVHTARISPQQRRGEPVPQELLDRVLKAHAYWSQHLMHQLQTEPPSTQVEAL

SEQ ID NO: 9034 - protein, 254 aa, Arabidopsis thaliana
MDSNQSMRLLSAWIGQIGDLGLNLLWRFIHIVVSLWYIVSGIFEAIESYAITLGLNKKYGSIDLEKLRCLAVVVDIEAAQDVANVVELLQWLTTIGVKQVGLFDSQGLLKKSKDLILETVPGSMLLEEIEKDVAPDGKRIALEFISSSDNKEAVMKAANILLQRYLKSSHPEDDKGEDFFTESHLNDALRVVGENVHVPDLLLVYGPIRSHLGFPAWRLRYTEIVHMGTLKYMRYGSLLKAIHKFTGVHQNYGT

SEQ ID NO: 9035 - protein, 350 aa, Arabidopsis thaliana
MATTMNAAVSLTSSNSSSFPATSCAIAPERIRFTKGAFYYKSNNVVTGKRVFSIKAQITTETDTPTPAKKVEKVSKKNEEGVIVNRYRPKEPYTGKCLLNTKITADDAPGETWHMVFSHQGEIPYREGQSVGVIADGIDKNGKPHKVSLCVKRLVYTNDQGETVKGVCSNFLCDLAPGSDVKLTGPVGKEMLMPKDPNATVIMLATGTGIAPFRSFLWKMFFEKHDDYKFNGLAWLFLGVPTTSSLLYQEEFDKMKAKAPENFRVDYAISREQANDKGEKMYIQTRMAQYAAELWELLKKDNTFVYMCGLKGMEKGIDDIMVSLAANDGIDWFDYKKQLKKAEQWNVEVY

SEQ ID NO: 9036 - protein, 369 aa, Arabidopsis thaliana
MATTMNAAVSLTSSNSSSFPATSCAIAPERIRFTKGAFYYKSNNVVTGKRVFSIKAQITTETDTPTPAKKVEKVSKKNEEGVIVNRYRPKEPYTGKCLLNTKITADDAPGETWHMVFSHQGKIPYREGQSVGVIADGIDKNGKPHKVRLYSIASSALGDLGNSETVSLCVKRLVYTNDQGETVKGVCSNFLCDLAPGSDVKLTGPVGKEMLMPKDPNATVIMLATGTGIAPFRSFLWKMFFEKHDDYKFNGLAWLFLGVPTTSSLLYQEEFDKMKAKAPENFRVDYAISREQANDKGEKMYIQTRMAQYAAELWELLKKDNTFVYMCGLKGMEKGIDDIMVSLAANDGIDWFDYKKQLKKAEQWNVEVY

SEQ ID NO: 9037 - protein, 138 aa, Arabidopsis thaliana
MSDDEHHFEASESGASKTYPQSAGNIRKGGHIVIKNRPCKVVEVSTSKTGKHGHAKCHFVAIDIFTAKKLEDIVPSSHNCDVPHVNRVDYQLIDITEDGFVSLLTDSGGTKDDLKLPTDDGLTAQLLCFVNADEAWIR

SEQ ID NO: 9038 - protein, 356 aa, Arabidopsis thaliana
MCGGAIISDFIPPPRSRRVTSEFIWPDLKKNLKGSKKSSKNRSNFFDFDAEFEADFQGFKDDSSIDCDDDFDVGDVFADVKPFVFTSTPKPAVSAAAEVFGKKVTGLDGDAEKSANRKRKNQYRGIRQRPWGKWAAEIRDPREGARIWLGTFKTAEEAARAYDAAARRIRGSKAKVNFPEENMKANSQKRSVKANLQKPVAKPNPNPSPALVQNSNISFENMCFMEEKHQVSNNNNNQFGMTNSVDAGCNGYQYFSSDQGSNSFDCSEFGWSDQAPITPDISSAVINNNNSALFFEEANPAKKLKSMDFETPYNNTEWDASLDFLNEDAVTTQDNGANPMDLWSIDEIHSMIGGVF

SEQ ID NO: 9039 - protein, 431 aa, Arabidopsis thaliana
MRRFLINQAKGLVDHSRRQHHHKSPSFLSPQPRPLASSPPALSRFFSSTSEMSASDSTSSLPVTLDSINPKVLKCEYAVRGEIVNIAQKLQEDLKTNKDAYPFDEIIYCNIGNPQSLGQLPIKFFREVLALCDHASLLDESETHGLFSTDSIDRAWRILDHIPGRATGAYSHSQGIKGLRDVIAAGIEARDGFPADPNDIFLTDGASPAVHMMMQLLLSSEKDGILSPIPQYPLYSASIALHGGSLVPYYLDEATGWGLEISDLKKQLEEARSKGISVRALVVINPGNPTGQVLAEENQRDIVNFCKQEGLVLLADEVYQENVYVPDKKFHSFKKVARSLGYGEKDISLVSFQSVSKGYYGECGKRGGYMEVTGFTSDVREQIYKMASVNLCSNISGQILASLVMSPPKKEMEFSHPWLNVQRLWKTLSTV

SEQ ID NO: 9040 - protein, 328 aa, Arabidopsis thaliana
MEHHVKTCHGSVSVVVYGDQEKPALITYPDVALNYMSCFQGLFLCPEAVSLLLHNFCIYHISPPGHEFGAAPVCSNDPSPSVEDLADQILEVLNFFSLEAVMCMGITAGAYILSLFAIKHKERVLGLILISPLCKAPSWSEWFYYKVVSNLLYYYGMSGLLKDIFLQRYFSKEARGSSEVPERDVVHECRRLLGERHGSSLMRFLEAVNRRHDLTDGLKSLKCRTLIFVGDQSPFHSETLHMVTALDRKYSALVEVQACGSMVTEEQPHAMLIPMEFFFMGFGLYRPGRVSDSPRSPLSPSCISPELLSPESLGLKLKPIKTRVPTKC

SEQ ID NO: 9041 - protein, 393 aa, Arabidopsis thaliana
MASIVQPSPTFPALNLRRSSLIRPPSSVRFPLCNAADPYKFDGGNSAGFHLLTGDTVPASFSRTRLEDSIYQNTTRLRIFSGTANPILAQEISCYLGLDLGKIKIKRFADGEIYVQLQESVRGCDVFLVQPTCPPANENLMELLVMIDACRRASAKTITAVIPYFGYARADRKTQGRESIAAKLVANLITQSGADRVLACDLHSGQSMGYFDIPVDHVYGQPVILDYLASKAISSEDLVVVSPDVGGVARARAFAKKLSDAPLAIVDKRRHGHNVAEVMNLIGDVKGKVAIMVDDMIDTAGTISKGAALLHQEGAREVYACTTHAVFSPPAISRLSSGLFQEVIITNTIPLSEKNYFPQLTVLSVANLLGETIWRVHDDCSGAIEPFSTLGID

SEQ ID NO: 9042 - protein, 134 aa, Arabidopsis thaliana
MSLQRPNGNSSSSSSHKKHKTAGSTCVLSSSADDGVNNPELDQTQNGVSTAKRRRGRNPVDKEYRSLKRLLRNRVSAQQARERKKVYVSDLESRANELQNNNDQLEEKISTLTNENTMLRKMLINTRPKTDDNH

SEQ ID NO: 9043 - protein, 982 aa, Arabidopsis thaliana
MILKRTLTTFENQNLKRCKIDSEIEYGRKKGEIIVYKKRQRATVDQPCSKEPELLTSSSSSLTSKEESQQVCSDQSKSSRGRVRAVPSRFKDSIVGTWKSSRRKGESTESSHDDDDVSLGKKVKGFSGSSKLHRSKDSKVFPRKDNGDSSEVDCDYWDVQISYDDANFGMPKKSDASRKGVYKPEEFTVGDLVWAKCGKRFPAWPAVVIDPISQAPDGVLKHCVPGAICVMFFGYSKDGTQRDYAWVRQGMVYPFTEFMDKFQDQTNLFNYKASEFNKALEEAVLAENGNFGDAEIISPDSSATESDQDYGPASRFQGSYHEDIRTCDGCGSVMPLKSLKRTKDSQPEELLCKHCSKLRKSNQYCGICKRIWHPSDDGDWVCCDGCDVWVHAECDNITNERFKELEHNNYYCPDCKVQHELTPTILEEQNSVFKSTEKTTETGLPDAITVVCNGMEGTYIRKFHAIECKCGSCGSRKQSPSEWERHTGCRAKKWKYSVRVKDTMLPLEKWIAEFSTYTLETQMLDKQKMLSLLEEKYEPVRAKWTTERCAVCRWVEDWEENKMIICNRCQVAVHQECYGVSKSQDLTSWVCRACETPDIERDCCLCPVKGGALKPSDVEGLWVHVTCAWFRPEVGFLNHENMEPAVGLFKIPANSFLKVCTICKQTHGSCVHCCKCATHFHAMCASRAGYNMELHCLEKNGVQRTRKSVYCSFHRKPDPDSVVVVHTPSGVFGSRNLLQNQYGRAKGSRLVLTKKMKLPGFQTQTQAEQSRVFDSLSAARCRIYSRSNTKKIDLEAISHRLKGPSHHSLSAIENLNSFKEADFTSFRERLKHLQRTENFRVCFGKSGIHGWGLFARKSIQEGEMIIEYRGVKVRRSVADLREANYRSQGKDCYLFKISEEIVIDATDSGNIARLINHSCMPNCYARIVSMGDGEDNRIVLIAKTNVAAGEELTYDYLFEVDESEEIKVPCLCKAPNCRKFMN

SEQ ID NO: 9044 - protein, 202 aa, Arabidopsis thaliana
MVRGKIEIKKIENVTSRQVTFSKRRSGLFKKAHELSVLCDAQVAAMIFSQKGRLYEFASSDIRNTIKRYAEYKREYFVAETHPIEQYVQGLKKEMVTMVKKIEVLEVHNRKMMGQSLDSCSVKELSEIATQIEKSLHMVRLRKAKLYEDELQKLKAKERELKDERVRLSLKVGERPMGMPSGSKEKEDVETDLFIGFLKNRP

SEQ ID NO: 9045 - protein, 568 aa, Arabidopsis thaliana
MVSHKCVEEFGYASYLVPSNARAPRSARKRRSIEKRISKEDDNMCAIDLLATVAGHLSFESGSSLMSIDKLIEDHRVKEEFPEEEKPLMPVALSPYRGSLSPCGFSSVINGKVENEVDGFSYSGGSDACQVGNFSQDVKPDIDGDAVVLDARPNVVVSLGSSSRTEVPSIGNCVSHGVRDDVNLFSRDDDENFSKYIHPRVTKHSPRTVPRIGDRRIRKILASRHWKGGSRHSDTKPWRNYYLHQQRSYPIKKRKNFDHISDSVTDDYRMRTKMHRGSRKGQGASFVASDSHVKLRIKSFRVPELFIEIPETATVGSLKRMVMEAVSTLLSDGHRVGLMVQGKKVRDDNKTLHQTGISQDNSHLDSLDFSLEPSSEMPQLLTSHPLGHACEELLPVCQATKIDNVLESDHHDSALFPSDSLGNNNVTEDSKAMISVALNELSSQSQPPSRKSRRSEQQQQQAAQRRIRRPFSVAEVEALVQAVEKLGTGRWRDVKLCAFEDADHRTYVDLKDKWKTLVHTAKISPQQRRGEPVPQELLNRVLNAHGYWTQQQMQHLGGRLSFVYYYYY

SEQ ID NO: 9046 - protein, 577 aa, Arabidopsis thaliana
MVSHKCVEEFGYASYLVPSNARAPRSARRRSIEKRISKEDDNMCAIDLLATVAGHLSFESGSSLMSIDKLIEDHRVKEEFPEEEKPLMPVALSPYRGSLSPCGFSSVINGKVENEVDGFSYSGGSDACQVGNFSQDVKPDIDGDAVVLDARPNVVVSLGSSSRTEVPSIGNCVSHGVRDDVNLFSRDDDENFSKYIHPRVTKHSPRTVPRIGDRRIRKILASRHWKGGSRHSDTKPWRNYYLHQQRSYPIKKRKNFDHISDSVTDDYRMRTKMHRGSRKGQGASFVASDSHVKLRIKSFRVPELFIEIPETATVGSLKRMVMEAVSTLLSDGHRVGLMVQGKKVRDDNKTLHQTGISQDNSHLDSLDFSLEPSSEMPQLLTSHPLGHACEELLPVCQATKIDNVLESDHHDSALFPSDSLGNNNVTEDSKAMISVALNELSSQSQPPSRKSRRSEQQQQQAAQRRIRRPFSVAEVEALVQAVEKLGTGRWRDVKLCAFEDADHRTYVDLKDKWKTLVHTAKISPQQRRGEPVPQELLNRVLNAHGYWTQQQMQQLQQNVNKLEQETQSQTTEGLLLL

SEQ ID NO: 9047 - protein, 325 aa, Arabidopsis thaliana
MAVKGVMHFYKDTKKHVITTQTEHKCVLDSCRHLQQEGFEVTYLPVKTDGLVDLEMLREAIRPDTGLVSIMAVNNEIGVVQPMEEIGMICKEHNVPFHTDAAQAIGKIPVDVKKWNVALMSMSAHKIYGPKGVGALYVRRRPRIRLEPLMNGGGQERGLRSGTGATQQIVGFGAACELAMKEMEYDEKWIKGLQERLLNGVREKLDGVVVNGSMDSRYVGNLNLSFAYVEGESLLMGLKEVAVSSGSACTSASLEPSYVLRALGVDEDMAHTSIRFGIGRFTTKEEIDKAVELTVKQVEKLREMSPLYEMVKEGIDIKNIQWSQH

SEQ ID NO: 9048 - protein, 262 aa, Arabidopsis thaliana
MTLPVRLGTLSSPPKVPYREGQSIGVIPEGIDKNGKPHKLRLYSIASSAIGDFGDSKTVSLCVKRLVYTNDGGEIVKGVCSNFLCDLKPGDEAKITGPVGKEMLMPKDPNATIIMLGTGTGIAPFRSFLWKMFFEEHEDYKFNGLAWLFLGVPTSSSLLYKEEFEKMKEKNPDNFRLDFAVSREQTNEKGEKMYIQTRMAEYAEELWELLKKDNTFVYMCGLKGMEKGIDDIMVSLAAKDGIDWLEYKKQLKRSEQWNVEVY

SEQ ID NO: 9049 - protein, 744 aa, Arabidopsis thaliana
MWITVNTDNTIKEILHVSKSNTLQVCLVKTGTSIPYINTLELRPLADDIYTNESGSLNYLFRVYYSNLKGYIEYPDDVHDRIWKQILPYQDWQILTTNLQINVSNDYDLPQRVMKTAVTPIKASTTTMEFPWNLEPPTSQFYLFLHFAELQSLQANETREFNVVLNGNVTFKSYSPKFLEMQTVYSTAPKQCDGGKCLLQLVKTSRSTLPPLINAMEAYTVLDFPQIETNVDEVIAIKNIQSTYGLSKTTWQGDPCVPKKFLWDGLNCNNSDDSTPPIITSLNLSSSGLTGIIVLTIQNLANLQELDLSNNNLSGGVPEFLADMKSLLVINLSGNNLSGVVPQKLIEKKMLKLNIEGNPKLNCTVESCVNKDEEGGRQIKSMTIPIVASIGSVVAFTVALMIFCVVRKNNPSNDEAPTSCMLPADSRSSEPTIVTKNKKFTYAEVLTMTNNFQKILGKGGFGIVYYGSVNGTEQVAVKMLSHSSAQGYKQFKAEVELLLRVHHKNLVGLVGYCEEGDKLALIYEYMANGDLDEHMSGKRGGSILNWGTRLKIALEAAQGLEYLHNGCKPLMVHRDVKTTNILLNEHFDTKLADFGLSRSFPIEGETHVSTVVAGTIGYLDPEYYRTNWLTEKSDVYSFGVVLLVMITNQPVIDQNREKRHIAEWVGGMLTKGDIKSITDPNLLGDYNSGSVWKAVELAMSCMNPSSMTRPTMSQVVFELKECLASESSREVSMTFGTEVAPMAR

SEQ ID NO: 9050 - protein, 693 aa, Arabidopsis thaliana
MTVFFINDCVRFPDDVYDRKWYPIFQNSWTQVTTNLNVNISTIYELPQSVMSTAATPLNANATLNITWTIEPPTTPFYSYIHFAELQSLRANDTREFNVTLNGEYTIGPYSPKPLKTETIQDLSPEQCNGGACILQLVETLKSTLPPLLNAIEAFTVIDFPQMETNEDDVTGINDVQNTYGLNRISWQGDPCVPKQYSWDGLNCNNSDISIPPIIISLDLSSSGLNGVITQGIQNLTHLQYLDLSDNNLTGDIPKFLADIQSLLVINLSGNNLTGSVPLSLLQKKGLKLNVEGNPHLLCTDGLCVNKGDGHKKKSIIAPVVASIASIAILIGALVLFFVLKKKTQSKGPPAAYVQASNGRSRRSAEPAIVTKNKRFTYSEVMQMTNNFQRVLGKGGFGIVYHGLVNGTEQVAIKILSHSSSQGYKQFKAEVELLLRVHHKNLVGLVGYCDEGENLALIYEYMANGDLKEHMSGTRNHFILNWGTRLKIVVESAQGLEYLHNGCKPLMVHRDIKTTNILLNEQFDAKLADFGLSRSFPIEGETHVSTAVAGTPGYLDPEYYRTNWLTEKSDVYSFGVVLLEIITNQPVIDPRREKPHIAEWVGEVLTKGDIKNIMDPSLNGDYDSTSVWKAVELAMCCLNPSSARRPNMSQVVIELNECLTSENSRGGAIRDMDSEGSIEVSLTFGTEVTPLAR

SEQ ID NO: 9051 - protein, 1018 aa, Arabidopsis thaliana
MILKRTLTTFENQNLKRCKIDSEIEYGRKKGEIIVYKKRQRATVDQPCSKEPELLTSSSSSLTSKEESQQVCSDQSKSSRGRVRAVPSRFKDSIVGTWKSSRRKGESTESSHDDDDVSLGKKVKGFSGSSKLHRSKDSKVFPRKDNGDSSEVDCDYWDVQISYDDANFGMPKKSDASRKGVYKPEEFTVGDLVWAKCGKRFPAWPAVVIDPISQAPDGVLKHCVPGAICVMFFGYSKDGTQRDYAWVRQGMVYPFTEFMDKFQDQTNLFNYKASEFNKALEEAVLAENGNFGDAEIISPDSSATESDQDYGPASRFQGSYHEDIRTCDGCGSVMPLKSLKRTKDSQPEELLCKHCSKLRKSNQYCGICKRIWHPSDDGDWVCCDGCDVWVHAECDNITNERFKELEHNNYYCPDCKVQHELTPTILEEQNSVFKSTEKTTETGLPDAITVVCNGMEGTYIRKFHAIECKCGSCGSRKQSPSEWERHTGCRAKKWKYSVRVKDTMLPLEKWIAEFSTYTLETQMLDKQKMLSLLEEKYEPVRAKWTTERCAVCRWVEDWEENKMIICNRCQVAVHQECYGVSKSQDLTSWVCRACETPDIERDCCLCPVKGGALKPSDVEGLWVHVTCAWFRPEVGFLNHENMEPAVGLFKIPANSFLKVCTICKQTHGSCVHCCKCATHFHAMCASRAGYNMELHCLEKNGVQRTRKSVYCSFHRKPDPDSVVVVHTPSGVFGSRNLLQNQYGRAKGSRLVLTKKMKLPGFQTQTQAEQSRVFDSLSAARCRIYSRSNTKIDLEAISHRLKGPSHHSLSAIENLNSFKASFSFRAPFMSVFCFLGATFSEYLRKILISIYLVTHQEADFTSFRERLKHLQRTENFRVCFGKSGIHGWGLFARKSIQEGEMIIEYRGVKVRRSVADLREANYRSQGKDCYLFKISEEIVIDATDSGNIARLINHSCMPNCYARIVSMGDGEDNRIVLIAKTNVAAGEELTYDYLFEVDESEEIKVPCLCKAPNCRKFMN

SEQ ID NO: 9052 - protein, 447 aa, Escherichia coli
MTTILKHLPVGQRIGIAFSGGLDTSAALLWMRQKGAVPYAYTANLGQPDEEDYDAIPRRAMEYGAENARLIDCRKQLVAEGIAAIQCGAFHNTTGGLTYFNTTPLGRAVTGTMLVAAMKEDGVNIWGDGSTYKGNDIERFYRYGLLTNAELQIYKPWLDTDFIDELGGRHEMSEFMIACGFDYKMSVEKAYSTDSNMLGATHEAKDLEYLNSSVKIVNPNMGVKFWDESVKIPAEEVTVRFEQGHPVALNGKTFSDDVEMMLEANRIGGRHGLGMSDQIENRIIEAKSRGIYEAPGMALLHIAYERLLTGIHNEDTIEQYHAHGRQLDRLLYQGRWFDSQALMLRDSLQRWVASQITGEVTLELRRGNDYSILNTVSENLTYKPERLTMEKGDSVFSPDDRIGQLTMRNLDITDTREKLFGYAKTGLLSSSAASGVPQVENLENKGQ

SEQ ID NO: 9053 - protein, 478 aa, Arabidopsis thaliana; identical to SEQ ID NO: 607

SEQ ID NO: 9054 - protein, 452 aa, Diospyros kaki
MAMAASPSIVKFLPGFDGELPFKLETGYIGVGEIDEVQLFYYFVESQGDPSNDPLILWLTGGPGCSGFSALVYEIGPLLFKVQSWKPGTLPSLRASKNSWTKVANIIFIDQPVGTGFSYGTTAAAYNSSDTVAAAQVYKFLRKWLMYNPKFGANPLYVGGDLYSGITVPLLVQTILDGIGSGSLPRMQLKGYLLGNPLTDDFIDANSKIPYAFRVNLLSDELYEDAEVSCNGDFVNVDFNNTNCVAVLQGIKENLQLLNEAQNFGPLCALAKPKGEGIQWGAEEAEFTDSLILQDIIPQLTCRSSSWMLSYIYMNDEGVQRALGVKEGTMNSTWRRCAKSLPFYEEDVSSTVAYHKNFTRTALRALIYSGDQALSIPYLGTLEWINSLGVPIFDTWRPWFVDGQVAGYTQKYEKNSYSLTFATVKGAGETAPEYKRKEALAMVNRWFAGYPV

SEQ ID NO: 9055 - protein, 654 aa, Paracoccidioides brasiliensis
MAPAIGIDLGTTYSCVGIFRDDRIEIIANDQGNRTTPSFVAFTDTERLIGDAAKNQVAMNPSNTVFDAKRLIGRKFADPEVQSDMKHFPFKVIDKAGKPVISVEFKGEEKQFTPEEISSMVLTKMRETAESYLGGTVNNAVVTVPAYFNDSQRQATKDAGLIAGLNVLRIINEPTAAAIAYGLDKKAEGERNVLIFDLGGGTFDVSLLTIEEDIFEVKSTAGDTHLGGEDFDNRLVNHFVNEFKRKHKKDLSSNARALRRLRTACERAKRTLSSAAQTSIEIDSLYEGIDFYTSITRARFEELCQDLFRSTMDPVERVLRDAKIDKSSVHEIVLVGGSTRIPRIQKLVSDFFNGKEPNKSINPDEAVAYGAAVQAAILSGDTTSKSTNEILLLDVAPLSVGIETAGGVMTPLIKRNTTIPTKKSETFSTFADNQPGVLIQVFEGERARTKDNNLLGKFELTGIPPAPRGVPQIEVTFDVDANGIMNVSALEKGTGKTNKIVITNDKGRLSKEEIERMLAEAEKYKAEDEAEASRISAKNGLESYAYSLRNTISDSKVDEKLDASDKEKLKTEIDKTVSWLDENQTATKEEFEAQQKELESVANPIMMKFYGAGGEGGAPGAGFPGAGGPGGFPGAGAGGAHSGGDDGPTVEEVD

SEQ ID NO: 9056 - protein, 679 aa, Pennisetum glaucum
MATTTIPTSTPFFTAHHGPRRSRPSVSAAVYSRSRRWRPLRVACEKVVGIDLGTTNSAVAAMEGGKPTIVTNAEGARTTPSVVAYTKTGDRLVGQIAKRQAVVNPENTFFSVKRFIGRKMNEVDEESKQVSYRVVRDDNGNVKLDCPAIGKQFAAEEISAQVLRKLVDDASKFLNDKVTKAVITVPAYFNDSQRTATKDAGRIAALEVLRIINEPTAASLAYGFEKKNNETILVFDLGGGTFDVSVLEVGDGVFEVLSTSGDTHLGGDDFDKRIVDWLAGTFKNDEGIDLLKDKQALQRLTEAAEKAKMELSSLTQTNISLPFITATADGPKHIETTLTRAKFEELCSDLLDRLRTPVDNALRDAKLQFKDIDEVILVGGSTRIPAVQELVKKITGKDPNVTVNPDEVVALGAAVQAGVLSGDVSDIVLLDVTPLSLGLETLGGVMTKITPRNTTLPTSKSEVFSTAADGQTSVEINVLQGEREFVRDNKSLGSFRLDGIPPAPRGVPQIEVKFDIDANGILSVTAVDKGTGKKQDITITGASTLPKDEVERMVDEAERFAKEDKEKRDAIDTKNQAESVIYQTEKQLKELGDKVPSDVKGKVKSKLQELKDAVAGGSTQMMKDALSALNQEVMQLGQSLYSQQGAPGASPTPGADATGSPEKPGGEGDVIDADFTDSK

SEQ ID NO: 9057 - protein, 237 aa, Oryza sativa Indica Group
GKWAAEIRDPRKGVRVWLGTFNSAEEAARAYDAEARRIRGKKAKVNFPEAPTTAQKRRAGSTTAKAPKSSVEQKPTVKPAFNNLANANAFVYPSANFTSNKPFVQPDNMPFVPAKNSAAPIEDPIINSDQGSNSFGCSDFGWENDTKTPDITSIAPISTIAEVDESAFIKSSTNPMVPPVMENSAVDLPDLEPYMRFLLDDGAGDSIDSLLNLDGSQDVVSNMDLWSFDDMPVSDFY

SEQ ID NO: 9058 - protein, 333 aa, Medicago truncatula
MAMQPVYLKEHEGNVHNSVGQFSSVTSAPWWSNAYGSQPVYGGDSCGQMKPFSLELSNYIDQLAPSKNLVRGVEQLFDKGHTNQFTIFPADDCKMSVDTPNHQATLSLQSPFAAEPLNRFELGFNQSMICAKYPYMDQFYGLFSTYGPQISGRIMLPLSMTSDDGPTYVNAKQYHGIIRRRHSRAKAVLQNKLIKRNKPYMHESRHLHAMRRPRGCGGRFLNTKVSANGNGKSGSEENGNIGGLQLQSSGSQSSEVLQSEVGTLNSSKETNGGSPNVSGSEVTSMYTQGVLDSFTVNHIGSTVHSLGDMIDTGHGIVMPTKWFAAAGRQLLEP

SEQ ID NO: 9059 - protein, 451 aa, uncultured crenarchaeote 4B7
MNTFDELKINEDIMRSIKELGFTTPFPIQTQSIPELLRGNDVIGQAHTGTGKTAAFGIPMLQNIIHGGGIQGLVIAPTRELAMQITEEIKKVGKYTKIKVVTVYGGQGIGIQLDALRRKPEIVVATPGRLIDHLDNGSIRTDNIKHVVLDEADVMLDMGFIEDIEYVLQKIPGNRITSLWSATMPPEILRLSDKYLNNAKNILIDSDDLSGEGIDQAFLVIKDREKHKYLTDFINQNKGQVIVFCSTKIRTRNVARDLIKSRYKVVPIEGDMSQNKREYSMMKFRKNQADILVATDVAARGIDVPRVGLVVNYDVPNQDMVYFHRIGRTARAGAKGKAITLVSYSSIGDWKFIKKQIKSDLTDLNKKMGIEVHIPDPLKRNVGRRIAQPMRSGYGRRPSYGGGGRSSYGGGGRSSYGGGHSRDGPARDQYKRKGSSRSSYGRQNRDTKKKW

SEQ ID NO: 9060 - protein, 583 aa, Pediococcus inopinatus
MQAQSKNNTKFNFKTFMGLINRIHPRYWQLLLGFFLGVVTTAMQLMVPGIAKGIINSIGHSMDVGLIVAVILLFVFSTIIGAFSGSILGFFGEDVVYKLRTTLWDKILTLPVGYFDQTKSGKITSRLVNDSTQVKELLANSVPKTATSILQLVGALVLMLIMDWRMTIIMFIAVPLVLICLLPIVRQSNKVARARQDALADLNGKAGEMLGEVRLVKSSTAENLERTAGDKRMYRLYRIGLKEAIYDSIAGPVMGMVMMAMVLGILGYGAIRVREGAIDIGTLFSFLMYLVQMISPFAVLGQFMSDVAKASGSTTRIQALLQTHEEDRLTGTDLDIGDQTLQMNHVSFSYDQHHPILSDVSFTAEPNSVIAFAGPSGGGKSTIFSLIERFYEPNEGSITIGNTNITDIQLADWRQQIGLVGQDAAIMSGTIRYNLTYGLPGHFSDEQLWHVLEMAYATQFVQKMPRGLDTEVGERGVKVSGGQRQRLAIARAFLRNPKILMLDEATASLDSESEMMVQKALDQLMANRTTLVIAHRLSTITNADEIYFIENGRVTGQGTHQQLVKTTPLYREYVKNQSATSNG

SEQ ID NO: 9061 - protein, 776 aa, Magnaporthe grisea 70-15
MANAHDFICQLPDGYNTIVGERGSRLSGGQKQRICIARAIISDPKVLLLDEATSALDIESEKAVQVGLKQASAGRTVIVIAHRLSTIQDADQIVVLSHGSIVEQGTHEDLLERNCVYSKLMDAQNLAEMLACQETQFRTKEITTASCGRDENDSFLAKDQSTVKALAAGTSTSQRAAHVAKYDIWTLIRFIASFNKQERNLMLWGLIWAVICGTGTPIQAIFFAKQIMILGQPLSSETVEAIKKRSDFWSAMYLLLAVVQFVAFAFQGLAFAKCSERLIRRVRNMTFGHLLRQDQAFFDDMETGALLSFLSTETANIAGLSGATLGTLLTVSTTLIAALVLGLLIGWKLSLVIASAVPVLLACGYLRFHMLAKFSRHSQDSFAQSASIANETITSLRTVAALVREDEALAEYRRIIKKQQHKSLISTLRSSALYAASSSAFFLAFALGFWYGGTLLARREYDQFQFFVCFSAIVFGAQSAGTFFSYAREMGDAHGAAVKLKRLSDRRPAIDTWSEAGAAVNRSSSTGAIEFRNVDFSYPKQSDRLVLQNLSLRIPAGQYVGLVGASGSGKSTVVSLLERFYDPVAGSIHLDGQDIRTLNLKQYRAIISLVGQEPTLYQGTVRDNILLGIPCPNLVHSETIKKACMDANIYDFIQSLPNGLDTPVGNNGVLLSGGQKQRIALARALIRNPRVLLLDEATSALDSKSESLVQAALHKAVNSRRTIISVAHRLSTVRHAHIILVLANGAVAEAGNHDELMRKDGLYAQMVRYQSIQSSL

SEQ ID NO: 9062 - protein, 985 aa, Magnaporthe grisea 70-15
MTVFIASLFLPKTVHFRLPGTPSRSAPPPALDKDRAKGDVPAGGLKSPSHAKQPSLFKDITPPETPIEERPAAEDIFANEDGLAVPQFPAPTDAGKQRGPADRGSPTWGARRDQPMSRANSPPPSSLLNHNKTLALKARELGRMGVKQPLSLTRSDSHDRVFAQADYTIVNADQGNGGLRNAAEAAAREGKLGDHTYVGTLGMPTDALDGTQQKQDIEDRLATEHDCLAVWCSDKDFDGHYSHFCKQILWPVFHYQIPDNPKSKAYEDHSWKYYVNVNQAVADKIVKNWKRGDVIWVHDYHLLLVPGMIRKKLPDAKIGFFLHVAFPSSEVFRCLAVRRELLEGMLGANLVGFQIHEYTRHFLQTCSRILSAEATPDGLQLEDRFVDVINMPIGIDPVALSEHRKEPQVLEWVNKLRKQYEGKHLIVARDKLDHVRGVRQKLLSYELFLNQNPEWRGKTMLIQVALSTSEKSELDATVSDIVTRVNSSWASLTYQPVTYLKQDIGYAQYLALLTIADALMITSQREGMNLTSHEFLACQDGKNSNDKKHGSLILSEFTGTSSLFGGNELSVNPWDYRACADAIKKALEMSAEEKERRWTKLYQAVSHHTGAHWFTEFMLRLDRVHEEQHRRDQTSVPRLSVASLSAQYKRSSKRLFILDYEGTLVSWGPVNQIIPVSPQVQNATSTNPLSAGQQGQPEGRQHIVHPRLGPLTLASPPTIVTHQPPTTIRDVESNVLSPIRPSSPYTTLNKTMRPGDPIQYTDTNPQRTLDVLSDLLLDEQNTIYVMSGRRPEELDRLFRARIPNLGLIAENGCLLRKCGADSWTEMADAGHIKNWKESVRGIMTYFLERTPGAEVEERRCSLVFHYKNAEDYEAAARQASDCASHINDACESQRVHAVALDGCVVVEPVDWTKGTAAEKIFDDLRSGDLSPDFLMVVGDGREDEKVFKWANQLGEEGTVKDVVTVSLGSRNTEARATLTQGVSGK

SEQ ID NO: 9063 - protein, 306 aa, Magnaporthe grisea 70-15
MKATILTLAAAVAPVLAGIPPAEFKFPEAESELSVEFTWSGQSRTVMAGQLFGSNITSQKPQLAVDQQKFKALADYKGEYIIVMIDPDAPSPDDPKLKFILHWLQTSVTAQTTMASNSTLGGQMALLPKAGQQPQVPYAPPAPPPTSSAHRYIIYAFAQPSNFTMPRTFANFSGTNRASFNIDNFVRDANLDKPLAAEYFYVSRQSNVPGTFVDQPGGSYPGGNGNAIFTANQTRPASPSSGSNNGTRPAPTTPSSGGSGGGGGTPAGGQGTTFTPPSIPGNAAVKQSAGMGALLGAGVVGLTMLL

SEQ ID NO: 9064 - protein, 476 aa, Magnaporthe grisea 70-15
MAPGGLRRQFLQRQARNVSYIAEPVTRNFISFLELYGNFAGEDLEESDDEDDIAVVEEDEEEQGERRPLLGRRQSSKRLRQQGDASNMKSFFTLLKAFVGTGIMFLPKAFKNGGMLFSAITLIVVSAVTMICFEMLLACRKKYGGGGYGDLGQIIVGKRLRQLILISITLSQLGFVCAGLIFTAENLASFFDAVTPDSKPLGTNALIGVQLVVLIPLAFIRNISKLGPAALLADIFILIGLTYIYWFDISWISKNGGFHSSIELFNPRDWTMTIGSAIFTFEGIGLILPIQSSMKQPEHFSKLLLTVMVIITVVFTSVGVLCYGTFGENVSVEVITNFPQSSKLVNAVQFLYAMAVLVGTPVQLFPAMRTIELKIFGRASGRRDSLTKWKKNAFRTVLVVFSGVVAAFGANDLDKFVALIGSFACVPLVYIYPAYLHYIGVAERPWVKAGDIAMMVVGLVAMVYTTIITIARWAET

SEQ ID NO: 9065 - protein, 358 aa, Magnaporthe grisea 70-15
MATANVTYVENLQKYLKLDQRGAVIAEYVWIDSEGGVRSKSRTLESKKDGFKPDDLPTWNFDGSSTGQAPGDNSDVYLKPVAVFPDPFRGGENILVLSECINADGTPNKFNHRHECAKLMETHAEHQPWFGLEQEYTLLDLNDRPFGWPQNGFPAPQGPYYCGVGAGKVVQRDIVEAHYKSCLYAGVKISGTNAEVMPAQWEFQVGPCTGIEMGDHLWIARFLLHRVAEEFGAKVSFDPKPIPGDWNGAGLHSNFSTKEMRVEGGMKHIEAAIKKLEGRHQEHIAVYGEGNEKRLTGRHETGAIDTFSYGVANRGASIRIPRECAAKGYGYFEDRRPASNADPYQITGIIMETCFGEA

SEQ ID NO: 9066 - protein, 406 aa, Magnaporthe grisea 70-15
MQLRGSLAGLSEESPVTLTPTEPEDMWHANNLIRNQDILKGHAIRRVTTENSTGHTTSNRVHTELTLRVTSTLFDPAASALHVSGIVTVENDVVPLGKYHTLDLELNRPFTLWKKDGWDSVAVEALRDALNTDRDGAVAAIVMQDNFANICLISDYQTLIKQRVESSGSAKGGSSGRNASKRDGPDAKTTKFFRMTLDTLLRNIDFKGEARPLLLASPGYTAQKFRDFIKEEAARTRDKMLAQIVKNTVVVHSSSGNVYSLNEVLKSQEVLKQMKTMKSALSSGGMDDLEAMIRADDGRACYGYSTVKKAVEEGAAGRGGGVLYINNALFRSQDIEELDKVKEDGGEVRVLSSDHEAGAKLQALGGVAAMLTYPLVFDDDSDEDAEDQEGDATVPTDAGRKTGAII

SEQ ID NO: 9067 - protein, 387 aa, Magnaporthe grisea 70-15
MSYGSAQSTHITLHLEAPTLPNPLASRLTRRPLHPIASADEAWSKLSAKADIVTPTSTDRASFLAECASGAFAGVVAAYRTFVSGRTTGRIDAELLAALPPTLRFICHNGAGYDQIDVAACTAAGVRVSNTPSAVDDATADAGIFLMLGALRNFGPGMQSCRNGEWIGKPAPALGHDPRGKVLGILGMGGIGRNMAKKAAVFGMKIRYYNRTRLSAELEADCGAEYVDFDTLLVTSDVLSLNLPLNVSRGFEVQAASHYREKVLKVFSPYNKQPKTRHTISHAEFAKMKTGVVVVNTARGAVMDEAALVAALDSGRVASAGLDVYEEEPKVHPGLLANHRCLLVPHMGTYTEETQTKMEEVAISNVVAALEKGQLVTGVPEQSGLTF

SEQ ID NO: 9068 - protein, 1095 aa, Magnaporthe grisea 70-15
MGMRVAAKAVGIDQDAKSRHLPDDLKARALGAVMPLDPFFEEDPTVKEWLLEQRPTLAGTSRYITSITLGFVVVPQAMAYAILAGLRPEFGLYTSFTGAALYWLFGTSKDIAIGATAVVSLLVGKIIEAARAENPESAPEEVSKTIAALSGCFLLVFGMLRLDWLIEFIPHVAIASFVTGASVTITISQMPTVLGIADKINTRDAPYAVFVNTCRALPKATVGAAVGLTAILILHVIKSFCARMAVKQKHKAKMWDTISSIRMTFVILLYTLISFIVNRGLSPEEAKFKILGPVPTGFQAAGTPSFNPDLVKFLIPQLPALLIILIIEHIAIGKSFARLNNYTIVPSQEIISIGAANLLGPFLGGYAATGSFSGTAILSKAGVRTPLAGVFNGLILILALYALTSVFYFIPSAALAGLIVHCVSNLITPPATLVKYWQLAPLDVFIYFVGVFLSIFLSLETGIYATVGLSFLILLLRIARSQGRFLGRARMHVLSSHSKGGGRRPSDASEHWEQRLPSQSSQHSSSLGHGWVNNGREVFLPLDRRDGSNPAVDVSSVHPGVFIYRFTEGCTYLNQAQCVDHIVAHITSHTRKTNMNEYKRPGDRPWNEAAVKKTDQPSDYPNEQNLPLLRAVICDFNTVNHVDSSAVEGLMDMRAQLDRWAAPAAVEWHLAGVRSRWTRRALVAAGFGYPSAVTSGGFWIPGFDVGATSSGDTATVVAEPPRKHPVSRADQECADIADATTRVNSVEDLADCELGLGDRLSSSGTATPGSVAGHLRHVCDEGHADQITNIPNIKCPLRIELVGMLAIRVALFLVPSLVSLLFDTLIPSLAESIKFEGASSLPPRDASQLARTVGLVLVNLALETSVQAGVSTSYTLLTKSPLLQTSTTLPLPWAIIKHVGAMLAAREVLTYLIHRHVLHNRKDGGRVARWHGTYGAHARSGGAAPYSLLLCADHPVSFLLHRFVPLYLPALVLRPHLLTFLLVAALATAEETLAMSGYSVVPGILMGGIARRTAVHCCCSGGARQQGNFGAWGLLDWMCGTSIGKDVMADVRDEAEKHRVKERGEKAASDGVGMIQGGIDGLRRSQRNRNSRRVD

SEQ ID NO: 9069 - protein, 783 aa, Magnaporthe grisea 70-15
MVSQAAAPVVETVDEKHKGQNVSDVVSGADSTSDKSREPHQVKKDEDDDDGASLPSMEVLHAAGVGLDEDDPNQPCLTIRMWVIGIAFCIVGSGVNALNTMRIPSTTLSQSAIQFLAYPIGKAWEYALPDWGVTVFGSRISLNPGPFNAKENILIYILANLSFLSRLSVDVLIEQRIFYGLEAGWGFELLMTASTLILGFALSGIFRKLVVEPPSLMWPGVLGNTALNHTLHSKDKMISESRWKMSRYTFFMIAFCASFAWYWLPDFLFPALSYFTFICWAAPNNVVVNQVFGMKSGMGLMPITFDWAQIAYINNPLLVPPWAIINVFASLVIWVWILAPILYYTNTWNLAYLPFQDNSVFDNMGKSYNVTRVIDKQAGFTFNATKYEQYSQIYMPATYAINTFGLCFATITSLFVWIALEKRDNVWSAINSSWLARRFMPSKYQPPQPSPQPQYRVAPTWWYVAAGVVALVFGILSCELYPVQLRWYGVIFSFVISFIFFLPLAWVYATTNIKIQIEIICRVIAGYAYEGKVLANIWFFNLGYISGIKGLAFAQDLKLGLYCNVPPIKLFIVQVVGIVFATLSQVGVLNWALGSIPGICTPKAENGFTCPFSRTHFNTSMIWGAVGPRRFFGPEALYTPLLWFLLVGAALPVLVWALRHPRALGRYKAARWLKHVHVPVFLGGLNYIPPATGANYSSWAVVGLTFGILMRRRASEWWSRYNFVLAAALDCSVAIAGVVIFFAIFYTGVGTKFSWWGTDVYQNTCDWTGCSYLNLPKGQKFGP

SEQ ID NO: 9070 - protein, 164 aa, Magnaporthe grisea 70-15
MSDEQHEHTFDSTDAGASTTYPMQCSALRKGGHVVIKGRPCKIVDMSTSKTGKHGHAKVHLVAIDIFTNKKLEDLSPSTHNMDVPNVTNETFELIDIEGDGFLQLMDSNGEMREDIKLPEGSDKAEEVAKEIRRLHELKQQDENKEVFIVVTKAMGEEVPTQAK

SEQ ID NO: 9071 - protein, 706 aa, Magnaporthe grisea 70-15
MAKYVDAAKQDLREDVTWQKAGRLSRRGIKEFPEASVQYLLDKAPIIGWLPKYNPRWLINDAIAGLTLGLMLIPQGLAYAKIAEIPVEYGLMSSWLPASIYAIMGTTKDLSTGPTSLIGLLTSEGVHEFGEEYTPSQVASAMALWMGVFGMVLGFLKLGWLLEFISLPILSGFITAVAITIALNQMPSLLGISGVGSGTAQQIHDVFAFLPRASLMTCVIGFTGILMMTILEKMGKRWSDKNKIIWFCSITRAFLTLVLFTGVSYAVNGKKANAKQYMFEVVQVKAQGLEQPGMPPSDLIMKTATRSIALFIAAAVEHSAIARAFGVKNDYIPDQSQELCYFGVTNFVNSFFHAMGVGGAMSRTSVNSQCHVKSPLSGLMTTAVVLISIYFLVGTLYWIPKATLAAIIITAVWPLIHPPSDFYRYWKTSLADFISSMIALWVSLFYSTEMGIGLAVGFNVLYCILRQTFTRVTASGIPAPSDISDRDLPHPDSPQARDVHVFRFNDSFFFPNSYMCSTAILDSIQTYHAPAYHGAQGPEVRERNWSVVAEKRIQRLRRRAGVTDPDALPPIGLVVLDFGRVNHVDSTACSHLKNLAKEISRYGGKHVELRFVGMTEYVRERFVRYGWKVDDAPAWAGPAPDKDATLLFPTVAAAVLAPRRNDAPEVVQHDFDEKRSSSEDLEKGMAMHAETADRSSSQERKTEARP

SEQ ID NO: 9072 - protein, 526 aa, Magnaporthe grisea 70-15
MSALKTTTNEKTSTGDKLRNFFKINNNRRRLPFGRSKTGHEAPQAKSTRADDSDGAQYTTHDDESQDANEPHSTPADSEAARRIRRVKSEPSQLGLIFGYLSGGRPATSGRGKEKTLLANKNASAVGLVGTSSSTPTPGPSSTGGGECVIPSAGGEIVVVPTPNAATPPHGGPKQKLVAYHRTYSSNSIKKGPVRVGPEDFEKLKLIGKGDVGKVYLVREKKRDKLFALKMLDKDEMIRRNKIKRTVTEQEILQVMNHPFIVSLHHSFQSQKYLYLCMEYCSGGEFFRALQSRPGKCISEEAARFYIAEVISALEYLHMNGLIYRDLKPESQDGMPTMIVGRNGTTTMLDTRSCLEGYRTNSFVGTEEYIAPEVIKGHGHSVAVDWWTVGILSFEMIYGVTPFKGKNRNATFANVMREDVHFPDDPELSPMGKSFIRKCLIKDENRRLGAIAGAAELKRHPWFRTTQWALLRHLTPPIIPDQGPDGNFRTLKDSQSVDIGGATRKVADDDPFSAFSSVTLHYGDDK

SEQ ID NO: 9073 - protein, 342 aa, Magnaporthe grisea 70-15
MSLDQKGSIMAEYVWIDSEGGVRSKSRTLKEQKYEPKDLPTWNFDGSSTGQAGGDNSDVFLKPVAVYPDPFRGEPNIIVLAECWDSDGTPNKFNHRHEAAKLMEAHAEHEPWFGLEQEYTLLNLEDRPFGWPKNGFPAPQGPYYCGVGAGKVVQRDIVEAHYKACLYAGVKISGTNAEVMPAQWEFQVGPCEGIEMGDHLSIARFLLHRVAEEFGAKVSFDPKPIPGDWNGAGLHSNFSTKEMRVDGGMKHIEAAIKKLEGRHKEHIAVYGEGNEKRLTGSHETGSIEEFSYGIANRGASIRIPRECAAKGYGYFEDRRPASNADPYQITGIIMETCFGAVN

SEQ ID NO: 9074 - protein, 474 aa, Magnaporthe grisea 70-15
MKNNSENGWVVQKFGGTSVGKFPDKIAEDIVQPYLRNNKIVVVCSARSSGKKVTGTTSRLLEVFRRLKSLEISIEPTQTELIDEARRIIQDICDDHVAAAETFIRDASRCAMLIKEIQDECLELCEYIVAAKRFHLEVNARSKDRVASFGEKLSCRFMACLLQDRNVEAQYVDLSDVLSYEGARRLDHTFYSDAAAVIRKKILACGDKVPIVTGFFGNVPGSLLDGDIGRGYTDLCAALIAVGLKAGELQVWKEVDGIFTADPTKVPTARLIGAITPSEAAELTFYGSEVIHHLTMDQVIKADPPIPIRIKNVKNPRGEGTIVVPDAVFAPGKELRRSRPSELDSVGRKTPKRPTAVTIKDGISVINVHSNKRSIAHGFFARVFSILDQNQVSVDLISTSEVHVSMAIHAASDNGGNFDRARAELGDCGEVSVLHDMAILSLVGADMKNMVGVAGKMFSTLGEHNVNIEMISQE

SEQ ID NO: 9075 - protein, 824 aa, Magnaporthe grisea 70-15
MVSGAVRRTVLLPHLGAAGSAQLLLSARPHLIPLHEPLLPSAAIWTWSKIPVQAARSFAAATSTSFTCANNTAPAASRLSTLPAKAPTSFLGLGNRFSSPSGVLRRFSTTQTPWKQSVKETSLQDDSREDGKALENAEAKKDGDVASPNANLNDDGLESLGFKKSEKALKASQINMSARLSKESKAQPSRAGMGEIWRLLKIARPELKWLAVAFVFLLISSSVTMSIPFSVGRILDLATKGDVESTRIFGLTLTQFFMAFGAFLTLGAVANFGRIILLRIVGERVVARLRSQLYRRTYTQDAEFFDANRVGDLISRLSSDSVIVGKSITQNVSDGMRSIVSGCAGGVAMLWLSPKLTSILLLMFPPIAIGAFIYGRMIRNISRQIQRNLGTLTKIAEERLGNIKTSQAFAGEVQEVHRYNTQIRKIFSLGKRESFVAATFYGSTGWAGNMTILALLVVGGGLVRSGSMSLGDLTSFMMYTAFAGSSLFGVSGFYSELMKGVGAASRLFELQDRTPTIPQTVGLKVKSAQGPIKFSNVCFAYPTRPAVSIFNGLDFEIPSGSNVCVVGPSGGGKSTVAGLLLRFYNPTSGTITINGVDISKMNVKSLRRRIGMVAQEPVLFSGTVAENIAYGRPEASRAEIVAAAQKANCGFISDFPEGLETQVGARGAQLSGGQKQRIAIARALLKDPDILILDEATSALDAESETLVNSALAQLLKGRNTTISIAHRLSTIKRSDKIIVLSSEGKVAEIGSYTELSANPDSAFSKLMEWQMSGGDIPTQQRPPPIITEAEAISEELEGDEAAAAEEEDVEGEHKDAKKTSEKQ

SEQ ID NO: 9076 - protein, 281 aa, Magnaporthe grisea 70-15
MRALGCIAFAAAMTPVVANMPPSEFNFPSVNNDTVLTVAYTFNGNTTVVDPGTMFGGNVARNQPQLAVDPTKFRSLADYTGQYVVIMIDPDAPSPDNPIRRSILHWLASGITQTLGGGSGRISGQRSLTNSTPATVPYAAPGPPPSSSAHRYFFYIWQQPPGFQVPSSFNPNNRANFDIENFVRETNLGAPAAANYIYVSRQDSVPMTFIASPGSEYPGGNGNAVFPRKGDGNGNGNGNGNDNGDPYNPNYPDEGAASGGIQMSNFAALISFVAMGLACLV

SEQ ID NO: 9077 - protein, 745 aa, Magnaporthe grisea 70-15
MSGAPPPPTPTAGGPPPAQYAGQQPQHPPAAAGQSTAPSGGGGGTTATSQSDLNKIVTDYLLKKGYTQTEATFRRESAHVSADGRPIHTRAEDAGPKRFIRAFNLVRDWVENNLDVYKSVHSDALKTLAMVTLPVHVKENDMTRKYRENKYRIPLNQFVTGNLFSFLERESDSGGSVATYILQTHCLLESTARGPIEPYSFEAIYRKTQNLDLDEADASEGIPGVFTGSNNKDALDATAPLKLGPLPMEPELRDDVRAELEDEDQRQPPAPGRSSLVEEFEAKIKREDSADGPLRSELPLPPSRARDVVMEIQRVRENRDRFKIEGRTGGVGVPVSICMFTFHNTLGSVTCMDFSKDNQFVAVGTMDSYIRVWSLDGKPLKSKVPQEQDIHVNNRKLVGHSGPVYGVSFSDSIANTDHNLFGDESNSNNIDTDPKLLLSCSADGQVRLWSLDVWSCLAVYKAHHGPVLRVLWGPHGHYFATAGWDKTVRVFMQDHASAQRIMVGHDTSISALAWHPNGTYVFSASDEQDKSIRMWSVQTGNCVRVFTGHTEYISTLEVAPNGRILASADIGGNIIFWDISKGKRIKRCRGHGKGGIPSLSFSVESNVLVSGGLDGTVRLWDVELPADGSKANAVAGPSAAAIGGQPEGSGAGGAAGDNAAAGGSGERSITVGAQPGQAASSVGASVGTTSGSGGGSGGTGKKKGKEVQITPDQISAFPTKKTPVLKVHFTRMNLVVAGGCYDPER

SEQ ID NO: 9078 - protein, 444 aa, Magnaporthe grisea 70-15
MVRNIVVLGGNSHPELVDEVCGILSIPPCDRILSKFEVGESRCEIKDSVRGKDVYIIQSGGGKSNDHFIELCIMISACKTGSAKRVTAVLPLFPYSRQPDLPYKKSGAPLSQAAGSSNKEYTFESVPATPAPGIPRTAGLTNGVDITHMLRDSSFTNGNAPASPRPAPPSEQFSGKNDANGVNGSRSGKPKAHNSSASTSSLVRSYTTHDYENPSFINHFQARPGYKQWVAQAGTLVANLLTCAGADGIITLELHDHQYQGFFDIPVDNLYGKPLLQRYIQTHVPNYKDAIIVSPDAGGAKRATAIADSLGMDFALIHKERRPTKISDNQNATMMLVGNVSGRICILVDDLCDTGNTITRAAKLLKKQGATYIYALVTHGLFSGDAIPRINASSIDKIVTTNSVPQAEHKALCPKMEILSVSPVFAEAIRRVHHGESISVLFQH

SEQ ID NO: 9079 - protein, 315 aa, Magnaporthe grisea 70-15
MTSKEDIRIMGMPPFVVDFLMGGVSAAVSKTAAAPIERVKLLVQNQEEMIRAGRLDRRYDGIVDCFKRTSQAEGVMSLWRGNTANVIRYFPTQALNFAFRDKFKAMFGYKKDKDGYAKWMAGNLASGGAAGATSLLFVYSLDYARTRLANDAKSAKGGGDRQFNGLVDVYRKTLASDGIAGLYRGFGPSVAGIVVYRGLYFGMYDSIKPVLLTGSLETNFFASFALGWCVTTGAGIASYPLDTVRRRMMMTSGEAVKYSSSFDAFKQIVAKEGVKSLFRGAGANILRGVAGAGVLSIYDQLQLIMFGKAFKGGSG

SEQ ID NO: 9080 - protein, 768 aa, Magnaporthe grisea 70-15
MSHTGRESPSQMPPLGSSPVGSFRGRSLSTSVPRADVTARLASPLPSQFGSPSAALLASSSPRPHAYRQASESGSLTPLAGASATAPGPGISALAAALSNTIGTSPPRFGTPPVRSQSPAASSAAAPMLGSTPPANYGSFDARARLLQSDSSQRDDDEAVAEIVRRHLVQPTDSSEGPDDSSKGKQVVDGSGPGLDDDEFSSLKLQGGDITRPIYRWTEDATNRERIQRSKSFSMPRPDPEHEVLDINNIKVPGGFRRNFLRRAARSPSANPSSMEGGRTSQEPPLVTSNFLEFLSIYGHFAGEELEEDDEVLGPGEYFSSGDDDEDLYTAGEGSDDDRDPMEDSALLTPGRRKRRRKHRGGSGKATPLNAAMVLLKSFVGTGVLFLPRAYLNGGMIFSNLVLLFVAALSYYCFVLLVNTRLKVDGSFGDIGGILYGKWMRLLILTSIVISQVGFVAAYIVFTSENLKAFILAVTDCRTSIDVGYLILMQMVIFLPFSLFRDINKLAFTALIADAFIVIGLAYLFYFDVLTLSTNGLADIIYFNQKDWTLFIGTAIFTFEGIGLIIPIQESMKDPKKFPKVMAVIMVIITTLFTVMGAVSYAAYGSKTETVVLLNLPQDDKMVNVVQFLYSLAILLSTPLQIFPAIRITENGLFTRSGKYNPYIKWQKNIYRFCVVAGCAALAWGGADNLDKFVALVGNFACIPLVYIYPPLLHYRAVAKSNLKRWSDLGLCVFGFVAMAYTTSLTVMAWADSSSEPKPPSYCDSKRH

SEQ ID NO: 9081 - protein, 1118 aa, Magnaporthe grisea 70-15
MSISGPTENDPQVIQWSWSITLFPWHSGSGIATGSIASRDFEAELVRYVLYFVYTGIGEFVAVYVSTVGFIYTGEHITQRIRARYLQAVLRQNVAYFDNLGAGEITTRITADTNLVQDGISHKVSLTLTAVATFVTGFLIAYIRFWKLALICTSTLVAFVTVMGGGTKVIVKYGTRSMQHYAEGNNVVQEVLGTIRTATAFGTQDRLAERYESHLRVVERYGIKMQVAQALMVGALYSITFLTYGLGFWQGARFLGTGEMDAGGILTVLMTIMTGSAAASKIYSTIDRPSPLDPASKHGQQLERVQGDIELRGVTHVYPSRPDVVVLDDVSLRIPAGRTTALVGPSGSGKSSIIGLIERFYSPVAGDILLDGRSVRDLNLRWLRQQMSLVSQEPSLFSTTIFENIRFGLIGTPLENGPEELVRERVEKAAAMANAHNFITSLPKGYQTHVGKKAWCCRELIALGGEYYRLVESQEFSDDEVDSEASNELKGAKAELEATTPTDKHALAKVSFLGSNTPTGPTGDESNTVYSLGTLVRFVASFNKPELKLILLGVVFVVLAGCTQPTQAVLYAKAIAAITTSANRDQLRRDTDFWALMLLALGLAQLLFYAVQGTCLGVGSEKLTSRARGTAFRVMLRQEIAFFDREDNTTGSLTSFLSAETKHLSGISGIILGSILMTVTTLTASLVVALAVGWKLALVCISVVPFLLACGFWRVSILARFQVHSKRAYEASATYACEATTAIRTVAALTKEEEILAQYDRQLGRQARDSLAWTLKASALYALSQAVTFFCQALAFWYGGTLLASREYSIFQFFVCFSEIMYGTNAAGSIFHHASDMGKAKNAAADFKRLFDRRPDIDVWSEEGEKVSSAAVEGMVEFRDVHFRYPTRPEHAVLSGLSFKVEPGQYVALVGPSGCGKSTTIALLDRFYNVTSGGVYLDGRDISQLNVNSYRNLLALVSQEPTLYQGTVRENILLGSQDRDVSEEALVAACKEANIHDFIQSVPDGYDTQVGSRGSMLSGGQKQRVAIARALIRNPRVLLLDESTSALDSESERVVQAALDAAAKGRTTIAVAHRLSTVQKAHVIFVLDQGRVVESGTHQELMRSKGHYYELVNLQRLG

SEQ ID NO: 9082 - protein, 781 aa, Magnaporthe grisea 70-15
MASSQPFGDAIIGAALDPVSGKAVSAPAHDAINEKLGQDKSDVIAATSSTEKGEIQPARSAEDSDNDKGSESDPDAIIVTGTDVARHLLPLRDDADPSLTFRSMVLATGLSGFQSVMNQIYQFKPTLVTIQGTFIVLIAYFLGQAWAKFLPRGDRLEARWRSKGGEGKVPLWIRIVSFFNYGEWGLKEHAICAITATAASNAAASSTVFSAQLLFYDLPLSATTVVLTVISIGLFGYGLCGILRPVTVWHVDAVYWSTLPTVKTLQGLHWQEIKSSKPIRYFWIAFVGMFFYEFFPAYIWPWLNAVSIPCLASMNATGATGATLTRLFGGSLNNEGLGLFTLSFDWQYITSFNTSLPLVLQAHTAVGYFICFLAMLGIYYTNQWDAKSQPFMSTKLRSEDGGSYPTAKVFAGGILDHAALAKYGIPMLSGTFAYAMFMANAAIGALVTHCFLFWGGDIKKTYRSAREGRFDDPHHVIMAKNYKETPWWWFMVVLVGSFVLGLIVVTTQDVTLPAWAYIVSLLLGSIIAPFSTLLYSRYGNGIATNNLSKMIAGLILPERPIANMYFAAFSHNVINCTLNLSNDLKMGEYRFINYAVMISIVTGNKDLLVNGNGDASWSGATIQSYNTNATSWALASYLYKAGGRYWQVIPMGLFPSDWELVPPSLLPTASSTTIGRFDLLDINMPQLIQYAGYIPYNASQTCVLFSQVISGFFIQFYLRNYRPRIFKDYSYLVTGAFEGGSLLALFILSFAVFGAGGAVVAFPQWWGNNVAGNYDLCPVAE

SEQ ID NO: 9083 - protein, 529 aa, Magnaporthe grisea 70-15
MGSVEDETALPSGGRLLLISNRLPITIKRSDDGQYSFSMSSGGLVTGLSGLAKTTSFQWYGWPGLEVPDAEAGPVVQRLKNEYGAHPVFVDDELADRHYNGFANSILWPLFHYHPGEITFDESAWSAYKEVNRLFAQTVVKDVQDGDMIWVHDYHLMLLPEMLREEIGDSKKNVKIGFFLHTPFPSSEIYRILPVRQALLQGVLHCDLLGFHTYDYARHFLSSCSRILSAPTTPNGVQFAGRFVTVGAFPIGIDPEKFVEGLQKPKVQQRIAALTRKFEGVKLIVGVDRLDYIKGVPQKLHALEVFLTEHPEWIGKIVLVQVAVPSRQDVEEYQNLRAVVNELVGRINGKFGTIEFMPIHFLHQSVSFDELAALYAVSDVCLVSSTRDGMNLVSYEYIATQRDRHGVMILSEFTGAAQSLSGSLIVNPWNTEELANAIHDAVTMGPEQREANFKKLERYVFKYTSAWWGSSFVAELNRLAAGIEGADAEGSKTKIAIRGVGDAVADGAGKVADAVSSVLPGGDNKTEGN

SEQ ID NO: 9084 - protein, 872 aa, Magnaporthe grisea 70-15
MPNIAQSARIIFWLRCSSAELVNTPPEVLARTGAADVDIAMLKLGGSRSAGVWCASFCTPGQSRPQAWGKMGSGRTAARLVGIDVDRYSKERRTAVPGNLVGVSYYVEAEPTAKEALEQLIPTAAGVKRYFRSLFPFLSWIFHYNLTWLSGDLIAGITVGFVVVPQGMAYALLAQLPPEFGLYTSFVGFLLYWAFATSKDITIGTVAVMSTIVGNVVIRVQSTQPDIPAEQIARCLALLSGVVLLFLGLVRAGFIVEFISLTAIASFMTGAAVSIAAGQVPTMMGISGVSSRDPTYLVIINTLKGLPRTKLDAAMGLSALVMLYSIRSFCNFMARRQPRRQKMWFFIATLRMAFVILLYILISFLVNRNVTKASDARFRILGTVPSGFQHVGAPVMTSKVLNAVAPDLPVTIIVLIIEHIAISKSFGRINNYIIDPSQELVAIGFSNVFGPFLGGYPATGSFSRTAIKAKAGVRTPLAGIFTAAIVLLALYVLTSVFFYIPSASLAALIIHAVGDLITPPNTVYQFWMTSPIEVVVFFAGVILTVFTNIENGIYLNMAASAALLLFRIARSPGRFMGHTRIYTTTSTAGASASELEASGTGRDAYFDEERRDNANPDLPIRQVHPGIFVYRFPDGFNYTNSAAHLDFITMYVYKKTRRTVLDNNAKIGDRPWNDPGPRRGQMVTDDMANRPILRAMVLDFSSINYADVTSVQALIDLRNQFAKHAAPSPVEWHFAGVTNRWTKRALVAAGFGFADTAAEADHSASSSREKDYESDSGSRVPGSPNTPWAPLFSVSVVDGSGNVEPRHEDGSRMAVDAEKGNGTAADGNGSAAGAASLGGSSLVPVYGLNRPFFHVDVAEAVQSALSSIESNT

SEQ ID NO: 9085 - protein, 886 aa, Magnaporthe grisea 70-15
MAPKRKTKASSRSGAAARPAKRPRQAKENGIPAEALDVYAFGTGVAGELGFGPGPPLSSDPESHTQLRAPLLNPALSGVVQVSAGGMHCAALTAAGKILTWGANDTGNLGRDTAWEPEDGDDDGAVVNPLESTPMEVDEEWFGGAGKRPDFVQVVAIDNATFALAKDGKVWGWGSFRDEKGLLGFIKANLDRKPNPTDADKIQTKPIIVPGLPGNVKQLAGNTNHMLALTHSSQIWAWGGSSTCGELGRRIRSTRSASRYNSLVPTRVALPRSAAREVRAVYAGPHHSFAIDGDGSVFAWGANHFGQTGVVVPRAGGGVEAAQDCITAPTLAPLLGRGRVVHIAAGTHHSVACAADGGVWAWGRCDEGQVGLDLSRFPAGELLVDRRGRRVALLVPSIVPLGVGENATRVAAGVDCSFAVTGSGRVYAWGYAEGYRLGLPSEVTGLEPKRLVRDAHGNPIRNDGFSWAGCGGQFGVIAGPVVKDAAQASTQGGIESADADMVKAKNGAGEEDIVDVDQVDMDEMEDVISFEKQTNQREGGAAETGDGMVENDAHSHKVTHGRDPVQPLDAVTGSGNNIDNNLPRLTNANAAHVQAIPENLLPDGPVERPRITRNNIQYLIDNPGQGDDDCDDYSSDGGSFAPETDDEDDTDEWMSGSDESDESDDSSGGGGAALASTSSGGESTPDEDGESEGSSESSSSDATPEPPSSSESEDVDYSEGTNDDNGASSGRESTPELSSSFSGSEENESNEENTEDSSDSDSPRLRPLPARPTCYDDTDHIEQNTQPVPTWGMPLVDGNGLPVPGWTNANPGGYDDDERSSLFSSEEEGEDSHVDQNARPLRARGWSHVDGNGLPEPGRGYAPDFAVYAGQEDGEEGEDAGGAALE

SEQ ID NO: 9086 - protein, 471 aa, Magnaporthe grisea 70-15
MTARIFDVDQTGNVLCSYDHGDRIDDNSDGSMKIEKTHVPLIKAIFYAFLPAGFPHTVTEDYLHYQIYDSLQAFSSSIASLLANRAVLEGLGVGDASQSPTAALVLKIIQDTISRLATIMFAHRMGTAIEPECKSYRFLADIFNDAAQILDLLVPVLPLLPKVSVLVTSGCLRSLCGVAAGASKASLSAHFAKTGNLAELNAKEASQETVVSLVGMLTGTAVVHMVEDKTAVWCWMVVLICMHLMMNYRAVRNVRMLTLNRQRATIVFREFLETGKVLTPAQCSARESILLNSRGNMGSKSGDYKGFCQFGSYGDVMSWRPWGYHRYDFETDDYFMGIYHWRSTFYIRIAMKETSREGRANGPLLAWFDAVAHAYHFDSALKDGLGSHTEHAGPAGYISPETKETVLKALTAAGWDIYDGQLEIRSPVRVLPFALPPSEKAAIISQHQHHVPSTQSSHGQYHTVPQEMKHD

SEQ ID NO: 9087 - protein, 936 aa, Magnaporthe grisea 70-15
MTEPKKANEAMPPEMVDLTPSDSVLSPSATRVETGTEEKHATVRTTRTLTGNTAAMSPSTTRDEPVAFEEIAAAPTTVESPQREDIEEIVEKMRDGAAGITPEMRAKVEAYYGRKAEEENLAPSADVVYILDKIALMSEEQAMEILVKAIDFHSIDPNFPGATMAKIKMLVQGQKASGLADYDFDLKTEAAIIHYHSPYPEVRSVTMPGDDPNTPCETFRAYFLGLIFTAGCTAINTFFSPRQPSIEIKAQVMQLLLAPCGKFMAKVSPDWGFTLRGTRYTLNPGPWTYKEQVLATIMFTIANNVGNVYYVYLVQRMPQYLGNTWVTFSYEIVLALATQFFGLGFAGLLRRFVVYPVTAIFPKVFPALALNRALVLPEKKGEVINGWKASRYRFFLTAFVLMFFYFWIPNYLFKAVRSFNWMTWIAPENFTLGMIRGFWGGMGFNPLPTFDYNVAGSSILVTPWFSAIQQYSMRILSGLIIIGMYWGNMYWSAYMPINSNEAFDNTGVKYNVTRILNDDRTSINLDKYQEYGPPFFSGANVFGQGAWFAWYPMTLFSVTIQYWDSIKRSGIDMWKGIRHRKSIYESYDDPHTRLMSVYPEVPDWWFLAVLLISLALGIIALQVWPVSLPVWSLFAVVGISAIMLVPSVLIMASANVTMGFNVLFQLLGGIWFVGNPEALILVVAFGQNFDAQAHDYISDQKMGHYAKVPPRAVFRAQMIAVFINCFIFVGMLDWMVLDYNDGTLCPVEQLPAFCLHQRRAVLLYCFLIGALVGIVWGVGRRFGGRLRSYLQRSSSERRFHSLDRWVLGPASHLYWFDPAVAWAGALNWTGGNNLSYATVGIYLSFFFMYHVKRHYGAWWEKYNYLLEAGFGVGIAISATIQTFGLVMTRTELPWWGNTVTMAGVDYRAYNQNATLLPLPEAGFFGPTSDQYPMRFS

SEQ ID NO: 9088 - protein, 797 aa, Magnaporthe grisea 70-15
MDGRMDNETVILAPMQRNYSQAPQEHVSAFWDSFFTKKPGKVTSIFPRSLYQSLLPLEKVSLSSSSQNAAESYEAAARECRERVKRIVREAHRTNEKFTDPDFDLAMDYCRNTLDGLRSKSDFNTGSVHRVDWIFENPQFTINGYEASDIVQGAIGDCWWLAGTATIAHRKDLMERVCVARDEEVGVYGFVFYRDGEWEPVLVDDSLYLAAFDFREVHDPTGKKAREWRRNHQTGSNALFFSKCQDPNETWLPLMEKAYAKIHGDYHAIESGWAGQAVEDMTGGVTANLATNCVLNKDKLWRELSSKDGEFVFALGSRQDDSDGLFGSHAYSILQATEVSGENGQKVRLVQVRNPWGDSEWNGPWSDGSKEWTPYWMKKLGHTFGDDGVFWISYRDMLEKFEDISRTRLFDRSWTVVQQWATMNISWVTGYSQSKFLLEIKQGGLVVITLAQLDDRYFRGLEGQYDFSLHFVLQEQGAKSGDHICRVRAGIHNGKRSVSCEVELEAGRYEVIPKITATRDTNKDMVEDIVKERAQSNPQKLRQIGMQYDLAHAKAGITDEDLVLHTKVEKKKLEEEKRKTKEKEAKEKRRTKEKEAREQRRKQKLSLKQQAPEAKQTEQQTGPGSVADHVEEDQKQADVKDIKEESENDPKADEGKTVENENVKDEDGEKKTEIDSAPVKTEPVADKAPDESKPVKCKACEEREQKGEEEKKDKEVDSADDGNSDDSDEDYTDDDDDTSSESSDDLHDHPGPWNAVCVVGLRVHSRCKNVSVKLVEPKDPEEGALLSVDSAPAGATM

SEQ ID NO: 9089 - protein, 740 aa, Magnaporthe grisea 70-15
MSEIEKALAELKNLMKYRAGELGKEEDFRGLGLTSRKNLCLHPSVKREKSGAIVDARCRGLTAGFVKEKKEKGEDVELCVYHDNLDLLEPHNLIPNGVWTLEGLLRYGEEHKQCPYFTSRRMMQYCNVIIYSYHYLLDPKIAERVSKELSRDSIIVFDEAHNIDNVCIESLSTDITEDSLRKASRGAMNLEKRINEMRETDQNQLEDEYRKLVEGLREADEARQEDAFMSNPVLPDDLLKEAVPGNIRRAEHFVAFLKRFIEYLKASNSLSSQIYVYFQLTLLIQTRMKVLEVISETPPSFLAHLKEYTFIEKKPLRFCAERLTSLVRTLELTNIEDFQPLQEVATFATLVATYDKGFLLLLEPYESEKSQIPNPVLHFTCLDAAIAIKPVFERFKTVIITSGTLSPLEMYPKMLGFDAVVQESYAMTLARRSFLPMIVTKGSDQASISSSFAVRNDPAVVRNYGQLLTEFAKITPDGMVVFFPSYFYMESIISMWQGMKILDEIWKYKLILVETPDAQETAVALETYRTACCNGTGAIMLCVARGKVSEGIDFDHQYGRTVLCIGVPFQYTESLILKARLEFLRETYRIRENDFLSFDAMRHAAQCLGRVLRGKDDYGIMVLADRRFPKKRPQLPKWINQALAESDVNMSTDMAVSAARKFLKSMAQPFRPEDQDGVSRWTIEDLKKHQAKVENDMIRELQAAQGKATNGQAVTVRVIEEDEDYEMDDAAEKDMMQLDA

SEQ ID NO: 9090 - protein, 486 aa, Magnaporthe grisea 70-15
MSSTSRRRLNHDNINPHVKAAKYAVRGELAVKSEEFRAKLTNGDSDLPFKEVISANIGNPQQLDQKPITFFRQVLSILENPLLLDHEDVLLNHLGYKSDVVARAKWLLSKVGSVGAYSASNGAPAIRQSIADFLERRDGFPAKESDIYLSAGASSGVNTLLHVICSDKNSGVLVPIPQYPLYTASLSLLDAQCVPYYLDESKNWGTSMETIRAAHDEAKAKGTDVRAIVVINPGNPTGASLSEEDIRGIIELARAERLVVMADEVYQTNVFVGKFHSFKRVLRQLQKENPDGKYDEVELASLHSVSKGMVGECGHRGGYFELVNFDEKVQAEIYKFVSIMLCAPVIGQCLVELMVNPPKEGEPSYELYKKEYDGIFEGLKARATALHKAFAEMEGVECDTPQGSMYLFPTINVPQKAAAEAEKEGRTPDEFYCMRLLEATGVCVVPGSGFGQKPGTLHLRTTFLAPGTEWVGSIVKFHKEFMDKYR

SEQ ID NO: 9091 - protein, 259 aa, Magnaporthe grisea 70-15
MSTLRDITTLEEWEAHQASLPASTLQIIYFHAPWAPPCAQMATVLKTLSSEYPVTDPLATSWVSLDAEDLSDVSETYDVTAVPFVVLSRGGKVLESISGNSAQRVRTAIETHTSSSGPGASSAGAPVAASDEAAKAEGAPQDPEKQKEELFKRLADLVKAAPVMLFMKGTPSAPQCGFSRQLVALLRENSVKYGFFNILADDEVRQGLKEFADWPTYPQLWMDGELVGGLDIVKEEIGNDPDFFKAYSVKASTDAAGTS

SEQ ID NO: 9092 - protein, 1059 aa, Magnaporthe grisea 70-15
MFAPRGKGYDSDSEDECQRLTPSPGTSSSAVSLQSSGRARKEKPSLGAGGNNGDDKKKKKIKLPPQHSIDKIWERFSKKTFTKALSILPFEPVPASTSSERENELLWAGYERAADECRRKVRKIIQECKRVNQRYRDPGFDLDWDLKWEKGNTLNYLGKTKFALNTSTLQDPSSTVPKAVKRVHEIFDNPTFMKNVNGSDVKQGGLGDCWLMASMSGLANVEGAIQRTCVEYNTRIGIYGFVFYKDGEWIYSIIDDKLFLKSPNWDNRSMQRDLLQQIEREEAEMVYRKTYQTGSKALFFGQNKDQNETWVPLLEKAYAKAHGDYASLAGGWIGEGLEDLSSGVTTELLTSDILDTDVFWDNELNNSNKEFLFGCSTGLLDGGTGTRDGIQERHAYNVVETRTLKDGTRLVKLRNPWGAKGRGIWEGAYSDGSKEWNRQVQEELGHSFGSDSVFWITYDDLLRKFQHVDRTRLFSDPDWRVSQRWIGVDVPWRAQYHEKFHVKLTKDSPLVLVLSQLDDRYFKGLRGQYVFDLHFRVHEQGRPDAEDYIVRSHANYLMERSVGVELPDMAAGNYSIWICVGGERLNGSSSVEEVVARECRARVENEKLAQVGRAYDLAHSKAAAHLAEVARQRRACDHSKADEERKKERKANWERRRLQTVVHKKQRDKNLAKRERRKKERREAAEKKKAEEEAAKVAAEPKVEDAKTDDADKSQTEDKPAAETADTPADEPKATDEAAAVETATKADETAAEADKQDTEEKPTHSDVATDASSTECKQDAESTTSSDSSPQDTPMDTPQSEKSDTVTPGPDADSGSEKVPVPPVTGGPPPEPESNNATTTSTLPIVCQYHKDQQAEAQKQLLAAQEEQKKLEQQQREQQQQQQQQQAQNQRDPYSEDDSSDSPVSDWDDLFDSSDDDTANPKVQLREQTAAAQAAGLPNPVLVDVDETDNEDARAEPWNAVCVVGFRVYSKDEALELRVVMEGGGLSEGGMGEKGEMDLDDAMNNAGGARGEVKKDDTNKEDGGGELAKYATIVSKDGEEYEKAAVPPVSAKDGEDKS

SEQ ID NO: 9093 - protein, 444 aa, Magnaporthe grisea 70-15
MAAKEPISFIGLGAMGFGMATHLIKEGYSVTGFDVWGPTLDRFKAAGGSAASTPAQAVADKPFCVCMVATAQQAQAVLIDGPDAAVPALPQGAVLMLCSTVPCQYAQALDQQLRDMGRGDILFVDCPVSGGAIRAADGTLSIMAGASDEAIAKGRDILQAMSDPAKLYIVAGGVGAGSNMKMCHQVLAANQILSASEAMGFAAHLGLDLAKARDAILASDGKSWMFENRVPRILHPEHKPVASALTIILKDTSIITSEARRRRFATPMTSAAEQAYFVGLGLGYGPDDDAGMLRVYTQGVGKVGPVQGAAETDEAKVALVLALLEGIHLCSAAETLAFADFVKLDLDQVFELCTNAAGGSRMLDRFGPGILAAFKSGVAAKGWETEAGVYDVTAAADRLQAAVDEAQRLKMPLFLGTQALNLLRTATRSLDGKASAGAVVKLWT

SEQ ID NO: 9094 - protein, 175 aa, Magnaporthe grisea 70-15
MANPPHGGVLKDLLARDAPRNAELAAEAETLPALLLTERQLCDLELIITGGFSPLEGFMTEKDYNGVVKENRLTDGALFSMPITLDLSQQTIDENGVKPGARITLRDFRDDRNLTILTVEDVYRPDKQLEAKEVFGGDPEHPAVNYLFNTAGEFYVGGKLEAVNRLQHYDFVDLR

SEQ ID NO: 9095 - protein, 370 aa, Magnaporthe grisea 70-15
MASPKQVHIAIIGAGGVGKCFLSQLQALAKRRPSPQLSLCYISTSKKALFNDDHSEVYSLTSGGADLVSSLAASSREPPAIPQLVDYLASAPAKVVLVDNTSSQAVADSYPQFLRRGVSVVTPNKKAFSGSYGLWRDIFAAAAESGAKVYHESSVGAGLPVISTLKDLVDTGDEVTRIEGVFSGTMSFLFNSFAPTEGQGGKWSAEVAKAKQLGYTEPDPRDDLNGIDVARKLTILARLAGLEVESPTSFPVQSLIPKALESAASGDEFLQRLPEFDSEMEEVKTAAEKEGKVVRFVGSIDVANKQVKVGLEKFDRSHPIAALKGSDNIISFYTKRYGSNPLIIQGAGAGGDVTAMGVTGDLIKVLGQIA

SEQ ID NO: 9096 - protein, 332 aa, Magnaporthe grisea 70-15
MTEVSSTRLYLGNLPRSATKEDVSTHFSSHGTGKITEIKLMNGFGFIEYDDPLDARDVVPAFHGSTFMGERLTVQFARGTRNREGGSGGGGGGGGGGGGGYGGERSGPRPRRTAFRMQISGLPVDTSWQDLKDFARQSQLDVVYSETGRNNNGEGFVEFETAADLASAVEALDGKEFKDKIVRCVANTQPDPPPRDGRGRSRSPPGRRPYGPPGDEYDRRGPPRGYSPPRRDGYRDGYRDRSPPRREYYDDRARYRSPPRHGRGPPMDDYPPPPPRGRYDHDPYRRDYPPPDPYANGRPYDRPPPRDFPPRDPGYAREGGYPREYDRPGRYW

SEQ ID NO: 9097 - protein, 419 aa, Magnaporthe grisea 70-15
MATTQTTQGQIQPCRYKVGKTLGAGSYSVVKECVHIDTGRYYAAKVINKRLMAGREHMVRNEIAVLKKVSMGHQNILTLVDYFETMNNLYLVTDLALGGELFDRICRKGSYYESDAVDLIRATLSAVAYLHDHGIVHRDLKPENLLFRTPEDNADLLIADFGLSRIMDEEQFHVLTTTCGTPGYMAPEIFKKTGHGKPVDIWALGVITYFLLCGYTPFDRDSDLEEMQAILNADYSFTPIEFWRGVSDSAKDFIRRCLTIDPTKRMSAHEALQHPFVAGYLADKGANLLPTVKKNFNARRTLHAAIDTVRAINKLREGQGLNGQRLMAGVKSREPNKAAAAAAAAASIPTSTGEVGTVGAATHKDSGYGSTRPDGDGSGDVAMDEAPPVSHPAALRPGVETNKVVETSKGLWTGVGSRG

SEQ ID NO: 9098 - protein, 776 aa, Magnaporthe grisea 70-15
MAVVPEGGPDGITPTEIVANNPLEKTSSSDPAIHDFEKGQHKQATSKEENDKSETGDGIEVASQHDSVLQDAAKIYVPADDEEFIDPRLKDYPVKLVAKTVDLHNDFDEPILTFRFWILSTFWVVCGCGISSMYYFKPYSAILTSYAVQLLSWGMGDAMAKYLPNWGFTVRGKRYSLNPGPWNAKEHGLIVVAYWGSCYTAWGLGPLSALEMHYGRRIHAGWGIMFLLTTQMIGYGLAGIFRDILVRPPKLFYPSTLPNVALFDAMHKNPSVTTKSLKFFTYVAVATFVWQWVPGVMFLPPEFFLAESWHSSTLSANQSKRLSNQYTPLWSTASQVLGAVLTCWFIYPIMYFGNSLHALNYPPMSSGTFDTTGARYNVSRVLNSDYTLDQAAMDAYSEPRWSPSYAMYFFWGFAASTGALLYAVLWYGKESYIAVMDSWKGRDNDYNDPYLRLMSRCPRVPHWWYLTLLAVCFALSLGTIYGAGLGLPWWGFVLIVVVSTICTFPNGILWGVANIQVGMAFLSELLAGAMFPGNPSAVLTCMVYGRQILSQNLNLISDYKFGFYMKIPEKEMFIGQVWGTLLGPFINYGVMRVIIDEIGVDVLTGVVKSESWLALKTRNFYSLSVLWGILGPKVFFSSGSDYAWIYWAFLIGPALVLMVYIVHRWRPSWDMEKMCNPVVIMHGATWFPVYQTTNLMTSALVAFFFMGYMLRYRPVWFRKYNYLLGVGLDCGTQLCQTVIMLGLDLSGSKFPNWWGKDLEYVERCFPPADLPANALN

SEQ ID NO: 9099 - protein, 803 aa, Magnaporthe grisea 70-15
MAHCQDRGSNSRRGSLAHGTFEDEELSLSLTAIDPRNTAATTTRTTPTQHRRDDSNGRPRPKHSHSHSRRHSQHAQHQNQHQNQDQNQQSPPSAMPPTVHRGGGGGGPNAMPADGSTSSKIRVDQRISAYEISKTLGEGSFGKVKLAVHKGTKQMVALKIISRKRLASTDMAGRVEREIEYLQLLRHPHIIKLYTVIKTDNEIIMVLEYAGGELFDHIVTNGRLSEDEARRFFQQMLCAVEYCHRHKIVHRDLKPENLLLDDNLNVKIADFGLSNIMTDGNFLKTSCGSPNYAAPEVISGKLYAGSEVDVWSCGVILYVLLVGRLPFDDDHIPTLFSKIARGTYVVPHWMSPGAAALIKKMLVVNPVNRATITEIRQDPWFTTELPEYLQPPIEPFFNTGIDPEKAIRPSDIAPNAPPKVQEKLHAEVTDKISKTMGYGKQDVLDALEAEEPSAIKDAYMIVRENKMMQSNPALGGDNPFFATTPLGDENGSTGIMETMDSAMSASGHDPNASPMTSMSVRSATSSTLSAALAYQRPYTSKIGILPSSLPAYHNAYMESEKSGTAQDVPDMMALNEPPAPARTPAEQEETARRLRPHARSSQSAADSKPQSLTPSNAPKKTKPTRWQFGIRSRNAPFEALLCIYKALKKLDCSWKIDRDYHKVHGDENEKHRSRGDAGTPYILPADPWHIEARWETGPLRTHSVMTDPKNSAAFPGGKVRVQKKHSNNSSEDDDEEANATYEVIAMRLSIQIYEMESGVYLVDFKCAGYELPDGRLMEEKDVTSPFPFLDLAARLIIQLADAD

SEQ ID NO: 9100 - protein, 319 aa, Magnaporthe grisea 70-15
MKSVAWYLVWLSPALAAWEFPRGPQVPLGGSHVWHADDVDIITGSQFNGLKTFGNLPYVNCFSDEQAAIKGNGYDIAVMGAPFDTVVSGRVAANTSISKTPRILTLGGDHTTTLSALRSTYQRFGPVSVIHMDSHIGKRVVALPIDSRTQLMINLQTPGILPSLAAEYLIMPHEEGLIKNTSIHAGIRAPLIRRQGDLRNDLRCGFTIITARDLDRLGVSGMISRIKERVGDSKVYISIDIDVLDPAFAPATGTAEPGGWSTRELLSILDGLTGLSVVGADVVEVAPVYDNVGETTVLAAAEVGMSLLGLMVDTPVKSK

SEQ ID NO: 9101 - protein, 398 aa, Magnaporthe grisea 70-15
MRPVVYLAALLATAGAAVACAGGKHHDDHEWTKEELDELERKWGMEWPFVGIGSFAHLKYVKCLTTPSEDFDIAIVGAPFDTAVSYRPGARFGPRAIRQASSRQTTFRGFNPRANINPYQNWAKIIDCGDIPVTPVDNAVALTQMTAAFGELGMHKPTSGLLQRPKLVTLGGDHSLALAALRALKKIHGKPIRVLHFDAHLDTWHPAKYPSAWPSEQAHFNHGSMFWLAGSEGLISNSSDAPSVHAGLRTRLSGDDWGDYDDDTAQNWKRIAADDIDELGASGVVRTIMSHLGTEDPVYLSVDIDVLDPAFAPGTGTPEPGGWTTRELIRILRGIEDLNVVGADIVEVSPAYQGAGEETALAGAQVAYEIISSMVKKGMKEMGKETASGFIGVERDEL

SEQ ID NO: 9102 - protein, 797 aa, Magnaporthe grisea 70-15
MSSQPEISNTAATTSGGGISEKKPGLGKEVNVTAVEVDSTLSKAHASSGGSSSSSSSSRSSTHEKNSSSSNSIQDSDNEDVIIISGEDVSNHLLPLRDDGDAALTFRSIFLATCLAAFESTLYQIYQFKPTEIEVSSLFIVLIAHFAGTAWASLLPRGDRLEARWRAGRGSSSSSTGAPPLWIRIASVVNPGPWGLKEHAICAITAASSSNAAEAILAFTAQDLFYDLELKPVTVVLSIISISLFGYGICGLIRPIAVWHVDAVYWSSLPVVKTVQSLHWQEFKTSKPLRVFWIAFACMFVYEFLPAYMWPWLNSVSIPCLAAMHATGDLGATLTRFFGGSINNEGLGLFSLSFDWQYITSYNTSLPLITQLHTGLGFGICMIGMVVVWYTNAFNAQSQPFMSTRLHSADGSIYPISQVFEAGQLDHAALERFGLPQLSGTFVWGLFMANAAIGGMITHCAVFYAKDIINSFKSANNDDFKDRHHNHMKANYKEAPWWWFAIVLFSTMLFSRFGLAIATNNLSKMLAGLIIPERPIGTMYFAAWSHSVISSCHSLCNDLKIGEYLKIPPRDMFLTQVYGTILGGFINYGVMSSIVKTNRDLLVNSDGNNSWSGATIQSYNTNAATWALAKYLYAPGGAYSIVPLGLVLGVVLVLIHRAIVYFVPKIKGWDLAENINLPQLLTYCGEIPIGATQTCVIFSQILGGLFAQFYLRNYRPRIFKNYFYSTAGAFDGAALSALFLLSFAMFGAAGPAIPFPSGGGIAPGRIMTFVPRSSRKSCMLVFFVFFTFSSCLGVCGK

SEQ ID NO: 9103 - protein, 1333 aa, Magnaporthe grisea 70-15
MEPSEKRLGDAPEAVVASQTPSNRSRGGSESSSKQQKDDLTKADSKVLKPTADAVADPDDIYKHLPPHVAEILKRQVDTPSVKVGLATLYRYASRNDLIILSISLICAVASGAALPLMTVIFGNLQGSFQDRFLGVTSYDEFMQTMTNLVLYFVYLAIGEFITSYIATVGTIYTGERISAKIRAHYLESCMRQNIGFFDKLGAGEVTTRITADTNLVQEGISEKVGLTIAAVATFVSAFVIGFVMYWKLTLILTSTFFALIFVMGGGSAFIVKFSKQTIDSYAEGGSVAEEVISSVRNAVAFGTQDRLARQYDSHLVKAEGTGFKVKASIGIMVAGMMSVLYLNYGLAFWMGSRYLVDGVIPLSKVLTVMMSVMIGAFNIGNVAPNVQAFTTALGAAAKIYTTIDRQSVLDPTSDEGEKIENLKGTIFLENVKHIYPSRPEVVVMEDVTLEIPAGKTTALVGASGSGKSTIIGLVERFYQPVGGKVYLDGKDISTLNLRWLRQNISLVSQEPILFSVSIYENIKHGLIGTKHENAEPEVQKELIIEAAKKANAHEFISTLPEGYDTNVGERGFLMSGGQKQRIAIARAIVSDPKILLLDEATSALDTRSEGVVQAALEVAAEGRTTITIAHRLSTIKDAHNIVVMSEGRIVEQGNHNDLLEKRGAYYNLVTAQEIAKVTELSPEEEEAINEKEEVLIRKATSNKESGSFIPDPNDKLATKMERTKSASSVALQGRSKDAPKKYTLWTKIKLIASFNAPEWKLMVIGLLFSIICGGGNPTQAVFFAKLITSMSVPVNEQTIPGIQRDVSFWCLMYLMLAIVQFIAFSIQGILFAKCSERLIHRVRDRAFRTMLRMDIGEFDKEENTAGALTSFLSTEATHVAGISGVTLGTILMVITTLVSAFTLSLAIGWKLALVCISTVPVLLACGFLRFWMLAHYQRRAKRAYDNSASYASEAITAIRTVASLTRENDVLKRYQNSLDEQGRASLQSVLKSSTLYAASQSLTFLVIALAFWYGGSLLGRGEYGMFQFFLVFSAIIFGAQSAGTMFAFAPDMGKAAHAAELLKTLFDRKPTIDTWSTDGERIGEVNGTIEFRDVHFRYPTRPEQPVLRGLDLTVLPGQYVALVGASGCGKSTTIALLERFYDPLVGGIYVDGREISSLNVNDYRARIALVSQEPTLYSGTIKDNILLGTSGQVTDEAVEYACREANIYDFILSLPEGFNTVVGSKGALLSGGQKQRIAIARALIRDPKILLLDEATSALDSESEKVVQAALDKAAKGRTTIAVAHRLSTIQKADVIYVFDQGRIVERGTHSELMKKNGRYAELVNLQSLEKR

SEQ ID NO: 9104 - protein, 1179 aa, Magnaporthe grisea 70-15
MSDSSSDDSSTSSTTTTSASTRPARRKGRPNRGSSWNLSKNQAPQERLDDFWDKFTTKTPGKAMRILPRKDYTSKKQKERPGESVQLKPVSYDEAVAQCKAKVAQVVKECRRVNQRYRDPHFDLEIDFQLRRNQCLVSLSNRRRDIMAMRATNRKDGAVHGVETQSRAGLAQAKASSYGQGGPRPRPPPSHQQNFRPMAVHRVTEIFEKPQFFVDGPSANDVRQGREVGDCWLMAALCTMSNKPGLIERICIAHDVQVGVYGFVFHRDGDWFSEIIDDKPKKLYLTKGDYDDGCIERILLDHDRVRQDSEEAYRRLYQTNSGALYFAQSSEPNETWEHFWKEGLLRVNKDFLFGCSTGIWGRGTGERRGIVELHAYSVMKTVEIGGHRLLMLRNPWGRDEWKGKWSDGSAEWTPEWLAKLNHRFGDDGAFWISYEDLLRKFQSFDRTRLFGPEWKAAAIWTTFSVPWVHEYHDTKFAFSLSRPGPVVLVLSQLDKRYFKGLEGQYRFEFSFRVHVSGQEDYLVRSLTPYRMNRSVNVELDLEAGDYTVLVMVNASRDTSSMPAEDVAKAYSKNQREKLARIALSYDLAHSRGRIVETAQEKEARLAAEVRKKEKAKRKLKKAIMEDRHLRYRIDVREVLTAKKAKAKAKAKRARKRAEEEKKWKEEAEKANEALKQAQATSAGGQSATQPQTQADAEHAKGDKTMPAVGSRAPISQVDADYNNNNKAPIATLGGDNKYGSEQPSMATSSQATQGLNAPNVTSATTKGSLDIPTPVSSLAESVEAAPAVADSEPQTGEVQCSGEASNMTAHSLENAAVPVEETPELMASSGVAPGNGEHYISQDPNKTAGSNIPNAVGDTPRRMISSTAVETAERGTNTEPKRTVQGLHTADESVNWSNGIASEPVAAGPNNVPDSQHTDRALLHPDGTEGTIPRRQSSRSRTRGQPATFQQMGQQQQLQMMYRSGVPPYNAGRVPARGYGRPQRFIPRPGRPDTEGSVEDSSETESVSSVSEISDGEIELELDAIHRGWRQYPAATGVFPRTSAVGPPARPSLPTGPSPDGEVQKDPWNAVVILGLRVYYRLAQGEGADTEVVKLHIERPDPYAADDQDSGEEDVGAAGKAKAGEQKVMDVDNSAKDAAKDIDIVDNGVVKANDQAPANNVPETGKDIQGAETGNIKTE

SEQ ID NO: 9105 - protein, 322 aa, Magnaporthe grisea 70-15
MSSTSNSIKLLSGNSHMLLGRLVADRLGIEIAKTLSLNYSNQETSVTVGESVRDEDVFIIQSTMPGDINDGLMELLIMTHACRTASARRITCVLPNFPYARQDKKDRSRAPISAKLIANMIQTAGCNHVITMDLHASQIQGFFNIPVDNLYAEPSVLRWIRENLPVEKCVIVSPDAGGAKRATSIADRLDLGFALIHKERPRPNVVGRMVLVGDVKDKIAILVDDMADTCGTLSKAAQTVKDHGAAEVVAIVTHGILSGNAIENLNNSCLSKVVVTNTVPLGNKVDRCPKIRVIDVSATIAEAIRRTHNGESVSHLFTHVPV

SEQ ID NO: 9106 - protein, 415 aa, Magnaporthe grisea 70-15
MSKGRVCLAYSGGLDTSTILVWLIEQGYTVVCFLANVGQEEDWDEVKAKAKKLGAEEMVILDLQKEFVEQIVFRAIQCNAIYEDRYLLGTSLARPIIARAQVRVAEQYNCQYVSHGCTGKGNDQVRFELAFKACNPSIEVIAPWRLPEFISKFQGRQDLLKYAEEKNIPVSSSPKAPWSMDDNLVHCSYEAGVLEDPDHTPPKELWTRTVDPVDAPATPQEFTVEFEKGIPTKVTVDGKETTGSVEVFKLLNKLGHDHGVGRIDIVENRFIGLKSRGCYDTPGLTIARLAHLDLEGLVMDSKVREIRDQFCTLSWSRQLYNGMYFSPEREFVENSIIFSQENVTGQVRLAVYKGNTYVLGRKSDASNLYSEQDASMDSLEGFSPMDTTGFIEINAIRLKKYGLQKIKDGKPLTQS

SEQ ID NO: 9107 - protein, 415 aa, Magnaporthe grisea 70-15
MSKGRVCLAYSGGLDTSTILVWLIEQGYTVVCFLANVGQEEDWDEVKAKAKKLGAEEMVILDLQKEFVEQIVFRAIQCNAIYEDRYLLGTSLARPIIARAQVRVAEQYNCQYVSHGCTGKGNDQVRFELAFKACNPSIEVIAPWRLPEFISKFQGRQDLLKYAEEKNIPVSSSPKAPWSMDDNLVHCSYEAGVLEDPDHTPPKELWTRTVDPVDAPATPQENTVEFEKGIPTKVTVDGKETTGSVEVFKLLNKLGHDHGVGRIDIVENRFIGLKSRGCYDTPGLTIARLAHLDLEGLVMDSKVREIRDQVCTLSWSRQLYNGMHFSPEREFVENSIIFSQENVTGQVRLAVYKGNTYVLGRKSDASNLYSEQDASMDSLEGFSPMDTTGFIEINAIRLKKYGLQKIKDGKPLTQS

SEQ ID NO: 9108 - protein, 737 aa, Magnaporthe grisea 70-15
MAQEAPKITDIGVPLEQVSDVREVGPEAEAITQVRMVRANSEASSLSDMEKKSSSTVEVKHQESTRSSTDVEDNGREKVSANMEVVALKALHTDDDPTQNPWTFRAFFLGLALAAFGSSLATIFHFRPQSIGISITFLTVISYVFGNAMARYIPSKGPIGRFLNPHGFNSKEHMGIIIMASSASSTAHATDVLAAQKLFYNIVPHPAVAIMLLFSSQLLGYGLAGYLRESLVYPTAMIWPSQLPLASLIETLHRNRTEMASRWKFFWIIFWSIAVYEFFPQYITPVLTGVSVFCLAQQKNHMFTNIFGGAAGNEGLGVGALSFDLQYIGVSAFFLPLKMITNAFIGYVLCIVLFVILFYKNVWSAMQSAILNDRLELDEEALKQHGLPFFAATHASALLTTNLATGATILHIILYHPQIVKSAMGWGTHSWRRYLKYLKNPKQIFKYEEKTFSPTEDPANLDPHHRTMLQNYKEVPNWWYGICLGLSVIAAGACIYLAESTLPWYLFFLAIVIAYLHLKLGQYGKLAPRCTFTFQILGTVVGCILNFALMSSITTEQRDILLSIQGTNIWSGTHVQSFNSNAISFGALSKFMFVGGTYASVVYALPLGFLIPLPLWLAGKAWPKYAKSLSYIVTPVICAHLGFLSGGINSSVFMHFILAFTVQFYVRKKYPAWFLKYNYLLAAALSGGLELTIFFLTFIFNGAVMKQIPMPNYALNPKGNLDYCMRDPALAGARGGQ

SEQ ID NO: 9109 - protein, 379 aa, Magnaporthe grisea 70-15
MRKSLRSARRTAINPVAVRDLLIRCSSRPRSDSRKLPRDAAVGDGNDDPRGKFNPAALSTQKEPARRTSSPRQASLESQIREFLHAKKPREQGAGKEPLEQLQAAQAAAAAAALVAQPSAQPVAMHLGMFEIGKPLGRGKFGRVYLAREREHGFVCALKVLHKRELQDAHVERQVQREIEIQSNLRHPNILKMYGHFHDSKRIFIILEFAGKGELYKHLRKETRFPEWRAAQCIAQMASALRYLHRKHVMHRDIKPENILVGFYGEIKISDFGWSVHAPSDRRTTFCGTLDYLPPEMIKPRTADKSYDHRVDLWALGVLTYELLVGEAPFEDTPAMTHKKITRRDMKVPSFEPEGIRQVTALDRQHTPRRLNKKEWPRN

SEQ ID NO: 9110 - protein, 436 aa, Magnaporthe grisea 70-15
MELLIMISACKGGSASKITAVLPYFPYNRQSKKKSHRGAITARMLANLLHVAGVKHVITVDLHASQMQGFFQCPVDNLHAEPLIARWIRLNVSNWREAVVVSKNAGGTKRVTSLADALKLNFGMVTTDKKRGGGNMTASMILEQLDRPDPVAVPTKDGGVATTPTAEAPFPNLDGTSEATSSKTRVVADSRGSPKRIPVRTNGRSRVTSHPIQTETVAEEKEQAEGDVVDNGEDADDENDGRPDEVTHARLFQGHIVPDDFPSPSTSAADASLPDDDPMMMSHASSFFQPDNHALGGSGDAASSDEEEDKLKDPRIEHMITLVGNVRNRTVFIVDDMIDKPGSWIAAAEAVVKRGGATTVYCMATHGVFGGDCLEQLEACDCIHRIVVTDSYPIRPEKARSASKLVILDLSHLLAEAIRRNHNGEAISPLFQHIVD

SEQ ID NO: 9111 - protein, 995 aa, Magnaporthe grisea 70-15
MQPIQHAPDSAAEPEDPADIQDNQQQSFPLRNLAPNTRRPTRAELSPSAAPRAIAASTSIRGPLFDTTADGHSALDPSPQQPSLSPSFNTRQAFGAPSAGRQPSSSSSSSIASHVNAAASRQEKNDVPVQTDADIQSTTGLDDEATTNPMRKATPALRDSDEFRSAPSYGAVSLDHVKPPGANGHFSTGTTIDADELARIASQNSSRRRKSEDINVKSRRSGEELGASSVLGGLEGRFGVTEGGALDDPKHGDDSSSDGGISPEAIEDENNPPDNSPYPQVRASVSPVDNTSLSINTPRVQVPGQWDETHERSKLQRLRLWLAQGRWNEKEHSCVYVSSNVSFGFAFATDVIVEQTQFYKQDASITYQLLLTLSTQILGYTFAGLTRRFLVRPSGMIWPSTLMSAAMFTTLHKEENKPANGWKISRWNFFYVVFISAFLFYFLPGLLFPALSYFNVITWFAPKNVVVANLFGVVSGLGLFPLTFDWAQVAYIGSPLLTPFWAAMNVVGGLVIVMWILAPLAYYSNWMYSSYMPILSAAVFDNTGKVYDVSKILTKDFIFDAEAYKNYSRVFLPITYVLSYGVQFAGLAALLTHTACWHGRDIWTQWTKSLQEARQEGKVATYQPVATSSDDYGRSNTNGAQARREASTSSAFFEDIMSREDVHNRLMKRYKDAPMHWYLMTFVSMTAIGIFVVEYYPIHLPWYGLLLALGICSILFIPIGIVMAVTNQHTSIYLICQLVCGAIFPGRPVANMVFVTYGYISSSQGIKFAADLKLGHYMKIPPRILFMVQMVATVVSSLTQIAVLNWMFRNIPGICTPQAINGFTCPIARVHFNGSILWGVVGPSEFFGRGATYRPLVWCFLVGAIAPIPLWYISKGKKDSIIRKINLPVLFGSLSWIPPATGLNFSVWALVCYLFNSLLKNRATAWWAKYSMTLSAALDSALASGIVVVFFTFIYPGVMDGFSWWGTEVYKQGCDWQACAYMSVPEGGRFGPDTW

SEQ ID NO: 9112 - protein, 992 aa, Magnaporthe grisea 70-15
MSSRPSSSARPVQDVLPNNDYETTNVAQKATKDSRPPQSSRDTATRQHRRSGSQRSGHHGHDGNAEAGPSTPSQASHGSSDPRTRKMRTVIPAQSGKWNLGKTIGAGSMGKVKLARKEDGTEQVACKIIPRVTPDDGHTPRAERERADLSKEVRTAREAAIVTLLSHPHICGLRDVVRTNFHWYMLFEYVNGGQMLDYIISHGKLKEKQARKFSRQIASALDYCHRNSIVHRDLKIENILISKTGDIKIIDFGLSNLFAPKSHLKTFCGSLYFAAPELLQARPYTGPEVDVWSFGIVLYVLVCGKVPFDDQNMPALHAKIKKGVVDYPNWLSSECKHLLGRMLVTDPKQRITMAEILSHPWMVKGYSGPPENYLPNREPLTLPLDQEVINGMTGFSFGPPEVIKAQLTRIIESEDYQRSIRAYQREKETQQTPKDPEKKRGFGFYRRRNSFSSKDTLTTPSSEGLALGNDPLNAFNPLVSVYYLVREKQEKDSASRRPATSARPNAVPEIAPPQEAHTNASAYEMPGENATGGRTRPRARTHGEDDAPTEPIRPPQLSPPAAPPPERLEPPKKESAAAGLLRRFSTRRRKEQPERLDKDRSHPPVVQVHSPAENSSQPTSAIRKSFSIRRGRRDREEQASAESQARMRAGSSQPQHSDLLSPPLSAGANTQTFRKGLGRSASVNSGEFSRRRAMGTARTSKDPPPTSGSDHSTIHEKPPKEQQEKRSPTTAGPSQSMTSRAKSLGHARQESIQARRQRREAEKKREANVPEETDAEVNGADDSSKERVTDFDLDKPVYLKGLFSVSTTSGKPVREIRTDIKRVLKQLGVDYTEIKGGFYCRHSPSIDLQNVADNGAASPAQTPSGAKRRFSFGALRSDGKEESNGERVPVTPRTPGRSGGGSGTDRDRHDSSSEVSENSEAREETSRRRDHPAGETRTHVRSDMGESMVSEFEIFIVKVPMISLHGIQFKRLGGNTWQYKNLADQILKELKL

SEQ ID NO: 9113 - protein, 531 aa, Magnaporthe grisea 70-15
MSHIHPSRQAYVENAESQNAQPRGQIALSDVPMDYNYDMPAGAGASGNASAIMSGFDRKKIADAIPVPTNDVRVRARLRDMGEPITLFGEDAKERRDRLRELLMQEKERQQASGQVEGSQDVEMEDVDEEDDEDEEQEEEFYSRGGPDLLNARVEIAKYSLPRAKQRVAFQKTEAKIPQRTHMRARKQVKERLQGFELQGSQTAGQRHISITRISPNGETVATGNWGGQVKLFSIPNLDETMNLRGHTNKVSGMCWFPGATLQESNVSAESVNLATGGAEGQVNLWSLSQDTPLATLSGHTQRVCRVDFHPSGRFLASASEDTSWRLWDVEKRTELLLQEGHSRGVFAVSFNGDGSLLASAGQDSIGRIWDLRTGRTIMILDGHMDGHIKPIYALDWGSDGHRVLSASADGWIKCWDVRKVQRTGGVGAHTSAVSDMRWFKGLDGPLDGVPLGVDEKGQAMPKKSGTFLVSSGFDHKVNIYSADDWALVQSLSGHTGPVASVDVSRDGRWIVSGGHDRTVKLWGRNDGEGV

SEQ ID NO: 9114 - protein, 849 aa, Magnaporthe grisea 70-15
MEKPSETATLVEMVGIKNRSGDRSSKDEPKASVEVSGREVLGDTGSSRYEDDGSGITVLSRDKPPVDDIKERLSMWGESSSRTPYGDEYEGDEGSEYELLLDPNLPDDYSTAATNRSDPERSSADKEISTEEDSPYPEVRAAVRNYDEDLPCNTVRAWTIGLFLVVIGASMNTLFSLRSPSISLSSLIAQIIAWPLGHGWAKVMPKRKFSFFGIPWSLNPGPFNIKEHTIIVVMAGVSFSVAYATDIILAQVVFYKQDFGIAWQLMLMISTQSLGYGIAGMMRKFLVYPASMIWPANLVGVTLMNAMYEKPPPNDPTIIGGSMPRYRWFGIITLCSFVYYFIPGFLAQFLSIFAFATWIAPQNPVVNQLFGGLTGLSLIPITFDWSQIVGFVGSPMIPPWYAIANTLIGVVLFFIILASGLHYTNTWYADFLPISDSSTYDNTGSPYNVTRVITKDFTLSEEAYKAYSPLFLSTTFALTYGLSFAAIASLIVYTYLHHRKTIWLQYKNATNEAEDIHMKLMRKYVEAPTWWYMILFAIMLVIGFVTVLAYPTNMSWWSFLLAVAISFAFSLPIGIIQAVTNNQIGLNVLTEFVYGYIQPGRPLALMIFKTFGYITMSQALGFVGDLKFGHYMKIPPRTMFMCQVVATTFSCFIQIAVLNFALKHIDGVCTPTQAERFTCPGGKVFFSASVIWGLIGPARMFSPGQIYSSLMIFFGIGAVVPVMIYFYVRKWPKSPARFLMSPLIFGGSAAIPPASPLNYLTWGIVGFVFQYLIKKRHFNWWSRLNFLTSSGLDLGLGLATLVIFFAFTLNNINPPKWWGNDIVQTTMDFTDTAVRKHVAEGQIFGPRTW

SEQ ID NO: 9115 - protein, 493 aa, Magnaporthe grisea 70-15
MVKIHEIELDDFYAIKRPYNGSAETGGDALVQDLNVCLFYSGLARRKSALSLMFLSILALAVTTVQWFVWGYSLSFSRTANAFIGDLSNAGFQSVLARPSIGGDSIPDLLFAVYEGMLSALTVTLAVGAAAERGRVLPAIAFMFVWATLVYDPIACWTWNPAGWSFRMGGLDYAGGTPVHIASGAAALAYSMMLGPRRGHGTHELNFRPHNVAHIVIGTVFLWFGWFGFNAGSTLAANLRAVLAVVVTHLAACVGGLTWCLMDYRVERKWSAVGFCSGVVAGLVAITPGSGASSANLATRLKFTLGIDDALDIFAVHGVAGFMGNICTALFALNQVVALDGPSAGSSRDGIAGGWLNGHWIQIAYQLAGSFAGLAYSFIVSCAILAALDRIPGCRLRATDEAEVAGMDAAEMGEFAYNYVALTRELLRVPGEENGGSDGTAVCDPFSRPSAMAARHSQWFSGRRELLQADDGGYHVKPARARLGSEGTIISRC

SEQ ID NO: 9116 - protein, 280 aa, Magnaporthe grisea 70-15
MPSPRRLRLLCIVAVAVLFTLLFTSRLRQASDTDANSIQGLYHKTRTAIDRARADGQAALQRSKNGAAKGHLTLDKDADGDIDQDDEVFAQEMSDRLRAAEQKAKDLANSKSPNKPDAPRHIVGVGSSAGGQTAKKKTTKPALAEAEADEKSMVATSEDKEAKAELDTILRKSPVVIFSKSYCPYSKRAKGILLEKYSIQPAPYVVELDQHPLGPQIQQMLGDMTNRKTVPNILVNGKSIGGGDEITELDASQKLITTVNFCGDKHITMKERFPEKEAAA

SEQ ID NO: 9117 - protein, 432 aa, Magnaporthe grisea 70-15
MAVILSVNAGSSSVKVSVYEVAASGQPPKPIAEIQMSGLTAPPTKLTFKKRNDSDGKDEKLQDGQEVKDADSQITAFKRILDVLFDSRELPQLGQRSDIDFIAHRIVHGGDASRTEKVGRKTLERLDALSELAPLHNKPSLGIVKACMDMDGLEDAINVACFDTQFHASIPRHIHTYPIDQARARKNGLRKYGFHGISYSFITRAAAEHLGKPVEETSLIALHLGSGASACAIQKGRSRDTSMGLTPVAGLPGATRSGSVDPSLVFHYASDVGRLSPNSTRDLHISRAEEILNKESGWKALAGTTDFGEIAAAAEGDSGRDSLAFDLFVDRVCGFIGQYYVSLGGDVDALVFAGGIGEKSALLRKKVVEQCRCLGFRLAADGDDAAIVDNDERIVSEVGARDAKHRVLVCRTDEQFEMARMCAEDEELWGES

SEQ ID NO: 9118 - protein, 401 aa, Magnaporthe grisea 70-15
MSNGLPPVYIAAVARTPVGSFLGSLSSLSATQLGSHAIKSAVSRVPEIKPEDVEEVFFGNVLSANVGQAPARQCAIGAGLSNSVSCTTVNKVCASGMKAIILGAQTIMTGNASIVVAGGTESMSNTPHYLATSRSGTKYGDQTLIDGIQKDGLRDAYGKKELMGVAAELCSVDHELSREAQDEYAIKCYQKAQAATEAGVFKAEIAPIEVSGGRGKPNVTVDRDEEVKNLNIEKLKSARPAFQTTGGTVTAPNASPINDGAAAVVLVSEAKLKELGIKPLAKILGWGDAAREPERFTTAPALAIPKAIKHAGIEQKDVDFYEINEAFSVVALANMKILNLDPETVNVFGGSVAIGHPLGCSGARIVTTLTTVLKEKKGKIGCAGICNGGGGASAIVIENLQ

SEQ ID NO: 9119 - protein, 1020 aa, Magnaporthe grisea 70-15
MSQDAASAPSDLGAQTQQPHQAGNGGTNSSHGTDNIAKRALKLGTSTSLSPELPPTGLQEEVPVTPGITTAAYHDFEFDNGESGGGPGYFSRRGQNMMTTPVGKGVEDDGLGPSASSSAPDPEVLKRINQFRLGGRKESLTNIRAMNPDLSLSGNIISATFNIPYSLEYRKGADWVLNPRRGQSALFDSLSHLSSDNTPWNHTVVAWTGEIEPPSDLPSPPATPPATTTNLPALNSLSKPIPVNGEAPAPAPSHAEGLWIPREDQLRLESQLSHNAKIKTSAVWLSDSNEATEEGITLKDQARWRRFAEHELYNLFHYKQHEPNDGRKERVQWADYYRMNQKFANKIIENYKPGDIVIIHDFYLMLLPSMLRQRAPHIYIAFFLHSPFPSSEFFRCLPRRKEVLEGVLGSNMIGFQSYSYSRHFSSCCTRILGYKSDARGVNVYGSRVEVGVFPIGIDAKKVEQLAWSDSVNKLVQQLQTQTTQGRKLIVGRDRLDSVHGVAQKLKAFERFLENYPEWRDKVVLIQVTSPTSIEEEKDESKVSTLVNELVLKINGMYGGLGFEPVRHFSQYIGQDEYFALLRGADIGLITSVRDGMNTTSMEYVVCQRDSHGPLILSEFSGTAGSLTDAIHINPWDFSAVADEINRALTMPPHKRQEMQTKLYEHVTTKTVHEWIGGVVAKLIQVLGSGQNPVKTPLLDRSALLRSYRAAGKRLFMFDYDGTLTPIVREPSAAVPTERLLQTIKALAADDRNAVWVISGRDQDFLSAHLGHIQNLGFSAEHGSFMKKPGSDEWENLADKFDMGWQEEVIAVFQKFTDKVEGPFIERKRCAVTWHYRPVVDQDLAQRLARECHKELEATVARKWEVEVMPGKMNLEVRPTFINKGAIAKRLVLDYNAELVAAGKNKLEFVLCMGDDFTDEDMFRSLNTLSVTADGATEPELKTEHVFSTTVGPSTKVTIARWHLLEPEDVVECVALLASGVSTELLANQGEGVAETVKPLRVSENNLAAISEVEGRVPDIE

SEQ ID NO: 9120 - protein, 213 aa, Brassica rapa subsp. chinensis
MVRGKTQMKRIENATSRQVTFSKRRNGLLKKAFELSVLCDAEVSLIIFSPKGKLYEFASSNMQDTVDRYLRHTKDRVSSKPVSEENMQHFKHEAANMMKKIEQLEASKRKLLGEGIGSCSIEELQQIEQQLEKSVKCVRARKTQVFKEQIVQLKQKEKALAAENEKLAEKWGSHEIEVWSNKNQESGRGDEDSSPSSEVETQLFIGLPCSSRK

SEQ ID NO: 9121 - protein, 391 aa, Pseudomonas putida
MSLNPRDVVIVDFGRTPMGRSEGGMHRNTRAEDMSAHLISKLLERNDKVDPKEVEDVIWGCVNQTLEQGWNIARMASLMTQIPHTSAAQTVSRLCGSSMSALHTAAQAIMTGNGDVFVVGGVEHMGHVSMMHGVDPNPHLSLHAAKASGMMGLTAEMLGKMHGITREQQDLFGLRSHQLAHKATVEGKFKDEIIPMQGYDENGFLKVFDFDETIRPETALEGLASLKPAFNPKGGTVTAGTSSQITDGASCMIVMSGQRAMDLGIQPLAVIRSMAVAGVDPAITGYGPVPSTQKALKRAGLTMADTDFIELNEAFAAQALPVLKDLKVLDKMDEKVNLHGGAIALGHPFGCSGARISGTLLNVMKQNGGTLGVATMCVGFGQGITTVFERV

SEQ ID NO: 9122 - protein, 1126 aa, Capsicum frutescens
MAAFLLPFLVFLSTLCSAQQNPQTLSEVQALTSFKLRIHDPLTALSDWDSSSPFAPCDWRGVFCVNGKVSELRLPHLQLTGPLTNQIGNLRTLRKLSLRSNSFNGTVPASLSKCTLLHSVFLQGNAFSGKLPVEIFNLADLQVFNVAGNQLSGEIPGEVPRSLRYFDLSSILFTGDIPRYLSDLSQLLLINLSYNRFSGEIPASIGRLQQLQYLWLAYNDLVGTLSSAIANCLSLVHLSAEGNAIRGVIPAAIAALPKLQVISLSRNNLSGSLPASLFCNVSIYPPSLRIVQLGFNGFTDIVKQESAKCFSSLQILDLQHNQIHGEFPLILTNNSALTSLDVSWNLFSGKIPSAIGNLWRLELLRMGNNSFEAGLPFEITNCSSLKVLDLEGNRMTGKIPMFLGYLRSLKTLSLGRNQFSGSIPSSFRNLTNLENLNLGGNGLNGSLPEEVMSLSNLSILNLSGNKFSGSMPIGIGNLQQLSVLNLSKNGFSGTIPSSIGTLYKLTVVDLSGQNFSGEIPFDLAGLPNLQVISLQENKLSGNVPEGFSSLLGMQYLNLSSNSLSGHIPSTFGFLTSLVVLSLSNNHINGSIPPDLANCSALEDLDLHSNSLSGQIPADLGRLSLLSVLDLGRNNLTGEVPIDISNCSSLTSLVLDLNHLSGNIPESLSRLSNLTVLDLSTNNFSGEIPANLTMLSSLVSFNVSNNNLVGQIPVMLGSRFNNSLDYAGNQGLCGEPLERCETSGNGGNKLIMFIAVAASGALLLLSCCCLYTYNLLRWRRKLKEKAAGEKKHSPARASSRTSGGRASGENGGPKLVMFNNKITLAETIEATREFDEEHVLSRTHYGVVYKAFYNDGMVLSIRRLSDGSLSENMFRKEAESLGKVKHRNLTVLRGYYAGPPNLRLLVYDYMPNGNLATLLQEASHQDGHVLNWPMRHLIALGIARGLAFLHSSSMVHGDIKPQNVLFDADFEAHLSEFGLGKLVVATPTEPSTSTSVGTLGYISPEAALTGETTRESDAYSFGIVLLELLTGKRPLMFTQDEDIVKWVKRQLQRGQISELLEPGLLELDPESSEWEEFLLGIKVGLLCTAPDPLDRPTMADIVFMLEGCRVGPDIASSADPTCQPSPA

SEQ ID NO: 9123 - protein, 239 aa, Pyrus pyrifolia
MGGGRVQLKRIENKINRQVTFSKRRTGLLKKAHEISVLCDAQVALIVFSNKGKLFEYATDSCMEQILERYERYSYAERQLVEPDFESQGNWTFEYSGLKAKVEVLQRNHRHYLGEDLDSLNLKEIQNLEQQLDTALKQIRLRKNQLMHESISELQRKRKAIQEENNLLAKKIKEKEKAAAQPQVQNWEQQNHGLDLLPQPLPCLNNGGTQQDEFLQVRRNQLDQTLEPLYECHLGCFAA

SEQ ID NO: 9124 - protein, 350 aa, Lemna minor
ISIPARIGLYIGTANYVITVGFGTPKKNQTVIFDTGSNVNWIQCKPCVVSCYPQQEPLFDPTLSSTYRNISCTSAACTGLSSRGCSGSTCVYGVTYGDGSSTVGFLATETFTLAAGNVFNNFIFGCGQNNQGLFTGAAGLIGLGRSPYSLNSQLATSLGNIFSYCLPSTSSATGYLNIGNPLRTPGYTAMLTNSRAPTLYFIDLIGISVGGTRLALSSTVFQSVGTIIDSGTVITRLPPTAYGALRTAFRAAMTQYTRAAAASILDTCYDFSRTTTVTFPTIKLHYTGLDVTIPGAGVFYVISSSQVCLAFAGNSDSTQIGIIGNVQQRTMEVTYDNALKRIGFAAGACP

SEQ ID NO: 9125 - protein, 351 aa, Lemna minor
ISIPARIGLFIGSGNYVITVGFGTPTRTQTVVFDTGSDVNWLQCKPCAVRCYAQQEPLFDPSLSSTYRNVSCTEPACVGLSTRGCSSSTCLYGVFYGDGSSTIGFLAMDTFMLTPAQKFKNFIFGCGQNNTGLFQGTAGLVGLGRSSTYSLNSQVAPSLGNVFSYCLPSTSSATGYLNIGNPQNTPGYTAMLTDTRVPTLYFIDLIGISVGGTRLSLSSTVFQSVGTIIDSGTVITRLPPTAYSALKTAVRAAMTQYTLAPAVTILDTCYDFSRTTSVVYPVIVLHFAGLDVRIPATGVFFVFNSSQVCLAFAGNTDSTMIGIIGNVQQLTMEVTYDNELKRIGFSAGACP

SEQ ID NO: 9126 - protein, 250 aa, Arabidopsis lyrata subsp. petraea
HEGTLRSNIFLEDQETVSWIQYPPDEDPFETDDFSSHFFSTVDPLQRPTSETIKPKSGPDPPHVMVKPKACPDPPQVMPPPKFRLTNSSSGMRETEMEQYSVTTIGPSHCGSNPSQNDFDASMSQDRSKNIEEKLNPNASSSSGGSSGCSFGKDIKEMACGRSITTDRKRKHIMDTDESVSLSDAIGGNKSNQRSGSNRRSRAAEVHNLSERRRDRINERMKALQELIPHCSKTDKASILDGAIDYMKSL

SEQ ID NO: 9127 - protein, 251 aa, Arabidopsis thaliana
HEEALRSSTFLEDQETVSWIQYPPDEDPFEPDDFSSHFFSTMDPLQRPTSETVKPKSSPEPPQVMVKPKACPDPPPQVMPPPKFRLTNSSSGIRETEMEQYSVTTVGPSHCGSNPSQNDLDVSMSHDRSKNIEEKLNPNASSSSGGSSGCSFGKDIKEMASGRCITTDRKRKRINHTDESVSLSDAIGNKSNQRSGSNRRSRAAEVHNLSERRRRDRINERMKALQELIPHCSKTDKASILDEAIDYLKSL

SEQ ID NO: 9128 - protein, 251 aa, Arabidopsis thaliana
HEEALRSSTFLEDQETVSWIQYPPDEDPFEPDDFSSHFFSTMDPLQRPTSETVKPKSSPEPPQVMVKPKACPDPPPQVMPPPKFRLTNSSSGIRETEMEQYSVTTVGPSHCGSNPSQNDLDVSMSHDRSKNIEEKLNPNASSSSGGSSGCSFGKDIKEMASGRCITTDRKRKRINDTDESVSLSDAIGNKSNQRSGSNRRSRAAEVHNLSERRRRDRINERMKALQELIPHCSKTDKASILDEAIDYLKSL

SEQ ID NO: 9129 - protein, 199 aa, Arabidopsis thaliana
KQINLKSNPSVSVTPSSSSFGLFRRSSWNESFTSSVPNSDSSQKETRTFIRGIDVNRPPSTAEYGDEDAGVSSPNSTVSSSTGKRSEREEDTDPQGSRGISDDEDGDNSRKKLRLSKDQSAILEETFKDHSTLNPKQKQALAKQLGLRARQVEVWFQNRRARTKLKQTEVDCEFLRRCCENLTEENRRLQKEVTELRAL

SEQ ID NO: 9130 - protein, 199 aa, Arabidopsis thaliana
KQINLKSNPSVSVTPSSSSFGLFRRSSWNESFTSSVPNSDSSQKETRTFIRGIDVNRPPSIAEYGDEDAGVSSPNSTVSSSTGKRSEREEDTDPQGSRGISDDEDGDNSRKKLRLSKDQSAILEETFKDHSTLNPKQKQALAKQLGLRARQVEVWFQNRRARTKLKQTEVDCEFLRRCCENLTEENRRLQKEVTELRAL

SEQ ID NO: 9131 - protein, 199 aa, Arabidopsis thaliana
KQINLKSNPSVSVTPSSSSFGLFRRSSWNESFTSSVPNSDSSQKETRTFIRGIDVNRPPSTAEYGDEDAVVSSPNSTVSSSTGKRSEREEDTDPQGSRGISDDEDGDNSRKKLRLSKDQSAILEETFKDHSTLNPKQKQALAKQLGLRARQVEVWFQNRRARTKLKQTEVDCEFLRRCCENLTEENRRLQKEVTELRAL

SEQ ID NO: 9132 - protein, 199 aa, Arabidopsis thaliana
KQINLKSNPSVSVTPSSSSFGLFRRSSWNESFTSSVPNSDSSQKETRTFIRGIDVNRPPSTAEYGDEDAVVSSPNSTVSSSTGKRSEREEDTDPQGSRGISDDEDGDNSRKKLRLSKDQSAILEETFKDHSTLNPKQKQALAKKLGLRARQVEVWFQNRRARTKLKQTEVDCEFLRRCCENLTEENRRLQKEVTELRAL

SEQ ID NO: 9133 - protein, 199 aa, Arabidopsis thaliana
KQINLKSNPSVSVTPSPSSFGLFRRSSWNESFTSSVPNSDSSQKETRTFIRGIDVNRPPSTAEYGDEDAGVSSPNSTVSSSTGKRSEREEDTDPQGSRGISDDEYGDNSRKKLRLSKDQSAILEETFKDHSTLNPKQKQALAKQLGLRARQVEVWFQNRRARTKLKQTEVDCEFLRRCCENLTEENRRLQKEVTELRAL

SEQ ID NO: 9134 - protein, 908 aa, Helianthus annuus
IFAESSMVGRRKPLVLSSTKSLINSVLNSSNKLNTNGIDGAPINKHSSGDVDGSETTALQLRAGILRLSDEKLGLSRQKAISLDEAALIGLSTSLLKRLSITSGSLVIVKNVDSQIQRISQIVALDPPNVHDVSANNELLSYNASNAMVVFPSVTYPLIHHVPLASEVAYVSPLLAFNLGLHTSCLKLLLHHGEDKLASLFEVKGDNESDLETNEGFSVNLDIKPLTKLPSLKIVNKKIDIALNEYFTIDRYLSRGDVFSIRVNWSCKSAMCIACSQNNQNSRDTNLYFKVVAAEPSEEPVLRINRTETALVLSASTPSAIPPNLLVNKKKGFSPLHQDTVKTLASIITPTLCPSALSSKFRVAVLLFGLPGCGKRTVVKHVAHQLGLHVVEYSCHDLVASSEMENFCHVDSSFHCCSYSPTILLLRHFDAFSNLSSNDGSPNDQIGVNSEVASVIREFTEPFTQDEDDYEDEDEAEHMNSTRAIYTHPVLLVASADNSEGLPPTIRRCFSHEMKMGPLTEDQRVELLSQSLQRIPELLPDMSPEDLAKDMVGQTSGFMPRDIRALIADASSSLVPTNGISFENKESQKDIQPPSKEFMSKALERSKKRNASALGTPKVPNVKWEDVGGLEDVKKSILDTVQLPLLHKDLFSSGLRRSSGVLLYGPPGTGKTLLAKAVATECFLNFLSVKGPELINMYIGESEKNVRDIFQKARAARPCVIFFDELDSLAPARGASGDSGGVMDRVVSQMLAEIDGLNDSSQDLFIIGASNRPDLIDAALLRPGRFDKLLYVGVTTDPSYRERVLKALTRKFKLHEDVSLYSIAKKCPPNFTGADMYALCADAWFHAAKRKVLAADADPTNMKDDVDSVVVEYEDFVTVLRELSPSLSLAELKKYEMLRDQFEGASSK

SEQ ID NO: 9135 - protein, 464 aa, Nicotiana tabacum
MQYCLLVNILIYLLGLHQNIKNESHGQLLPDLLLLLRVLRLNFLTRFYSPLPSHTMGSYLNFKNFADTSQPESSGGKPMNIDNFSLARQSSIYSFTFDELQSTCGLGKDFGSMNMDDLLKNIWTAEESQALSSSVAGGNVSVPVGNLQRQGSLTLPRTISQKTVDEVWKDFQKESVNANDGSAPGASNFGQRQSTLGEMTLEEFLVRAGAVREDMQPTRYSKDVTFTSGFTQPSSNNSSLTIAFQQATQNPQQLSNQIAGNNIFNVVTTTSSQQKPQQAQPLFPKQTTVAFASPMQLGNTAQLASPGTRAPIVGMSNPSVNTTIIQGSIMQGGVMDMAGLHNGVTSVKGGSPGNLDPPSLSPSPYACGEGGRGRRSCTSFEKVVERRRKRMIKNRESAARSRDRKQAYTLELETEVAKLKEIKQELQKKQAEFIEKQKNQLLEKMNMPWENKLICLRRTVTGPW

SEQ ID NO: 9136 - protein, 345 aa, Hypocrea jecorina
MMEYAQYPQQQHNSHAGYASSAAGASITSPTSHGINQHAVQSSPVNASQQQQQQQQQQQQQQQQQQQQQQQQQQQQQQQQQQQSQQQHQPAQAPAHGMYQPQYGVPQPSMQQVPYGIPGIQAAAMAATAAASGSGYPYMHSDPSMPHTSPRMPSAKKDGRPSPRMNSISQIPGRRMSQVTSPGVPSAPGMMNHGGPRPPPMPPAPAMQHPQSPEMPAGAVEESPLYVNAKQFHRILKRRVARQRLEEQLRLTSKGRKPYLHESRHNHAMRRPRGPGGRFLTAEEVAAMESKGGLDGKGEGSDDVSPGKSSDAPSGKRKSESGPSTSSKKPKTQSDNGEGNAEDAS

SEQ ID NO: 9137 - protein, 242 aa, Rhodobacter sphaeroides
MLPQIRNGSVNKLDETLLTRLPPFSLLDRPQIRTILDQATSRRYDEGSTVFGEGMAADRFYLLLDGTIRVVRTTPTGEQIIALHIGPGQLFGIAPALARDTYPATAVAAAECVTLSWPVRLWGDFVASYPGFATESNRTLGARLGEMQNRITELATQQVEQRVAACLLRMVNQSGRKVATGIEISFPITRQNISEMTGTTLHTVSRLLSAWEREGIVESTRRRIVVTAPHRLVVLSGPAGQV

SEQ ID NO: 9138 - protein, 230 aa, Petroselinum crispum
MISSWRKIRASRHANKRNGLDDLSNMEVSIPNHFRCPISLDLMKDPVTLSTGITYDRHSIETWIEAGNKTCPITKQMLSTLEPIPNHTIRKMIQDWCVDNSSYGIERIPTPRIPVSSHQVTEMLSKVVAACRREEASACRELVGKIKRLVKENERNKRCFVANGTVGVLASTFEAFSKLSFDKNVAVLEEILSCLSLMTPLDGEAKAFLGSNSSLNCMVWFLKSGDLSAR

SEQ ID NO: 9139 - protein, 442 aa, Petroselinum crispum
MISSWKKIRASRHANKRNGLDDLSNMEVSIPNHFRCPISLDLMKDPVTLSTGITYDRHSIETWIEAGNKTCPITKQMLSTLEPIPNHTIRKMIQDWCVDNSSYGIERIPTPRIPVSSHQVTEMLSKVVAACRREEASACQELVGKIKRLVKENERNKRCFVANGTVGVLASTFEAFSKLSFDKNVAVLEEILSCLSLMTPLDGEAKAFLGSNSSLNCMVWFLKSGDLSARANSVLVLKHVLSTDQKKMEEFSMIEGSLEALVKVIKEPVSPTTTKASLLIVYYMVSTSSSSRVDDKIIARFIDMGLIERLLEMLVDCDKSICEKALGVLDGLCLTNEGREKAYANALTMPVLVKKILRVSDLATEFSVSIVWKLSKNDKSEDGGVIVEALRVGAFQKLLLLLQFGCNEKIKDKATELLKLLNLHRDKLECIDSMDFKNLKRT

SEQ ID NO: 9140 - protein, 395 aa, Serratia marcescens
MNVQQREVVIVAATRTPVGSFHGALAPLTAVELGAAGVQGLLAQSGVPPQQIDEVILGQVLTAGCGQNPARQTALNAGLPVTTPALTINKVCGSGLKAVHLAAQAIRSGDAEAVIAGGQESMSQSPYLMAGARAGLRLGHAQMVDSVIHDGLWDAFNDYHMGITAENLAEKYAISREEQDRFALRSQQKAQAAQRAGRFAQEITPVTVPQPKGEALRVERDEQPRDTSLEALARLRPAFRKEGSVTAGNASSLNDGAAVVLLMSAEKAARVRLPVLARIAGYASGVDPAIMGIGPAPAARRCLEKAGWRLEEVDLIEANEAFAAQALAVGKELGWEAERVNVNGGAIALGHPIGASGCRILVSLLYEMQRRGVNKGLAMLCIGRKQGVALAVERP

SEQ ID NO: 9141 - protein, 367 aa, Blumeria graminis
MGNSHVKPCFSDEVNLSHFRLLRVVGRGAFGKVRIVERRDTGLTFALKYIRKGDVIRTESVRNILRERRMLEQLNYQFICNLRYSFQDIEYMYLVVDLMNGGDLRFHISRKVFTEEAVRFWISELGLAIRYIHSQGIIHRDIKPDNVLLDAEGHVHLADFNVASDFTPGKLLTSKSGTLAYLAPEVYKGKGYSSSVDWWSLGVLFYECIYNKRPFEKISSSDLQEQILKADPKFPVTDPPVSIVCMHAISSALEQDPNKRMGCTKDEGFSSFTDNPFFRAIDFYALERKEIEPVFVPSSGKTNFDATYDLEEMLLEEAPLEARARRQKPREQLREDATEKQIREEEMYQMIEEHFTPFDYTTIAYER

SEQ ID NO: 9142 - protein, 553 aa, Linum usitatissimum
MAWSESNRTKNIFLLLTFSAAILITATTATVHHPVIKSSCSTTLYPELCHSAASASAAVLSDIKTTTDVVDLSLNATIAAVQANNQAIKKIISSRSLSLTKREKAALADCIELCGETMDEPVKTIEELHGKKKSAAERGEDLKTLLSAAMTNQETCLDGFSHDKGDKKVRELLAAGQTNVGRMCSNSLAMVENITEEEVFREGKTASFLSEGRKMGEEEDGWPRWISAGDRRLLQAGTVTPNVVVAADGSGNFRTVSQAVAAAPEGSTSRYVIRIKAGVYRETLVVPKKKTNLMFVGDGRTSTIITGSMNVVDGSTTFNSATVAVVGDRFMARDLTFQNTAGPSKHQAVALRVNADFTAFYRCDMLAYQDTLYVHSLRQFYVSCFIAGTVDFIFGNAAVVLQNCDIHARRPNSGQRNMVTAQGRDDPNQNTGIVIQKCRIGATQDLLQVQSSVESYLGRPWKMYSRTVIMQTDISNVIRPAGWFMWDGNFALATLTYREYANTGAGSGTSGRVRWGGYKVITSASEAQPFAPRSFIGGASWLPATGFPFSLDL

SEQ ID NO: 9143 - protein, 345 aa, Emericella nidulans
MKYMSLDQRGSVMAEYIWIDAHGGTRSKTKTLSKAPSSVDELPEWNFDGSSTAQAPGDNSDVYLRPVAMYPDPFRRGDNILVLCETWDSDGSPNKFNYRHDCARLMETHAKEEFWFGLEQEYTLLGPDGWPYGWPKGGFPGAQGPYYCGVGTGKVYCRDIVEAHYRACLYAGVKISGINAEVMPSQWEYQVGPCHGIEMGDHLWISRFLLHRVAEEFGVKISNDPKPIKGDWNGAGLHTNVSTTSTRAEGGIKAIESYMKKLEARHVEHIAVYGEGNEERLTGRHETGNIDKFSYGVADRGGSIRIPRQVAKDGKGYFEDRRPASNADPYQITGIIAETVSFSNR

SEQ ID NO: 9144 - protein, 357 aa, Oryza sativa Japonica Group
MAPQVQGGGGYSQPQSQRRSSDDGYNWRKYGQKQVKGSENPRSYYKCTFPNCPTKKKVERSLDGQITEIVYKGTHNHAKPQNTRRNSGSSAAQVLQSGGDMSEHSFGGMSGTAATPENSSASFGDDEIRVGSPRAGNGGGDEFDDDEPDSKRWRKDGDGEGISMAGNRTVREPRVVVQTMSDIDILDDGYRWRKYGQKVVKGNPNPRSYYKCTTAGCPVRKHVERASHDLRAVITTYEGKHNHDVPAARGSAALYRPAPPAAAATSSHPYLPNQPPPMSYQPTGPQPYALRPDGFGGQGPFGGVVGGSSFGGFSGFDDARGSYMSQHQQQQRQNDAMHASRAKEEPGDDMFFQNSLY

SEQ ID NO: 9145 - protein, 400 aa, Acinetobacter sp. NCIMB9871
MLNAYIYDGLRTPFGRHAGALSSIRPDNLAAHVIKALVEKNHLPANIFDDVILGNTNQAGEDSRNIARHATLLAGLDVKTPAQTVNRLCASGLAALIDAARAISCGEGEVILAGGVESMSRAPFVFAKSETSFSRDLKVFDSTIGARFPNPAIEKQFGDDTMPKTGDNVAVEYGVTREDADRFAAASQARYEAAKQASFFAGEIVGVEVSQGRKLSPKLVEIDEHPRPSSDFVALQKLKPLFEGGVVTAGNASGVNDGAAALIIGSTAAEQKLGIKPMAKILSSGAAGIEPRIMGAGPVDAIKLALKRANLTLDDMDIIEINEAFASQVLACLKGLDIDFDDPRVNPNGGAIAVGHPLGASGARLALTTARELQRSGKKYAVISLCIGVGQGLAMVIERT

SEQ ID NO: 9146 - protein, 342 aa, Hordeum vulgare subsp. vulgare
MDRYEVVRDIGSGNFGVAKLVRDVRTREHFAVKFIERGHKIDEHVQREIMNHRSLKHPNIIRFKEVVLTPTHLAIVMEYASGGELFQRICNAGRFSEDEGRFFFQQLISGVSYCHSMQVCHRDLKLENTLLDGSVAPRLKICDFGYSKSSVLHSQPKSTVGTPAYIAPEVLSRREYDGKVADVWSCGVTLYVMLVGAYPFEDPDEPRNFRKTIARILSVQYSVPDYVRVSMDCIHLLSRIFVGNPQQRITIPEIKNHPWFLKRLPVEMTDEYQRGMQLADMNTPSQSLEEAMAIIQEAQKPGHNALGLAGQVACLGSMDLDDIDFDVDDIDIENSGDFVCPL

SEQ ID NO: 9147 - protein, 283 aa, Pyrococcus horikoshii OT3
MLLYTYRSFDMELPTVDIKDADYIILGLPFDGTTSYKPGARFGPVLIRQATLNLESYILDYDIDIAELKIADAGDVALPVSIEDAIKVAVETIKEVRSINPRALPIFLGGEHSMTYPPVKVLEPKSYVVFDAHLDLRDSYQGSRFNHACVARRIHEMGVKVAIFGVRSGTREEVMFASQSGIEWVHARDYNFDAFVDLVSSLPEPVYVSIDVDVFDLPLVPETGTPEPGGLGFWEVIEALEWLTKRKKVAGFDIMEVSGDRLGNSTSITAAKLLFYVIGMSAR

SEQ ID NO: 9148 - protein, 399 aa, Pyrococcus horikoshii OT3
MSVMSGDEVQFQGDYDDYITYLKRRIRQLELQVRMLEADKERLERELSRLRSEMSRLRQPPAFAGTVIEVLDEDRAIVQNYNGPRFVVRIAPWIDRKKLRPGTRVALDQRTMAVVEILPTSKDPTVLGFEVIERPNVTYNDIGGLKKQLQELREAIELPLKHPELFEEVGIDPPKGVLLYGPPGCGKTLMAKALAHEVNATFIRVVGSELVRKYIGEGARLVHELFELAKEKAPTIIFIDEIDAIGAKRMDETTGGEREVNRTLMQLLAEMDGFDPRGNVKVIAATNRPDILDPALLRPGRFDRLIEVPLPDFEGRLEILKVHTRRMKLKGVDLRAIAEMTEGASGADLKAIATEAGMFAIRERRTYVTQEDFLKAVDKVLGNERKLLQQITSHEVIYG

SEQ ID NO: 9149 - protein, 324 aa, Pyrococcus horikoshii OT3
MILLRVRNLRIYYSTPRGFVKAVDGVSFEVKKGEVFGIAGESGCGKSTLVHSLILRKPPMTHKGGKAIFKGKDLMKLSREEARKIQYKELSIIPQYAMNALNPTKKIKDIVWDLAREHGMQDKKEVEKLLKERLSMVKLSPKVAEMYPVELSGGMRQRATMVVSTLLNPDLLIADEVTSALDVTTQRVVIELLHHFMEEGIVKSIIFVTHDLALLRQIADRVMIMYAGKVVEIGSMEEVLESPAHPYTQLLLNSLPRMGVHYKRERLRGIPGYPISLLNPPEGCRFYTRCPYAMQVCREVEPELVEVSPGHYAACHLLGGGSRA

SEQ ID NO: 9150 - protein, 333 aa, Pyrococcus horikoshii OT3
MRPKVGVLLKMKREALEELKKYADVEIILYPSGEELKGVIGRFDGIIVSPTTKITREVLENAERLKVISCHSAGYDNIDLEEATKRGIYVTKVSGLLSEAVAEFTVGLIINLMRKIHYADKFIRRGEWESHAKIWTGFKRIESLYGKKVGILGMGAIGKAIARRLIPFGVKLYYWSRHRKVNVEKELKARYMDIDELLEKSDIVILALPLTRDTYHIINEERVKKLEGKYLVNIGRGALVDEKAVTEAIKQGKLKGYATDVFEKEPVREHELFKYEWETVLTPHYAGLALEAQEDVGFRAVENLLKVLRGEVPEDLVNKEVLEVRPIENVKML

SEQ ID NO: 9151 - protein, 840 aa, Pyrococcus horikoshii OT3
MILGRSEPQKEEIKLRVAEALKRDVGRGIVRFDRRYQKMIGVEPGDIVEIEGERVTAAIVANSHPDDKGLDIIRMDGYIRKNAGVSIGDYVTIRRAQVKEAKKVVLAPAQKGVIVQIPGDIIKNNLLGRPVVKGDIVVASGRGDLYYSSGTPFDEIFRGFFEAMSVGFGELKFMVVNTIPKGIVQITYNTEVEVLPQAVEVREEKIPEVTYEDIGGLKEAIQKIREMVELPLKHPELFERLGIEPPKGVLLYGPPGTGKTLLAKAVANEANAYFIAINGPEIMSKYYGESEERLREIFKEAEENAPAIIFIDEIDAIAPKREEVVGEVEKRVVSQLLTLMDGLKGRGKVIVIGATNRPDALDPALRRPGRFDREIEVGVPDKQGRKEILQIHTRGMPIEPDFEKDAVIKVLKDLEKDERFEKEKIEKIIEKVSKANSEDEIKEILKEDGNVYVEVRNRLIDKLLEELAEVTHGFVGADLAALAREAAMVVLRRLINEGKINPEAESIPREVLEELKVTKRDFYEALKMVEPSALREVLIEVPNVHWDDIGGLEEVKQELREAVEWPLKYPKAFKKLGITPPKGVLLYGPPGTGKTLLAKAVATESEANFIAVRGPEVLSKWVGESEKRIREIFRKARQAAPAIIFIDEIDAIAPARGTSEGEKVTDRIINQLLTEMDGLVENSGVVVIAATNRPDILDPALLRPGRFDRLILVPAPDEEARFEIFKVHTRSMPLADDVDLRELARRTEGYTGADIAAVCREAALNALRRVVKSVPKEKLEEESEEFLNKLVVTRKDFEEALKKVKPSVSKYMMEYYRQFEEARKRVSGESVGREPDYFTG

SEQ ID NO: 9152 - protein, 641 aa, Pyrococcus horikoshii OT3
MEELQYFPYEKFRPNQREFIEIVKEAVKRGENLIVEAPTGFGKTISVLAGVLPYAISLGYKVVYLARTHKQMDRVIEELRKIGEKSEVSGIEFRSRKDLCLHAYIQTFAQDAYTSMIVCKSLRKLGKCKYYENLKEKRDRVDEIVKFFLSFPPFPREVIEYSELLELCPYEITKKVGEKANVVVASYLYMISPPIRQAFLENLGVDYSDLIVIFDEAHNLPDQAISALSDRLSVRSIERAIKEAEEYGEKDIENFLSILLRGLEILYKEKLENYESEEIPIRPEEVFLHPASILGWRGRDIGMMLEDMIEVGDAIREDRIERNLPPRSYVGRVGEFLWNWLSLRDREDYLHLFTKEKGLALELVALDPSVALDFLEEVHSAIFMSGTLSPLEAFRDIIGVNARLKKFPRIVKRENAIVLVARDVSTRGIERSPPLYKRIAEYIFEAVKNTPKNVGVFTASYEVLEGVLSTNVHIKIEEEVGKKVFIEKKDAPSRENDEMIREFKEESKGKGAVLFGVMGGRNSEGQDYSGDEMNGVILVGIPYARPTPRVQAQTRYFEKKFPGKGRYYGYILPAHRKLAQAAGRVHRSENEKGSIVILDYRVLWKNVKKDLPDWMVETMIPVTLPTLRIKLRRFWRERLNE

SEQ ID NO: 9153 - protein, 391 aa, Pyrococcus horikoshii OT3
MREKRKYFIAERVLLIKRSKIRELFERASKMEDVISLGIGEPDFDTPKNIKEAAKRALDEGWTHYTPNAGIPELREAVVEYYKKFYGIDIEVENVIITAGAYEGTYLAFESLLERGDEVIIPDPAFVSYAEDAKVAEAKPVRIPLREENNFLPDPNELLEKISKNTRMIVINYPNNPTGATLDKELAKTIADIAEDYNIYILSDEPYEHFIYEDAKHYPMIKFAPENTILANSFSKTFAMTGWRLGFVVAPSQVIKEMTKLHAYVIGNVASFVQIAGIEALRSEESWKAVEEMKKEYNERRKIVVKRLKNMPGIKVKEPKGAFYVFPNISGTGMSSEKFSEWLLEKARVVVIPGTAFGRMGEGYVRISYATSKEKLIEAMNRIEKALEGEK

SEQ ID NO: 9154 - protein, 359 aa, Pyrococcus horikoshii OT3
MVEKPVVIKFGGTSVRYAFEEALELVAKLHENMKIIVVVSALAGVTDCLLRLAKGDKSALLEIDEIHEELSQELNVQLEHLIHQLKKTINSKSSFPSEKAFIDEIASFGERFSAKLFSEGLKILGITARPVDSKDVLFVKGEFGNAEVEFKKSAQGVDVLYRMLRRGIVPVVTGYYGNLNGFRATFGRGGSDYSATSIASLVNAKAVLIMSDVEGIYTADPKLVPPARLIHYISYKEAKTAAKLGMKVLHPRAIDPVEGKIPVILGKTRDLKFGTLISHESQGIPIVTHKLLENHAEISVVSVKTNIPLPYEVYEEGDLYFKIKTSKDQFLEVLRDVHRRVVENENLHSSHDGELWTWV

SEQ ID NO: 9155 - protein, 237 aa, Pyrococcus horikoshii OT3
MLCLRNVTYRVDGRRIIERINMRFKEGMTYSILGPNGAGKSTIAYILMGVMKPSEGRVLLDGDDITNLSITERARLGITLLWQEPARYDGITVEKYLTLGGKIKVDKNEMREILELVGLPYELYAHRFVDKSLSGGERKRIELASILMLRPRYAILDEPDSGLDITAGELIENVLEYFRRVGTTVILITHHEEIAAKTDFAYFVCAGRIIKKGFSREIVDYYKKTCGRCFLTGRMEV

SEQ ID NO: 9156 - protein, 330 aa, Pyrococcus horikoshii OT3
MAEPVLKWAGGKRQILHYIVSLMPSDYKDRRFHEPFFGGGAVTFWLEPKEGTINDINPKLINFYIILRDYPEELIEDAKMHKNEREYYYRMRREYNKLALSSWFRDFVRRGFKVESEQDRRNAIRLASLLLYLNKTAYNGLYRENRKGEFNVPFGRYKNPRIVDEKRLREASRVLRNLEIYNTDFSYVLDKAKEGDLVYFDPPYQPISQTASFTDYSKEGFTYKDQIRLRDVCLELHRRGVYFILSNSSAPEIVKLYKDIPEFDIIIVKAKRVINSKADRRGPVDEILVTNVPREERVGLEKAIKLTRQESYEKQEQGHNRERSILEWIN

SEQ ID NO: 9157 - protein, 480 aa, Pyrococcus horikoshii OT3
MCLIAGGFKLYTDEIIRIIELGKHRGPDSFGVWSEREVIKSSDFSALEEVKGGDKVLIQCRLAMTGSKEYTQPFYNEIALVHNGEIYNHEKLRAYLVERGISFESDVDSEVILRLLEYLLFDRNLSPWNAIKKLMWMLRGDYAVAFHYNGKFYLFRDPLGIRPLYYSSQGHFGSEKKVLWGLGEEATPVMPGEAVEISKFGINRVRLYDVTAIKSFGSEYFDGLRNLLIDSVKIRSSKKIGILFSGGLDSTLIAFIASRYSNVTLYVSGTEDSKDVEWARKVSQELGLKLKEYIFSKEEVEKELKRIMFAIEEPNPMNLSIAIPLYFSTKLAREDGVKILLSGQGADELFGGYAKYLENPNLMISDVANLGERNLARDDKVSMINGVEVRYPYLDLPFAVLALNTPLQHKIKDGKRKIILREIAKSLGLPEWIAEREKKAAQYGSNAQKILEKIAKSRGIRLKELASLLFSEVFRGIHNR

SEQ ID NO: 9158 - protein, 661 aa, Pyrococcus horikoshii OT3
MLKVVALVGNPNVGKTTIFNALTGMRQHVGNWPGVTVEKKEGIMKYKGEEYLIVDLPGIYSMTAHSIDELIARNFILEGNASVIVDIIDSSCLMRNLFLTLELFEMGVKNVIIVLNKIDMIKKKGVKIDIKEMERIFGVPVVPTNAKTGEGLDELKRKISLMVEGKITTNPLIPKYDEDIEREIRHVSEVIKDTPLAEKYSIRWLAIKLLQRDEEVIKLIIKHVGQAKIDEVLKHVSELEEKYKRSLDIVIASQKYEFLHEILRKFVQHPKEVRETLSDQLDKLLTHPVYGTISMLIVFYILFQFVFAVGGPLQELLDDAFSSFGEWLGERIANETIRGLVVDGIIGGVGTVLSFFPLVFLLFVGMSILEDSGYLARVAAVMERYLRVFKLPGKAIIPMVLAFGCNVPAVMATRILEEEKDRILTMLINPLIPCVARMTVITFLAGTFFPNKAALVAVSIYVIAIAIALISAFILGKFVVKSEESPFIIELPEYSIPSWRTIAIHSWERSKEFLRKAATVILLGSILIWYLSSYPEPVGSGVSYAEKLGRILEPLAKLMGLDWKAAVSLIFGIIAKENVIATYSVIYGVSEESLGSAMIHAMTPLQAYILALVTTLYFPCLATIGAIRAEGGMKWATIAIIYNLLLATTVGIIAYHLGLLV

SEQ ID NO: 9159 - protein, 363 aa, Pyrococcus horikoshii OT3
MHRLQILQVQKCHEEFEKAMALGQYDKARLIALRCSELLRNLASENLDLSHILLEEAKKWEDKARNIRKKKEARNEYFDRLKVLIKKSTVTWNDIGGLKEAKKLIAQAVGLSIAKSPIDPPQGILLFGPPGTGKSLLASATANSLNATFFSVKASDLLSKYFGESSKLVSALFSLARQLSPSVIFIDEVDSLTMKRSSLDDAARRMIGTLLAEIDGFKDKRRKVIVLTATNTPWDLDEAMLSRLPIRIYVPLPDIPSAVEIFRIHLRGIPHEVSLNKLAKEAVKKLYSGREIANVVKLATMKMLEEMNPELVDPLRVATLKGKDLTTRPLTMDDFRYAMAKIKSPITKSDVKKYEKWAKEFGI

SEQ ID NO: 9160 - protein, 537 aa, Pyrococcus horikoshii OT3
MNLGILLGFLIYLVLLAYIGWWANRYTKTEEQYFIGGRKVHVLAATLSDKASDFSGWLMLGYPGTAFKTGLGAFWAAIGCLFGTLADYLLIGPRLRIYAGKFRSITLPDYLEARLKDNTKLIRILSAAIILIFMTAYVAAQFAAGGKTFSEAFGVSVTTGILITVIILTAYVITGGFFAVVWTDVVQAMFMLLTLIIMPILALAEIGGLDKATQIIGSVNPAKLHPFGGATGLAAIVFAIGYASWIVGYLGQPHIVTRYMSVEDPRKLRRPGIFISGIWTTIVLWGAFFAGFLGFALAINGSIKIDDPEKIVPAMAVHFLPSWIAGFVIAGIISAVMSTADSQLLVASSAIARDIYHKVLGQELGKKQMVNISRVVVAIVSLIAMWFAISGPKVIYQMVATAWGGLAVGFGPILTLSLWWKRVTKEAGIIGMGYGLISEVLLEAKIYGWAFNPNAPGFFGTLGKWFNGVPVFFINFFITLLVIIIVSLLTKPPEDVVKLHKELFKKVPIEKSEKIKVARAKSQAENVFDFAIASGLL

SEQ ID NO: 9161 - protein, 389 aa, Pyrococcus horikoshii OT3
MALSDRLELVSASEIRKLFDIAAGMKDVISLGIGEPDFDTPQHIKEYAKEALDKGLTHYGPNIGLLELREAIAEKLKKQNGIEADPKTEIMVLLGANQAFLMGLSAFLKDGEEVLIPTPAFVSYAPAVILAGGKPVEVPTYEEDEFRLNVDELKKYVTDKTRALIINSPCNPTGAVLTKKDLEEIADFVVEHDLIVISDEVYEHFIYDDARHYSIASLDGMFERTITVNGFSKTFAMTGWRLGFVAAPSWIIERMVKFQMYNATCPVTFIQYAAAKALKDERSWKAVEEMRKEYDRRRKLVWKRLNEMGLPTVKPKGAFYIFPRIRDTGLTSKKFSELMLKEARVAVVPGSAFGKAGEGYVRISYATAYEKLEEAMDRMERVLKERKLV

SEQ ID NO: 9162 - protein, 138 aa, Pyrococcus horikoshii OT3
MGDKTKVQVSKLKPGRYIIIDDEPCRIVNITVSSPGKHGSAKARIEAVGIFDGKVRSIVKPTSAEVDVPIIDKKTAQVIAITPDTVQIMDMETYETFEVPIDTGVADEIRDQLKEGINVEYWETLGRIKIMRIKGEGE

SEQ ID NO: 9163 - protein, 247 aa, Pyrococcus horikoshii OT3
MLKIVDLHVEAGGREILKGVNLTVNEGEFHVIMGPNGSGKSTLALTLAGHPNYKVTKGGIFFEDKEITNLTPDERAKMGILLAFQVPPEIQGVRIIDFLTQTLSEIKNLDASEAYNIIIEKAKELWFREDDLRRYINVGFSGGERKRLELLQALLLEPKLLILDEPDSGVDVDSLSVISRKIEELHKKGVSIILITHYGRIFGHIDKEKLKVNIMRDGKIVMRGGSELISMIEEKGFKAIFGGDNDE

SEQ ID NO: 9164 - protein, 307 aa, Pyrococcus horikoshii OT3
MKRMKVLVAAPLHEKAIQVLKDAGLEVIYEEYPDEDRLVELVKDVEAIIVRSKPKVTRRVIESAPKLKVIARAGVGLDNIDVEAAKEKGIEVVNAPAASSRSVAELAVGLMFSVARKIAFADRKMREGVWAKKEAMGIELEGKTIGIIGFGRIGYQVAKIANALGMNILLYDPYPNEERAKEVNGKFVDLETLLKESDVVTIHVPLVESTYHLINEERLKLMKKTAILINTSRGPVVDTNALVKALKEGWIAGAGLDVFEEEPLPKDHPLTKFDNVVLTPHIGASTVEAQERAGVEVAEKVVKILKG

SEQ ID NO: 9165 - protein, 351 aa, Pyrococcus horikoshii OT3
MRRGKMHLMEFPREVILGKNLIQEINNVIKRLKLGSPGLVVYGPITKKIAGSNVEKIVKEEFEVYSITVKEAHINEVERVISKIRDKGIKWAIAVGGGSIIDVTKLASFKMGIPFISFPTTASHDGIASANASIKGLNVKTSIKAKPPIAVIADIDVIKTAPKRYLAAGVGDIVSNITAVRDWKLAHKLKGEYFSEYAASLSLMSAKMVIRDAEIIRLGQDEGIRKVVKALISSGVAMSIAGSSRPASGAEHLFSHALDMLLDKPALHGEQTGIGTIIMAYLHGINWKKIRDTLKIVGAPTTAYELGIDPEIIIEALTIAHTIRPERYTILGKEGITREAAEKAAKITGVI

SEQ ID NO: 9166 - protein, 356 aa, Pyrococcus horikoshii OT3
MEILEEKPKEGKVKIKVETLDDLWHLYHIITPGDVVYAKTLRKQSQRSDSLRPEKVEVIPVFLGVKVEKINFHKFANQLRVTGPIIYASREDVPLGKYHTIAVEPGTIITLQKERWKPYYIERLKEAVEASKRAKVMIVTIEDGEAEMAIVREYGLDFIATIRHNLGGKRYNIKREDEERKFFHDVAKTMKDVMSRENIQRAIVAGPGFYKEDFYKFLKENYPDLASKIVLDDTSMGGRVGIYEVIKRGTVDKVYSESRIANEIKLVEKVIERIAKDEPVAYGMKEVEEAVNYGAVEILLVLDELLKGDNREKVEELMELARSLRSKVVVVSSEHEGGEKLKALGGIAGILRFKIK

SEQ ID NO: 9167 - protein, 570 aa, Pyrococcus horikoshii OT3
MDVEKIALKHALINAIEHGGKANLKAVIGKVLGENPELRPRAKEIIPIINKVVEEVNSLARDEQLEKLKDIYPEYFEKKEEKKEKKGLPLLPKAEKGKVVTRFAPNPDGAFHLGNARAAILSYEYAKMYGGKFILRFDDTDPKVKRPEPIFYKMIIEDLEWLGIKPDEIVYASDRLEIYYKYAEELIKMGKAYVCTCPPEKFRELRDKGIPCPHRDEPVEVQLERWKKMLNGEYKEGEAVVRIKTDLNHPNPAVRDWPALRIIDNPNHPRTGNKYRVWPLYNFASAIDDHELGVTHIFRGQEHAENETRQRYIYEYFGWEYPVTIHHGRLSIEGVVLSKSKTRKGIEEGKYLGWDDPRLGTIRALRRRGILPEAIKELIIEVGLKKSDATISWENLAAINRKLVDPIANRYFFVADPIPMEVEGAPEFIAEIPLHPDHPERGVRRLKFTPERPVYVSKDDLNLLKPGNFVRLKDLFNVEILEVGDKIRARFYSFEYEIAKKNRWKMVHWVTEGRPCEVIIPEGDELVVRKGLLEKDAKVQVNEIVQFERFGFVRIDRIEGDKVIAIYAHK

SEQ ID NO: 9168 - protein, 582 aa, Pyrococcus horikoshii OT3
MRNMRNNESSFSLLIRFIREALSEKKTLVVVIISIVGSAIANLASPYVLHIAIDNYIVPGKYGELWFVTLLYLLSLIGQWFFMTLQTYYTEVFGQGVLKRLRSKLHEKILISNLDFFKEKSTGDLVSRIINDTNIVNDVLVSGLLGGLGSLLSLAGIIIAMFLLDVKLTLVTLASVPLMVLVAYYFGGKMRRAYRETRQKIAKISSVVEESVAGIETIRAFGKERDVEREFSKVSLETIKAYLRVAVYMGVFWPLMNITSLLSVIAVIAYGGYLAYKGAVSIGVVVAFIQYAQRFRGPINNVVSMYDSLQSALAALERIYEILDDENVEDYNGINVERLNGEIEFRNVWFEYERGRPVLKDINLLIPSGSKVAIVGKTGAGKTTLANLIMRFYDPTKGDIFYDGIEGRKISRKSLRRRIGYVPQETYLFPGTIMENILMANPEAREEDVIRVCKELGIHEFIMKLPNGYKTSAGEAGKLLSLGERQLISLARALLKDPDIVILDEALSSVDPKTEQLVQNAMLKLMEGRTSIIIAHRLSITRFADKVIVVKDGRIIEEGPPKLLLEKKGYFYRLYTSQVQEV

SEQ ID NO: 9169 - protein, 580 aa, Pyrococcus horikoshii OT3
MDGSLRQLERLLSYLREYRWHFIGGIGLVLLMSYTNGVIPVLIRNAIDKGIVTKKYSVAFNYGLLILLVAVFNGIFSFTGRYLLVKSAQHAVYYIRMDAFKAIQRHRMEFFDKTFSGQLISRITNDTERITRFLSFRIRMFVYSIFLIAVSLYYMIRMNVFLSLVALGTIAVVVLLNTTYATKVRPIYDKIRHQTGVIASIATGTIAGIKTIKSLSVEENIQEKFSKENENLYSLNIDAIKITALYGNAPFLILGLAMSAMLYYGGKAIIAKTLTVGELVAFLTYMLTMMWPLRALGFTIGDIQRSLAAAARLFEVIDSAPKAIDAPDAVEINDPKGEVEFRDVWLTYHTGRTVLRGVNLKVSPGEKVLIVGPPGSGKSSILKLIARFYVPDKGEVLIDGVNVKKIKTESLRRIVAYVPQEPFIFNRSIRENIALAKPDAKMDEIIRAAKIAKIHDFISSLPNGYDTIVGEKGVTLSGGQRQRIALARALLLDPKIILLDDPVSNLDAETEKRLVEDLKEILKGRTALIVSQRLSLVKLTDRVIVIKDGRIIEEGKPSELVKKGGAFSEMIRAIGEEYEK

SEQ ID NO: 9170 - protein, 798 aa, Pyrococcus horikoshii OT3
MMLMVEKKEIKLKVASAYQRDVGRGIVRIDRRSMRELGVSPGDVVEIIGTKNTAAIVWPAYPEDEGLGIIRMDGTIRKNAGVGLGDEVTIRKADVKEARKVVLAPTEPIRFGRDFVEWLHERLVGRPVVRGDYIKIGVLGQELTFVVTTTQPSGVVQITEYTDFDISEKPVKEVEKRMTTGVTYEDIGGLKDVIEKIREMIELPLKHPELFEKLGIEPPKGVLLYGPPGTGKTLLAKAVANEANAYFIAINGPEIMSKYYGESEERLREVFKEAEENAPSIIFIDEIDAIAPKRSEVTGEVEKRVVAQLLALMDGLKGRGKVIVIGATNRPDALDPALRRPGRFDREIEVGVPDKQGRKEILQIHTRGMPIEPDFRKEDVLKILEGLKKEGKFRDVIDKAIDRVMKVSEDDIPKVLKELNGELYEEVRTRLVDLLLEELAEVTHGFVGADLAALAREAAMAALRRLIKEGKIDFEAETIPREVLDELKVTRKDFYEALKMVEPSALREVLIEVPNVHWDDIGGLEEVKQELREAVEWPLKYPEAFRAYGITPPKGVLLYGPPGTGKTLLAKAVATESEANFIAVRGPEVLSKWVGESEKNIREIFRKARQAAPTVIFIDEIDAIAPRRGTDVNRVTDRLINQLLTEMDGIQENTGVVVIAATNRPDILDPALLRPGRFDRLILVPAPDEEARFEIFKVHTRSMPLADDVDLRELARRTEGYTGADIAAVCREAAMIAMRKALEKGIIKPGMKADEIKQKAKVTMKDFEEALKKIGPSVSKETMEYYRKIQEQFKQARG

SEQ ID NO: 9171 - protein, 287 aa, Pyrococcus horikoshii OT3
MNKVFVIGSGAKHLEEEISKNAKILKTEIKKFPDGEKYVRILEHGEEVIVVQSTYRPQDEHLIETIIIGDALKEAGFEKLKLVVPYLAYSRQDRVTKEGEPISVRAIMKMLGLYYDELYVFDIHNPKTLDFFPGKAVNIYPAKVIAEYFRDKLENGLVLAPDRGALERAKEVANILGLEYSHFEKERISPTEVKMTPVDVNVKGRNVLIVDDIISTGGTMIRAAEILKDLGAEKVFVVATHGVFAEGAIERVSKAVDELAVTNTIPTKVSKISIVPEIMRSILEVKS

SEQ ID NO: 9172 - protein, 670 aa, Arabidopsis thaliana
MAAATTTTTTSSSISFSTKPSPSSSKSPLPISRFSLPFSLNPNKSSSSSRRRGIKSSSPSSISAVLNTTTNVTTTPSPTKPTKPETFISRFAPDQPRKGADILVEALERQGVETVFAYPGGASMEIHQALTRSSSIRNVLPRHEQGGVFAAEGYARSSGKPGICIATSGPGATNLVSGLADALLDSVPLVAITGQVPRRMIGTDAFQETPIVEVTRSITKHNYLVMDVEDIPRIIEEAFFLATSGRPGPVLVDVPKDIQQQLAIPNWEQAMRLPGYMSRMPKPPEDSHLEQIVRLISESKKPVLYVGGGCLNSSDELGRFVELTGIPVASTLMGLGSYPCDDELSLHMLGMHGTVYANYAVEHSDLLLAFGVRFDDRVTGKLEAFASRAKIVHIDIDSAEIGKNKTPHVSVCGDVKLALQGMNKVLENRAEELKLDFGVWRNELNVQKQKFPLSFKTFGEAIPPQYAIKVLDELTDGKAIISTGVGQHQMWAAQFYNYKKPRQWLSSGGLGAMGFGLPAAIGASVANPDAIVVDIDGDGSFIMNVQELATIRVENLPVKVLLLNNQHLGMVMQWQDRFYKANRAHTFLGDPAQEDEIFPNMLLFAAACGIPAARVTKKADLREAIQTMLDTPGPYLLDVICPHQEHVLPMIPSGGTFNDVITEGDGRIKY

SEQ ID NO: 9173 - protein, 516 aa, Arabidopsis thaliana
YDLSLEELCTKISLCDALIVRSGTKVGRDVFESSRGRLKVVGRAGVGIDNVDLAAATEYGCLVVNAPTANTVAAAEHGIALLTAMARNIAQADASIKAGKWTRNKYVGVSLVGKTLAVLGFGKVGSEVARRARGLGMHVITHDPYAPADRARAIGVELVSFEVAISTADFISLHLPLTAATSKMMNDVTFAMMKKGVRIVNVARGGVIDEEALLRALDSGIVAQAALDVFTVEPPVKDNKLVLHESVTATPHLGASTMEAQEGVSIEVAEAVIGALRGELAATAVNAPMVPLEVLRELKPYVVLAEKLGRLAVQLVTGGSGVNAVKVTYASSRAPDDLDTRLLRAMVIKGIIEPISSVFINLVNSDYIAKQRGVKISEERMVLDGSPENPIEYITVRIANVESRFASALSESGEIKVEGRVKQGVPSLTKVGLFGVDVSLEGSVILCRQVDQPGMIGKVASILGDENVNVSFMSVGRIAPGKQAVMAIGVDEQPSKETLKKIGDIPAIEEFVFLKL

SEQ ID NO: 9174 - protein, 553 aa, Coxiella burnetii
MRSLILNPWQLCDLEMLFNGGFAPLNGFLSKADYYCVIETMRLVDGSLWPIPITLDVKSEFATKLIIGEPLALRDDQGSLLGILEVEEIWEPDKYKEAHCVFGTLDEAHPGVKQLLRHKGSFYLNGKLTKINAPKHYDFIQYRLSPQQLKDKLKGLHKNLVGFQTRNPMHRAHFELTRCAAEICNANLLIQPVVGITKLGDMDYVTRARCYEIMLSYYPPGTTFLNFLPLAMRMGGPREALWHMLIRKNYGCTHFIIGRDHASPGVDSRGKPFYEPYAAQALAQKYQTEAGIQIVPFHEMVYSQAKQKYIPVNQIQQNETTLKISGTEIRRRLREGLEIPEWFSYPEVIAELRKSFPPKNKQGITLFLTGLSGAGKSTISKALIAKLQEMDERKITLLDGDVVRKNLSHGLGFSREDRDANVARIAFVASEVTKHGGMAICAQIAPYADTRKRAREIVESQGIFIEVYISAPLEICEQRDPKGLYGKARMGIIKIFTGISDPYEPPASPEIIIETNQITIEESVAKIIFYLFEKGYLTPKVDRVRNSVLSVNA

SEQ ID NO: 9175 - protein, 384 aa, Aeropyrum pernix K1
MRAVPYLEGSAKKYALAAVDAEKRGDYEAAIVNLNKAIEYLTEIVRNYPDYPLAHIYRRLIAQYRRKVKDLEKKARMIPASGDEVYVDTQEKDGGGEDEAPEFVLKEKPSVTFDDIAGLEEAKKAIREAIVFPVKRPDLFPLGWPRGILLYGPPGTGKTMLASAVANEIDGEFLYVDAANIMSKWLGEGEKNVKKLFNYARNKAKEGKPVVIFIDEVDALLGVHGSEVGGEVRVRNQFLKEMDGIQDKGSRLHVYVIAATNKPWKLDEPFIRRFQKRIYVPLPSRETRKRMLEMYTRKLRLAGDVDLDRLAEMLEGYTGSDIADIVREAYMATVRELFEKGKVDGEPRPITMSDFQEILRRRRPSVDHRLLKTYEEWTERFAAV

SEQ ID NO: 9176 - protein, 726 aa, Aeropyrum pernix K1
MANSSVELRVSEAYPRDVGRKIVRIDRQTAARLGVEVGDFVKVSKGDRSVVAVVWPLRPDDEGRGIIRMDGYLRAALGVTVGDTVTVEKAEKVEPASKVVLAPTEPIRFGRDFVEYVKEFLLRKPISRGETIIVPVLEGLPLVVVSTQPAHFVYVTEATEVEIREKPVREEIERLRGVPKVTWEDIGDLEEAKERIREIVELPMKHPEIFKHLGIEPPKGILLYGPPGTGKTLLAKALANEIGAYFISINGPEIMSKYYGESEQRLREIFKEAEENAPSIIFIDEIDAIAPKREEVTGEVEKRVVAQLLTLMDGLKERGRVIVIGATNRPDAIDPALRRPGRFDREIEIRPPDKRARAEILKVHTRNMPLAEDVDLDKLAEMTHGYTGADLAALAKEAAMAALRRFIREGKINFEAKEIPATVLKELKVTMKDFMEAMKMIRPTLIREIYVEVPEVRWSDIGGLEEAKQALREAVEWPLKHPEIFEKMGIRPPRGVLLFGPPGTGKTLLAKAVATESGANFIAVRGPEILSKWVGESERAIRKIFERARQAAPAVVFFDEIDAIAPARGARFDTSGVTDRIVNQMLAEMDGIQPLSNVVVIGATNRPDILDPALLRPGRFDRLIYVPPPDKEARKEIFKIHTKKVPLGEDVDLEKLAEMTEGYTGADIEAVVREAVMAKLREKLEVGKVEMRHFLEALKKVPPSLTKEDILRYERLAKELKKLTLG

SEQ ID NO: 9177 - protein, 253 aa, Aeropyrum pernix K1
MGLEVKGLTAKIGEKVVLNKVDFDLKYGEVHAVMGPNGSGKSSLGYVIMGREIYEVVEGDILLDGESIKELPPEERALKGIFMAQQDPPQIPGVRLSSLIIAFVNKRLGAQDLSKPADPKIVKRMYEYATKLGLDREILNREVNVGFSGGEKKRSELLQAMIFDPKIVILDEPDSGLDIDGLKIVAEFIKQLRDSGRGVMLITHYARLLNFVEPDRVTVLYRGSVLARGGAELARQVEEKGYAQLYRMLAKSR

SEQ ID NO: 9178 - protein, 409 aa, Aeropyrum pernix K1
MTLSSAGGSRSHRHNGGHSERDVEIRILKDKVRSLTKEKISLQKELEYYKNEITKLLSPPYIEAVVLEVIDDNRVVVKSSTGPNLIVNVAAGVDARSLKPGAIVALNNRGSTIVDVLPGRYDPLVKAMEVEERPKVFFKDVGGLEEQIREIYEAVVLPIKNPHLFRELGIDPPKGVLLHGPPGTGKTLLAKAVAGETEATFIRVVGSELVNKFIGEGARLVREIFRLAREKAPSILFIDEIDAIASKRVDIGTSGDREVQRTMLQLLAELDGFDPLDNVKVIAATNRLDLIDPAVLRPGRFDRIIEVPLPSLRGRLEILGIHTRKAKMAPDVDLEAIAKLTEGFSGADLKAVVVEAGYNAIRRGSRVITMDDMIKAVEKVKAALDKRGGGDPFIRAQQKSGDDTIATVI

SEQ ID NO: 9179 - protein, 402 aa, Aeropyrum pernix K1
MATARAGVLRSPVYIVDGVRTTIGKFGRSLKDFKAVDLAALTIRELLERAGVDPNYIELAVYGHVIRAGTHMNTAKQAALKAGLRSDLEGFNVDMVCASGMASVVKASLLIDAGMYSLALAGGMESMSNAPFIAPPSIRWGVRLLYQGALEMKDAMVSDGLYDPLNQLVMGQEADETAWEYGAQREELDWIAYESNMRAARAWERGHMQKYTIPVKAGGAVVLDYDEGIRPDTTVERLSKLPPVFTPKGPHTAGNSSQISDGAVSLLVAGEEAVREMGLKPKARIVGWGYAGVDPRRFPVAPVHAVRALLKKLGWRVEDVDYWENNEAFAVNSLIMNRELGVPYERLNVVGGSIAVGHPLGSTGARLILQLVYTLEENGARRGVASICHGLGGAAAVAIERV

SEQ ID NO: 9180 - protein, 246 aa, Dendrobium nobile
MGRGRVQLKRIENKINRQVTFSKRRSGLLKKAHEISVLCDAEVAVIVFSNKGKLYEFSTDSSMEKILERYERYSYAERALFSNEANPQADWHLEYHKLKARVESLQKSQRHLMGEQLDSLSIKELQHLEQQLESSMKHIRSRKTQLILDSISELQKKEKILLEQNKTLEKEIIAKEKAKALTQIAPWEKQNLSQYSSAPLHVISDSVPTPTSRTFQAIANEEESPQAQLRVSNTLLPPWMLGHMNG

SEQ ID NO: 9181 - protein, 234 aa, Dendrobium nobile
MGRGKIEIKRIENTTNRQVTFCKRRNGLLKKAYELSVLCDAEIALIVFSTRGRLYEYSNHSIKATIEKYKKACADSSNPGSLVEVNSQQYYQQESAKLRHQIQLLQNSNRHLMGEGLSSLTLKELKQLENRLERGITRVRSKKHELLFAEIEYMQKREVELQNDNMYLRAKINDNERAEHANIVQAGTDFDTLPNFDSRNYYHLNILETAPHYSHHQDQTALHLGYETKADHSA

SEQ ID NO: 9182 - protein, 466 aa, Brassica oleracea var. medullosa
MRNLYFLVLFPLSILILVDASLHVKYLPGLEGPLPFELETGYVSVGESGDVELFYYFVKSERNPDKDPLMIWLTGGPGCSSICGLLFANGPLAFKGDEYNGTLPPLELTSFSWTKVANILYLESPAGSGYSYAKTRRAAETSDTKQIHQIDQFLRSWFVDHPEFISNSFYVGGDSYSGKIVPGVVQQISLGNEKGLAPLINIQGYVLGNPAVRTNLEPNHRVSFAHRMGLISDELHESLERNCGGKFFNVDPSNAKCSNGLLAYHRCISEIYIEQILLPNCKVDYVLSDISQTLPNIRTSRRRELKEFSRNDSSSLPPPSCFTYRYFLSAFWANDENVRRALGVKKGFGKWSRCNTQNIPYTYDIHNAIPYHVNNSRKGFRALIYSGDHDMMIPFSSTEAWIKSLNYSIVDDWRPWMMSSNQVAGYTRTYANKMTFATIKGGGHTAEYNPDQCSLMFKRWIDGESL

SEQ ID NO: 9183 - protein, 466 aa, Brassica napus var. napus
MRNLYFLVLFPLSILILVDASLHVKYLPGLEGPLPFELETGYVSVGESGDVELFYYFVKSERNPDKDPLMIWLTGGPGCSSICGFLFANGPLAFKGNEYNGTLPPLELTSFSWTKVANILYLESPAGSGYSYAKTRRAAETSDTKQIHQIDQFLRSWFVDHPEFISNSFYVGGDSYSGKIVPGVVQQISLGNEKGLTPLINIQGYVLGNPAVRTNLEPNHRVSFAHRMGLISDELHESLERNCGGKFFNVDPSNAKCSNGLLAYHQCISEIYIEQILLPNCKVDYVLADISQTLPNIRTSRRRELKEFSRNDSSSLPPPSCFTYRYFLSAFWANDENVRRALGVKKGFGKWSRCNTQNIPYTYDIHNAIPYHVNNSRKGFRALIYSGDHDMMIPFSSTEAWIKSLNYSIVDDWRPWMMTSNQVAGYTRTYANKMTFATIKGGGHTAEYNPDQCSLMFKRWIDGESL

SEQ ID NO: 9184 - protein, 684 aa, Sagittaria trifolia
MAAPYATAAAAAAAATATKLPFTSPAGSAAASTVSASSTSLYRPLRRHREFAGRKHPLPVVPMPLKTSALRHHLPVFAALSDSSKPQAAATSTTTTVTERLIRNFGPDEPRKGADILVEALEREGVKDVFAYPGGASMEIHQALTRSPSIVNHLFRHEQGEIFAAEGYARATGRPGVCIATSGPGATNLVSGLADALLDSTPLVAITGQVPRRMIGTDAFQETPIVEVTRSITKHNYLVLSVDDIPRIVHEAFYLATSGRPGPVLIDIPKDIQQQLAIPEWRTTMKLHGYMSRLPKPPQQSQLEQIVRLLLESRKPVLYTGGGSLNASDELRRFVELTGVPVASTLMGLGSFPTSSDLSLKMLGMHGTVYANYAVEHSDLLLAFGVRFDDRVTGKLEAFASRAKIVHIDIDPAEIGKNKQPHVSICGDLKLALEGINELLEETKIHEQLDFSSWRGELDEQKRKFPLSYKKFGDAIPPQYAIHVLDELTNGEAVISTGVGQHQMWAAQWYSYKKPRNWLSSAGLGAMGFGLPAAAGAAVGRPESIVVDIDGDGSFLMNIQELAVLRIENLPVKIMVLNNQHLGMVVQWEDRFYHANRAHTYLGDPARESDIYPDLVSIAKGFNIPAARITKIGEVRAAITKMLETPGPYLLDIIVPHQEHVLPMIPSGGAFKDLIVEGDGRSSY

SEQ ID NO: 9185 - protein, 403 aa, Hordeum brevisubulatum
MKGGLTDQIKREISVMKLVKHPNIVQMYEVMATKTKIYFVLEHVKGGELFNKVQRGRLKEDAARKYFQQLICAVDFCHSRGVYHRDLKPENLLLDENSNLKVSDFGLSTISECRRLDGLLHTSCGTPAYVAPEVINRKGYDGAKADIWSCGVILFVLLAGYLPFQDKNLMNMYKKIGKAEFKCPSWFSSDIRRLLLRILDPNPSTRISIERIMEHPWFRKGLDAKLLRYNLQAKDAVPAADMTVTSDSPSSSNSAIEGKEQEAKKLSNLNAFDIISLSNGLDLSGMFEDNDKKRESKFTSTNSASTIVSKIEDIAKGMRLKLVKKDGGMLKMEGSKPGRKGVMSIDAEIFEVTPDFHLVELKKTNGDTLEYQRVLNQEMRPALKDIVWAWQGEPQPQPQQQPC

SEQ ID NO: 9186 - protein, 1514 aa, Escherichia coli
MTRKPRRHALSVPVRSGSEVGFPQSLGEVHDMLYDKSLERDNCGFGLIAHIEGEPSHKVVRTAIHALARMQHRGAILADGKTGDGCGLLLQKPDRFFRIVAQERLAFRKNYAVGMLFLNKDPELAAAARRIVEEELQRNTLSIVGWRDVPTNEGVLGEIALSSLPRIEQIFVNAPAGWRPRDMERRLFIARRRIEKRLEADKDFYVCSLSNLVNIYKGCVCRRICRVLSGSCGPASGMAICLFHQRFSTNTVPRWPWRNRSAIWRITVKSTPSPVTANGRARTYKFQTPLIPDLHDAAPFVNETGSDSSSMDNMLELLLAGGMDIIRAMRLLVPPAWQNNPDMDPELRAFFDFNSMHMEPWDGPAGIVMSDGRFAACNLDRNGLRPARYVITKDKLITCASEVGIWDYQPDEVVEKGRVGPGELMVIDTRSGRILHSAETDDDLKSRHPYKEWMEKKVRRLVPFEDLPDEEVGSRELDDDTLASYQKQFNYSAEELDSVIRVLGENGQEAVGSMGDDTPFAVLSSQPRIIYDYFRQQFAQVTNPPIDPLREAHVMSLATSIGREMNVFCETEGQAHRLSFKSPILLYSDFKQLTTMKEEHYRADTLDITFDVTKTTLEATVKELCDKAEKMVRSGTVLLVLSDRNIAKDRLPVPAPMAVGAIQTRLVDQSLRCDANIIVETASARDPHHFAVLLGFGATAIYPYLAYETLGRLVDTHAIAKDYRTVMLNYRNGINKGLYKIMSKMGISTIASYRCSKLFEAVGLHDDVVGLCFQGAVSRIGGASFEDFQQDLLNLSKRAWLARKPISQGGLLKYVHGGEYHAYNPDVVRTLQQAVQSGEYSDYQEYAKLVNERPATTLRHLLAITPGENAVNIADVEPASELFKRFDTAAMSIGALSPEAHEALAEAMNSIGGNSNSGEGGEDPARYGTNKVSRIKQVASGRFGVTPAYLVNADVIQIKVAQGAKPGEGGQLPGDKVTPYIAKLRYSVPGVTLISPPPHHDIYSIEDLAQLIFDLKQVNPKAMISVKLVSEPGVGTIATGVAKAYADLITIAGYDGGTGASPLSSVKYAGCPWELGLVETQQALVANGLRHKIRLQVDGGLKTGVDIIKAAILGAESFGFGTGPMVALGCKYLRICHLNNCATGVATQDDKLRKNHYHGLPFKVTNYFEFIARETRELMAQLGVTRLVDLIGRTDLLKELDGFTAKQQKLALSKLLETAEPHPGKALYCTENNPPFDNGLLNAQLLQQAKPFVDERQSKTFWFDIRNTDRSVGASLSGYIAQDARRSGLAADPIKAYFNGTAGQSFGVWNAGGVELYLTGDANDYVGKGMAGGLIAIRPPVGSAFRSHEASIIGNTCLYGATGGRLYAAARARERFGVRNSGAITVVEGIGDNGCEYMTGGIVCILGKTGVNFGAGMTGGFAYVLDESGDFRKRVNPELVEVLSVDALAIHEEHLRGLITEHVQHTGSQRGEEILANWSTFATKFALVKPKSSDVKALLGHRSRSAAELRVQAQ

SEQ ID NO: 9187 - protein, 303 aa, Escherichia coli
MTRKPRRHALSVPVRSGSEVGFPQSLGEVHDMLYDKSLERDNCGFGLIAHIEGEPSHKVVRTAIHALARMQHRGAILADGKTGDGCGLLLQKPDRFFRIVAQERGWRLAKNYAVGMLFLNKDPELAAAARRIVEEELQRETLSIVGWRDVPTNEGVLGEIALSSLPRIEQIFVNAPAGWRPRDMERRLFIARRRIEKRLEADKDFYVCSLSNLVNIYKGLCMPTDLPRFYLDLADLRLESAICLFHQRFSTNTVPRWPWRNRSAIWRITVKSTPSPVTANGRARTYKFQTPLIPDLHDAAPFV

SEQ ID NO: 9188 - protein, 272 aa, Escherichia coli
MLYDKSLERDNCGFGLIAHIEGEPSHKVVRTAIHALARMQHRGAILADGKTGDGCGLLLQKPDRFFRIVAQERGWRLAKNYAVGMLFLNKDPELAAAARRIVEEELQRETLSIVGWRDVPTNEGVLGEIALSSLPRIEQIFVNAPAGWRPRDMERRLFIARRRIEKRLEADKDFYVCSLSNLVNIYKGLCMPTDLPRFYLDLADLRLESAICLFHQRFSTNTVPRWPWRNRSAIWRITVKSTPSPVTANGRARTYKFQTPLIPDLHDAAPFV

SEQ ID NO: 9189 - protein, 353 aa, Alcaligenes faecalis
MSYQLTIEPLGATIEVEEGQTVLDAVLRQGLYLPHACGHGLCGTCKVQVCDGEVDHGAANPFALMDFERDDGKTLACCATLQADTTIEADIDEEPDARVIPVRDFAATVSRVEDLTPTIKAIHLQLDKAIDFQAGQYVQVEIPCVGSRAFSIANQPADVAATKGIELNVRKLPGGAGTTWLHEQLKAGDRLRVAGPYGRFFVRESARQPMLFMAGGSGLSSPRSMIVDLLSRGCTLPITLVYGQRSHEELYYDAEFRALAEQHANFTYVPALSHEPEGSDWDGFRGFVHEAAKAHFGGSFAGQKAYLCGPPPMIEACISTLMQGRLFERDIYTEKFLSAADAQAARSPLFRQV

SEQ ID NO: 9190 - protein, 390 aa, Triticum monococcum
MASEMSKDVKFSEEEVTSHPRVLEGEEQAVAPARQSSIFALTLDELQYSVCEAGRNFGSMNMDEFMSNIWNADEFQAATGGSLVGMEVAPVVGAGGGGGGLDAGGSNLARQESFSLPPPLCRKTVEEVWAEINREPRPVHAQPQAARPSQQPPVQPSVPANDRQGTLGELTLEQFLVKAGVVRGSGAGGQAPVPVGMVHGQMNPAQQGQQPGPMMYPMAPANGMFPVMGDGMGFIPNGYAGMVVVPPPPPPQGGVGIVSPGSSDGRSAMTQADMMNCMGEGAMMENGGTRKRGAPEDQSCERSIERRHRRMIKNRESAARSRARKQAYTVELEAELNHLKEENARLKAEEKTILLTKKQMLVEKMIEQSKENVNAKKGGPLSRHCGSCIW

SEQ ID NO: 9191 - protein, 372 aa, Novosphingobium aromaticivorans DSM 12444
MDKATRVLVIGGGVGGLAVAIGLHQRGIDVEVVERDKDWKVYHVGIIVQANFVRALNMLGVGDDAVKAGYAYRGARFLDLDGNVLKELPGDTAVDGLPSDLGLTRPALHKVLTEKVLGLGIPVRLGVTFESLDDRGDAVDVVFTDGTRGTYDVVIGADGNYSAVRKALWPHAKPQYTGQGVWRYNVPRPEGLEWSDIYLGKDKGKAGYCPLTPEEMYIFAVFEEPGNPRFAPETLADEMRARLEGYGGLLAEAATHVTDPALVVYRPLEACIMPAPWYKGRIVVIGDAAHSATPHLGQGAAMAVEDAVVLAEELAERAVDDALAAFMERRFERAKLVGTSSIQLGEWDMHPERAGDPVALTDQIRRKLAEPV

SEQ ID NO: 9192 - protein, 389 aa, Novosphingobium aromaticivorans DSM 12444
MPARPNMPEAYIIDAVRTPVGRKKGGLAHLHPADLAAHPIRELMARHDFDPALVEDVVWGCTETIGGQAGDIGRTAWLVAGLAEDVPGVTVDRQCGSAQQAVHFAAQGVMSGTQDIVVAGGSQAMNRIPIMAAMTAGAAYGFESPFIGAKGWDARYGDQEVNQIRSAEMIAEKWNLSREEMDAFAYESHRRAQYATEQGWFRNEIVPLEGLDRDETIRPGTTLEGLASLSAVREGGRVTAGNASQNSDCAAALLIVSERAVKEHNLKPRARIHHMSVRADNPVWMLTGPIPATRYAMQKSGMKLSDIDLFECNEAFASVPMAWMKELDIPHEKVNVSGGAIALGHPIGSTGAKLMTTLLNALERTGGRYGLQTMCEGGGQANVTIIERL

SEQ ID NO: 9193 - protein, 400 aa, Novosphingobium aromaticivorans DSM 12444
MREAAIVSTARTGVGKAYRGAFNDTEAPVLSSHVVNAAIERAGIDPARVDDVYLGVGNHWNTQSYNLGRLTVHGSVLPDTTAGFTLDRKCSSGLNAIALAARGIMCNEIDVAVAGGMESISLTINKHAPAFRNRSEFIKAADPHAYMVMIETAEIVAERYGVSREDQDRFAALSQQRAAAAQEAGRFDDEIVPITVTKALFDKEGNETGKEQVTLDRDEGVRAGTTYEALAGLKPVFKGGQVIAEGRHVTAGNASQLSDGASAQVLMDLDTARAEGRPVLGIYRGFQVAGCGAEEMGIGPVFAIPKLLDRAGLKVEDIGLFEINEAFASQAVYCQQKLDIDPERLNVNGGGIAIGHPFGMTGSRLVGHALIEGRRRGVKYAVVSMCVAGGMGAAGLFEVA

SEQ ID NO: 9194 - protein, 400 aa, Novosphingobium aromaticivorans DSM 12444
MTQAFVCDAVRTPIGRLNGSLSGIRADDLAALPLRALMERNPQVDWAALDDVVLGCANQAGEDNRNLARMALLLAGMPEAVPGATINRLCGSGMNAVGIAAQAIRSGDADLMIAGGAESMTRAPYVLGKAGSAFGRDQKIEDTTLGWRFVNPAMKRAFGVDTMPQTAENVAAQWNVGREEQDRFALASQDKTAAAQARGRLALEIVGVSVPSGKGQTREFTQDEHPRSTTLDVLSGLRPVVHKEGTVTAGNASGLNDGAAAMIVASEQAAAANGLVPRARIVAMASAGVAPRVMGIGPVDAARRLFARTGLSMERMDVIELNEAFAAQAIPVLRDLGVDPLDPRVNPNGGAIALGHPLGMSGARLVQTAVQELQETGGRHALAMMCVGVGQGIAMILERV

SEQ ID NO: 9195 - protein, 210 aa, Ammopiptanthus mongolicus
MRNPSSMAVKQNQNLKKNNNNIGAEVQVHYRGVRKRPWGRYAAEIRDPARKTRVWLGTFDTAAEAARAYDAAARQFRGLKAKTNFPSENNQCSTVESSTPDSPEREVTRRCDDVCGIDRFPFLPLQTRHVAFGGEGLDVAPVRPVFFSEPAVGTEFVSQSCPIRFDPEPVEFNGGFGIGAQSESDSSFVVDCKPKTVLNLDLKLALPIDA

SEQ ID NO: 9196 - protein, 559 aa, Lactococcus lactis
MDLVEELVNVVGKKNVITNKAKSLRFRKGYRSGKGDAVAVVFPTSLMAMWRVLNVLHDNNIIIIMQAANTSLTEGSVPAPGYDRSAVVVNGMKIKDLQLINNGEQVLAFPGTTLFHLENELRPLKREPHSVIGSSNLGASVIGGINNNSGGALIRRGPAYTELSLYVWIDEHDEMHVVNHLGIDLGKTPEEIITNLQNRNFDLNQVPATEHHGSMFHHEQVVRDVESDKPIRYNANPKELYEVSGSSGHVAALAVRLDTFPMDKKTQMFYIGTNNPDELEDIRRHIMTTFKELPVSGEYMHKNAYKLAKKYGKDSLIVIEKIGTGHLPQMFALKAWGERFLKHIPFFKPYFPDRLLQTLSNLFPNQMPKRLDDYYEKYDHYLQLKMAGNGIEEAREYLKSYFDKASGDYFEADANETSKAATHRYVTAGVAIRYQELKQDSIDILPLDIALASNDYKWFEYLPKEIEDKIEHKIYYGHLLDHVMHQDYILKPGVDAHELKKEMLKILDERHAVYPAEHNVGHLYLAAPALIKHYKKNDPTNSFNPGVGKQTMSKYWGEY

SEQ ID NO: 9197 - protein, 275 aa, Dichelobacter nodosus VCS1703A
MNHRRPFLKWAGSKSKLIPWIARAIPQTARRLIEPFAGSAALSLALDFEAYVLNDINRDLIHLYQTLKIEKTAFIDYARSFFTAEHNQENRFYDLRAQFNDSDDIFERSALFLYLNRHGFNGLCRYNRAGQFNVPFGRYRAPYFPEAEMRHFIEKSERFTLLCGDFQTAFHQANRDDIIYCDPPYVPLSATASFTAYAQKGFTLNEQRQLAQMAQQTAPRVKSILISNHDTDFTRTLYHGARFNCFSVRRSIAAQGNCRKKVKELLAIYNENAAF

SEQ ID NO: 9198 - protein, 586 aa, Dichelobacter nodosus VCS1703A
MRRKVSFIAHKMQMLFYRLTPMRHWYQRITPKNVQYDFWAGLTGAVMVLPQGIAFSLIAGLPPEFGLYSAIVVQIIAGFWGSSLHMVSGPTIALSIVIPNIVSNYAAMGSPEYIGLSLTLMLIVGVIQLAFGLFRLGGLVNFISHTVIIGFTAGSGVLIMLSQLPTYLGIDIARGLSFIDKWGAIYQQLPHIHWHSFIVATVTLITAISLRIYRKKLPFMLLGMIAGAVTASFLGGEEAGIAMLGALPEKLPRFIAPPFDILKISAMIPSAFALALLGLIEAVSIARSLSIRSHQRIDGNQEFFGQGLSNIIGSFLSCYVGSGSFNRSAVNYDAGAKTPFALLFSSLIVATVIITIPWITRYLPMAAMAGVIMLAGYNLFDITHIKIIARTSTNETAIILVTFLSTLFLNLEFAIYVGVILSLVLYLQKTAHPVIVEVDFSSITPAVLHQDNPPKISVVQINGSLFFGAIDHIHRTMEQYAANHQWQHVIIMAEGINLIDISGIEFLISERERLLKYGGDLYIIGLKPHVREELRKSPYWRDLDGDEKIFESTYSAFRDICKKLEIQNYRDFMRLLFHDYNKLGLN

SEQ ID NO: 9199 - protein, 685 aa, Dichelobacter nodosus VCS1703A
MTKSILLVATHRGAGLTSSVLGLSHAIEKLGVKVALHKPVLQCACEASCACNSAATCTDRALSISPERIQQALKNQKIDELMEEALQHFVAAKADADIVVMEGLLETPNAPYAHLINQKIARSLGADVIVVSSADVESIDRLERRLSFAGEYFAGRLLGAIINRVGGEGNLTQECLQKSSCFNDALPLLATISENAELAAPRVLDLQRHLDAEILFSGEINSRRIYDYVLFARSVQNAIPVLRDGVCVFSPADRDDTLMAVTTAVASGTHLACLVLTGEERSDDAVMRLCKPLLEKSKLPVLRIKRDSWESTRAMEGFNAHLAADDKERIEKIRTFFVEHLNKEWIKNYVARGDEQRLSPAAFRYNVVQKAIAAKKTIVLPEGDEPRTVVAASQCAARGMAKCVLLAKPERVHAVAAEQGVTLGDGISIIDPEQAREQYVARLVELRKHKGMDEATARSQLENNVMLGTLMLEAGEVDGLVSGAVHTTADTMRPPLQLIKTAKGASMVSSVFFMCLPEQVLVYGDCAIVPKPTVDDLAQIAIQSNDTAKAFGIEPKVAMISYSTGNSGQGEDVEKVKAATAKVRELRPDIIVDGPMQYDAASVASVGRAKAPNSPVAGQATVFVFPDLNTGNTTYKAVQRTAHAVSMGPVLQGMRKPVNDLSRGALIEDIVYTIALTAVQATLAE

SEQ ID NO: 9200 - protein, 353 aa, Dichelobacter nodosus VCS1703A
MRFVDEVVINVKAGKGGNGIVSFRREKYIEFGGPDGGDGGDGGSVYLRASDGLNTLSDFRYTRHFEAENGAAGEGRNKRGRSGEDLYIDVPLGTQVFVAETDELMGDLTAVGQTLLVAKGGFHGIGNTRYKSSVNRAPRQCKAGGLGEERVIRLELKLLADVGLLGMPNAGKSTLIAQVSSAKPKIADYPFTTLHPNLGVVRVGALQSFVMADIPGLIAGAADGMGLGHQFLRHLARNRILLHLLDCSPMSDSQNPITDFEQVSAELIKYDADFAQIPRWLVLNKMDTLPPELWQQKQEEIVRALNWQGKVFSISAAAGIGTAELCTAIMQELTAMKANQTAENDEPNAPELI

SEQ ID NO: 9201 - protein, 181 aa, Dichelobacter nodosus VCS1703A
MIDLSKKLVLFDRDGVLNEDRREHVRAPEELLLFDGALAALADLTRAGIRIGICTNQSGIERGYFDEAMLTQIHQYLCARAATFGARIDRIVFCASADNAHPWRKPNAGMLLDQARYFAVDLKGVPFVGDNIIDVQAARAAGAQPVLVKTGKGCLVAKEYAQELSDVLVYDDVQTAIKDWL

SEQ ID NO: 9202 - protein, 549 aa, Dichelobacter nodosus VCS1703A
MTEPITPAANFIRNIIVSDVENGKNDARVHTRFPPEPNGYLHLGHVKSICLNFGMAKEFNGLCNLRFDDTNPEKENEEYMSSIKEDVTWLGFKWHVLRHASDYFPQLLAYAYQLIEQGDAYVDSQTADEIRDTRGTLTEAGKNSPYRDRSPEENKRLFDEMVAGKHPDGSLVLRAKIDMASPNINMRDPVIYRIRHTDHFHAGDEWKVYPMYDYTHCLSDMIEGITHSLCTLEFEDHRPLYDWVLDKLQTPCHPQQIEFSRLNLEYTVLSKRRLIQLVQEKHVNGWDDPRMPTIAGLRRRGIPASGLRDFCERIGISKADGTIEMSYFESVIRDRLNQEALRRMVVLDPIKLTITSLSDDFRAVYDLPNHPQNPEMGTRKVPFSNTLYIERDDFSENPPKGWKRLAPNAAVRLRGSYVVICDEVIKDENGNVIELKCHHDPETLGKNPQGYKANGVIHWVSAADALTTEIRQYGLLFQEKNPMAAEHFLDTINPDSLKILHNAQAEPAIKAAAGTVYQLERQGYYAIDPDSCADHLVLNLTVTLRDGWK

SEQ ID NO: 9203 - protein, 442 aa, Dichelobacter nodosus VCS1703A
MNNTFSELGLSTQILRTISRHGYEKPTPIQARAIPLALQGRDLLLSAQTGSGKTAAFVLPILQQLAAEPTKSKLPRALIVIPTRELAQQVQDSVFQYSREFKELYSITLVGGTAYQKQIRALKKGVSIVVATPGRLLDHVREGHLDLSQIRYLVLDEADRMLDMGFSDDMHAIIKQCPQNRQTIMSSATWDGNVGKIAAGFTHNAEKIIIAPETSHIEEISYFTDDQAHKNAVLDRLLADEAVTQCIVFTATKSTTETVAHHLYENGFQAQFLHGDLQQQKRNRIIERFRNGQINVLVATDIAARGIDIPAISHVINYDLPRQSEDYVHRIGRSGRAGRSGVALNLVSLTDRAAMAHIERYLKRAIKTDVLEGLEPTKVPSKKKPSSGRGKTWQARGAKNGSRANSEAKSARGNWHDRKTGKITVARKRSRAEGKSFAHRAS

SEQ ID NO: 9204 - protein, 642 aa, Dichelobacter nodosus VCS1703A
MGKIIGIDLGTTNSCVAVMDGDSAKVIENSEGTRTTPSIIAFSDGEVLVGQPAKRQAVTNPKNTLYAIKRLIGRRFDEKEVQKDINLVPYNIVKSDNGDAWVEIDGKKMAPPEISARILQKMKKTVEDYLGETITEAVITVPAYFNDSQRQATKDAGRIAGLEVKRIINEPTAAALAYGIDRGAKDAKIAVYDLGGGTFDISIIETIDLDEEGQQFEVLATNGDTFLGGEDFDRRIIDYLVNEFKKEQGIDLTSDSLALQRLKEAAEKAKIELSSSQQTDINLPYITADASGPKHMNLKLTRAKLESLVADLIERSLEPCRIAMKDAGLSNSDITDVILVGGQTRMPKVQEAVKNFFGKEPRKDVNPDEAVAMGAAIQGGVLGGQVKDVLLLDVTPLSLGIETLGGVMTKLIEKNTTIPTKASQIFSTAEDNQSAVTIHILQGERQQASANKSLGRFDLSDIPPAPRGMPQIEVSFDIDANGILNVSAKDKQTGKEQSIIIKASSGLSDEEVARMVKDAEAHAEEDRKFQERIETKNSAESMINGVEKAISELGDEVTSDEKEKTEAAIKALREVMKGEDSDAIKEKTNALMEAASSIMQKAYAKMTEKQQSDDGAGTQNADHKEDDVVDADFEEVKSDKKD

SEQ ID NO: 9205 - protein, 252 aa, Dichelobacter nodosus VCS1703A
MLRIENLHVSVEQKSILNGVNLHIPAGEVHAIMGPNGSGKSTLANVIAGYPDYQVTAGNVWFKDQDLLALDPEERAREGVFLAFQYPVEIPGVSTLYFLKTALNAKRKHHNLPPLDAIDFHQFVMERLQQIKMGEDFLKRAVNVGFSGGEKKRNELLQMSVLEPDLAVLDETDSGLDIDALRVVADGVNQLMDGKRSFLVITHYQRLLEYIVPDVVHVLVDGKIVQSGSKELALELEASGYQDYRGARGESR

SEQ ID NO: 9206 - protein, 394 aa, Dichelobacter nodosus VCS1703A
MQFVLVLNCGSSSLKFAVMNPTSGDVLLNGTAERLGHDVGSLTVKDESGKAVQEIKPGTHAQALELIVETLKTKNLMDKIAAVGHRLVHGGEFFKESVVINNEVREKVAECIRLAPLHNPANITGIEAALKVFPKLPQVGVFDTAFHQQMPEKAYLYPLPRKFYEEFHIRRYGFHGTSFRYIASQLESVTGLKNPRTVVCHLGNGGSLAAIKDGHSVDTTMGLTPLEGIVHGTRCGDIDPAIIQILQKQFHISATEMNEILWKKSGLLGLSGISNDCRSLEEAMAEGNEAAIRALEVYCYRLAKHIAAQMVALNGCDALVFTGGIGENSAFVRANTMEQLAFLGFELDKKANEETSRGKQGKISTANSKPVWVIPTNEELLIARDTAQLSGMTR

SEQ ID NO: 9207 - protein, 312 aa, Dichelobacter nodosus VCS1703A
MTVFTGNANPQLARQIVQHLGLPLGNATVSKFSDGEIQVEIRENVRGKDVFIIQPTCFPTNDCLMELLLLSDALRRSSANRITAVMPYYGYSRQDRRPRSARVAISAKVVANMIARVGIDRVMTLDLHADQIQGFFDFPVDNIYSTPIVLNDILSKDIKSPVIVSPDIGGVVRARAVAKRVGAKLAIIDKRRPRPNESEVMNIIGDDVSECSCILVDDIVDTAGTLSNAASALKERGAKNVTAYCTHAVLSGNALANIANSGLDELVVADSIPLREEAKSCEKIRVLSIAGLVAESIRRIHVEESISSLFVD

SEQ ID NO: 9208 - protein, 857 aa, Dichelobacter nodosus VCS1703A
MQMSKKFTARFQEALSAAQSLAVGKDHAYIEPLHIFSALLDQEGSSIIAIVQRAGAQIGALRQAVMQALERLPRVKNPTGDVNISPESMRLLNLCDKYAQQNGDEYISSELFLRAVYDAKGDLEQLLRANGLEKAAVVAAIDAVRGGEAVTDEYAEDKRGALKKYTLDVTQRALDGKIDPVIGRDEEIRRAMQILQRRSKNNPVLIGEPGVGKTAIVEGLAQRIADRAVPESLKGKRLLSLDLAALLAGTKYRGEFEERLKAVLDEITKADGQIILFIDEIHTMVGAGKSEGSLDAGNMLKPALARGDLHCIGATTLDEYRQYMEKDAALERRFQKVIVDEPSVEDTIAILRGLQERYEVHHGINITDPALVAAAQLSHRYISGRKLPDKAIDLMDEAAAQIRMELDSKPEVMDKIDRRLIQLQIERMALEKETDAASKRRLSDLEAEIAAQEKEYADLEEIWLAEKAGTQGAAEIKEQLDKLRVELEAAKRRGDFARASEIQYGLIPAKEKQLLENEQQTEQRPHRLMRNKVTAEEIAEIVSRWTGIPVAKMMEGEKERLLHLETVLNERVVGQKTAVEAVANAIRRNRAGLSDPKRPIGSFLFLGPTGVGKTELCRTLAQFLFDSEENMVRIDMSEFMEKHSVARLIGAPPGYVGYDQGGYLTEAVRRKPYSVVLFDEVEKAHSDVFNTLLQVLDEGRLTDGQGRTVDFRHTVIIMTSNLGSDMIQLLAEKSYEEMKSAVMEIVMAHFRPEFINRIDEAIVFHGLAKTHMYRIAQIQLERLRQRLQTRELLLSVEEDAINQLVELGYDPLFGARPLKRAIQNHIENPLAQALLAGQYLPQSTITIGFDGTNFTFH

SEQ ID NO: 9209 - protein, 106 aa, Dichelobacter nodosus VCS1703A
MFAVIETGGKQYKVKPGQRLRVESLAGEVGDKIAFDKVLLVAAGEEVSVGAPYVAGGSVQATIANHGRHKKVTIIKFRRRKHSMKRQGHRQNYTEIVIDTINGKTE

SEQ ID NO: 9210 - protein, 257 aa, Dichelobacter nodosus VCS1703A
MSLYPQEILTVTIEKGIGKANGRLGYLSILGFLGGAFIALGYLSYIKVVGGMPHEWGSFATLLGASVFPIGLIGILIGGGELITGNMMVVSVAYFAKRVSITKLARNWIIISSTNLLGALAVAWFFGHYLGITEGALLPETLAVAQSKVDMDFSRAVVSGIGCNWMVCMGVWLAYGAKSMSGKILGIWFPVMIFVLLGFQHVVANMFVIPAAMFAGANISMSQFFYNLCSVYLGNTLGGAILVGGMYFMAYRQVLTH

SEQ ID NO: 9211 - protein, 320 aa, Dichelobacter nodosus VCS1703A
MTSIHWINNGENVLALEAAAIAAQRLTDDFGRACETLMKTRGHVIVSGMGKSGHIAAKLAATFASTGTPAFFVHPSEAGHGDLGMITAADTLLMLSFSGESGELLAMLPALKTLAVPVIAMTGNPQSHLAQNADIHIPIHIEREACPLNLAPTASTTAMLAVGDALAISLMQARDFNDEDFARSHPFGRLGRRLTIKVADIMRPFAQLPLNLPTDSVQTALFQITDKRLGMTLIAQEKKLLGIYTDGDLRRTLGAFSNALHLPLEHVMTKNPKTITEHCLAAEALHLMQQQQITVLPVLTIEQQLCGAVHIHDLIAAGVA

SEQ ID NO: 9212 - protein, 413 aa, Dichelobacter nodosus VCS1703A
MALIVQKYGGTSMGSVERIETVADRIVRARQAGHDVVVTVSAMSGETNRLIALAQRFAAQPSPRELDVLMSSGEQVSMALLAIALEKRGCPALSLAGWQVGIFTDSQHTKARIQHIDDGAIYRALSAGKVVIVAGFQGVDEAGDITTLGRGGSDTTAVALAAVLKADECQIYTDVDGVYTTDPRIEPRARKLEQISFVEMLEMASLGSKVLQIRSVEFAGKYHVPVRVLSSFSDDETGTLISSVEGAIIEATHVTGIAFTRDEVMIQLMHLPDDMNTLYQILRPIGCADISLDMVAQTRNDDGSINFSFIVPHQEKDRVIEFIVEQFSHIAALSVLQTEIAKISLVGLGLRSHTGIIGRILQALMQENIPVHCFATSETRVSLVTDLLYLERAVHCLHDAFQLEKADECRESF

SEQ ID NO: 9213 - protein, 253 aa, Dichelobacter nodosus VCS1703A
MPFLKTLFRGALCSIACGASLFCAADVYRIIRNYPELMPVSYMDEKGSPTGFETELIRKIAEQAQLDLKEEFVANFGDTLTALENGKADLAMATISVTPARQQIFDFTTPYFRVNPFAFITKDDSIKTIQDLANKKVSVWTGSNHEQKIKEIQKEGTGSVIPAKSIFLAVKAVIQGEADVAVGDDAYMLNFADRYKQHNLKAVIDRSTEPESYAIAVRKGDQALKKKIDDALLQLKRDGTIDALTKKWYPNRT

SEQ ID NO: 9214 - protein, 299 aa, Dichelobacter nodosus VCS1703A
MNTRAGMIAVVGRPNVGKSTLINHLLGQKIAITSRKPQTTRQALLGIYSEDDVQMVFVDTPGIHRDGKKAINRQMNRAAWQSMHDVDVILHVSEVKRWEEDDARIAAEIAQMKVPAVHVVNKIDRLKDKADLFPELQARQSIANWAAIVPVSAARSQNLEELLRVLAPLLPEQPFLYDQSQVTTASMRFLAAEIVREKLFRYVHQEVPYELGVIIEQYQLIGKTVHIDATILVERESQKGIVIGVGGKTLKAVGQAAREELEQILEQKVMLRNFVKVADNWRDNHRILQSMSAGSGTEL

SEQ ID NO: 9215 - protein, 109 aa, Dichelobacter nodosus VCS1703A
MDTLERIKQQIASMPVLIYMKGTPDMPMCGFSAKAVQCLKDLETSFAYVNVLQDPEIRATLPKYANWPTFPQLWVNQQLIGGCDIIVEMYENGELEKLLENVVWPESME

SEQ ID NO: 9216 - protein, 640 aa, Dichelobacter nodosus VCS1703A
MRKSLIIWGGLILLFLALVGQVNQSGMSAQSRQVSYSQFLNRVDNGEVKSVDINVQTMTIVFTDTSGNKYLTHNPEINTSALVGQLLKNNVEIVSEPVEQESVLMRILINLLPVILLVALFLFVSRQVQGGGGRGGAFSFGKSKARLIPEDKIKVTFADVAGADEAKEDVAEMVEFLRAPAKFSRLGGQIPRGVLMVGPPGTGKTLLARAIAGEAKVPFFTISGSDFVEMFVGVGASRVRDMFEQAKKHAPCIIFIDEIDAVGRQRGAGLGGGHDEREQTLNQLLVEMDGFEGNEGVIVIAATNRPDVLDPALLRPGRFDRQIVVDLPDLKGREQILKVHVRKKPLSQDVVIRDLARGTPGFSGADLANLVNEAALFATRRDRDEITMKDMEDAKDKIMMGAERRSMMMSDKEKEMTAYHEAGHCIVGRLVPNHDPVYKVTIIPRGRALGVTMFLPDHDRYSYSKEHLESQISTLYGGRLAEELIYGKEQVSTGASNDIKRATQIARNMVTQWGLSEKLGPLLYAEDEGEVFLGRSVTKHKNVSEETAKLIDLETRAIIDRNYQRAQNILEENQDILHEMTKALVKYETIDEAQIDDLMNRRPVREPKDWNQPENGHSDQDGMGNITVELNNNDKPAEQC

SEQ ID NO: 9217 - protein, 382 aa, Dichelobacter nodosus VCS1703A
MKQEHGDTWAYFDYSASTPPDAEIVSHYYHHLLHDFANSGSAHALGRAQAEQIATARADFAAAIAADPAEIIFTSGATEADNLALKGAVGYHGCKNPRIITVQTEHKAILDPLSELARSGVKVDVLPVDERGLLSLDVLKNALQQPATLVSVMAVNNETGVLQPLRQIADCVHAAGGKFHVDAAQALGKIAVNARDWDADLISFSGHKCYAPKGVGALFVRHFPKMRLQAQMHGGGQERGLRSGTLPSGLIMAFCAAAVKVQHDLTNRRTIVLQHAQTLQAALPLSMHLNVPLDPEIHTPHILNIDSGLPAEQVLAAASDAKIALSAGSACQSARGEASHVLQAMGKKDAAARSLRVSLSHITQDWELARLIDLLQRLSRGG

SEQ ID NO: 9218 - protein, 755 aa, Dichelobacter nodosus VCS1703A
MNHSLKEEALHFHRYPTAGKISVTPTKSLTNQHDLSLAYSPGVAFACEEIQNDALQADFLTARANLVAVISNGTAVLGLGNIGALAGKPVMEGKGVLFKKFAGINVFDIEINETDIDKFVDIVASMEPTFGGINLEDIKAPECFAIEKKLQARMNIPVFHDDQHGTAIIAAAAVLNALKIQNKNCADVKVVVSGAGAAGLSCVDMFIAVGIKAEHIIVCDSKGVIYAGRDGLDERKAQYAAQTSARTLADAMVGADIFLGVSKAGLVSPEMVKSMAEKPLILALANPTPEIMPEEIKAVRDDAIIATGRSDYPNQVNNVLCFPYLFRGALDVGATTINEAMKRAAVEALATLAQLPADEEVISAYDGQRLIFGEEYIIPKPFDARLITTVPVAVAQAAMKSGVARRPIADMNAYIDQLKALFNPHYRVMKPILERAKAQPLKVVFAEGEDLRTLRAVLNCVQEKICTPILIGWRAAIVARLQEYHLPLDSDRDIQIIEPDLHYKNCWQTYQTLCANAGIDPEAIQNQPEMQATVLAALLVHLGHADTLICGTNGHYDHHRQQLDLILALKDGMKTSAALDMLLLPKESVFIADTHIHHQPNAQEITHITLLAEKMLRQLGITPRAALLSRSHFGECPDLESHRVMQEALAAIQKMQPNLEIAGEMQADVALSAEIRHHAGAEKGLNTSANLLIMPNVDAANIAYHVMKVWSNGSAVGSMLLGLQRPAQLMNQEVTARQIFTMAAIAVVAAQTDND

SEQ ID NO: 9219 - protein, 155 aa, Medicago truncatula
MDAFTERQEALVNSSWEAFKKNIPQLSILFYTLILEKVPDAKDMFSFLKNFDGIPHNNSTLEAHAELIFEMTRDSAVQLRAKGKVDVADDVTLEYLGSVHVQKGVIDLHFMVFKEAMLKTIKKAVEDKWSEELDCAWGIAYDELAAAIKKAMGWP

SEQ ID NO: 9220 - protein, 333 aa, Bradyrhizobium sp. ORS278
MSGRKKPLVVVTRKLPDSVETRMRELFDARLNLDDEPMSQEQLADAVRTAEVLVPTVTDHISADILNQPDCKLRMIANFGNGVDNIDVAAAVARGITVTNTPKVLTEDTADMTMALILAVPRRLIEGASVLTEGKNWAGWSPTWMLGHRIGGKRLGIIGMGRIGQAVARRARAFGLQIHYHNRRPVAPVIADELGATYWESLDQMLARMDIISVNCPHTPATFHLLSARRLKLIRKDAYIVNTARGEVIDEETMTRLIEAGDIAGAGLDVFEHEPAVNPRLVRLAKAGKVTLLPHMGSATIEGRVEMGEKVIINIKTFLDNHRPPDRVLPSML

SEQ ID NO: 9221 - protein, 631 aa, Bradyrhizobium sp. ORS278
MGKVIGIDLGTTNSCVAVMDGKSSKVIENAEGMRTTPSIVAFSDDGERLVGQPAKRQAVTNPERTFFAVKRLIGRRYDDPMVEKDKKLVPYKIVKAGNGDAWVEADGKTYSPSQVSAFILQKMKETAEAHLGQKVDQAVITVPAYFNDAQRQATKDAGKIAGLEVLRIINEPTAAALAYGLDKSKSGTIAVYDLGGGTFDVSILEIGDGVFEVKSTNGDTFLGGEDFDMRLVSYLADEFQKEQGINLRNDKLALQRLKEAAEKAKIELSSTTQTEINLPFITADQSGPKHLTMKLTRAKFEALVADLVEKTIEPCRKALKDAGLTAGEIGEVVLVGGMTRMPKIQEMVKQFFGKEPHKGVNPDEVVAIGAAIQAGVLQGDVKDVLLLDVTPLSLGIETLGGVFTRIIDRNTTIPTKKSQVFSTAEDNQNAVTIRVFQGEREMAADNKMLGQFDLMGIPPAPRGMPQIEVTFDIDANGIVNVSAKDKATGKEQQIRIQASGGLSEADIDKMVKDAEANAAADKKRREAVDAKNHADALVHSTEKALAEHGSKVADTERRAIEDAVSDLKEALKGDDAEAIKTKTNTLAQASMKLGEAMYKQQAESDAARDAAKDDVVDAEFTEVDDDKKKSA

SEQ ID NO: 9222 - protein, 448 aa, Bradyrhizobium sp. ORS278
MTTILKGLPTGEKVGIAFSGGLDTSAALLWMKQKGARCFAYTANLGQPDESDYDEIPRKAMSFGAEKARLVDCRTQLVHEGIAAIQSGAFHISTGGATYFNTTPLGRAVTGTMLVAAMKEDGVNIWGDGSTYKGNDIERFYRYGLLTNPNLKIYKPWLDQQFIDELGGRAEMSAFLTAHGFNYKMSAEKAYSTDSNLLGATHEAKDLESLSSGIRIVNPIMGVPFWREDCAVRPETVVVRFEEGQPVALNGQTFTDPVALFLEANAIGGRHGLGMCDQIENRIIEAKSRGIYEAPGMALLHIAYERLVTGIHNEDTIEQYRMSGMKLGRLLYQGRWFDSQALMLRETAQRWVASAITGEVTLELRRGNDYSLLNTESPNLTYQPERLSMEKVEDAAFTPADRIGQLTMRNLDITDTRTKLKLYSDTGLLSGAEGAQIFQLGHDKGDKS

SEQ ID NO: 9223 - protein, 356 aa, Bradyrhizobium sp. ORS278
MKFLDEAKVYVRSGDGGNGCVAFRREKFIEFGGPNGGNGGRGGDVVIEAVDGLNTLIDYRYQQHFKAQKGENGMGKDRHGAGGKSIVLKVPVGTQIFDEDRETLIHDFTAVGERFVLAEGGNGGFGNAHFKSPTNRAPRHANPGQPGEERWIWLRMKLIADAGLVGLPNAGKSTFLSKVSAAKPKIADYPFTTLHPQLGVVNADGREFVLADIPGLIEGAHEGAGLGDRFLGHVERCRVLLHLVDATCEHAGKAYKTVRHELEAYGGDLTDKIEIVALNKIDAVDPDELKKQRDRLKRAAKKTPILISGATGEGVKEALRKLADVVGEQPVSSKAKNAVESAATEEPWAAPVPPQG

SEQ ID NO: 9224 - protein, 130 aa, Bradyrhizobium sp. ORS278
MRTMFAVIKTGGKQYRVAPDDVLEIGKIDGEPGTIVQLNEVLVVGGDTPVLGIPAVAGASVAVEVLDHKRGPKVIAFKKRRRKNSRRKRGYRDELTLIRVSEILTDNAKPTKGPRPKKAKAEAPAADAAE

SEQ ID NO: 9225 - protein, 266 aa, Bradyrhizobium sp. ORS278
MEAILRSHPADAMSITLETRDLTIRFGGHVAVNSVSCSFRPGELTAIVGPNGAGKTTYFNLISGQLTASSGSILFDGLDITGLSAPLRSRAGLGRAFQLTNLFPNLSVEENVRLAVQAQSGTHYDLLRPWMARRDLIARADAILDQVALGGRRSVTATTLSHGDQRKLEVALMMALEPKVFMFDEPTAGMSIDEVPVVLDLIARLKQDTSKIILLVEHKMDVVRSLADRIIVLHNGQLVADGKPAEVIASPIVQEAYLGVAPRSAA

SEQ ID NO: 9226 - protein, 402 aa, Bradyrhizobium sp. ORS278
MRDVFICDAVRTPIGRFGGALAKVRTDDLAATPLKALKAKHPNLDWAAVDEVFFGCANQAGEDNRNVARMALLLAGLPDSIPGQTLNRLCASGLDAVGAAGRAIRAGEVDLAIAGGVESMTRAPFVQGKATEAFSRSAEIFDTTIGWRFINPLMKSQYGVDSMPETGENVAEEFQVSRADQDAFAIRSQQRAGQAIASGYFAAEIAQVAVPGGKAGPIIVDKDEHPRPETTLEGLAKLKPIVRNPGTVTAGNASGVNDGAAAMILASEAAVKKHGLTPRARVLGLASAGVPPRIMGIGPVPAVRKLLERLGLKITDFDLIELNEAFASQGIACLRQLGVAEDADFVNPHGGAIALGHPLGMSGARIAMTAVHGLEVRGGKRALATMCVGVGQGVALAVEMVN

SEQ ID NO: 9227 - protein, 394 aa, Bradyrhizobium sp. ORS278
MPMSDDVVIVSAARTPVGSFNGAFANVPAHELGAVAIKAALERAGVEPGRVSEVIMGQILTAAQGQNPARQASIAAGIPVDSPAWGINQLCGSGLRSVALGYQALKNGDSDIVVAGGQESMSMAPHAQYLRGGVKMGSLEFVDTMIKDGLWDAFNGYHMGNTAENVAKQYQITRAQQDEFAVASQNKAEAAQRAGKFKDEIVAVTIKGRKGDTVVDTDEYPRHGATLDAMAKLRAAFEKDGTVTAGNASGINDGAAAVVLMTAKQAAKEGKTPLARIVSWGQAGVDPKIMGTGPIPASRSALKKAGWNIADLDLIEANEAFAAQACAVNKDLGWDPAKVNVNGGAIAIGHPIGASGARVLVTLLHEMQKRDAKKGLATLCIGGGMGIALCVARD

SEQ ID NO: 9228 - protein, 418 aa, Bradyrhizobium sp. ORS278
MGRLVLKFGGTSVANIDRIRNVARHVKREVDAGHEVAVVVSAMSGKTNELVAWCTEASPMHDAREYDAVVASGEQVTSGLLAIVLQSMGIQARSWQGWQIPIKTSDAHASARIVGIDGSELIQRFQERKEVAVIAGFQGINAETGRITTLGRGGSDTSAVAIAAAIKADRCDIYTDVDGVYTTDPRVVPKAKRLDKIAFEDMLELASQGAKVLQVRSVELGMVHNMPIFVRSSFDKPEDIDPHANQPPGTLICSEEQIMENHVVTGIAFSKDEAQISVRQIEDKPGIAASIFGPLADANINVDMIVQNVSEDGKTTDLTFTVPATDYNRARETITAAKDKIGYQRMDAATDVAKVSVIGSGMRSHAGVAAKGFAALAARNINIRAITTSEIKFSVLIDAAYTELAVRTLHTLYGLDQA

SEQ ID NO: 9229 - protein, 68 aa, Bradyrhizobium sp. ORS278
MQGTVKWFNGQKGFGFIQPQDGGNDVFVHISAVERAGLAGLAEGQKLNYDVKTDKMRGKTSAENLSLI

SEQ ID NO: 9230 - protein, 308 aa, Bradyrhizobium sp. ORS278
MRGCVVVASLTVAALLACAGAQPGIAQSGAGEGLSPTLAAIKARHVVNLGYRESSPPFSFLDQAGRPIGYSLELCEAIVEEIGGEIDDPGLRIAYVKVTSDDRIDAVVAGRIDLECGSTTANAERSRQVSFSPLIFVAGTKLMVSKGSPVASATDLRGKSVVVTKGTTNEAAMREVDRKSALGLTVVTATDHEQSYQMLVDGKVDAFATDDILLSGLIARHKAQDKMRIVGDYLSYDPYGIMFRKDEPQLAAVVERAFRRLGSNHDLIPLYNKWFVRRLPTGERLNAAISPQLEQAFHVLDDSPAANN

SEQ ID NO: 9231 - protein, 327 aa, Bradyrhizobium sp. ORS278
MAATSSDKVDVLIYGPLRPILEKGFPDSFNVHHATTQADLEALPADVKGRIRGVAVTFHTVKTDAAVMASLPKLEIIASFGVGYDHIAAAHAGQHGIIVTNTPDVLTEEVADVALGLLIATCREFIKADRFVRAGEWSAKAYPLSVGSLRDRTVGMVGMGRIGQAIARRLEASLVPVVYHSRNPAAGVANKHYPDLLQMAKDVDTLVVIVPGGASTNRIVNAEVLKALGPRGVVVNVARGSVIDEQALVEALQSGTILAAGLDVFEKEPAVPDALKAMDNVVLLPHIGSAAIVTRNAMDQLVVDNLKVWFAGKPPLTPVPETPAKGR

SEQ ID NO: 9232 - protein, 622 aa, Bradyrhizobium sp. ORS278
MTDNRNTILAVILSGLVLILWQVFYNGPQMEKQRAQAQLQSELAKKQGPATQPDGTAPSATPQPNAAASGSPSAPGGAATTATGVVPRETAIAANPRVKIDTPRLSGSISLKGARIDDLAFVQYRETVDPNSPAIVLFSPSNTAEPYYAEFGWVNAAGAKVQVPDQNTVWQQDGANALTPATPVKLTYTNGDGLTFQRTISVDDHYLFTIKDDVTNAGSAPVTLYPYGLISRHGTPHVSGYYILHEGLIGYLGEKGLQEFTYKKMDDEKAAKFDITNGWLGITDKYWAAALLPMTDARLQANYSSKLVDNQHRYQTDYVENPQTVPAGGSATVSTRLFAGAKEAGVVGINFPLGGLGGYNQQLGLNHFDLLIDWGWFYFLTKPMFLALDFFFRFFGNFGVSILLVTVLVKLAFLPLANKSYASMAKMKAIQPQLQALKERYPDDRMKQQQEMMEIYKKEKINPVAGCLPVVLQIPVFFSLYKVLFVTIEMRHAPFIGWIKDLSAPDPTNLFTLFGLIPFDPTQLPLFGHYLALGIWPIIMGITMWFQMKLNPAPPDPTQAMIFNWMPLIFTFMLAGFPAGLVIYWAWNNTLSVLQQSFIMRRNGVKVELFDNIRGTFRKKPA

SEQ ID NO: 9233 - protein, 589 aa, Bradyrhizobium sp. ORS278
MCGICGEIRHSGQPALAALSLVNDAMQARGPDAAGLYVQGGIALGHRRLSILDLSSAAQQPMIDAALGLGIAFNGCIYNFRELRTELKAKGYRFFSDGDTEVILKAYHAWGKNCVQRFKGMFAFALWERDCGRVVIARDRLGIKPLYYTEGDGFFRFASSLPALLAGGGVDTSLDLTALHHFFSFHAAVPAPRTILNGVKKLEPATLLTIEPDGTRRRERYWHFNVGEQRPTDRAMTADEWSEAVLDAMTAAVDRRRVADVPVGVLLSGGLDSSLLVALLSKLGHQDIRTFSIGFDAVGGHSGDEFRYSDIIARTFGTNHEQIRIGGHRALEALPHAIAAMSEPMVSHDAVAFHLLSSEVAKRVKVVQSGQGADEVFGGYSWYPGFLSANDPVQSYQSTYFDWQHADLQRLLLPDMLGDDVSLAFVERFFAEHGGAAVDKVLQIDAEIMLVDDPVKRVDNMTMAFGLEARVPFLDHDVVELAARIPAELKVKNGGKHILKEAARRCVPAEVIDRPKGYFPVPSLRYLRGPFLDYVRDVLSDDKARTRGLYQRDFVDHMLQNPEAEMSPKGHSRLWQAALLEAWLQTHGI

SEQ ID NO: 9234 - protein, 390 aa, Bradyrhizobium sp. ORS278
MAEAYIVAAARTAGGRKGGRLAGWHPADLAAKVLDALVERSGAAPDQVEDVIMGCVMQTGEQSTNIARNAVLASKLPESVPGTSIDRQCGSSQQALHFAAQAVMSGAMDVVIAAGVESMTRVPMGLSSTLPAKNGFGHYKSPSMESRYPNIQFSQFTGAEMMAEKYGLSKDDLDEYAYNSHQRAIAATQAGHFKDEIVPLQITRADGSTDTHHIDEGIRFDVSLDGIKGVKLIAENGKLTAASASQICDGASGVMVVNERGLKSLGVKPLARVHHMTMMGGDPVIMLEAPLPATQRALQKAGMSIDDIDLYEVNEAFASVPTAWLKTTGADPSRLNVNGGAIALGHPLGGSGTKLMTTLLHALKQRNKRYGLQTMCEGGGMANVTIVERL

SEQ ID NO: 9235 - protein, 395 aa, Bradyrhizobium sp. ORS278
MTDAVIVSTARTPIGKAYRGALNATGGATLLGHAIGEAVKRAKIDPAEVEDVVMGAALQQGSTGGNIARKALLRAGLPVSVGGTTIDRQCASGLQAIALAARSVIFDGVEIAVGGGGESISLVQNDKMNSFQATDAALLEIKGDVYMPMIDTAEVVAKRYGISREKQDEYALESQRRTAAAQQGGKFNEELAPISTKMAVTDKATGNISFKDITLSQDEGPRPETTAEGLAGLKAVRGDGFTITAGNASQLSDGASASVIMSDKEAAKRGLQPLGIFRGFVAHGCEPDEMGIGPVFAVPRLLKRHGLTVDDIGLWELNEAFAVQVLYCRDKLGIDPDKINVNGGAISVGHPYGMSGARLTGHALIEGRRRKAKYAVVTMCVGGGMGAAGLFEVLQ

SEQ ID NO: 9236 - protein, 70 aa, Bradyrhizobium sp. ORS278
MSMGTVKWFNATKGYGFIQPDDGGNDVFVHISAVERAGLGTLREGQKISYEIVADRRSGKSSADNLRAAN

SEQ ID NO: 9237 - protein, 473 aa, Bradyrhizobium sp. ORS278
MTSFQDFNLADALTRALKEENYTTPTPIQAQTIPLALQGRDVIGIAQTGTGKTASFALPILHRLLENRIKPQPKTARVLVLSPTRELSGQILDSFNTYGRHIRLSSTLAIGGVPMGRQVRAVMPGVDVLVATPGRLLDLVQGNALKLSHVEFLVLDEADRMLDMGFINDIRKIVAKLPIKRQTLFFSATMPKDIAELADSMLRDPARVAVTPVSSTVERIAQRVIQVDHSAKPSLLAQLLKNEPVNRALVFTRTKHGADKVVKGLEKAGIPAQAIHGNKSQNHRERTLAAFRTGEIRTLVATDIAARGIDVDGVSHVVNFDLPNVPETYVHRIGRTARAGADGVAISLVAGADEMSYLRDIERLTKTTLPREDRRTPGQRDAAPAGQHQRQNGHGGGRPGMQNARSNEGGNAAKGPRRRRRSNAKMPPLPGNRQEPQRPPQGGGKAGSIQGVAFLHREGRPKNHAHNRNQRPN

SEQ ID NO: 9238 - protein, 551 aa, Bradyrhizobium sp. ORS278
MYAYDDIDRTLVNERVAEFRDQVKRRLSGELTEDEFKMLRLQNGVYLQLHAYMYRIAIPYGTLSSDQLRRLAHVARRYDRGYGHFTTRQNIQFNWIKLAELPDAMADLAEVGIQSMQTSGNNMRNVTSDQWAGVAPGEVEDPRIWAELLRQFTTLHPEFSFLPRKFKIAITASEHDRAAIKIHDIGLRLKKNEQGETGFEVLVGGGLGRSPFIAKTIKPFVHGHDILSYVEAILRVYNQYGRRDNIYKARIKILVHELGIEKFAAEVEEEWQQIRDGVLKLDQGIVEDIRSRFFYPAYETLPHMPDELKQAAHDAKFEAWRKNSVFPHKQQGYAIAVVSLKPVGKPPGDATADQMDALADIADRYSFGEIRVGHEQNLALPHVRKRDLPAVWKALEAIGLAIPNVNLVSDIIACPGLDYCSLANARSIPIAQEITRRFANHDTANLIGRLHINISGCINACGHHHVGHIGILGVEKNNEEFYQITIGGRADEGAELGTLIGPAVPYAEVADVVEDIVEAYLALRVSPEELFVDTVKRLGVEPFRERVYATR

SEQ ID NO: 9239 - protein, 644 aa, Bradyrhizobium sp. ORS278
MFPDLPSDVRRAYHDGRLDEFSGDPMSAVERLDGRQGAAPSAQEAVQDAVAAVEALTEPATPVRRSKLRPLLALAPYIARYRVRAFLALVALTIAALTTLLVPVAVRRMIDFGFTPKGIALINSYFSVMIAVVAVLALASAARYYLVMTIGERIVADLRRDVFAHLMSLSPSFFDSARSGELVSRLTADTTQIKSAAGASVSIALRNLLLFLGATAMMVFTSPKLSGFVLLAIPLIVLPLVAFGRWVRRLSRNAQDTLADASAYASELVGAIRTVQAYTSEKLAAGRFGGEVEQAYEAARVSTKARGVLTAIIIFIVFSSVVAILWVGSHDVLTGNISAGRLGQFVLYAAFAAAGLGQLSEVWGEVSAASGAAERLFELLHVKPEIIAPAHPTALPEPARGDIGFDRVSFAYPSRPDVRVLEDVSFAIRAGEKVAIVGPSGAGKSTLFHLLLRFYDPASGVISVDGVPVRSADPRKVRERMALVPQESVVFAASARENIRFGRPEATDAEVERAADLAHASEFIRRLPEGFETPLGERGVTLSGGQRQRIAIARAILRDAPLLLLDEATSALDAESETLVQTALEGLMKDRTTLVIAHRLATVLSCDRILVMDRGRIVEQGTHTSLVAANGLYARLARLQFETV

SEQ ID NO: 9240 - protein, 657 aa, Bradyrhizobium sp. ORS278
MSPRTDGRDPRDHEGKSMNANLRNFALWVIIVLLLLALFTLFQNPGQRASSQDITFSQLLTEVDQGNVRDVVIQGPEIHGTFKNGSSFQTYAPSDPNLVKRLYDAKVSITAKPPGDNVPWFVSLLVSWLPFIALIGVWIFLSRQMQGGAGKAMGFGKSRAKMLTEAHGRVTFEDVAGVDEAKQDLQEIVEFLRDPGKFQRLGGRIPRGVLLVGPPGTGKTLIARAVAGEANVPFFTISGSDFVEMFVGVGASRVRDMFEQAKKNAPCIIFIDEIDAVGRHRGAGLGGGNDEREQTLNQLLVEMDGFEANEGVILIAATNRPDVLDPALMRPGRFDRQVVVSNPDIIGREQILKVHVRKVPLAPDVNLKTIARGTPGFSGADLMNLVNEAALTAARRNKRMVTQAEFEEAKDKVLMGAERRSMVMTEEEKMLTAYHEAGHAIVGLNVPSHDPIHKATIIPRGRALGMVQSLPEADRHSHTREWCVSKLAMMFGGREAEVQKFGPEKVTNGATGDIQQATNLARAMVMEWGMSDKLGRVRYQSNEQEVFLGHSVARSTNISDDTARLIDSEIRGLIEAGEQEARRIITEKREDWETIAQALLEYETLTGEEILDLLKGKKPNRESAIEPSTPRASAVPPAGKPRPRPDPDPGLEPQPQA

SEQ ID NO: 9241 - protein, 375 aa, Bradyrhizobium sp. ORS278
MKIAVAKEIDPLEPRVAASPDTVKKFKALGAEIAVEPGAGIKSGLPDSEFTAAGATVSADALKDADIIIKVKRPEASELANYRRGALVFAIMDPYGNDAALKAMADAGIASFAMELMPRITRAQVMDVLSSQANLAGYRAVIEGAEAFGRAFPMMMTAAGTVPATKVFVMGVGVAGLQAIATARRLGAIVSATDVRPATKEQVESLGAKFLAVEDEEFKNAQTAGGYAKEMSKEYQAKQAALTAEHIKKQDVIITTALIPGRPAPRLVTLEMVKSMRPGSVLVDLAVERGGNVEGVKLGETVEIDGVKIIGFPNLAGRVAASASGLYARNLFSFIETMIDKKEKTLAVNWDDELVKATALTKDGAIVHPNFQPKA

SEQ ID NO: 9242 - protein, 238 aa, Bradyrhizobium sp. ORS278
MASIDRSLVAHLPLFAGLSPEDLAEVLREARSMRVPRNSAVFEQGADATSFFLLLHGHVRASKTTPTGDQIVVRYVVPGDTFGVAPAIGLQHYPATATAVDDSVVLAWPSVAWPRLVARFPSLAANTLQTVGQRLQETHARVVEMSTQQVEQRIAHALLRLANQAGRKLDHGVQIDFPISRQDIAQMTGTTLHTVSRILSGWEQLGLVESGRQKIVLREPHKIVLLAEQTSDATASRS

SEQ ID NO: 9243 - protein, 66 aa, Bradyrhizobium sp. ORS278
MAKGTVKWFNPTKGYGFIQPAAGGKDIFVHISAVQKAGLATLNEGQTIEYEEIANRGRSSAENLKV

SEQ ID NO: 9244 - protein, 570 aa, Bradyrhizobium sp. ORS278
MKVSPDSAADLIARLLKRRGVNRVFALCGGHIMPIWMRLDAAGIQIIDVRDERAAVHMAQAHAELTGELGVALVTAGPGMTNAITGIANAHVSRAPVLVLSGGNPRPQENRGGLQDMDHTQLVRSITRYARTVREPSLVLQELDEAIARAFGDGGEPGPVFIDFPVDTLRGIVPKALQLEEHLAPKPRTATRPDPAEVERAVELLWSARRVLVISGRGARGAGPELIGLLDRLGAVYLDTGESRGLVPDDHLSVVGAMRGAVMGDADVVLTVGRKLDFQLAYGSPAVFKDAKFVRISDTASELRDNRRGAAEILAAPAETLRAIVALAGNRESAVDKSWAAKLRASHQERAAKLKQSMAAAPSGSDARLHPNRVLSAIQDAIGNDAVVITDGGDFLSFARVGLSAPLMLDPGPFGCIGVGVPYGIAASLAYPDKPVVVATGDGAFGFNAIEVDTAVRHKAPVLIVVANNGAWQIEVHDQTVTHGKVVGTKLQFADHAAMARAFGMHAERVETEEQLGPAVQRALANRPALLDVVVTPEAVSSDAKTGLAWVPDLQPLAAWDEAERKWRGS

SEQ ID NO: 9245 - protein, 415 aa, Bradyrhizobium sp. ORS278
MPLSLPKQKIRVLLLEGVNDSAVRMFEASGYTEVERLPKALGSAELKRMLSGVHMLGIRSRTNLTADVLQAADRLMAVGCFSVGTNQVDLDAARRLGIPVFNAPYSNTRSVAELTIAEVVMLMRRIFPRSVSAHAGGWDKSANGSREVRGKTLGIIGYGNIGSQLSNLAEAMGMRVIFFDLTDKLRHGNTEPVESLDELLANSDVVSLHVPETPATANMIGERQIRHMKDGAYLINNSRGTVVDIDALASALREGKLSGAAVDVFPVEPASNADPFVSPLQGLPNVILTPHVGGSTEEAQDRIGGEVARKLIDYSDVGSTFGAVNFPQVQLPARPTGTRFIHVHRNVPGVLRQVNEAVSRHNINILAQYLQTDPEVGYVVLETDVVGGEGEELLSELRAVDGTIRVRVLYDHDRP

SEQ ID NO: 9246 - protein, 320 aa, Bradyrhizobium sp. ORS278
MSDSLHTVVVARKAIEAHNMASFELVPADDQPLPGFTPGSHIDVTLPNGLTRQYSLLNSATERDRYCIGVWKDANSRGGSKALHLDVNEGDRLQVSRPRNRFKIPKDIKRALLVARGIGVTPILSIADTLKAKKIPFELHYVFALMSPDSFRGTIEASSFADNTTYYKEATEDNQLLKAADLLADRPDDTELFICGVDWWMDPIIALAKQKGFAEERIHVERFTAKAAAALLDKVFDVTIKSTGATFKIPGDKTVTAFLEENGVKIATSCEQGMCGTCKTKVVDGDIDHRDKRLSAAQRAEGYFLPCVSRAKGDRLVLDL

SEQ ID NO: 9247 - protein, 395 aa, Bradyrhizobium sp. ORS278
MTTQHILTLNAGSSSIKFALFEHDAGPRETMRGQIEGLGSAAPHLQARLRGASLRDEPLDARRATDHETALAVVIDVLQSAVGRTTVDAIGHRIVHGGLVFTQPIVIADDVPARLETLNPLAPLHQPHNLAGLRAAHRAFPDALQVACFDTAFHRTHPWVSDTYALPRRLYDEGVRRYGFHGLSYEYVVSRLKEIAPREEKGRVVVMHLGNGASMCAIRDGRSIGSSMGFTALDGLPMGTRCGQLDPGVVLYLLQEKGMTAEAVTDLLYNHSGLKGLSGLSQDMRELEQAGTAEARQAIHYFVDRIRREIGAMAAVLSGLDAVVFCGGIGEHAWQVRESVCEGFDWLGIALDKSRNRAGETVISSDDSRVRIFVISTDEEMMIAQHAAELLDERR

SEQ ID NO: 9248 - protein, 211 aa, Bradyrhizobium sp. ORS278
MSSAEFFARGRERLRFDVPPALLDPEVIPTSGDSGTDRMLEIIAREQPIRPAAVLIPVVDHPEPTVLLTQRSPNLSSHAGQIAFPGGKIDVTDATPLDAALREAEEEVGLDRSFVDPIGYLDVYGTAFGFRILPTVARVRPGFSLKINKGEVDDAFEVPLAFLMDPANHQLHSKEFRGMERSYYAMPFAERYIWGATAGILRVLYERIYLS

SEQ ID NO: 9249 - protein, 438 aa, Bradyrhizobium sp. ORS278
MTKTAHPARRNGLSRRQLLKAGAGTAALLAAAKLNLPGGAFAQGAGPEVTAAKLGFIALSDAGPLFVAKDKGIFAKYGMPDVDVQKQASWGTTRDNLVLGSEGNGIDGAHILTPMPYLISAGKVTQNNQPTPMYILARLNLDAQCISVAKEYADLKLGLDTAPFKAALEKKKASGKSVKAAMTFPGGTHDLWIRYWLAAGGIDPDKDIETIVVPPPQMVANMKVGTMDCFCVGEPWNAQLVNQGIGYTAVTTGEIWNKHPEKSFAMRSAFVDKYPKAAKALTMAVMEAQQWCDKMENKQELATIMAKRQWMNCPVDDVAGRTAGKFDYGTGKVIENSPHIMKYWRDFASYPFQSHDLWFITEDIRWGKYEAGFDAKSLIAKVNREDIWREAAKELNVPAAEIPTSTSRGKETFFDGKVFDPEDPAAYLKSLSIKRIDA

SEQ ID NO: 9250 - protein, 134 aa, Bradyrhizobium sp. ORS278
MVQDSFAKVAPISDQAATIFYDRLFEVAPQVRAMFPADLTEQRKKLMATLAVVVNGLTDLPAILPAASALAKRHVGYGAKPEHYPVVGAALLWTLDKGLAEAWTPEVAEAWTAAYGTLSGFMIAEAYGKAQAAE

SEQ ID NO: 9251 - protein, 337 aa, Bradyrhizobium sp. ORS278
MSLTFAIPGELVDDYRFAPGQYLTLKTTLGGEEVRRSYSICSGPDDNEIRIAVKRVDGGAFSSFVTDELKRGDEIDVMTPTGRFGVALQPEAARTHVGFAAGSGITPILSIVKAVLAREPDSRFFLFYGNRTTAGMLFREQLEELKDRFLDRLSVFHVISGEEQDLPILHGRLDGEKVRLLLRSLVPAEAVDHVFICGPTGMSEEIEAACRALGIADDRVHVERFVSGAGGKPRPKIVVPDSAPPKAIAALIIDGKRREVPVAEGEAILDAALRAGVDLPFACKGGMCSTCRAKLSEGKAEMELNYSLEPWELQAGFVLTCQAKPVTERVVVDYDHM

SEQ ID NO: 9252 - protein, 302 aa, Bradyrhizobium sp. ORS278
MKTSRLLAYALFATMLAAPALAEDLTGTLQKVKETGTITIGYRETSLPFSYIDDNQKPLGFALDICGKIVDEIKATLKLDKLEVKLTPVSSATRIPLMANGTIDLECASTTNNLERQRLVSFSHTYFLTASRYVAKAASGLKTIDDLKGKTVASTSGTSNIKQLYEANTARQLGLNIVAAKDNAEGFLMVENGRADAYVMDDILLAGLVASAKAPSDYAISTDQFSMPEPYGIMLRKDDPAFKTVVDRATAKLYTSPEIATLYAKWFMTPVPPKGVNFNFPMTAVLQKAFAQPNDSGDPKAY

SEQ ID NO: 9253 - protein, 460 aa, Bradyrhizobium sp. ORS278
MSIFDDPFDAESRVNTGCICGEHRSPAEHDHAMALRCDPVVESQQKRYENVVASAVLRAVFPEAATRRAFLKTVGAATALAAVSQFFPLKTATEAFAETGAPEKKDLKVGFIPITCATPIIMAAPLGFYSKAGLNVEVVKTAGWAVIRDKTINKEYDASHMLAPMPIAISLGLGAQPIPFTVPAIENINGQGIVLSMKHKDKRDPKDWKGLKFAIPFDYSMHNYLLRYYLAEHGIDPDTDVQLRSVPPPEMVANLRADNIDGFLAPDNICQRAIYDGVGFLHILSKEIWDGHPCCSFAASRDFITTAPNSFAALTRAIVDATAYAAKAENRKQIAEAIAPANYINAPVTVLEQVLTGTYADGLGGVKTDPKRVDFDPFPWQSFAVWMLTQMKRWGQIKGEVDYKAVAEQIYLATDTRKVMTEMGLTPPAESYKSFSVMGKSFDPTKPDDYVASFKIKKAS

SEQ ID NO: 9254 - protein, 112 aa, Bradyrhizobium sp. ORS278
MSIEQFIDNEVKSNDVVLFMKGTPQFPQCGFSGQVVQILDHVGVGYKGLNVLESAELRNGIKTFSNWPTIPQLYVKGEFIGGCDIVREMFQSGELQQLFTDKGIPVGTAASA

SEQ ID NO: 9255 - protein, 446 aa, Bradyrhizobium sp. ORS278
MSASLPPSSPVPSNGSEPVGAAFILRKAVLSALVALGLFSLMVGVRTEAGQSGQLEYWTRFGELASLVGAVFVGSIVVELLRLWLGPRGGLGSFVPASVQSGLSVAGRYLAPALLIFTFLVPVIFYNQRYILDLGILVLTYVMLGWGLNVVVGLAGLLDLGYVAFYAVGAYSYGLLSTTFGLSFWICLPLAGILAAFWGVLLGFPVLRLRGDYLAIVTLAFGEIIRLVLINWQEVTGGPNGVSGIPRPTLFGIPLTPGEGGLASMLGIPFSPTHRIVFLFYLILALALLTNWVTIRLRRLPIGRAWEALREDEVACRALGINITTTKLTAFATGAMFGGFAGAFFATRQGFISPESFTFQESALVLAIVVLGGMGSQLGVALAALAMIGGFELFRSLEVYRMLVFGLAMVLVMIWRPRGIVGHRAPTVFLEKSKSISSDLVKEGHG

SEQ ID NO: 9256 - protein, 399 aa, Bradyrhizobium sp. ORS278
MALRTVTVAGAGIGGLTAALALATKGFRVVVLEKAERLEEVGAGLQLSPNASRILIDLGLGPRLTTRAVVPEAVSIMSARAGGEIARLPLGTTASESAGAPYWVIHRADLQAALAAEAMAHPDIELKLGCQFEDVAAHAKGLTVVHRRGDERRQDVALALIGADGVWSAVRHHLFPQVRAAFSGLIAWRGTLEARQLPRDYTSARVQLWMGPSAHLVAYPISAGRQVNVVAVVPGTWNRPGWSTDGDPAELKAAFAPPGWPATARLLLNAVDGWRKWALFAVPEGIEWSKGNVALLGDAAHAMLPFAAQGAGMAIEDAAVLAKALSEARPDGLAGIEGALKRYAKLRRPRVGQVQTTARKQGRIYHMSGPLALARDISIKALGPERLSARQRWIYDWRL

SEQ ID NO: 9257 - protein, 330 aa, Bradyrhizobium sp. ORS278
MVPSGMLDKVLIYSRLPKSMTQRFSDRFDLLDTGGKPAREVFSAEEVAQVRALITAGATPLAAEQMDRLPALGAIVCYGTGYDGVDLKAAAARNIAVGHSPGANAAAVADVAVMLMLASTRRLVVADAYVRDGGWAGAKPSPLMRPPPSLAGCKVGVYGMGAIGRKIAARVAAFETEVGYFNRTRYDDLPYQYVSSLDALAEWCTVLMVAVRASAETTHVVNAHLLKKLGPDGHVINISRGSVIDQQALVAALKDGTIAGAGLDVFEKEPHAPDELTALPNVVVTPHIGGNTRESHVAMQACVVANLTAFFVGEKLPYAVSASSGAYERV

SEQ ID NO: 9258 - protein, 395 aa, Bradyrhizobium sp. ORS278
MASFDPVMILSAARTPLGRFMGELSPLRAHELGAHAIKSALERAALAPETVGEVFMGNVLPAGQGQAPARQAARGAGLPDATGATTINKVCGSGMKATMLAHDIIRAGSADIVVSGGMESMSNAPYLLAKARGGYRAGHDRIFDHMMLDGLEDAYDTGRSMGDFGEATAEAYQFTRADQDAYAIETLTRARKAVESGAFAAEIVPITLTEKSGPRVVTNDEHPLKVDPAKIPALKAAFRKDGTITPAASSANADGAAALVLATRTRTERDGLPVIAEIKGHATHSQEPQWFTTAPIPAIRKLLDKVGWRVEDVDLFEINEAFAVVAMAAQRDLGIPRERLNVNGGACALGHPIGATGARLIVTLLHAMQTRGLRRGVASLCIGGGEATAIALERP

SEQ ID NO: 9259 - protein, 634 aa, Bradyrhizobium sp. ORS278
MAERNYVNPTPVQLAVLAEDAEGRDLLVSAQTGSGKTVAYGLAMAANMLGEAERFGPAAAPLALIVAPTRELALQVQRELAWLYQHAGARVISCVGGMDPRREQRELEAGAHIVVGTPGRLCDHLRRGRLDISELKAVVLDEADEMLNLGFREDLEFILETTPETRRTLLFSATFPRGIVALAKQYQDDAFRIEVEGDEGGHADIEYRAIRIAPDDAEHAVVNLLRFYESPSAIVFCNTREAVRHLQAALLERGFSVVALSGELTQNERTMALQSLRDGRSRVCVATDVAARGIDLANLDLVIHAELPNDPEVMQHRSGRTGRAGRKGVSVLLVSPARRRRAEMLLKLAGIEAEWGAAPQAEEIRKLDQERMLQDSVLTEESTAEDLALAQALLAERSPEDIAAALVRLYRARLPSPEDILDPGEDRGRSRPDRAARERPSRGEERAPAPRTKGGKPSRHGMGEPSVWFRAAIGRRKNAEARWLLPMICRRGGIDKQDIGAIKISDTTTEFEIAARVADSFTANIRRPDKEDTIRIEPLAAAPSAAARPDKPPRRKADEGSYHPLDRDEPRDRADDKPRGKPPRDHQPKSFREPAFAKKKKHRDKSSPGGQAFRSSNPHAKAPGGKKPKAKRRG

SEQ ID NO: 9260 - protein, 69 aa, Bradyrhizobium sp. ORS278
MPTYKGSVKWFNPTKGYGFIKPTGGDKDVFVHISAVERAGLTTLNENQAIEYDLVESRGKTSAENLKLS

SEQ ID NO: 9261 - protein, 770 aa, Bradyrhizobium sp. ORS278
MSSSYSEDLRSAALAYHRLPRPGKLEIQASKPLANQRDLALAYSPGVAAACTEIANNPAEAASLTARANLVAVVSNGTAVLGLGNIGPLASKPVMEGKAVLFKKFAGIDVFDIEISADTIDRVVETVAALEPTFGGINLEDIKGPECFEIEARLKERMKIPVFHDDQHGTAIIVGAAIKNALSLAGKQLSEVKIVTSGAGAAAIACLNLLVSMGAQRKNIWVCDIDGVVHEGRNTLMDPWKAVYAQKTDKRTLAEVIGGADIFLGLSAGGVLKPELLKQMAEKPLIMALANPNPEIMPEEARAARPDAMICTGRSDFPNQVNNVLCFPFIFRGALDVGATAINEAMKQAAVDAIALLAQDPPSDAVNRGFDTGETQGFGPGSLIPSPFDPRLILRIAPAVAKAAMESGVATRPITNFDEYTALLERFAFRSGLIMKPVFAKAKAQPVRVIYAEGEDERVLRATQVVLEEKLARPILVGRPSVVEARIKRFGLSIKAGRDFDLVNPEDDPRYRSYVQSYIEIAGRRGVTPDAARTVVRTNATVIAALAVVRGEADAMICGVEGRYMSHLRHVREIIGFMPGVSDYAALALTITSKGAYFIGDTQVRPDPTAEELAEMASLAANHVTRFNIKPKIAFVSHSDFGSYDTDSSRKMRRATALLKQHRPDLEADGEMQGDTALSATARKAILPHSDLDGSANVLIMPNLDAANVAYQMIKVLADAVPVGPILIGPARPAHILTPSVTARGILNMTAVAAVEAQERAGRAQPTLFA

SEQ ID NO: 9262 - protein, 357 aa, Bradyrhizobium sp. ORS278
MLGSHLSIRQRGSMTKYKLEYIWLDGYKPVPNLRGKTQIKEFSSFPTLEQLPLWGFDGSSTMQAEGHSSDCVLKPVAVYPDAARTNGVLVMCEVMMPDGKTPHPSNARATILDDPDAWFGFEQEYFFYKDGRPLGFPEYGYPAPQGPYYTGVGFKNVGDVARKIVEEHLDLCLAAGINHEGINAEVAKGQWEFQVFGKGSRTAADQMWMARYLMLRLTEKYGIDIEFHCKPLGDTDWNGSGMHCNFSTKHMREVGGKEYFEKLMDAFKEARADHIAVYGPDNHMRLTGKHETASIDTFSWGVADRGASIRVPHSFVNNSYKGYLEDRRPNSQGDPYQIASQVLKTISTVPTGAKAAA

SEQ ID NO: 9263 - protein, 291 aa, Bradyrhizobium sp. ORS278
MARVAFIGLGRMGHGMAGRYLDAGHAVAVWNRSKAKAEDLLARGARWSTSPADAAIDADTVVTMVADDEASRAVWLGPDGAAATMRVGTIAIECSTVSRDHALRLSRELNARGVIYLDCPVTGLPDAAASGKLTLLVGADPADLDRARPYLTPIGSTIRHFGPVGAGTVYKLINNLLGAMQIAGLAEGLAIAEQAGLDMALVLEAIQGGVAASPQVLRHAPRMIARNFADASFTAALRQKDAAYALRLAEELLGERPIMAQAAVDAYARAKAAMPDEDEGRMIELVSRPKA

SEQ ID NO: 9264 - protein, 387 aa, Bradyrhizobium sp. ORS278
MRDRVYLDWNATTPLRPEARAAMVAAFDLVGNPSSVHDEGRKARRVMEEARPVIARGLGTVARRVVFTSGGTEANTLALSPGMKTPAGPVERLLVSAVEHASVLAGGRFAPAAIETIPVDRSGLVDPGRLEALLAGGPPALVSVMAANNETGVLQPVSQVAEIVRRAGGLLHVDAIQAFGKIPLDINQMGANLVSISAHKIGGPKGSGALVLGDAVDDVIPVLRGGGQERGRRAGTENLAGIAGFGAAAGAALTALEADLPRVTALRDRLEAGLRQTAGVTVFSSDAPRLPNTTLFTAPGMKAETAVIGFDLEGISVSSGSACSSGKVQPSHVLEAMGVGPAAAPGAVRLSLGWSTTSAEVDRAVEAWRKLSMTLLKGRGETALEQF

SEQ ID NO: 9265 - protein, 250 aa, Bradyrhizobium sp. ORS278
MALLEIKNLQVRVEEREILHGLTLTIDEGKVHAIMGPNGSGKSTLSHVIAGKPGYEVTGGEILFKGEDLLAMDPDERAAKGVFLAFQYPVEIPGVATMTFLRTALNAQRKARGEEEYSTPDFLKKVREISKQLSIPQDMLKRGVNVGFSGGEKKRNEVLQMALFQPSLCILDEMDSGLDIDALRIAADGVNALRAPERSMIVITHYQRLLNYIVPDVVHVMSKGRVVKSGGKELALELEASGYAQFEDAA

SEQ ID NO: 9266 - protein, 605 aa, Bradyrhizobium sp. ORS278
MAAGASSAIMKIEPLSVDFNDEQKRYLEGLAAGLKVTLAGRGQSAAAVATEPTGPDALHIKAQDKLLAAGRKLADQEKIKRELHPFDAYERLKAQARSNAAPSAADNFRWRYHGLFHVAPAQNSYMCRLRIPNGIMKHWQLSGLADLADRLCGPYSHVTTRANLQLREIPPKHAVMLLEGLSDLGLTARGSGADNIRNVTGTPTAGIDPQELLDTRLYAREWHFHILNDRSLYSLPRKFNVAFDGAGRIAALEDTNDIAFSAVEVKDGFGVAPGVWFRLGLGGITGHKDFAKPTGIIVEPDKATEVADAIVRLFIETGDRTNRLKARLKYVLDSMGHDKFMEAVEARLGRTLARVPDEALKPRPEADRMAHIGVHPQKQSGLNWIGVVLPLGKLTSDQMRALAKIAADLGDGDIRLTVWQNLLLSGVSDDKVSLASAAIAQIGLATTASHIRAGLIACTGNAGCKFAAANTKKHAAEIADWCEGRVGMDTPLNIHLTGCHHSCAQHYISDIGMIAAKVPVGDGDDTVEGYHLFAGGGFGPQADIGREVYRDLKAEDAPGTVEKLLKAYLAHRTSPEETFLSFARRHDGDALRKLAEAQTSSEVSA

SEQ ID NO: 9267 - protein, 332 aa, Bradyrhizobium sp. ORS278
MTTRTATNKNKILVTQSFSAKGRALLSAREDVEMIEFPNMISAADFSALLSSHAPVHGVALGATRFGEPELLAAGDMKVVTRIGVGFDAVDVPALSRHKVPLMVAGTANSPSVAEQALFMMLTLAKRASEMHAMVKDGTWGSRLGVLPFDLYGKTVLIIGFGRIGTRTAKRCLAMEMQVLVYDPYKPAAEITAAGCEPVADLDAALPRADFVSIHCPKTQETIGLFNAARLRLMKPTAYLINTARGGLIDEAALYDALSTGRLAGAGLDVFEQEPPPVGHALHALPNVIMAPHVAGVTREAVDRMSEQTARNILSVLDREPIRQNVINQDVL

SEQ ID NO: 9268 - protein, 335 aa, Bradyrhizobium sp. ORS278
MPPASRGSDMRYKLLITGPALTAEATAIAARRGAALVDNPRYASPQELAEITAREQPDGIIVRQGKIDDQVIGASQKLKAIAKHGVGYDNIDVEAADRRGIPVFVARGANSQSVAELAFALMFAVAREIPHLDARIKTGHWDKATTKGAQLLGRSLGVIGFGEIGRILVGLVQPLHMEVRIFDPYMPADAEISGAERAGSLDEILTASDVISLHCPLMPQTRNMIGRDQLARMRRNAILINTARGGLIDEAALYDALRDGVIAGAGLDSFAEEPAKPDLPLLALSNVVVTPHAGASTQEARDAMGVIAVNHVMDVLEGKTFDRRALVNKTQLSFA

SEQ ID NO: 9269 - protein, 338 aa, Bradyrhizobium sp. ORS278
MKRVTLALTLALAPVLASVGAQAETLKTVKDRGMLACGVSQGLPGFSNPDDKGNWTGLDVDVCRAIAAAIFNDPTKVKYVPLSAKDRFTALQSGEVDVLSRNTTWTLSRDTSLGANFAGITYYDGQGFMVKKALKVNSALELNSASVCVQTGTTTEQNLADYFKANKMKYEVIAFAGADETVKAYESGRCDVFTTDVSGLYAERLKLANPADHVVLPEVISKEPLGPMVRHGDDQWFDIVKWTLFGLITAEEMGVTQANVDEMAKSDKPDFKRAFGTDGNLGEQLGLTKDWFSRIVKAVGNYGEMYDRNVGSGSKLQIARGLNQLWNKGGLQYAPPIR

SEQ ID NO: 9270 - protein, 233 aa, Bradyrhizobium sp. ORS278
MSTLLEVKGLKSGYGRIPILFGVDLTVGDGEYLGILGHNGMGKTTALRTLMGHLPTTDGSVVFAGKTITHLKPHERSRLGIGLVPQGREIFPDLSVMENLRMGLAAAPKEDRSVIEAVLQDFPRLVRLLDRRGGALSGGEQQLLALARCLCTKPKLILLDEPTEGIQPSIIEEIIETLLALKTRWKMSLIVVEQNLEFITSLSDRILHIQKGRITEELDRETLLAREGQMVPS

SEQ ID NO: 9271 - protein, 563 aa, Bradyrhizobium sp. ORS278
MMTTTTDTAATAEAGRDFIRDIVQADLDSGRHKTVVTRFPPEPNGYLHIGHAKSIGLNFGIAREFGGRCNLRFDDTNPTKEEQEYIDSIQADVRWLGYDWGDNLFYASDYFERLYDWAEGLIKAGLAYVDDQTQEEIRASRGTLTEPGKNSPFRDRSVEENLDLFRRMKAGEFPNGARVLRAKIDMAAGNINLRDPVLYRILHAHHPRTGDTWKIYPSYDYAHGQSDAIEGVTHSICTLEFEDHRPLYEWLLDKLPVPSHPRQYEFARLNLTYTLLSKRVLTRLVQDGHVSGWDDPRMPTIAGLKRRGVPPAAVREFTKRIGIAKANSVVDVGMLEFCIREELNRTAQRRMAVLRPLKVLIENYPEGQVEELEAINHPDDPSAGTRKIAFGRELYIEQDDFMENPPKKFFRLSPGNEVRLRYAYFIKCREVIKNDAGEIVELRCTYDPETKGGNAPDGRKVKATMHWLPAAQSLTAEIRLYNQLFANPSPNAADFTADLNPDSLEVLADARIEPSIAASNSDAPVQFERQGYFVRDPDSTPDRLVFNRTIGLRDTFAKEVAKG

SEQ ID NO: 9272 - protein, 356 aa, Bradyrhizobium sp. ORS278
MSMSVGTKAAVTDVQVHKVRFEPVGIEMEVAEGETVLDAAFRQGISLMHGCKEGQCGSCKSKLVDGDIELLKYSTFALPDYESENGHVLLCRTHAYSDVSFELLNYDEDMLRRSIAVKTFRGHVTGITALTSDIRLLEIEIDKPMKFWAGQYVDLTIDDGRITRAFSMANAPGEGTRLSFIIKKYPNGAFSSQLDGGLDVGSVVLAKGPYGTCFRREERPGPMLLIGGGSGMSPLWSILADHIASGEQRPIRFFYGARSRADLFHLDELAAIGRELADFRFVPALSHATDEDHWDGETGFVHEVVARHLKQERLAGVIDAYACGPTQMIDAVLPVLQINGVEPDHIYFDKFTPAVR

SEQ ID NO: 9273 - protein, 307 aa, Bradyrhizobium sp. ORS278
MTAEQQAGQGATRCGFVALIGAPNVGKSTLVNALVGSKVTIVSRKVQTTRALIRGIVIEGQSQIILVDTPGIFSPKRRLDRAMVTTAWSGAHDADLVCVLLDAKKGLDDEAQAIIDKAASVAHEKILVVNKVDLVPREKLLALVAAANEKLAFARTFMISALSGDGVDDLRRALAEMVPPGPFHYPEDQMSDAPMRHLAAEITREKIYSHLHQELPYQSTVETDSWTERNDGSIRIEQTIFVERDSQRKIVLGKGGATIKSIGAQSRKEIAEITGVPVHLFLFVKVRENWGDDPDRYREMGLEFPRE

SEQ ID NO: 9274 - protein, 289 aa, Bradyrhizobium sp. ORS278
MAKVAFIGLGVMGFPMAGHLVKKGGHEVTVYNRTAAKAKEWADKFGGKTAPTPKQAAEGQDFVMCCVGNDNDLRSVTIGPDGAFGGMTKGATFVDHTTASAEVARELDAAATKAGFKFVDAPVSGGQAGAENGVLTVMCGGTQDAYAGAEPVIAAYARMCKLLGPAGSGQLTKMVNQICIAGLVQGLSEGIHFAKKSGLDVPAVIETISKGAAQSWQMENRYKTMNDGKYDFGFAVEWMRKDLSICLNEARRNGAHLPVTALVDQFYSEVEKLGGKRWDTSSLLARLEK

SEQ ID NO: 9275 - protein, 646 aa, Bradyrhizobium sp. ORS278
MCGIAGIIGRLDDDNRAALQRMNGAMLHRGPDAGGTWASEPDERGWGALLGHRRLAILDLSPAGVQPMTDPVTGHVIVFNGEIYNFADLRERLVAGGQRFTSTGDTAVMLRALGLHGPEAVAWLRGMFAFACWDPGQRQLLLARDPLGIKPLYVARAVNHDAGWSVAFASELRALLASGLLGTPRLDPEAVASGVWNGFVVGPGTAVKGVELLPPGHLTAFDGVGNTVRDEDFWTIPPLAPEQGMDEEQLTDILEETLRLHLASDVPLAVFLSGGIDSSVMANLAQRAAPNPIHTFTLAFEEQELNEGPIARRIATALGTEHHEVVLTEQHFVDNLDAALDSLDQPTFDGLNAYYMSHAIRSAGFTVALSGTGGDELFGGYTSFRDLPVLQQWSQRTSWMPGGLKVAAATLASRMLSPSGGAVAAQTRWAKLPDMVRRGDDLLALYQMAYALFLPGFQRELLAPDVAATVSDGLPAAMKAKITAETRSRTPLSAISVMEQRLFLGERLLRDNDVASMAASLEQRVPLVDQVLLEAVDRLPDQSRYEPLRSKAMLRRIGLRGLDLSMFDRPKSGFVLPMDRWIRRGLQDAMDQTLRDPQATAPVGLDPAAVERLWRAFLDGAPGLYWSRVWSIYVFVRWCHRHRVFR

SEQ ID NO: 9276 - protein, 595 aa, Bradyrhizobium sp. ORS278
MAKMRAIDAAVRILEKEGVACAFGVPGAAINPLYSALQRRGSIRHILARHVEGASHMAEGYTRAKAGNIGVCIGTSGPAGTDMITGLYSAIADSIPILCITGQAPRARLYKEDFQAVDIEQIAKPVTKWAVTVREPGLVPRVFSQAFHIMRSGRPGPVLIDLPLDVQLAEIEFDDETYAPLPVYKPAATRKQIEKALEMLNAAERPLIVAGGGIINADASDLLVTFAETVNVPVVPTLMGWGAIPDDYLLMAGMVGLQTSHRYGNANFLESDFVLGIGNRWANRHTGSLETYTKGRTFVHVDIEPTQIGRVFNPELGIVSDAKAALEMFIAVAREWRKAGKLRERQAWPAACQDRKRTMLRRSDFDQVPIKPQRVYHEMNKAFGRDTCYVSVIGLSQIGGAQFLSVNHPRHWINAGQAGPLGWTLPAALGVRAADPKREIVALSGDYDFQFLIEELAVGAQFNLPYIHVVVNNAYLGLIRQAQRGFSMDYQVQLSFENINAPEVGGYGVDHVAVAQGLGCKAIRVTDPRQAQAAFATAREWMAEYQVPVVVEFVLERVTNIAMGTEIDNVVEFEEVLDLPVDETPAESQRTLQPA

SEQ ID NO: 9277 - protein, 222 aa, Bradyrhizobium sp. ORS278
MPVIPSTKPYRIGRSKTGLGLFATQPIKKGTKIIRYFGPLLDSKKAEDDAIENKYLFELDNRWTIDGSVRENVARYINHSCKPNAESDVKPRKKKIFIRAIKNIAPGEEINYDYGTDYFKAYLKPIGCKCDACEKKRAKKKAEARAERAKQKAKDERKAAKKAKKKAKKTSDKLPKETVKSKQRVKAKTSTRAKAESRRPAAGKRVKTKSSPAKTLTRAKAA

SEQ ID NO: 9278 - protein, 656 aa, Bradyrhizobium sp. ORS278
MCGIAGLLQTERATDHAGLVSITDCMTAALAHRGPDASGTWIDARHGVCFGQRRLAILDLSEAGAQPMHDACGRYTITFNGEIYNHLDIRAELDAGGAAPNWRGHSDTETLLAAIRQWGVNRALQRLIGMFAFALWDAEARELVLARDRFGEKPLFYGWIGGDLVFGSELKALAAHPSWSPSLDRAALTAFMRYSYVPAPATIWGGVRKLPPASFVSFPSDAVPGELPEPRPYWSLRDRLTSGRGDRIDGESEAIDRLGQLLSTAVKRQCLSDVPLGAFLSGGIDSSTIVALMQAQASQPVRTFSIGFAEGGYNEAEDARRVARHLGTDHTEMYVDARTAMDVIPKLPRIYDEPFADSSQIPTHLVAQLARRHVTVALSGDAGDELFGGYNRHVWGGALQARLGRWPLPLRRALGAVLGAIAPEPADTVLGALQPLLPRRFKVRHPGDQVAKLGRLIAADGFDGLYRALCSIDPSPTRTVLDGEERAHWAGEQMRQGAAALDPLDRMTLADSLSYLSDDILQKVDRAAMAVALETRVPFLDKDVVEFAARVPPDMKVRDGRGKWLVRQVLYRYVPAEMIDRPKTGFSIPLDSWLRGPLKSWASDLLSPERLKRQGLFDPVRVTRMLDEHLSRRHNHAYWLWNVLMAEAWYDEWARA

SEQ ID NO: 9279 - protein, 175 aa, Bradyrhizobium sp. ORS278
MTTPQLKPAAFLDRDGVINHDDNYIGSPERIRWMPNVAAAIRRLNEAGYHVFLFTNQSGVARGLFSEDDVLSLHDWMRAELAAQGAVIDDIRYCPYHTEGSVERYLREHPWRKPQPGMILDLMQHWAVRREGSFVIGDRASDIAAAEAAGLPGFLFAGGDLDAFVTEVIAQTSPR

SEQ ID NO: 9280 - protein, 243 aa, Bradyrhizobium sp. ORS278
MIEDKKGSNRPASSGKLSVLRQHPIFCELDPEALDQLCRYAKPTTLKRGATIFSKGDPGSSLYAVISGTVKISVSSPDGRNAILNLISAGEIFGEVAVLDGRERTADATANTNCEILVIDRREFLPFVKSQPVLAMKFIELLCDRLRWTSDQVEQVILQDLPRRLASALLGLTEKQKVDSSNRTIAITQQEISEMVGMTRESINKQLRAWAARDWVRLEHGAIVLLNPEPLRGLADAGQHDDE

SEQ ID NO: 9281 - protein, 324 aa, Bradyrhizobium sp. ORS278
MAPSDPASPHRIAVLGAPIDLGASVRGTLMGPAALRTAGLVPVLESLGLEVTDYGDVGIADMAELGDDPPSSAKHYRQIQRWSRVLARRSYELAQTGALPVFLGGDHSLSMGSVNGIARHCRDIGRELFVLWLDAHADYNTPATTITANMHGMSAAFLCGEPGLDGLLGDEPRVGISSAQLELFGIRSIDKAEKDLLRLRRVSIADMRAIDEFGVGVLMRRVLDKVRARDGVLHVSFDVDFLDPDVAPGVGTTVPGGATYREAHLIMELLHDSGLVCSVDIVELNPFLDDRGKTARVAVELIGSLFGQQITDRPTPTNAIVPDQ

SEQ ID NO: 9282 - protein, 109 aa, Bradyrhizobium sp. ORS278
MSTSERIQKLIDSNDIVLFMKGVPAAPQCGFSAAVAQILAKLEVPYESVNVLADPFIREGIKEFSNWPTIPQLYVKGEFVGGCDIVREMFQAGELATLLADKGIKASAS

SEQ ID NO: 9283 - protein, 404 aa, Bradyrhizobium sp. ORS278
MRPVYLDNNATTRVDPEVVAAMLPFFTDQFGNASSSHAFGSEVAGAVRQARKSLQALLGAAFDHEIVYTSGGTESDNTAILSALETQDGRDEIVTTAVEHPAILTLVEHLRDKRGVTVHLIGVDAAGRLDVDAYKRALGPRTAIASVMWANNETGTLNPIPELAKLAHDAGALFHTDAVQAVGKIAIDLKATAVDMLSLSGHKLHGPKGIGALYVRKGTPFAPLVRGGPQERRRRGGTENVPAIIGLGKAAELAAKHLADEQGRVRALRDRLEQGITQGVGHCAMLGDVAQRLPNTANIAFQHLEGEPIVMRLNQAGIAASLGSACASGSMEPSHVLRAMNVPPELLRGAVRFSLSRDTTDDDIDGVLAVLPDIVGRLRETSPSWLQHHPSNAADALRPTELTQ

SEQ ID NO: 9284 - protein, 253 aa, Bradyrhizobium sp. ORS278
MTALLEIKGLHAEISGGRKIIQGLDLTVNKGEIHAIMGPNGAGKSTLSYVLAGKPGYEITAGEVYLNGEDLLAMSADERAAKGVFLAFQYPLEIPGVATLTFLRAAFNAQRKARGEEELSSPDLIKRVREIAKTLNIDSEMLKRPLNVGFSGGEKKRNETLQMALLQPSLCVLDETDSGLDIDALKVVANGVNALRSAERGMIVITHYQRLLDYIVPDIVHVFAAGRIVRTGAADLARELEATGYAQYQSEAA

SEQ ID NO: 9285 - protein, 584 aa, Bradyrhizobium sp. ORS278
MTEQPHDGSHHWAMLRSLQGWRISTLPADLTAGLTLAAIAIPEQMATAKLGGFAPETGFFAFLAGSLGFALFGANRFLSCGADSTITPIFAGGLALLAASGTPEYGSIAAALALLVGVMLVLAGGFRLGGIANLLSVPVTVGFLSGIAVHIIVSQLPGVLGLPAPSGSTLARIAAMAGELGKTNIYTLIIGFGVLATVAVCERISACIPGALIALAAATIFVIGAGLEARGVPVIGAISGGVPMPSVPLIAPEQWVKLVPLAFLIAVVVMMQTAATTRSFPSEPDRPADVDRDFLGAGAGSVLAGLFGTFPVNASPPRTGIVVETGGRSQVAGLSAAVIVLLLVLFGARLLAHVPEAALGGVLLFVALRIIRVTQIVQIYHASKGEFLLIVATAAAIVVLPIEQGVALGISLSLLHGIWSTTRAHLMIFERVPDTTIWWPAHPHIRGEELSDIAVVGFQAPLSFLNAATFRADLQHLLQQRQPRLLVLEASAMVEIDFTAAQAMREVIRQCNEDGIVFAVARLESLRAQAAFERFGLYDVLPRDHVFHSVDLALRSLRVEPLSGARETNGATPHSRHPRESGDP

SEQ ID NO: 9286 - protein, 320 aa, Bradyrhizobium sp. ORS278
MTRLRCAILDDYYDTALSLADWPGLSDRVDVTAFTHPFADEDAAAAALADVDIVCAMRERTPFPRGLIERLPKLKLLITSGMRNAAIDSEAAKSRGIVLCGTQYGRDPTAPLTMGLILELTRKIGQENARMHAGEPWQALGGIEIEGRTLGILGLGKLGTKVAGLAKAFGMNVIAWSPNLTPERCKDAGVGYAGKDELFAAADIITIHVVLSDRSRGLVGAADIARMKPSAYLVNTSRAPIVDEVALLQALKDKRIAGAGLDVFSVEPLPVTHPLRRLDNVVLTPHLGYVTEESFRAHYGQMVACIAAWLDGAEPPRRLA

SEQ ID NO: 9287 - protein, 529 aa, Bradyrhizobium sp. ORS278
MTKPKVLISDALSPAAVQIFRDRGVEVDFQPNLGKDKDKLADIIGDYDGLAIRSATKATAKIIERAKRLKVIGRAGIGVDNVEIPAATAKGIIVMNTPFGNSITTAEHAITMMLSLAREIPQADASTQAGKWEKNRFMGVEITGKTLGVVGCGNIGSIVCDRAQGLRMKVIGFDPFLTEERARDLGVEKVELDELLKRADFITLHTPLTDKTRNIIDAQAIAKMKQGVRIINCARGGLIDEAALLEALNSKQVAGAALDVFAEEPATSNPLFGHPGVICTPHLGASTTEAQENVALQIAEQMSDYLLTGAISNAINFPSITAEEAPKLKPFIALAEKLGSFAGQLTESSITKVQITYEGQVAEMKTKALTSAVLAGLLRPMLGEVNVVSAPVIAKERGMIVDEVLRAGESDYESLISVAVTTGQQERAVSGTVYADGKPRLVDIKGIRVDAEFGKSMIYVTNEDKPGFIGKFASLLGDAKINIATFHLGRVAPGSDAIALVEVDGAVPAELLAKIQALPQVKQAKALAF

SEQ ID NO: 9288 - protein, 401 aa, Bradyrhizobium sp. ORS278
MMSFLAAALDRVKPSATIAVTDKARVLKAAGRNVIGLGAGEPDFDTPDNIKQAAIKAIQDGKTKYTAVDGIPELKDAIIGKFQRENGLTYKPNQVIVGVGGKQVLYNALMATINPGDEVIIPAPYWVSYPEMVALAGGEPVPVVCTSAHGFKLQPEALEKAITPKTKWLILCSPSNPTGAAYTKAELKALTDVLVKHPHVWIMTDDMYEHLVYDDFVFTTPAQIEPSLFDRTLTVNGVSKAYCMTGWRIGYAGGPAQLIKAMATIQSQSTSNPCSIAQWAAVEALNGPQHFIPENNKVFKERRDLVVSMLNQASGIECPRPEGAFYVYPSCAGTIGKTTPSGKVIDNDQTFVTELLETEGVAVVQGSAFGLGPAFRISYATKTSDLEDACKRIQRFCGNLR

SEQ ID NO: 9289 - protein, 317 aa, Bradyrhizobium sp. ORS278
MSAKNGSIKLVAGNSNPPLAAAIASELGLALTKAVVRRFADMEIFVEIQENVRGSDVFIIQSTSYPANDLLMELLIITDALRRASARRITAVVPYFGYARQDRKSGSRTPISAKLVANLITHAGVDRVMTLDLHAGQIQGFFDIPTDNLFAAPLMVRDIKDRFDLSSVMVVSPDVGGVARARGLAKRINAPLAIVDKRRERPGESEVMNVIGDVSGRTCILIDDIVDSGGTLVNAADALLKYGAKDVYAYITHGVLSGGAATRISSSRLKELVITDSILPTEAVRGAPNVRALPIAPLIAEAIGRTAAEESVSSLFD

SEQ ID NO: 9290 - protein, 71 aa, Bradyrhizobium sp. ORS278
MAMTGTVKFFNGERGYGFIKPDDGGRDVFVHITAVERAGLKDLTEGQRISFEVEPDKKGKGPKAVNLVLSS

SEQ ID NO: 9291 - protein, 298 aa, Bradyrhizobium sp. ORS278
MSNITCLGLGAMGSRMAASLLKTGHRVTVWNRSAERAAALVAAGAVVADTPRAAVRQADVVMAMTRDDNTSREIWLDPATGALDGMREGAIAVESSTLSPAWVQDLARHAAARAIRFVDAPVVGSRPQADAGQLIFLAGGDAADVALAAPVLECMGSAVHRTGPVGSGALLKLAINALFAVQVTAMAELIGALDAAGADIAGAIEIIGATPVASAAAKGAASAMLSGRFAPLFPVELVAKDLAYVRQLGTPVAAGMPMTTAAAGVMQSALAHGFGGDNLTGIVRLFRPGTAQPSDTRA

SEQ ID NO: 9292 - protein, 333 aa, Bradyrhizobium sp. ORS278
MPRSKPLTDATPANADVQSALRTLDAGSNGIAAIAAALRGPLGAAFAAAVGLIRQAKGRAILTGLGKSGHVARKMAATLASTGTPAFFVHSAEAGHGDLGMITSDDVVVALSWSGEQPEMKTLVNYTKRFAIPMIAITSNAQSSLGQAARIVLELPKAREACPHNLAPTTSTLMQAAIGDALAIALLEGRGFTALEFANFHPGGKLGAMLKHISDLMRSGDAVPLKPLGTGMADALAEMSAKGLGCVVIVDGRGHVAGIITDGDLRRKMRADLLSVSVDEIMTANPRTVRREALASEALEILNSAKITTLIVTDGARPVGILHMHDLLRAGVA

SEQ ID NO: 9293 - protein, 407 aa, Bradyrhizobium sp. ORS278
MTDVILTVNAGSSSIKFAAYEVGAGALRAVARGHVDDIGDDTIFAAGSADGPVERQPIDAARGTVDHGAALRLAIDWLRRHEEGCHVVAIGHRVVHGGPDHAEPVVIDTGTLQTLRRLIPLAPLHQPHNLAGVEAALQAFPDAAQVACFDTAFHRQHPFVADAFALPRRLYDEGVRRYGFHGLSYEYVSRRLRSLAPDLASGRVIIAHLGNGASVCALRDGRSIASTMGFTALDGLPMGTRCGQLDPGVVLYLLTEKGMSADEITHLLYHDSGLKGLSGLSNDMRELEASDAPEAREAIDYFVARVRREIAGLAATIGGVDAVVFAGGIGEHAWRVREQILADMGWLGIALDRAANAGNAQTVSLSDSRVAVLVIPTDEDRMIAEHTAEILGLMQPADSMPLTRLTA

SEQ ID NO: 9294 - protein, 321 aa, Bradyrhizobium sp. ORS278
MTATHSLGWIGMGRMGYPMAERLLKAGHKVSIFNRTRAKAEPLATKGGIIVDHPSDLAGCDIVFSMVSTAKDLEQVYFGDHGLVASGSGPRPQILVDCSSIGVGQSEAIDAKLRQLDCAFVRAPVSGNGKCVKAGKLSSVVSGPKAAFDAIAPYLAKIAVSGVSYVGEGELARICKIAHNVFLGVVIQNLAEITILAQKAGVPRHAFLDFMNASVMGSTFTKYKSNALVNLDWTTTFTPTLLRKDLDLGLSAARQLDVAMPVTAATREALQAHVGAASLQSDPAAYLEKDFAALLETVALAAGLKLQPENVPMPTGLETEG

SEQ ID NO: 9295 - protein, 401 aa, Bradyrhizobium sp. ORS278
MSFPAMRRSRRAGLQPQRSRLRRHHPDFDKMATQGWQALEAEGKLPSNGWRKERQWALDMGLPGSDSLTDRDIPTFARGELPHFAGINTFMKAPYVENVRDVGKYDAAVIGIPFDSGTTYRPGTRFGPQGIRRISALYTPYNYELGVDLREQMTLCDAGDVFTIPANLEKSFDQISRGVAHVFSSGALPIMLGGDHSIGFPCVRGIAQCTDKRIGIIHFDRHIDIQEKDLDERMHTTPWYWATNLPNVSPTNLVQLGIGGWQVPREGVEVARKRNTNVLTIADIEKIGLEKTAEIALELAWKDADAVYISFDVDSIDCGFVPGTGWPEPGGFLPREALKLLGLVAAEGLCGLEVVEVSPPYDTSDITALIGVRVVVEALGSMVAHGKLGSHKHIINKPVSF

SEQ ID NO: 9296 - protein, 443 aa, Bradyrhizobium sp. ORS278
MRDGAQAEPIAQIEQLGQGALALLDLPAAHYAGYYEGFANSALWPALHSRSDLIRVSQDDYNSYREVNSFVARALLKFQKQDTLFWIQDYHFLSLGAELRTLGVKSPIGFFLHTPWPARSVIDSVPNHRDLVTAMLAYDLIGFQTEDDRENFAACVRADLGLQVRNGVVTSRHGRTRLAVFPIGIDADKFAQQAAKAASHPDVSRLRRSLHGEKLAIGVDRLDYSKGLVNRINAFDRMWSVHPTLLRAASLLQIATPSRESIEAYGNLQSEVARLVSEVNGRHGEVDWTPIRYLNKGYGQGVLAGLYRSAQVGVVTPLHDGMNLVAKEYVAAQSPVDPGVLVLSKFAGAANELDAALLVNPHDIDGMARTIAMALSMPLNERRMRHQILMTKLRRHSIQQWFADFLDALQDDGAHEPVEVEPLPAASAGLLGSRFMSSTARYH

SEQ ID NO: 9297 - protein, 545 aa, Bradyrhizobium sp. ORS278
MPALAHALLVALKDHGAREIFGIPGDFVLPLFRVIEESNILPSVTLSHEPAVGFAADAAARYHGGLGVAVVTYGAGAFNVVNAVAGAYAERSPVVVIAGAPGARERLSGFLLHHQARTVDTQLAVFKEITCDQAVLSDPATAPAQIARVLRSAREMSLPVYLEFPRDMVDAEVEAVVPLPPRTANREALDECVDEILARIAQAQRPVIVVDVEIRRYGVEDQIAALARKLGLPLVTTFMGRGLLDNADDVVAGTYLGAAGNPAITQLVEEADLVLMLGVILSDTNFALSNRAPDPRRMILASSREVQIGHHAYRDMPLRDLIDALAQRAAPRAAQPGTPRQRSSYPRRLSSDDQPIAPSDIATAINDMFDRHGRMPMTSDIGDCLFTAMEIDNTALAAPGYYAGMGFGVPAGIGVAATGLRPLILVGDGAFQMTGWELGNCRRYGLDPIVVLFNNCSWEMLRVFQPESRFNDLDDWHYADVANAIGGAGERVATRAALVAALERAVQRRGQFSLVEVMLPRGKTSDTLARFVAGFKSARERMAKA

SEQ ID NO: 9298 - protein, 851 aa, Deinococcus radiodurans
GAFGWEQDRGAPFSGRSPRILTRMTDAPRPTAGADAPARPPAAPLVAPNFITEIIERDLEAGKYPRVVTRFPPDPSGYAHLGHVFASLLDFNTARQYGGQFNLRMDDTNPELARQEYVDSIADDLKWLGLDWGEHFYYASDYFDRYYAYAEQLIRQGDAYVESVSPEELSRLRGNATTPGTPSPYRDRSVEENLDLLRRMKAGEFADGEHVLRAKIDLTAPNMKLRDPVLYRIVNKPHFRTSDEWHIYPAYDFEHPLQDAIEGVTHSMCSLEFVDNRAIYDWLMEKLNFDPRPHQYEFGRRGLEYTITSKRKLRELVQAGRVSGWDDPRMPTLRAQRRLGVTPEAVRAFAAQIGVSRTNRTVDIAVYENAVRDDLNHRAPRVMAVLDPVKVTLTNLDGEKTLSLPYWPHDVVRDSPDGLVGMPGGGRVAPEEAVRDVPLTRELYIERDDFSPAPPKGFKRLTPGGTVRLRGAGIIRADDFGTDEAGQVTHIRATLLGEDAKAAGVIHWVSAERALPAEFRLYDRLFRVPHPEGENADVEDDSAGPAEHEAEPGAGQETAPVSQGFMRYLTPDSLRVLRGYVEPSVAGDPADTRYQFERQGYFWRDPVELERVDSREDALVFGRIITLKDTWGKQGGGTQQKAEGKKRPSTKGRGPDEVRGEGSSSPAKAHAPKAQPLTPEQDAEFTRLLGLGASEGDARTIARDPALLAFVGGAAPGDTFAQVASWTVNELVAGLRAGEVKVRAADLAPLAEGVASGQLSARIAREALARAAASGDAPLTIIEREGLNAGLSAEALQQVVAQVIAANPDKAEAYRGGKTALLGFFTGQVMRATAGKADPQALAAALKDALA

SEQ ID NO: 9299 - protein, 410 aa, Escherichia coli
MAKVSLEKDKIKFLLVEGVHQKALESLRAAGYTNIEFHKGALDDEQLKESIRDAHFIGLRSRTHLTEDVINAAEKLVAIGAFAIGTNQVDLDAAAKRGIPVFNAPFSNTRSVAELVIGELLLLLRGVPEANAKAHRGVWNKLAAGSFEARGKKLGIIGYGHIGTQLGILAESLGMYVYFYDIENKLPLGNATQVQHLSDLLNMSDVVSLHVPENPSTKNMMGAKEISLMKPGSLLINASRGTVVDIPALADALASKHLAGAAIDVFPTEPATNSDPFTSPLAEFDNVLLTPHIGGSTQEAQENIGLEVAGKLIKYSDNGSTLSAVNFPEVSLPLHVGRRLMHIHENRPGVLTALNKIFAEQGVNIAAQYLQTSAQMGYVVIDIEADEDVAEKALQAMKAIPGTIRARLLY

SEQ ID NO: 9300 - protein, 410 aa, Escherichia coli
MAKVSLEKDKIKFLLVEGVHQKALESLRAAGYTNIEFHKGALDDEQLKESIRDAHFIGLRSRTHLTEDVINAAEKLVAIGAFAIGTNQVDLDAAAKRGIPVFNAPFSNTRSVAELVIGELLLLLRGVPEANAKAHRGVWNKLAAGSFEARGKKLGIIGYGHIGTQLGILAESLGMYVYFYDIENKLPLGNATQVQHLSDLLNMSDVVSLHVPENPSTKNMMGAKEISLMKPGSLLINASRGTVVDIPALADALASKHLAGAAIDVFPTEPATNSDPFTSPLAEFDNVLLTPHIGGSTQEAQENIGLEVAGKLIKYSDNGSTLSAVNFPEVSLPLHVVRRLMHIHENRPGVLTALNKIFAEQGVNIAAQYLQTSAQMGYVVIDIEADEDVAEKALQAMKAIPGTIRARLLY

SEQ ID NO: 9301 - protein, 290 aa, Thermus thermophilus
ERVAVVGVPMDLGANRRGVDMGPSALRYARLLEQLEDLGYTVEDLGDVPVSLARASRRRGRGLAYLEEIRAAALVLKERLAALPEGVFPIVLGGDHSLSMGSVAGAARGRRVGVVWVDAHADFNTPETSPSGNVHGMPLAVLSGLGHPRLTEVFRAVDPKDVVLVGVRSLDPGEKRLLKEAGVRVYTMHEVDRLGVARIAEEVLKHLQGLPLHVSLDADVLDPTLAPGVGTPVPGGLTYREAHLLMEILAESGRVQSLDLVEVNPILDERNRTAEMLVGLALSLLGKRIF

SEQ ID NO: 9302 - protein, 211 aa, Escherichia coli
MGSSHHHHHHSSGLVPRGSHMAKSVPAIFLDRDGTINVDHGYVHEIDNFEFIDGVIDAMRELKKMGFALVVVTNQSGIARGKFTEAQFETLTEWMDWSLADRDVDLDGIYYCPHHPQGSVEEFRQVCDCRKPHPGMLLSARDYLHIDMAASYMVGDKLEDMQAAVAANVGTKVLVRTGKPITPEAENAADWVLNSLADLPQAIKKQQKPAQ

SEQ ID NO: 9303 - protein, 527 aa, Zea mays
LKKAAVRCQRAVGAAVAEKKDAPVSVAQDRSGDGGAAPELTVVMKFGGSSVASAERMREVADLILSFPEEHPVVVLSAMGKTTNKLLMAGEKAVGCGATNVSELDELSFVKELHLGTLDQLGLDRSIVCGLLDELEQLLKGIAMMKELTLRTRDYLVSFGECMSTRIFAALLNKIGVKARQYDAFDLGFITTDDFTNADILEATYPAVARRLHVEWINDPAIPIVTGFLGKGWRSGAITTLGRGGSDLTATTIGKALGLREIQVWKDVDGVLTCDPNIHPKAKPVPYLTFDEAAELAYFGAQVLHPQSMRPAREGDVPVRVKNSYNRRAPGTLITKARDMSKTVLTSIVLKSNITMLDIVSTRMLGQYGFLAKVFSIFEDLGISVDCVATSEVSISLTLDPSKLWSCELVQHKNELDDVIEELEKIAVVHLLQNRSIISLIGNVQRSSLILEKAFNVLRRNGVNVQMISQGASKVNISLVVHDSEAKQCFQALHSAFFENGFLLEADELDVLHDGFTSHSNGTIHSH

SEQ ID NO: 9304 - protein, 437 aa, Escherichia coli
MTHDNIDILVVDDDISHCTILQALLRGWGYNVALANSGRQALEQVREQVFDLVLCDVRMAEMDGIATLKEIKALNPAIPVLIMTAYSSVETAVEALKTGALDYLIKPLDFDNLQATWKKRSHTHSIDAETPAVTASQFGMVGKSPAMQHLLSEIALVAPCEATVLIHGDSARKELVARGLHASSARSEKPLVTLNCAALNESLLESELFGHEKGAFTGADKRREGPFVEADGGTCLDEIGDISPMMQVRLLRAIQEREVQRVGSNQIISVDVRLIAATHRDLAAEVNAGRFRQDLYYRLNVVAIEVPSLRQRREDIPLLAGHFLQRFAERNRRGKRFYAPGLDLLIHYDWPGNIRELENAVERAVVLLTGEYISERELPLGIASTPIPLGQSQDIQPLVEVEKEVILAALEKTGGNKTEAARQLGITRKTLLAKLSR

SEQ ID NO: 9305 - protein, 548 aa, Escherichia coli
MNGAQWVVHALRAQGVNTVFGYPGGAIMPVYDALYDGGVEHLLCRHEQGAAMAAIGYARATGKTGVCIATSGPGATNLITGLADALLDSIPVVAITGQVSAPFIGTDAFQEVDVLGLSLACTKHSFLVQSLEELPRIMAEAFDVACSGRPGPVLVDIPKDIQLASGDLEPWFTTVENEVTFPHAEVEQARQMLAKAQKPMLYVGGGVGMAQAVPALREFLAATKMPATCTLKGLGAVEADYPYYLGMLGMHGTKAANFAVQECDLLIAVGARFDDRVTGKLNTSAPHASVIHMDIDPAEMNKLRQAHVALQGDLNALLPALQQPLNQYDWQQHCAQLRDEHSWRYDHPGDAIYAPLLLKQLSDRKPADCVVTTDVGQHQMWAAQHIAHTRPENFITSSGLGTMGFGLPAAVGAQVARPNDTVVCISGDGSFMMNVQELGTVKRKQLPLKIVLLDNQRLGMVRQWQQLFFQERYSETTLTDNPDFLMLASAFGIHGQHITRKDQVEAALDTMLNSDGPYLLHVSIDELENVWPLVPPGASNSEMLEKLS

SEQ ID NO: 9306 - protein, 424 aa, Escherichia coli str. K12 substr. W3110
MKPMHIAMALLSAAMFFVLAGVFMGVQLELDGTKLVVDTASDVRWQWVFIGTAVVFFFQLLRPAFQKGLKSVSGPKFILPAIDGSTVKQKLFLVALLVLAVAWPFMVSRGTVDIATLTMIYIILGLGLNVVVGLSGLLVLGYGGFYAIGLHFCAAQSLLRLGLLDLPADCWINGSGGGFLLGFPVLRLRGDYLAIVTLGFGEIVRILLLNNTEITGGPNGISQIPKPTLFGLEFSRTAREGGWDTFSNFFGLKYDPSDRVIFLYLVALLLVVLSLFVINRLLRMPLGRAWEALGEDEIACRSLGLSPRRIKLTAFTISAAFAGFAGTLFAARQGFVSPESFTFAESAFVLAIVVLGGMGSQFAVILAAILLVVSRELMRDFNEYSMLMLGGLMVLMMIWRPQGLLPMTRRQLKLKNGAAKGEQA

SEQ ID NO: 9307 - protein, 449 aa, Escherichia coli
MSEIVVSKFGGTSVADFDAMNRSADIVLSDANVRLVVLSASAGITNLLVALAEGLEPCERFEKLDAIRNIQFAILERLRYPNVIREEIERLLENITVLAEAAALATSPALTDELVSHGELMSTLLFVEILRERDVQAQWFDVRKVMRTNDRFGRAEPDIAALAELAALQLLPRLNEGLVITQGFIGSENKGRTTTLGRGGSDYTAALLAEALHASRVDIWTDVPGIYTTDPRVVSAAKRIDEIAFAEAAEMATFGAKVLHPATLLPAVRSDIPVFVGSSKDPRAGGTLVCNKTENPPLFRALALRRNQTLLTLHSLNMLHSRGFLAEVFGILARHNISVDLITTSEVSVALTLDTTGSTSTGDTLLTQSLLMELSALCRVEVEEGLALVALIGNDLSKACAVGKEVFGVLEPFNIRMICYGASSHNLCFLVPGEDAEQVVQKLHSNLFE

SEQ ID NO: 9308 - protein, 400 aa, Peanut witches'-broom phytoplasma
MKIMSVNSGSSSLKFQLINMVTETMLCSGLFERIGNVNSMFTIKTLDRIYKQNIAITDHKLAIELLLKKLIELSIIKEITEIKGIGYRIVQGGELFPNSIILTDENLDKLESLNNLAPLHNPVNILGARLFKQVLPKALHVGVFDTSFHQTIKTSNFLYAVPYEWYKKYKIRKYGAHGTSCRFIVQEAQRFLAKSNLKLIICHAGNGVSITAVNDKGESVDTSMGVTPLAGVPMGTRSGDIDPAIVALISSYENKTSQEVIDDLNNKSGLLGISGISNDCRDLEKAMLEGNAKAKLALEIQIKKIVDYIASYYVKLEGIDALVFTAGVGENSIFFRSEIISKLAVLNIFLEPTLNENGPKLRNIASKKSIIPILIIPTNEELTIARDVMSFISAKNNSAN

SEQ ID NO: 9309 - protein, 432 aa, Avicennia marina
MAQILAPSAQWQMRIAKNSIDASPLSTKTWSSLILKQNKKEAVKSPGKFRVLAVKSENSTVNRLEQMLNLDVTPYTDKIIAEYIWIGGSGIDLRSKSRTIPKPVEHPSELPKWNYDGSSTGQAPGEDSEVILYPQAIFKDPFRGGNNILVTCDTYTPQGEPIPTNKRYRAAQIFSDPKVAADIPWFGIEQEYTLLQPNVQWPLGWPAGGYPGPQGPYYCGVGADKSFGRDISDAHYKACLYSGINISGTNGEVMPGQWEFQVGPSVGIEAGDHIWCSRYLLERITEQAGVVLSLDPKPIEGDWNGAGCHTNYSTKSMREEGGLEVIKKAILNLSLRHKEHISAYGEGNERRLTGKHETANIDTFSWGVANRGCSIRVGRDTEKKGKGYLEDRRPASNMDPYVVTSLLAETTILWEPTLEAEALAAQKLALKV

SEQ ID NO: 9310 - protein, 414 aa, Borrelia bissettii
LSNTKGKKMKILIINTGSSSLKFAIYQYENSKKIISGIVEKIKSQKSIIKIINTDGSITERFEKGIENHQKAIEKMFELLLSSNLNILKTINEIEIIGHRVVHGGLSLKNSVILTNSILNTLKQISELAPLHNPNAIIAIEAVLKILPHAKQVLCFDTSWHQTIKEHAFLYAIPYSWYKKYNIRKYGFHGLSYSFITKRSSEILNKKIDNLNLIILHLGNGASINAVKNGKSYDTSMGITPLEGLAMGTRSGDIDPSIINLMSNILNKTTKQIEEILNKESGILGISEKSNDMRDIWNKIEEGEYQSKLAIDIMTYRIKKYIGSYIAALDFNVDAIVFTGGIGIVDYKIRDLALKGFEKIGIELDLEKNEMAQNKNLESKEISTTNSKVKILVIKTNEELTILENIYNLIPKNL

SEQ ID NO: 9311 - protein, 381 aa, Borrelia burgdorferi
LIINTGSSSLKFAIYQYENSKKIISGIVEKIKSQKSIIKIVNTDGSTTERFEKGIENHQKAIEKMFKILTNSDLKILKTLSEIKIIGHRVVHGGSSLKNSVILNNSILNKLKQISELAPLHNPNAITAIEAVLKILPHAKQVLCFDTSWHQTIKEHAFLYAIPYSWYKNHNIRKYGFHGLSYSYITKRSSEILNKKIDSLNLIILHLGNGASINAVKNGKSYDTSMGITPLEGLAMGTRSGDIDPSIINLMSTILNKTTKQIEEILNKESGILGISEKSNDMRDIWNKIEEGEYQSKLAVEIMTYRIKKYIGSYIAALDFNVDAIVFTGGIGVTDYGIRALALKGFEKIGIELDLEKNEMAQSKYLESEISTINSKLKILA

SEQ ID NO: 9312 - protein, 380 aa, Borrelia burgdorferi
IINTGSSSLKFAIYQYENSKKIISGIVEKIKSQKSIIKIVNTDGSTTERFKKGIENHQKAIEKMFKILTNSDLKILKTLSEIKIIGHRVVHGGSSLKNSVILNNSILNKLKQISELAPLHNPNAITAIEAVLKILPHAKQVLCFDTSWHQTIKEHAFLYAIPYSWYKNHNIRKYGFHGLSYSYITKRSSEILNKKIDSLNLIILHLGNGASINAVKNGKSYDTSMGITPLEGLAMGTRSGDIDPSIINLMSTILNKTTKQIEEILNKESGILGISEKSNDMRDIWNKIEEGEYQSKLAVEIMTYRIKKYIGSYIAALDFNVDAIVFTGGIGVTDYGIRALALKGFEKIGIELDLEKNEMAQSKYLESEISTINSKLKILA

SEQ ID NO: 9313 - protein, 383 aa, Borrelia burgdorferi
IINTGSSSLKFAIYQYENSKKIISGIVEKIKSQKSIIKIVNTDGSTTERFEKGIENHQKAIEKMFKILTNSDLKILKTLSEIKIIGHRVVHGGSSLKNSVILNNSILNKLKQISELAPLHNPNAITAIEAVLKILPHAKQVLCFDTSWHQTIKEHAFLYAIPYSWYKNHNIRKYGFHGLSYSYITKRSSEILNKKIDSLNLIILHLGNGASINAVKNGKSYDTSMGITPLEGLAMGTRSGDIDPSIINLMSTILNKTTKQIEEILNKESGILGISEKSNDMRDIWNKIEEGEYQSKLAVEIMTYRIKKYIGSYIAALDFNVDAIVFTGGIGVTDYGIRALALKGFEKIGIELDLEKNEMAQSKYLESEISTINSKLKILAIPT

SEQ ID NO: 9314 - protein, 386 aa, Borrelia burgdorferi
KILIINTGSSSLKFAIYQYENSKKIISGIVEKIKSQKSIIKIVNTDGSTTERFEKGIENHQKAIEKMFKILTNSDLKILKTLSEIKIIGHRVVHGGSSLKNSVILNNSILNKLKQISELAPLHNPNAITAIEAVLKILPHAKQVLCFDTSWHQTIKEHAFLYAIPYSWYKNHNIRKYGFHGLSYSYITKRSSEILNKKIDSLNLIILHLGNGASINAVKNGKSYDTSMGITPLEGLAMGTRSGDIDPSIINLMSTILNKTTKQIEEILNKESGILGISEKSNDMRDIWNKIEEGEYQSKLAVEIMTYRIKKYIGSYIAALDFNVDAIVFTGGIGVTDYGIRALALKGFEKIGIELDLEKNEMAQSKYLESEISTINSKLKILAIPT

SEQ ID NO: 9315 - protein, 385 aa, Borrelia burgdorferi
ILIINTGSSSLKFAIYQYENSKKIISGIVEKIKSQKSIIKIVNTDGSTTERFEKGIENHQKAIEKMFKILTNSDLKILKTLSEIKIIGHRVVHGGSSLKNSVILNNSILNKLKQISELAPLHNPNAITAIEAVLKILPHAKQVLCFDTSWHQTIKEHAFLYAIPYSWYKNHNIRKYGFHGLSYSYITKRSSEILNKKIDSLNLIILHLGNGASINAVKNGKSYDTSMGITPLEGLAMGTRSGDIDPSIINLMSTILNKTTKQIEEILNKESGILGISEKSNDMRDIWNKIEEGEYQSKLAVEIMTYRIKKYIGSYIAALDFNVDAIVFTGGIGVTDYGIRALALKGFEKIGIELDLEKNEMAQSKYLESEISTINSKLKILAIPT

SEQ ID NO: 9316 - protein, 392 aa, Borrelia burgdorferi
LSNTKGKKMKILIINTGSSSLKFAIYQYENSKKIISGIVEKIKSQKSIIKIVNTDGSTTERFEKGIENHQKAIEKMFKILTNSDLKILKTLSEIKIIGHRVVHGGSSLKNSVILNNSILNKLKQISELAPLHNPNAITAIEAVLKILPHAKQVLCFDTSWHQTIKEHAFLYAIPYSWYKNHNIRKYGFHGLSYSYITKRSSEILNKKIDSLNLIILHLGNGASINAVKNGKSYDTSMGITPLEGLAMGTRSGDIDPSIINLMSTILNKTTKQIEEILNKESGILGISEKSNDMRDIWNKIEEGEYQSKLAVEIMTYRIKKYIGSYIAALDFNVDAIVFTGGIGVTDYGIRALALKGFEKIGIELDLEKNEMAQSKYLESEISTINSKLKILA

SEQ ID NO: 9317 - protein, 391 aa, Borrelia burgdorferi
SNTKGKKMKILIINTGSSSLKFAIYQYENSKKIISGIVEKIKSQKSIIKIVNTDGSTTERFEKGIENHQKAIEKMFKILTNSDLKILKTLSEIKIIGHRVVHGGSSLKNSVILNNSILNKLKQISELAPLHNPNAITAIEAVLKILPHAKQVLCFDTSWHQTIKEHAFLYAIPYSWYKNHNIRKYGFHGLSYSYITKRSSEILNKKIDSLNLIILHLGNGASINAVKNGKSYDTSMGITPLEGLAMGTRSGDIDPSIINLMSTILNKTTKQIEEILNKESGILGISEKSNDMRDIWNKIEEGEYQSKLAVEIMTYRIKKYIGSYIAALDFNVDAIVFTGGIGVTDYGIRALALKGFEKIGIELDLEKNEMAQSKYLESEISTINSKLKILA

SEQ ID NO: 9318 - protein, 413 aa, Borrelia burgdorferi
LSNTKGKKMKILIINTGSSSLKFAIYQYENSKKIISGIVEKIKSQKSIIKIVNTDGSTTERFEKGIENHQKAIEKMFKILTNSDLKILKTLSEIKIIGHRVVHGGSSLKNSVILNNSILNKLKQISELAPLHNPNAITAIEAVLKILPHAKQVLCFDTSWHQTIKEHAFLYAIPYSWYKNHNIRKYGFHGLSYSYITKRSSEILNKKIDSLNLIILHLGNGASINAVKNGKSYDTSMGITPLEGLAMGTRSGDIDPSIINLMSTILNKTTKQIEEILNKESGILGISEKSNDMRDIWNKIEEGEYQSKLAVEIMTYRIKKYIGSYIAALDFNVDAIVFTGGIGVTDYGIRALALKGFEKIGIELDLEKNEMAQSKYLESEISTINSKLKILAIPTNEESTILEDIYNLIPKNL

SEQ ID NO: 9319 - protein, 384 aa, Borrelia burgdorferi
FIINTGSSSLKFAIYQYENSKKIISGIIEKIKEKKSIIKIVNTDGSTTERSEKGIENHQKAIEKMFKILTNSDLKILKTLSEIKIIGHRVVHGGSSLKNSVILKTSILNTLKQISELAPLHNPSAIIAIEAVLKILPHTKQVLCFDTSWHQTIKEHAFLYAVPYSWYKNHSIRKYGFHGLSYSYITKRTSEILNKKIDNLNLIILHLGNGASINAVKDGKSYDTSMGITPLEGLVMGTRSGNIDPSIINLMSTILNKNTKQIEEILNKKSGMLGISEKSNDMRDIWNKIKEGEYQSKIAVEIMTYRMKKYIGSYIAALDFNVDAIVFTGGIGVVDYKVRDLALKGFEKIGIELDLEKNKMSQSKTLESEISTIKSKVKILAMQQ

SEQ ID NO: 9320 - protein, 380 aa, Borrelia burgdorferi
INTGSSSLKFAIYQYENSKKIISGIIEKIKEKKSIIKIVNTDGSTTERSEKGIENHQKAIEKMFKILTNSNLKILKTLSEIKIIGHRVVHGGSSLKNSVILKTSILNTLKQISELAPLHNPSAIIAIEAVLKILPHTKQVLCFDTSWHQTIKEHAFLYAVPYSWYKNHSIRKYGFHGLSYSYITKRTSEILNKKIDNLNLIILHLGNGASINAVKDGKSYDTSMGITPLEGLVMGTRSGNIDPSIINLMSTILNKNTKQIEEILNKKSGMLGISEKSNDMRDIWNKIKEGEYQSKIAVEIMTYRMKKYIGSYIAALDFNVDAIVFTGGIGVVDYKVRDLALKGFEKIGIELDLEKNKMSQSKTLESEISTIKSKVKILAM

SEQ ID NO: 9321 - protein, 611 aa, Candida glabrata
MENKEHHHHHHHHHHHHSNGSYVSNKVSSLADGSRVGNYQIVKTLGEGSFGKVKLAYHVTTGQKVALKSINKKVLAKSDMQGRIDREISYLRLLRHPHIIKLYDVIKSKDEIIMVIEYAGNELFDYIVQRNKMSEQEARRFFQQIISAVEYCHRHKIVHRDLKPENLLLDEHLNVKIADFGLSNIMTDGNFLKTSCGSPNYAAPEVISGKLYAGPEVDVWSCGVILYVMLCRRLPFDDESIPVLFKNISNGVYTLPKFLSPGASDLIKRMLIVNPLNRISIHEIMQDEWFKVDLAEYLVPQDLKQQEQFNKKSGNEENVEEIDDEMVVTLSKTMGYDKDEIYEALESSEDTPAYNEIRNAYILIKDNKSLIKDMKQDNNVTQELDTFLSQSPPTFQQNGDGMKASEDQKKKHSGRRLASSVTQQRTFHQPPFMDQSKEEDSTISIPTSLPQIHRANMLAQGLPAASKISPLVTKKSKTRWHFGIRSRSYPLDVMGHIYIALKNLGAEWANPSEEDLWTIRVRWKYDSDESRLIEDGVKKIPNLMKIVIQLFQIETNNYLVDFKFDGWESTYGDSTISTNMSEDEMSTFSAYPFLHLTTKLIMELAVNSQGN

SEQ ID NO: 9322 - protein, 468 aa, Prunus persica
MAHFGSTPEPTKTDEYGNPVHHTTTGTGRTDEFGNPVQHGVADTGYGTGAGYGTHTKPGVVEHHGRPAVLHSKDDQYSRDTQTTTGGYGGDGYTGGEHQEKKGLLGQLQDKLPGGNKDGQYSHDTQTTTGAYGGAGYTGGEHHEKKGIIGQVKDKLPGGQKDDQYCRDTHPTTGAYGGAGYTGGEDHEKKGIIGQVKDKLPGGQKDDQYCRDTHPTTGAYGGAGYTGGEHQEKKGIIGQVKDKLPGGQKDDQYSHDTHPTTGAYGGGGYTGDDTREKKGIIDQVKDKLPGGQKDDHYSHDTHPTTGAFGGAGYTRDDTREKKGIIDQVKDKLPGGRQDDHYSHETHPTTGAYGGAGYTGDDTREKKGVVEKVKEKLPGGQNVHPTTGPYGGGGAAGIGETRERKGVGEKVEEKLPGGHKDDQYLHDTHPTKPTSAARGGVGHTGGEPQLHEKKGLIEKIKDKLPGHNN

SEQ ID NO: 9323 - protein, 224 aa, Escherichia coli
MPFGMAKLVGGICFSLGLILCVVCGADLFTSTVLIVVAKASGRITWGQLAKNWLNVYFGNLVGALLFVLLMWLSGEYMTANGQWGLNVLQTADHKVHHTFIEAVCLGILANLMVCLAVWMSYSGRSLMDKAFIMVLPVAMFVASGFEHSIANMFMIPMGIVIRDFASPEFWTAVGSAPENFSHLTVMNFITDNLIPVTIGNIIGGGLLVGLTYWVIYLRENDHH

SEQ ID NO: 9324 - protein, 1289 aa, Coptis japonica
MAEENGLDGDLNNHQATASTSNSPVQGANGTSETKGAQEKSEKSKEEEKIGQSVPYYKLLSFADSKDVLLMVIGTIAAVANGASMPVMTLLLGDLINAFGQNANNTDTLRVVSKVALKFVYLSIGAGVASFFQVACWMVTGERQAARIRSLYLKTILRQDVAFFDKETNTGEVVGRMSGDTVLIQDAIGEKVGKFIQLFSTFIGGFLIAFVKGWLLTLVMLTSIPPLVFCGALMTITISKMASRGQVAYSQAGIVVEQTIGSIRTVASFTGEKHAVTQYEKYLNKAYLAGIHEGLASGVGLGSVLLVIFCSYSLAVWFGGKMIIEKGYNGGNVINIIVAVLTGSMSLGQASPCLGAFAAGQAAAYKMLETIKRKPEIDSYDTSGHKSDDIRGDIELRDVSFTYPARPDEQIFNGFSLFIPSGTTSALVGQSGSGKSTVISLIERFYDPQAGEVLIDGVNLKDFQLRWIRGKIGLVSQEPVLFASSIRDNIAYGKDGATVEEIKAATERANASKFIDKLPQGLDTLVGEHGTQLSGGQKQRIAIARAILKDPRILLLDEATSALDAESEHIVQEALDRIMVNRTTVIVAHRLSTVRNADTIAVIHRGKIVEKGSHLDLLLNPDGAYCQLIRLQEIGRSEVDKAENVESGLNSSQQHSIGRSISRGSSGVGNSSRHSFSVSFGLPTGHIYETTAGLESTSPAPIGQTQEVPLRRLATLNKPEIPVLLLGVISAMVNGVIFPIFGVLLSSVIKTFYEPEDKLRKDTRFWAFMFIILGVASFVAAPATAYFFAVAGCRLIQRIRSMCFRTVAHMEIDWFDEPEHASGAIGAKLSADASTVRGLVGDALALLVQNAATAVCGLVIAFVANWTLALIILVLIPLIGVNGYVQMKFMKGFSADAKMMYEEASQVANDAVGSIRTVASFCAEEKVMQLYKKKCEGPMKTGIRQGLISGIGFGISFFLLFNVYATSFYAGARLVDAGKTTFSDVFRVFFALTMAALGISQSSSLAPDSSKAKSSTASIFGILDRKSKIDSSDESGMTVENVKGEIELRHISFKYPTRPDIQIFRDLSLAIHSGKTVALVGESGSGKSTVISLLQRFYDPDSGHITLDGIEIQKFQLRWLRLQMGLVSQEPVLFNETIRANIAYGKEGDATETEILAAAELANAHKFISGLQQGYDTVVGERGIQLSGGQKQRVAIARAMVKAPKILLLDEATSALDAESERVVQDALDKVMVNRTTVWVAHRLSTIKNADVIAVVKNGVIAEKGKHNDLINVKDGVYASLVALHTSAS

SEQ ID NO: 9325 - protein, 384 aa, Rhodospirillum rubrum
  misc_feature (1)..(1): Xaa can be any naturally occurring amino acid
  misc_feature (78)..(78): Xaa can be any naturally occurring amino acid
  misc_feature (97)..(97): Xaa can be any naturally occurring amino acid
  misc_feature (122)..(122): Xaa can be any naturally occurring amino acid
  misc_feature (125)..(125): Xaa can be any naturally occurring amino acid
  misc_feature (134)..(134): Xaa can be any naturally occurring amino acid
  misc_feature (162)..(164): Xaa can be any naturally occurring amino acid
  misc_feature (199)..(199): Xaa can be any naturally occurring amino acid
  misc_feature (226)..(226): Xaa can be any naturally occurring amino acid
  misc_feature (239)..(239): Xaa can be any naturally occurring amino acid
  misc_feature (280)..(280): Xaa can be any naturally occurring amino acid
  misc_feature (284)..(284): Xaa can be any naturally occurring amino acid
  misc_feature (356)..(356): Xaa can be any naturally occurring amino acid
  unsure (1)..(384): unsure at all Xaa locations
XKIAIPKERRPGEDRVAISPEVVKKLVGLGFEVIVEQGAGVGASITDDALTAAGATIASTAAQALSQADVVWKVQRPXTAEEGTDEVALIKEGAVLXCHLGALTNRPVVEALTKRKITAYAXELXPRISRAQSXDILSSQSNLAGYRAVIDGAYEFARAFPXXXTAAGTVPPARVLVFGVGVAGLQAIATAKRLGAVVXATDVRAATKEQVESLGGKFITVDDEAXKTAETAGGYAKEXGEEFRKKQAEAVLKELVKTDIAITTALIPGKPAPVLITEEXVTKXKPGSVIIDLAVEAGGNCPLSEPGKIVVKHGVKIVGHTNVPSRVAADASPLFAKNLLNFLTPHVDKDTKTLVXKLEDETVSGTCVTRDGAIVHPALTGQGA

SEQ ID NO: 9326 - protein, 162 aa, Aegilops longissima
MAGMVFGLENPMMTALQHLLDIPDGEAGGAGAAGGEKQGPMRAYVRDVRAMAATPADVKELPGAYAFVVDMSGLGSGDIKVQAEDERVLVISGERRSEEKEDAKYMRMERRMGKLMRKFVLPENADMEKISAACRDGVLTVTVEKLPPPEPKKPKTIQVQVA

SEQ ID NO: 9327 - protein, 159 aa, Aegilops peregrina
MAGMVFGLENPMMTALQHLLDIPDREAGGAGAAGGEKQGPMRAYVRDARAMAATPADVKELPGAYAFVVDMSGLGSGDIKVQAEDERVLVISGERRSEEKEDAKYMRMERRMGKLMRKFVLPQNADMEKISAVCRDGVLTVTVEKLPPPEPKTIQVQVA

SEQ ID NO: 9328 - protein, 159 aa, Triticum turgidum subsp. dicoccoides
MAGMVFGLENPMMTALQHLLDIPDGETGAPGGEKQGPTRAYVRDARAMAATPADVKELPGAYAFVVDMPGLGSGDIQVQVEDERVLVISGERRREEKEDTKYLRMERRMGKLMRKFVLPENADMEKISAVCRDGVLTVTVDKLPPPEPKKPKTIQVQVA

SEQ ID NO: 9329 - protein, 160 aa, Triticum turgidum subsp. durum
MAGMVFGLENPMMTALQHLLDIPDGEAGNTAGGEKQGPTRAYVRDARAMAATPADVKELPGAYAFVVDMPGLGSGDIKVQVEDERVLVISGERRREEKEDAKYLRMERRMGKLMRKFVLPENADMEEISAVCRDGVLTVTVDKLPPPEPKKPKTIQVQVA

SEQ ID NO: 9330 - protein, 479 aa, Triticum monococcum
MEDVAVAALATAPTPVFSPATAGLTLIAAAAAEPIAAVVAGAMEGVPVTFSVPPVRTTTDDGLPAATGGEGGEASAAGSPCSVTSDCSSVASADFEGVGLGFFGAGVEGGAVVFEDSAASAATVEAEARVAAGGRSVFAVECVPLWGFTSICGRRPEMEDAVIAVPRFFGLPLWMLTGNNMVDGLDPISFRLPAHFFGVYDGHGGAQVADYCRDRLHAALVEELSRIEGSVSGANLGAVEFKKQWEKAFVDCFSRVDDEIAGKVTRGGGGNVGTSSVTAMGMVDPVAPETVGSTAVVAVICSSHIIVSNCGDSRAVLCRGKQPVPLSVDHKPNREDEYARIEAEGGKVIQWNGYRVFGVLAMSRSIGDRYLKPWIIPVPEVTIVPRAKDDECLILASDGLWDVLSNEEVCDVARKRILLWHKKNGVNLSSAQRSGDSPDPAAQAAAECLSKLALQKGSKDNITVIVVDLKAQRKFKSKT

SEQ ID NO: 9331 - protein, 315 aa, Escherichia coli
MPDMKLFAGNATPELAQRIANRLYTSLGDAAVGRFSDGEVSVQINENVRGGDIFIIQSTCAPTNDNLMELVVMVDALRRASAGRITAVIPYFGYARQDRRVRSARVPITAKVVADFLSSVGVDRVLIVDLHAEQIQGFFDVPVDNVFGSPILLEDMLQLNLDNPIVVSPDIGGVVRARAIAKLLNDTDMAIIDKRRPRANVSQVMHIIGDVAGRDCVLVDDMIDTGGTLCKAAEALKERGAKRVFAYATHPIFSGNAANNLRNSVIDEVVVCDTIPLSDEIKSLPNVRTLTLSGMLAEAIRRISNEESISAMFEH

SEQ ID NO: 9332 - protein, 489 aa, Escherichia coli
MAISTPMLVTFCVYIFGMILIGFIAWRSTKNFDDYILGGRSLGPFVTALSAGASDMSGWLLMGLPGAVFLSGISESWIAIGLTLGAWINWKLVAGRLRVHTEYNNNALTLPDYFTGRFEDKSRILRIISALVILLFFTIYCASGIVAGARLFESTFGMSYETALWAGAAATILYTFIGGFLAVSWTDTVQASLMIFALILTPVIVIISVGGFGDSLEVIKQKSIENVDMLKGLNFVAIISLMGWGLGYFGQPHILARFMAADSHHSIVHARRISMTWMILCLAGAVAVGFFGIAYFNEHPAVAGAVNQNAERVFIELAQILFNPWIAGILLSAILAAVMSTLSCQLLVCSSAITEDLYKAFLRKQASQKELVWVGRVMVLVVALVAIALAANPENRVLGLVSYAWAGFGAAFGPVVLFSVMWSRMTRNGALAGMIIGALTVIVWKQFGWLGLYEIIPGFIFGSIGIVVFSLLGKAPSAAMQKRFAEADA

SEQ ID NO: 9333 - protein, 489 aa, Escherichia coli
MAISTPMLVTFCVYIFGMILIGFIAWRSTKNFDDYILGGRSLGPFVTALSAGASDMSGWLLMGLPGAVFLSGISESWIAIGLTLGAWINWKLVAGRLRVHTEYNNNALTLPDYFTGRFEDKSRILRIISALVILLFFTIYCASGIVAGARLFESTFGMSYETALWAGAAATILYTFIGGFLAVSWTDTVQASLMIFALILTPVIVIISVGGFGDSLEVIKQKSIENVDMLKGLNFVAIISLMGWGLGYFGQPHILARFMAADSHHSIVHARRISMTWMILCLAGAVAVGFFGIAYFNEHPSVAGAVNQNAERVFIELAQILFNPWIAGILLSAILAAVMSTLSCQLLVCSSAITEDLYKAFLRKHASQKELVWVGRVMVLVVALVAIALAANPENRVLGLVSYAWAGFGAAFGPVVLFSVMWSRMTRNGALAGMIIGALTVIVWKQFGWLGLYEIIPGFIFGSIGIVVFSLLGKAPSAAMQKRFAEADA

SEQ ID NO: 9334 - protein, 489 aa, Escherichia coli
MAISTPMLVTFCVYIFGMILIGFIAWRSTKNFDDYILGGRSLGPFVTALSAGASDMSGWLLMGLPGAVFLSGISESWIAIGLTLGAWINWKLVAGRLRVHTEYNNNALTLPDYFTGRFEDKSRILRIISALVILLFFTIYCASGIVAGARLFESTFGMSYETALWAGAAATILYTFIGGFLAVSWTDTVQASLMIFALILTPVIVIISVGGFGDSLEVIKQKSIENVDMLKGLNFVAIISLMGWGLGYFGQPHILARFMAADSHHSIVHARRISMTWMILCLAGAVAVGFFGIAYFNDHPALAGAVNQNAERVFIELAQILFNPWIAGILLSAILAAVMSTLSCQLLVCSSAITEDLYKAFLRKHASQKELVWVGRVMVLVVALVAIALAANPENRVLGLVSYAWAGFGAAFGPVVLFSVMWSRMTRNGALAGMIIGALTVIVWKQFGWLGLYEIIPGFIFGSIGIVVFSLLGKAPSAAMQKRFAEADA

SEQ ID NO: 9335 - protein, 489 aa, Escherichia coli
MAISTPMLVTFCVYIFGMILIGFIAWRSTKNFDDYILGGRSLGPFVTALSAGASDMSGWLLMGLPGAVFLSGISESWIAIGLTLGAWINWKLVAGRLRVHTEYNNNALTLPDYFTGRFEDKSRILRIISALVILLFFTIYCASGIVAGARLFESTFGMSYETALWAGVAATILYTFIGGFLAVSWTDTVQASLMIFALILTPVIVIISVGGFGDSLEVIKQKSIENVDMLKGLNFVAIISLMGWGLGYFGQPHILARFMAADSHHSIVHARRISMTWMILCLAGAVAVGFFGIAYFNEHPAVAGAVNQNAERVFIELAQILFNPWIAGILLSAILAAVMSTLSCQLLVCSSAITEDLYKAFLRKHASQKELVWVGRVMVLVVALVAIALAANPENRVLGLVSYAWAGFGAAFGPVVLFSVMWSRMTRNGALAGMIIGALTVIVWKQFGWLGLYEIIPGFIFGSIGIVVFSLLGKAPSAALQKRFAEADA

SEQ ID NO: 9336 - protein, 489 aa, Escherichia coli
MAISTPMLVTFCVYIFGMILIGFIAWRSTKNFDDYILGGRSLGPFVTALSAGASDMSGWLLMGLPGAVFLSGISESWIAIGLTLGAWINWKLVAGRLRVHTEYNNNALTLPDYFTGRFEDKSRILRIISALVILLFFTIYCASGIVAGARLFESTFGMSYETALWAGAAATILYTFIGGFLAVSWTDTVQASLMIFALILTPVIVIISVGGFGDSLEVIKQKSIENVDMLKGLNFVAIISLMGWGLGYFGQPHILARFMAADSHHSIVHARRISMTWMILCLAGAVAVGFFGIAYFNEHPAVAGAVNQNAERVFIELAQILFNPWIAGILLSAILAAVMSTLSCQLLVCSSAITEDLYKAFLRKHASQKELVWVGRVMVLVVALVAIALAANPENRVLGLVSYAWAGFGAAFGPVVLFSVMWSRMTRNGALAGMIIGALTVIVWKQFGWLGLYEIIPGFIFGSIGIVVFSLLGKAPSAAMQKRFAEADA

SEQ ID NO: 9337 - protein, 489 aa, Escherichia coli
MAISTPMLVTFCVYIFGMILIGFIAWRSTKNFDDYILGGRSLGPFVTALSAGASDMSGWLLMGLPGAVFLSGISESWIAIGLTLGAWINWKLVAGRLRVHTEYNNNALTLPDYFTGRFEDKSRILRIISALVILLFFTIYCASGIVAGARLFESTFGMSYETALWAGAAATILYTFIGGFLAVSWTDTVQASLMIFALILTPVIVIISVGGFGDSLEVIKQKSIENVDMLKGLNFVAIISLMGWGLGYFGQPHILARFMAADSHHSIVHARRISMTWMILCLAGAVAVGFFGIAYFNEHPAVAGAVNQNAERVFIELAQILFNPWIAGILLSAILAAVMSTLSCQLLVCSSAITEDLYKAFMRKHASQKELVWVGRVMVLVVALVAIALAANPENRVLGLVSYAWAGFGAAFGPVVLFSVMWSRMTRNGALAGMIIGALTVIVWKQFGWLGLYEIIPGFIFGSIGIVVFSLLGKAPSAAMQKRFAEADA

SEQ ID NO: 9338 - protein, 410 aa, Dehalococcoides sp. BAV1
MEQKAIFIDRDGTIVEDVPYCNSPRRVRLLDGVGKAIKRLNDQRYLVILITNQSGVARGYFSEETLGKIHNKLKEELDCFGARLDDIFYCPHHPGQGCTCRKPATGLIDMAVEKYGIDIGRSYFIGDRFIDIQAANRAGCQAVLVPYAPPETDYFKQEVAPDSRPSFLAADFTTAVDWVLADAAGKASVSVVIPTLNEEKNIGCVLPRLRCVPGITEVILVDGKSTDRTVEKALQLWPEIKVINQPGRGKGNAMRAGFEAATGDIVVTLDADGSLAPEELPRYIGPLFEGYQMVKGSRFCRGGGTSDMPLFRRFGNFIFTKMANLVCGCHYTDLVYGYHAFRRQILDSLCLRSDGFEIDTEMYIRAARIGLKVKEVPSYEARRLAGTGKLRSFHDGARILRTILRENFHG

SEQ ID NO: 9339 - protein, 526 aa, Dehalococcoides sp. BAV1
MKKVLVSDALSATGLAPLKEIAQVDVKTGLKPEELISIIGEYDALLVRSQTQVTADIINAGKKLQVIGRAGVGVDNIDLKAATGNGIIVVNAPTGNTISATEHTLALMLAMARHIPRANASLKSGQWKRNEFVGSELKGKTLGIVGLGNIGSEIAKRALALEMRVIGYDPFISMERAKKLQVELLPFEDLLKQADFITLHVPMTGQTKGLIGPKELEMMKPTVRLINTSRGGIIDEEALAKAVKEKRIGGAAIDVFSKEPCTESCLFECDNIIVTPHLGASTAEAQELATSDVVKQVIDVFEGRPARYAVNAPYISAESLPVVGPFMPVARTVGSLVSQLTDGHMKNVTIKYCGELAAYDTTALKALVLGGILEHISEERVNVVNADIVASQRGLGVTEQKESTCQNFSSLITVTIDTDNGKSNTVAGSLVRGDVHIVKLNDYWIDIVPTGGYFLFADHIDRPGLIGSAGKITGDADINISYMHLSRQKARGQALMILALDEPLPEKQRQQLLSLPDVQMVQVVKI

SEQ ID NO: 9340 - protein, 388 aa, Dehalococcoides sp. BAV1
MKLSKRIENLPPYLFVQISKKIAEKRAKGEDVISFAIGDPDLPTPKHILAELCKAAEDPSNHRYPETEGLPVLRKAMAEWYQKRFGVKLNPDTEVLPLIGSKEGIGHAAWCFLDPGDIALVPNPAYPVYAISSQLAGAEVFNLPLNKGNNFLPNLEAIPQNILSKAKVLWINYPNNPTGAVAGLSFFQEVANFAAKHNLAVCHDGPYSEIAFDGYKPVSFLEADGAKDVGIEFHSLSKSYNMTGWRIGMAVGNAKMIDALRRFKSNLDSGIPQAIQLMAIAALNGSQEIINQNCAIYQRRRDRLVEALRNIGMEVTAPKASLYIWAPVPESYTSASFATELLDKTGVVVTPGTGYGTAGEGYIRLSLTVPDEQIEKGIAKLAGYKKSS

SEQ ID NO: 9341 - protein, 127 aa, Dehalococcoides sp. BAV1
MRIMLKSKIHRATITDACIDYEGSITIDKNLMQAANLLPYEQVHVVNVNNGTRLETYVIEGSAGSGQICLNGAAARMGMKGDKVIILGYSLITEEDTLIHQPNLVYVDALNRITKVKNGVANQGLEV

SEQ ID NO: 9342 - protein, 569 aa, Dehalococcoides sp. BAV1
MKLTGAQIVCESLLKEGADIIFGYPGGVLLPLYDTFTQYPALRHILTRHEQGAAHAADGFARVTGKVGVCLATSGPGATNLITGIANAYMDSIPMVAITGQVTRNLIGKDAFQEIDITGITLPITKQNYLVTKASSLADTIKEAFYLARTGRPGPVLIDIPKDVFIEQAEFEYPDEPDLPGYKPVIKGNLMQIQKAARLIETAEKPVIIAGHGVNISGANEELKTLAENCQLPVITTLLGVSSFPEDHVLSYGMLGMHGMAYANMAVAATDLIIAIGMRFDDRVTGKLSSFAPHASVIHIDIDPAEIGKNVRVDVPIVGDVKNVLKSLNKQVECVQHPDWLRQLENWRREHPPLSIRHTDLILPQYIVQQISEATRGNAIVVTGVGQHQMWAAQHYTYIRPNSLVTSGGLGTMGFDLPAALGAKVGCPDETVWCIAGDGGFQMNMQELGTVVQEKAAVKIAVFNNGYLGMVRQWQDLFYNKNYVATPLGCPDFIKIAEAYGIPALNVKRKEDVRPAIEQAMSTEGPFLLNFVIEPEENVYPMVPPGAALHEVLEEPKKEVSACPRRSIP

SEQ ID NO: 9343 - protein, 500 aa, Dehalococcoides sp. BAV1
MKTFLPSKFIVDRIEDRCIKCKVCITQCSFDTHYYDADDDQIKVRNQNCVGCHRCVTFCPTGALVVRNNPLEYRQNANWTPEMIEDIFKQAETGGVLLTGMGMDKAKPIYWDKLLINASQVTNPSIDPLREPMELTTYLGRKPEKATFDKCGNIEVNVAPQVKIDVPLMFSAMSYGAISLNVHRSLAQAAKNMGTMWNTGEGGLHSSLMEFKDNTIVQVASGRYGVQNDYLNSGRIVEIKIGQGAKPGIGGHLPGEKVSADVSLTRMIPMGTDAISPAPQHDIYSIEDLSQLIYGLKEATRYRVPISVKIAAVHNVAAIASGIVRAGADIVTIDGMRGATGAAPKVIRDNVGIPIELALAAVDSRLREEGIRNQASLVISGGIRNSGDVFKAIALGADAVNIGTAALVALGCHLCQQCHTGKCSWGICTSDLALTKRINPEIGAKRLTNLLRGWSLEIKDMLGGLGVNAIESLRGNRLHLRGVGLSAEELKILGVRAAGE

SEQ ID NO: 9344 - protein, 636 aa, Dehalococcoides sp. BAV1
MSQNRNNPQSRMPVSGGPMGGGMHMGGGPMGGMRMAHSGEKARNFKDTMTSLLKYLTPYRFTLIIALVLAIFGTVFTIIGPKLLGNATTKLFEGLVSKVMNAPGAGIDFTYIGNIVLILVGLYAVSAICSYIMGYIMTGVSIKVTYDLRKQIAEKINRLPMKFFDNKTYGEVLSHVTNDVDLISNTLTQSMSQMVTSVVTILGVLVMMFTINWIMALASLIIVPVSIGLISLIVGRSQKYFRKQQDYLGHINGHVEEMYSAHNVMKAFNGEEKSITKFEGLNEELYGASWKSQFLSSIMMPMMNFIGNLSYVVVCILGGFLAIQKTIQVGDILAFVQYVRSFTQPLAQTANIVNILQSTAAAAERIFEFLGEGEEVPEPANPVSLKDISGAVSFKDVSFGYSPTKVIIKNFNADIKPGQRVAIVGPTGAGKTTMVKLLMRFYDVNSGAILVDGINIQDIKRQEYRSAFGMVLQDTWLFNGSIMDNIRFGKLDATDDEVYTAAKTAYVDHFIHTLPNGYEMVMNEESSNISQGQKQLLTIARAVLANPKILILDEATSSVDTRTEMLIQQAMENLMKGRTAFIIAHRLSTIRNADIILVMKDGAIVEQGNHKELLEANGFYASLYNSQFESGLIENN

SEQ ID NO: 9345 - protein, 398 aa, Dehalococcoides sp. BAV1
MTSQVGTDKGFISERAKELKPSGIRKFFDLAAKMGSGAISLGVGEPDFTTPWHIRESAIYALEKGYTMYTSNAGLLELRQEISKYLYQTYGLEYNPETEVLITVGSSEALDLVMRATLNPGDEVLMTDPAYVAYPSCVFMSYGNPVQIPTFEANNFEISAADIAPRITPKTRSILLGYPSNPTGAVMPKAKLAEIAKLACEKNLLVVSDEIYDKIIYSGFEHTCFATLPGMRERSVIINGFSKTYAMTGWRIGYAVGPAAIIQAMTKIHQHTMLCAPIAAQKAALEALRNGQDDVRLMVEEYDRRRRFIVKNFNDMGLSCFEPKGAFYTFPSVRKTGLSSNEFAEKLLMEEKVAAVPGTAFGESGEGYLRCCYATSLKDIEEAMKRFRHFLKHNCPQM

SEQ ID NO: 9346 - protein, 636 aa, Dehalococcoides sp. BAV1
MGKVVGIDLGTTNSEVAVMQGGEPVVIPSAEGSTLIPSVVAINKNGERIVGRQAKNQAILNPENTVYSIKRFMGRKWGEPAGRELPVEADAKRKPYKVIQGNNNEVRVVMGDKDFSPPEVSAMILQKLKSDAEAYLGEKVTEAVITVPAYFNDAQRQATKDAGAIAGLKVLRIINEPTAAALAYGLDKKKDETIAVYDLGGGTFDISILELGEGTFQVKSTAGDTHLGGDDFDQKIIDWLIAEYKKDQGIDLSKDKTALQRLKEAAEKAKIELSTVQQTEINLPFITADASGPKHLNIILTRSKLEQMVMDLVEKSLEPCRQALKDSGKTSAEINEVILVGGQTRMPLVQQKVKDFFGKEPNKGVNPDEVVAIGAAIQAGVLKGEVSDVLLLDVIPLTLGIETLGGVSTALITRNTTIPTSKSQVFSTAADNQPSVEIHVLQGERPMAADNRTLGRFMLDGILPAPRGVPQIEVTFDIDANGMLSVKAKDKGTGREQKITITASSGLSKEEVEKMTREAEAHAAEDTKRKEEIEARNVADNLAYNAEKTLRDNKDKIPAELNTELESKIAAVRTALQGNDVEAIKKTTQELSTALQSVGSAVYGKQQEGAPAQEEPSAEGKKADDEGTVEGEFREV

SEQ ID NO: 9347 - protein, 316 aa, Vitis vinifera
MGWGSVPVQGWRKGPWTPEEDKLLSEYVSSHGEGRWSSVARCSGLNRSGKSCRLRWVNYLRPGLKRGHITTMEEGIIIELHALWGNKWSTIARYLPGRTDNEIKNYWRTHFKKNQKQQKPKAQQPLEPKLQQQQQQQQEDHEIKLENGKMGEAQGKQEAISMEDQCLPVMYQEIDDHQARQQKFTVQSADPTFYTIWYKEGGVNGPMGKQVNLSFTGSLIIAQYPEYSSLSAQHASDRRIHRLRFSSCLVPTRVAYDADFCTVVAQLLSASPGTINFSQSPSDTFLLILFMLTHGDPREPVFSPFFNIVRTNQFTC

SEQ ID NO: 9348 - protein, 244 aa, Vitis vinifera
  misc_feature (104)..(104): Xaa can be any naturally occurring amino acid
  unsure (1)..(244): unsure at all Xaa locations
MGRGRVELKRIENKINRQVTFAKRRNGLLKKAYELSVLCDAEVALIIFSTRGKLYEFCSSSSMLKTLERYQKCSYGAVEVSRPSKELEQSSYREYLKLKSKFEXLQRTQRNLLGEDLGPLNTKELEQLERQLETSLKQVRSTKTQFMLDQLSDLQNKEQVLVESNKALTRKLDEISVKNHLQLSWESGEQSMPYGHQQAQSQGFFQPLECNPTLQIGIILQAQASYLLRVMPKMSMDLSLGGCF

SEQ ID NO: 9349 - protein, 311 aa, Vitis vinifera
MNLFVLLQFMPKKGTPRKNEIVFIAPTGEEINSRKQLEQYLKSHPGNPAISEFDWGTGETPRRSARISEKAKATPPAESEPPKKRGRKSSGSKKDGKETEAATEEQEGKKEISMQDADVTEKANAESEDVSKEIQVENGVKTVAEADQVKNLDVNMEEAGPVEAIDGKDEKIQSDTGDSKVAAAETEVVNAEEAQGEKEVKKQEVAEAVAVDEPAKEAGAEVTQKEGDKLETSATVELNEAVNKDKPNGLGIAPEEEVKEKQEVPDNDGKCKFQVEENGKKLEGDVTENGKVNQMQRAETPQHPAPSPVSC

SEQ ID NO: 9350 - protein, 415 aa, Vitis vinifera
  misc_feature (282)..(282): Xaa can be any naturally occurring amino acid
  misc_feature (291)..(291): Xaa can be any naturally occurring amino acid
  unsure (1)..(415): unsure at all Xaa locations
MAAAAKESYEDADGISMKGVKISGRPLYLDMQATSPVDPRVLDAMLPYYLSSFGNPHSRTHLYGWESDLAVEKARAQEIVFTSGATESNNISVKGVMHFYKEKKRHVITTQTEHKCVLDSCRHLQQEGFEVTYLPVGSDGIVDIDLMRSAIRPDTGLVSVMTVNNEIGVIQPIEEIGNICRELGVPFHTDAAQALGKIPVDVEKMNVSLMSLSGHKIYGPKGVGALYMRRRPRIRVEPQMNGGGQERGIRSGTVPTPLVVGMGAACELAMKEMEYDDKRISXLQERLLNGXKAKLDGVVVNGSKEKRYAGNLNLSFAYVEGESLLMGLKEVAVSSGSACTSASLEPSYVLRALGVDEDMAHTSIRFGIGRFTTEAEIDRAVELTVQQVEKLREMSPLYEMVKEGIDIKSIQWAQH

SEQ ID NO: 9351 - protein, 299 aa, Vitis vinifera
  misc_feature (151)..(151): Xaa can be any naturally occurring amino acid
  unsure (1)..(299): unsure at all Xaa locations
MKGCELCGCPARMYCESDQASLCWDCDAKVHGANFLVARHSRSLLCHVCRSPTPWRASGAKLGHTVSVCERCVDGCGGRKCGGAAEESEGGNDDEVGMEDDDLDEDDEYDDDDDVEDEEEEEEEDDDFGGDDEDGDNQVVPWSSTPPPPEXSSSSSEESLNSFSSGNRDVPGSFTMLSLKRMRETASDLRSQDDFNRPSSQPNYASARAAAARSAADDGEAISEDALRPFKDRRIEQNRPVQPQAGSRTAEIVDSLNRLHNQDITYGSDASSIIAGICNLSKQSGAVDLDCSSSRSRRI

SEQ ID NO: 9352 - protein, 1348 aa, Vitis vinifera
MNTQKIDVQKQKTGSVNCYSGKGSTFSRQPWKMELCFQPDQFPASEGGSSKQMINLGNTANMSTTIAGHFGSPAASAFYATEVYMGFPECDSYPVDSETLSYPSSNLDPASSQSRDTQNIPSCLEKSFGTPYRNSPVCDILFIKSEVEDEHPYRILRENQNQRIPYQLVEPSPRFQLRRQSANPSHSTYSVASGNSSSPAAAASNKSRIRWTHDLHKRFVESVNRLGGAASEHTAMVIKYRIARHLPGSTEEKSEKGTCADFITKFDPETGLRVAEALQLQLEVQTRLHEQLEVYEDFNGVRPIIPTSTNMGTLNTLISRPSVAIAVDFSYIAPGTRAAEESRRNGFVGFLGYKLAMDYEPFDSSGIQVFFSAMDEITVKYGVSVMLQKERDEIMLLNVMELMMIFLHHIKIESPEEGVYAGNGRSAVVGSIPYSRMYGETDMETQIHQLEQEAYSSVLRAFKAQADAITWEKESLITELRKELRLSNEEHRELLGRVNADDVIRRIREWRQAGGLQPGMLTTGQAVHDPIPSPTVSASRKKQKITQSIPSQSFGGPSQSFHPQAIAASNQPSSSAAKRGPILGPKGKKHKSVLPGASSMKSMQYASSGPTGRGQVANRGVNEPAEAATFDPLIGRKVRTRWPDDNNFYEAVITDYNPVEGRHALVYDMGSANETWEWVNLSEISPEDIQWDGEDPGISRRGGYDGSGHGMNRAVGRDSVQGAGRGRGLPKGQSKKDFLPSQNGIGKKAPDDIQILHTDTLIKEVERVFTANHPDPLEIDKAKKVLKEHEQALLDAIGRLADISDGESDTKNPIRQSVEEPQVLLQMAPLQGLSSCNRYQNSINISEFRVEKLSMKSYYIRCEGRDYVSLDGDGNGKKEKKRFRVLIAGGGIGGLVLALAAKHRGFEVKVFEKDLSAVRGEGRHRGPIQLLSSALAVLEAIDENVAKQIMEAGCVTGDRINGLADGLSGEWLSKFDLLTPAIRRGLPVTQVICRMSLQDILVNAVGLEILSNKSKVVDFMEDSNKVTVTLEDGRQYDGDVLIGADGIWSEVRSKLFGRQEAKYSNYTCYSGLTNFVPPYINTVGYRVFLGLNQYFVASDVGNGKMQWYAFNREPPMNNTDSPKGKKQRLLELFRSWCDEVITLILKTPDHMILQRDIYDRDMIYSWGTGRVTLVGDAAHPMQPNLGQGGCMAIEDCYQLILELDKIANSGSSILLSDQIVSALRRYEKKRMFRVGTVHTASRMASEVLAAYQPYMEFGFGPLPGLSTLRITHPGIQVARMFLQVNCLSNKPITGILLSCFWVNEGNAESNVGDNMVVVKEEEDFAVNHGKKLLDIFVSLTVDDGNLKS

SEQ ID NO: 9353 - protein, 312 aa, Vitis vinifera
MELELSLGDASSKPFAFMEKAHRQVANKGLGFSMGLGLGSAGRDQEEQKIHEVADDDDDDDDGEDDDDGRDQRPSMGLPLQLDLLPLAPVPRNQASHQGLTWPSDNGSSEAGSSGNVGLPARGLDVNRLPSTAVTAAAGEEVEDGAAAEVESSPNSAASSFQMDFCIYRGGNGGTKRDFESGEAERTSSRASDEDDNGLTRKKLRLSKEQSAFLEESFKEHNTLNPKQKLALAKQLNLRPRQVEVWFQNRRARWDEVEADGSGLRVSEEVLRDTDRRKQKTPQGASRAEGSQDFQPILHAAPRHHPHHVPLL

SEQ ID NO: 9354 - protein, 185 aa, Vitis vinifera
  misc_feature (102)..(102): Xaa can be any naturally occurring amino acid
  misc_feature (143)..(143): Xaa can be any naturally occurring amino acid
  unsure (1)..(185): unsure at all Xaa locations
MKECELCSFPARMFCESDQARLCWDCDEKVHGANFLVARHSRSLLCHACQAPTPWKASGTRLAPTVSVCEACVLRCDKDRHRSSGEDRESEGGNTDDEEDDXDDHDDDDENDGDEGDEDDDVEEEEDGENQVVPLSSSAASLXLPPDASSSSSEDGEASSRFSARGRGVMVAQSFFAVSKKLRNM

SEQ ID NO: 9355 - protein, 596 aa, Vitis vinifera
  misc_feature (28)..(28): Xaa can be any naturally occurring amino acid
  misc_feature (44)..(44): Xaa can be any naturally occurring amino acid
  misc_feature (265)..(265): Xaa can be any naturally occurring amino acid
  unsure (1)..(596): unsure at all Xaa locations
MVYMDVLTMLVRDMQIDVVPMRDGCTHXIGERNVVPMREEHKTXRLRFLVLGFSNETEVDSQCSRGCDLALGSYYVWQGSNLTFISQLFQTTISEILSYNSQIANQDSVEADTRIRVPYSSCDCINGEFLGKVFNYTVQSGDTYDLVAETYYSNLTTSAWLQNFNSYAANQIPDTDAYLNVTLNCSCGNSTVSKDYGLFLSYPLRPEDNLTSVAESEGLNASLLQSYNPDSNFSAGSGLVYIPTKDTSGSYRALKSRKRKVKEAXLLPTEEHSLQPGHGPGIASDKAVESTGPAFGSSAGLTGITVDKSVEFSYEELAKASDNFNLANKIGQGGFGSVYYAELRGEVRLIGYCVEGSLFLVYEYIENGNLSQHLRGSGGSTTSRGLEYIHEHTVPVYIHRDIKSANILIDKNFHGKVADFGLTKLTEVGSSSLPTRLVGTFGYMPPEYAQYGDVSPKVDVYAFGVVLYELISAKEAVVKENGSVAESKGLVALFEDVLNKPDPREDLRKLVDPRLEDNYPLDSVRKMAQLAKACTQENPQLRPSMRTIVVALMTLSSSTEDWDVGSFYDNQALVNLMSGRWFELLQLAATLNGDTE

SEQ ID NO: 9356 - protein, 931 aa, Vitis vinifera
  misc_feature (113)..(113): Xaa can be any naturally occurring amino acid
  misc_feature (216)..(216): Xaa can be any naturally occurring amino acid
  unsure (1)..(931): unsure at all Xaa locations
MEDGAPPPETALGTVPDSSMDLDFMDELFLGGCWLETTDGSEFLLQSPSNSGSVFDPSSLWPTFGSNNVDLSANLSANNIQEETQRSNFPGNAVESTDKTQSLSQSMTNVAGXPVQSENYLMDDFDLSRRWWIRPKSSPGPSSTVMERLIRALSYIRGSTKNKDALIQIWVPVNRGGRRVLTTNDQPFSLDPSCPRLARYRDISVNYQFSAEEDSXELAGLPGRVFLGKVPEWTPDVRFFRSEEYPRVDYAQHFDVRGTLALPVFEQGSQTCLGVIEVVMTTQKSNYRPELESVCKALEAVDLRSSEVLSTRNVKACNKFYQAALPEILEVLTSACGTHGLPLAQTWVPCIQQGKWGSRHTDGNYIHCVSTVDSACCVADPRTQGFHEACSEHHLLKGQGIAGRAFTTNEPCFSADITSFSKTQYPLSHHARMFGLCAAVAIRLRSIHVPVSDFVLEFFLPVDCRDPEEQKGMLCSLSIIIQKVCRSLRVVTDKELEGETPSLVSELTVLSDGSPGREETQKVQHTPTEKISQEQSSWMASLKEAQQSIDITPPSQKEKVRERLSEKSLEFRQHQQDSSQQGSFDCRDDSTFGKSSLSSVGKTGERRRSKAEQTITLQVLQQYFAGSLKDAAIKSIGVCPTTLKRICRQHGIKRWPSRKIKKVGHSLHKIQLVIDSVKGASGAFQIGNFYSKFPELASPELSGTHPYSTSKLFDHQKPLSVQPEGDNSSTGVAASKSLSSSCSPSSSSSQCCSTGTQEHPSTCSVTGSDPMVGENSAEGMLKRVRSEVELPISSQEELKLLPRSQSHKSLPECPNLESHPAIPQSGSLASQEGDAWRVKVTYGDEKIRFRMQSNWGLKDLRQEIGRRFNIDDSSGFHLKYLDDDLEWVLLTCEADFEECKDICGSSQNHVIRLAIHQISHHLGSSLGSTCP

SEQ ID NO: 9357 - protein, 603 aa, Vitis vinifera
  misc_feature (82)..(82): Xaa can be any naturally occurring amino acid
  misc_feature (593)..(593): Xaa can be any naturally occurring amino acid
  unsure (1)..(603): unsure at all Xaa locations
MNRENDEKRRRIWGVLVKVVGWQGRGDADGQRRISYQRNHTRSISWGTYVKALGNTTARLKDRLLTRSLDEVELHAVRDRSXNEMKKTLNWWDLLWFGIGAVMGSGIFVLTGEAANEYAGPAVVLSYFISGVSAILSVLCYTEFAVELPVAGGSFAYLRVELGDFVAYVAAGNILFEYVVAGAGVARSWTSYFATLCNHDPNDFRFYASSLAEGYNHLDPIAVAVSIVVCVLASLSMKGSSRFNSIASIVHMVIIAFMLVAGLTKADSANFKDFAPFGLRGILKASSMLFFAYVGFDGTTTLGEEIKKPARDIPIGLIGSMSLVMIVYCLLAATLVLMQPYAQIDVDAPYSVAFSAVGMDWAKYIVAFGALKGMTTVLLANIIGQARYFTHIGRTHMAPPFLATINKKTGTPVNATVFMTIANSVIAFFTSLDVLANLLSISTLFIFSLVALALLVRRYYVSGETSDSDRNKFIGFLVLILGSSITMAVYWAVSEHGWIGYIVGGAVWFLATLGLHVTMKQGRKPKIWGAPIVPWLPSASIAINVFILGSMDGSSFARFAVWTGILLVYYLFVGLHASYDAAKVAQKEVQVSXATSMEAGIAS

SEQ ID NO: 9358 - protein, 284 aa, Vitis vinifera
  misc_feature (68)..(68): Xaa can be any naturally occurring amino acid
  misc_feature (83)..(83): Xaa can be any naturally occurring amino acid
  misc_feature (110)..(110): Xaa can be any naturally occurring amino acid
  unsure (1)..(284): unsure at all Xaa locations
MVDKDDDLGLSLALKCPEALPQRPLNLFVQKKALCSDAFHASGTILLSLSLCVFVCFFLLEMRFFGVXELRSECIDVNRAPTXADCEDVGVSSPNSTISSISGKRNDREXNEEENENENEIESSEEDAGGTGDTVRKKLRLSKEQSAILEETFKEHNTLNPKQKLALAKQLNLRPRQVEVWFQNRRARTKLKQTEVDCEYLKRCCENLTEENRRLQKEVQELRTLKLSPQLYMHMNPPTTLTMCPSCERVAVAPSFPIGPASTSAHAHSRAESLEATSKYVGKK

SEQ ID NO: 9359 - protein, 374 aa, Vitis vinifera
  misc_feature (67)..(67): Xaa can be any naturally occurring amino acid
  unsure (1)..(374): unsure at all Xaa locations
MASMAATSKMGLHFSEDLRKKKLNKNVGLAKKLLKVEYYCSPMIRKENLLRRKLSVVANSTGYWAAXTDMINGKKLNGIHVGKMISSTDACMLGKFVEERFVYRQTFVIRSYEIGPDKTATMETLMNLLQETALNHVSSSGLAGNGFGATREMSLRKLIWVVTRIHIQVEKYSSWGDVVEIDTWVDAAGKNGMRRDWIIRDCNTQKIITRATSTWVIMNRETRRLCKIPEQVREEVQPFYLNRLAIAAAAQNHNEKIDKLTDETAGRIRSGLAPRWSDMDANLHVNNVKYIGWILESVPVDVLEHYNLTSMTLEYRRECRQSDLLESLTSMKAKVSEESSNKSRDLLSTHLLRMDDDKAEIIRARSEWQSKQQH

SEQ ID NO: 9360 - protein, 478 aa, Vitis vinifera
  misc_feature (54)..(54): Xaa can be any naturally occurring amino acid
  unsure (1)..(478): unsure at all Xaa locations
MGMTRERPMFYWVLICMLFSFVLTEAAPQTALVTKLPGFNGTFPSKHYSGYVTXDENHGKKLFYYMVVSENNPSEDPVVLWLNGGPGCSSFDGFVYEHGPFNFEASTQGDLPQLHLNPYSWSKLSNIIYLDSPAGVGFSYSENLTDYRTGDLKTASDSHAFILKWFELYPEFLSNPFYIAGESYAGVYVPTLAYEVVKGIKGGIKPILNFKGYMVGNGVTDEEFDGNALVPFAHGMGLISDELFQDIEGLNIYDILEPCYHEKSPETSLGNIRLPSSFQKLGETDRPFAVRKRMFGRAWPLRAPVREGLVPTWPQLLNSGSVPCTDDEVATSWLNNKAVREAIHAALESVAGKWELCTDRILYHHDAGSMIKYHKNLTSBGYRALIFRHLLILFISGSGDHDMCVPYTGSQAWTRSVGYKVVDEWRPWFFDEQVAGYVQGYENNLTFLTVKGSGHTVPEYKPREALAFYSRWLTGRPI

SEQ ID NO: 9361 - protein, 306 aa, Vitis vinifera
  misc_feature (173)..(173): Xaa can be any naturally occurring amino acid
  unsure (1)..(306): unsure at all Xaa locations
MDVNGRGGSSTVLSEEEMDLRRGPWTVEEDLTLVNYIATQGEGRWNSLARCAGLKRTGKSCRLRWLNYLRPDVRRGNITLEEQLLILELHSRWGNRWSKIAQHLPGRTDNEIKNYWRTRVQKHAKQLKCDVNSKQFKDTMRYLWMPRLVERIQAAAAATSGSSPAAVAAHQFXGSCDIVAGSAAVPQMAAGGADFYGGQVSTGYTPENSSTAASSDSFGAQVSPVSDLTEIYNFPVSDNQNPDFFQTGQVGYTDSLISPSGYFNQGLDFQSMEPNTQWYEGGDTATADNLWNVEDIWSVQTQFTNI

SEQ ID NO: 9362 - protein, 249 aa, Vitis vinifera
MATVAKRINNSSEEIELRRGPWTLEEDTLLIHYIACHGEGRWNLLAKCAGLKRTGKSCRLRWLNYLKPDIKRGNLTPQEQLLILELHSKWGNRWSRIAQHLPGRTDNEIKNYWRTRVQKQARQLKIESDSKRFIDAVRRFWMPRLLQKMEQASTSSTAADTVTTNTTNTTTVNSQSSTIPALLPNQITVSSSPPQSSVTSPSISTSDSMKIPLLPEISEHPTSPSQAIGNTVHNNPVINDCSYVEQQCL

SEQ ID NO: 9363 - protein, 239 aa, Vitis vinifera
MAIDTPANPTHESHVRNSPRQVQPGAKVPWSTGLCDCFSDVPNCCMTFWCPCVTFGRIAEIVDSGSSSCALNGLLYTLVAFTTGCACLCSCFNRSKMRKQYKLEGNDCKDCLAHYFCEACALCQEYRELKNRGFDMTLETGQYSGSNYGSGGGRRHAPLGCKCLFAYVLQARAVVGMFEAGDKPKATKNRKASAPKFWGALNPSSPRIHIGIAPLIRKRHSQISHDIIIENYICGLGYI

SEQ ID NO: 9364 - protein, 226 aa, Vitis vinifera
  misc_feature (193)..(193): Xaa can be any naturally occurring amino acid
  unsure (1)..(226): unsure at all Xaa locations
MDVIPMRSSSLELTISVPGFTSSPSLPSSAGEGVCGVRDLDINQVPLGAEEEWTTGSMEDEEESGNGGPPRKKLRLSKDQSRLLEESFRQNHTLNPKQKEALAMQLKLRPRQVEVWFQNRRARSKLKQTEMECEYLKRWFGSLTEQNRRLQREVEELRAMKVAPPTVISPHSCEPLPACHAHYVPSLRARAPXPRLGKDPTNRTTSPTLSSKLPTALHSRHSSAAC

SEQ ID NO: 9365 - protein, 170 aa, Vitis vinifera
MLLLGMLASSTQETSETVSLNRVKEEEVTSQENPEKEKSYRGVRRRPWGKFAAEIRDSTRHGIRVWLGTFDSAEAAALAYDQAAFAMRGPAAVLNFPVERVKESMQEIKCILEEGGSPVVALKKRHSMRRKSPCKKHKSEEVRLENVVVLEDLGTEYLEQLLTFSETSSP

SEQ ID NO: 9366 - protein, 1162 aa, Vitis vinifera
  misc_feature (85)..(85): Xaa can be any naturally occurring amino acid
  misc_feature (198)..(198): Xaa can be any naturally occurring amino acid
  misc_feature (294)..(294): Xaa can be any naturally occurring amino acid
  misc_feature (337)..(337): Xaa can be any naturally occurring amino acid
  misc_feature (514)..(514): Xaa can be any naturally occurring amino acid
  misc_feature (566)..(566): Xaa can be any naturally occurring amino acid
  misc_feature (595)..(595): Xaa can be any naturally occurring amino acid
  misc_feature (609)..(609): Xaa can be any naturally occurring amino acid
  misc_feature (647)..(647): Xaa can be any naturally occurring amino acid
  misc_feature (711)..(711): Xaa can be any naturally occurring amino acid
  misc_feature (752)..(752): Xaa can be any naturally occurring amino acid
  misc_feature (782)..(782): Xaa can be any naturally occurring amino acid
  unsure (1)..(1162): unsure at all Xaa locations
MGLGSRGGERRATHRTPTFSSSAASNMNNPNSRNNTIAQYNADARLLAEFEQSGESGKSFNYSRSVMNAPESVPEDQIIAYLSRXQRGGLVQPFGCMLAIEEPTFRIISYSENSMDFLGLNTLSETTQLKSLIGVDVRTLFTPPSSASLAKAAMSREISLLNPIWVHSRSAQKTFYAILHRIDVGIVIDLEPTRSGDXALSLAGAVQSQKLAVRAISRLQSLPGGDIGVLCDTVVEDVQKLTGYDRVMVYKFHDDDHGEVVSEIRRSDLEPYLGLHYPATDIPQAARFLFKQNXVRIICDCNAKAVRVIQSEELKQPLCLVNSTLRSPHGCHLQYMXNMGCIASLAMAVVINGNDATKLWGLVVCHHTSPRYVPFPLRYACEFLMQAFGLQLYMELQLASQLAEKKILRMQTLLCDMLLREAPLGIVTHSPSIMDLLKCDGAALYYGGRCWLLGVTPTESQVKDIAEWLLTEHGDSTGLSTDSLADAGYPGAALLGDAVCGMATARITSKDFLXWFRSHTAKEVKWGGAKHHPEDKDDGGRMHPRSSFKAFLEVVKSRSLPWEVSXINAIHSLQLIMRDSFQDIEDSSGKVMVHXQKYDSEMQGLNELXSVACEMVKLIETATAPIFGVDSSGCINGWNAKIAELTXLQAKEAMGKSLVDEIVHEDLRGAVDNLLCRALQGKEDKNVELKLKNFGLNQQDSALYIVVNACXSRDYTNDIVGVCFVGQDITSEKIVMDKFIRLQGDYKAIVQXLNPLIPPIFASDGNACCSEWNTSLEKLTGXMRHEVIRKMLPGEVFGGLCPLKSQDTLTRFTILLYQAISGQDTEKFPFGFFDKSGKLVEVLLTANKRTDANGNVIGCFCFLQIDTPDKHQGLGHGPEYRECFSKFKELAYIRQEMKNPLNGIRFTHKLLETTATSVYQKQFLETSEACERQMMSIIADIDMGIIEEGSSMELNVEEFLLGNVLDAVVSQVMMLLKEKKLQLVCEIPEEIKTLPLSGDQIKLQQVLSDFLHNIVHHAPSSDGWIEIKISTGLKMIQDFNEFIHLQFRMTHIGQGLPPDLIQDMFEGGDQWNTQEGLGLNLSRKLLSAMNGRVQYVREHGKCYFLVDIDLKNRRAREKGKQIQVTWNLGIDYSPCFAKLGLVYDYLYYDYLINMAGCQSHLI

SEQ ID NO: 9367 - protein, 180 aa, Vitis vinifera
MASKAVVNSALVLRILTLLLLAASVVVMATNNFKFSDGTKTSFTDVIAYRYVAATGAVGFLYTVAQIPFAVYHACTEKRLLRPEFDFYGDKVISLLLGTGVGAGFAVTFEFKRNLNDFVQGVEDLSGQDLSEFKSKTEKFLDRAIIATGLLFLGFICMAILSVLSSLSRRSAKSSKGFFG

SEQ ID NO: 9368 - protein, 156 aa, Vitis vinifera
  misc_feature (18)..(18): Xaa can be any naturally occurring amino acid
  unsure (1)..(156): unsure at all Xaa locations
MDLRIMGLDSPLFSTLQXMLDAGDDSDKSLNAPTRTYVRDAKAMAATPADVKEYPNSYTFIVDMPGLRSGDIKVQVEDGNVLVISGERKREEEKEGAKYVRMERRVGKFMRKFVLPENANTDKISAVCQDGVLTVTVEKLPPPEPKKPKTIEVKIA

SEQ ID NO: 9369 - protein, 283 aa, Vitis vinifera
MGFDDGCNTGLVLGLGFTATAAALDQTPLKPCTTTDHDQRSKKTCLRFGPLAAAPTSFEPSLTLSLSGETYQVTGKMDMNKVCEEAAADLYRQPSPHSTVSSFSNASVKRERDLGSEEVEIERLSSRVSDEDEDGSNGRKKLRLTKEQSALLEESFKQHSTLNPKQKQALAKQLNLRPRQVEVWFQNRRARTKLKQTEVDCEFLKKCCESLTDENRRLQKELQELKALKLAQPLYMQLPAATLTMCPSCERIGGVTDGASKSPFTMAPKPHFYNPFTNPSAAC

SEQ ID NO: 9370 - protein, 216 aa, Vitis vinifera
  misc_feature (111)..(111): Xaa can be any naturally occurring amino acid
  unsure (1)..(216): unsure at all Xaa locations
MKSHTSLFRLSLLSAALASLFAAGAGAATATPTTYSDNSKAIDFIRTSCNATLYPELCYTSLSAYAKSIQQSAAHLARIAVAISLSTASHMASYVAKLSRQADYGAAPLTXVALHDCFSTFDDAIDQIRGSLKQLKQMKQMKASESFMFQMANVQTWMSAALTNEETCTDGFEDVPDGALKSEVCDRAANVKKFTSNALALVNSYVNKETNPTETP

SEQ ID NO: 9371 - protein, 367 aa, Vitis vinifera
MEIPLISRTPHPPTTSFCSSSGGAGFCVLPATKKRNESKRCFGGFVRASAERSREGIDGGREGERGGGFTSPAMEVTTLNRSFNDTEFPVWEKIGAVVRLSYGIGIYGAMALAGRFICSMTGIDSMGGFNPSLDAILEGLGYAAPPIMALLFILDDEVVKLSPHARAIRDVEDEEIRSFFYGMSPWQFILMVAASSVGEELFYRAAIQGALADIFLRGTNFVTDARGMTSLTGVLPPFVPFAQAFAAVITAALTGSLYYVAASPKDPTYVVAPVLQSRSGRADLKKLFAAWYERRQMKKIYSPLLEGLLALYLGFEWIQTNNILAPIITHGIYSTVILGHGLWKIHDHRRRLRQRVRQLKTEVKNKS

SEQ ID NO: 9372 - protein, 190 aa, Vitis vinifera
MKQLGLQLQDQDSSSSQSTGQSHQEPQLVGIAPTRVPLPFDIAEDGPIFVNAKQYHGILRRRQSRAKMEAQNKLVKARKPYLHESRHLHALNRVRGSGGRFLSTKKLQEPDSTSNAGCHSVSGSGHFHQKGDTTEYEVHQSDTGKFVASTTSSSDVTSVSNSDVLFRQPEHSSDFMKYLGTVIEKFSVIL

SEQ ID NO: 9373 - protein, 879 aa, Vitis vinifera
  misc_feature (81)..(81): Xaa can be any naturally occurring amino acid
  misc_feature (644)..(644): Xaa can be any naturally occurring amino acid
  misc_feature (647)..(647): Xaa can be any naturally occurring amino acid
  unsure (1)..(879): unsure at all Xaa locations
MYGEIATISVANETRKQYTTLRHFPADNRKYCYTLDVISRTRYLVRATFLYGNFDNNKVYPKFDISLGATPWSTIVISDAXTIESSELIFLASDPTISVCLSNATTGQPFISTLELRQFNGSIYYTEYEEDFFLSVSARVNFGADSEAPVRYPDDPFDRIWESDSLKKANYLVDVAPGTEKVSTQMPIDVNKDSRPPEKVMQTAVVGRNGTLSYRLNLDGFPGFGWAFTYLAEIEDLGPEETRKFRLILPNMPDLSKPAVNIQENAQGKYRLYEPGYPNISLPFVLSFKFGKTSDSSQGPLLNAMEINKYLEKRDGCLDGSAIASIVLQYSSEDWAKEGGDPCLPVPWSWVACNSDPQPRIVSIHLSGKNLTGNIPTDLTKLSGLVELWLDGNALAGPIPDFTGLINLKTIHLENNQLSGELPSSLVDLQSLKELYSGNDNLHKGSTGGRHIGIIIGSSVGAVVLLIATIASCLFMHKGKKRYYEQGMHVSNLEVCLFSSIEMSVSVTGFFYEFVSDQLGHGLPAQRIVSSLNDAATEAANCFSLSEIEDATRKFEKKIGSGGFGVVYYGKMKDGKEIAVKVLINNSYQGNREFSNEVTLLSRIHHRNLVQFLGYCQEEGRSMLVYEFMHNGTLKEHLYGPLTXERXISWIKRLEIAEDAAKGIEYLHTGCVPSIIHRDLKSSNILLDKYMKAKVSDFGLSKLAVDGSSHVSSVVRGTVGYLDPEYYISQQLTDKSDVYSFGVILLELISGQEAISNESFGVNCRNIVQWAKLHIESGDIQGIIDPSLRDEYDIQSMWKIAEKALMCVQPHGSMRPPISEVIKEIQEAISIERGAEAAREGNSDASRNSIHSSINMGIDVGPTENYLSFDESIARPTPR

SEQ ID NO: 9374 - protein, 107 aa, Vitis vinifera
MADPLERVARLASENAVVIFSLSSCCMCHAVKRLFCGMGVNPTVYELDQDPRGKEIERALMRLLGNSPAVPVVFIGGKLVGSMDSVMASHINGTLVPLLKEAGALWL

SEQ ID NO: 9375 - protein, 392 aa, Vitis vinifera
  misc_feature (57)..(57): Xaa can be any naturally occurring amino acid
  misc_feature (78)..(78): Xaa can be any naturally occurring amino acid
  unsure (1)..(392): unsure at all Xaa locations
MEPDFKPTISEAHPETMDFLSPAWCNFAVQAIQPELQDQSLVILDNPIKKFGYDTKXPFPKMDQSVKVDDAGIKSPPXWKPNDVKSWIWMQQAMHPELNYNSYFRKKWLSWKIMPFGSSVSIKKWFKDIKLKRKEEGRLQRAEVHAAISVAGVAAALAAIAAESSKQDQSNATKESAVASAAALVAAQCAQVAEAMGAKREHLSTVMSSAMSGTSASDILTLTAAAATSLKGAATLKARAGYKNRLNGSAPVLPIEESNELDSDLEKHRTMLAKGAQLTIHTSDGRCLLRSVSIILNSQAKVILKIRKLNLMNTFSSKKESIIQDLHAELYDDSEADETNTCYLIVLTTNHGTIKLDMGDDYHLYKIWATTVNHMLTLSTSFTRYELQFYKT

SEQ ID NO: 9376 - protein, 246 aa, Vitis vinifera
  misc_feature (158)..(158): Xaa can be any naturally occurring amino acid
  misc_feature (167)..(167): Xaa can be any naturally occurring amino acid
  misc_feature (183)..(183): Xaa can be any naturally occurring amino acid
  unsure (1)..(246): unsure at all Xaa locations
MESLGVRKGAWIQEEDVLLRKCIEKYGEGKWHLVPLRAGLNRCRKSCRLRWLNYLKPDIKRGEFALDEVDLMIRLHNLWSLIAGRLPGRTANDVKNYWHSHHFKKEVQFQEEGRDKPQTHSKTKAIKPHPHKFSKALPRFELKTTAVDTFDTQVSTSXKPSSTSPQXNDDIIWWESLLAEHAXMDQETDFSASGEMLIASLRTEETATQKKGPMDGMIEQIQGGEGDFPFDVGFWDTPNTQVNHLI

SEQ ID NO: 9377 - protein, 261 aa, Vitis vinifera
MSQSDKDFLIIDQGHVYAYQDSTAFIVISETERMSPVADLDVLNGDLAATVSQLLNFPEAIDKFAFPSRSHHTHEHKGLSTIPTDIMDTPKEYLFYMDVPGLCKSDIQVTVEDDNTLVIRSHGKRKREDGEEEGCKYVRLERKAPQKLMRKFRLPENANTSAISAKCENGVLTVVIEKHPPPPKSKTVEMLGLWVVAGCMPRCSGRLLWSGWGKGKCSDLSKFVKLPIILHVERVRVFVQVHFNFGSEWLKSDLCIQIIAL

SEQ ID NO: 9378 - protein, 285 aa, Vitis vinifera
MQPNMGQGGCMAIEDSYQLAMELDKAWEQSIKSGTPIDVVSCLKSYEKARRIRVAVIHGMARMAAIMASTYKAYLGVGLGPLSFLTKLRIPHPGRVGGRFFIDIAMPLMLSWVLGGNSSKLEGRPPSCRLSDKANDQLRRWFEDDDALERAIGGEWFLLPSGESGLQPICLSKDENKPCIIGSVSHTDFPGISTVIPSPKVSKMHARISCKDGAFFLTDLQSEHGTWITDNVGRRQRVSPNFPTRFHPSEVIDFGSEKASFRVKVVRTPPDNAAKNEESKLFQAV

SEQ ID NO: 9379 - protein, 607 aa, Vitis vinifera
MAVDSGLSSPLGPPACEKDAKALQFIEEMTRNPDQVQEKILAEILSQNGETEYLQRFKLAGATDRDTFKSKVPVVTYEDLQPDIQRIANGDRSPILSSHPISEFLTSSGTSAGERKLMPTIHEEWDRRQKLYSLLMPVMNLYVPGLDKGKGLYFLFVKSETKTPSGLVARPVLTGYYRSEHFKKRPYDPYNVYTSPDEAILCVDSFQSMYAQMLCGLLMNKEVLRVGAVFASGLLRAIRFLQVHWQQLAHDISTGILNPKITDPSVREGLAGILKPSQELADFIIQECSGGNWERIITRIWPNTKYLDVIVTGAMAQYIPTLDYFSGGIPLACTMYASSECYFGLNLKPMSKPSEVSYTIMPNMGYFEFLPHDPSAPPLSRDSPPRLVDLADVEVGKEYELVITTYAGLCRYRVGDILQVTGFHNSAPQFQFIRRKNVLLSIDSDKTDEAELQKAVENASLLLREFNTSVVEYTSFADTKTIPGHYVIYWELLVKDPSNSPTDTVLKQCCLAMEESLNTVYRQGRVADNSIGPLEIRVVKSGTFEELMDYAISRGASINQYKVPRCVNFTPIMELLDSRVLSTYFSPAAPHWNPRATTYGLTAGSKN

SEQ ID NO: 9380 - protein, 243 aa, Vitis vinifera
  misc_feature (199)..(199): Xaa can be any naturally occurring amino acid
  unsure (1)..(243): unsure at all Xaa locations
MNMDLRKGPWTAEEDTLLNNYITIHGEGRWNSLARCAGLKRTGKSCRLRWLNYLRPNVKRGNITLQEQLLILELHSRYGNRWSKIAQHLPGRTDNEIKNYWRTRVQKQAKQLKCDVNSKQFRDTMRYVWMPRLVERIKAAGGDSTPTAPATYGHHMSSQILDMPRNGEFGLGYSDPEGSETQVSPVSDMTDYYDFSGGXCSDSQQNGGLEQSNGWSLGGGDSLENLLNDEDIWFLKQQFFDDF

SEQ ID NO: 9381 - protein, 483 aa, Vitis vinifera
MGARFDDTNPEAEKKEYIDHIEEIVQWMGWEPFKITYTSDYFQDLYDLAVELIRRGQAYVDHQTPEEIKEYREKKMNSPWRDRPIEESLKLFDEMRRGMIEEGKATLRMKQDMQSDNFNMYDLIAYRIKANKWCVYPSYDYAHCIVDSLENITHSLCTLEFETRRASYYWLLHVLGLYHPYVWEYSRLNVTNTVMSKRKLNRLVTEKWVDGWDDPRLMTLAGLRRRGVTSTSINTFIRGIGITRSDCSIIRLDRLEYYIREELNKTAPRTMVVLHPLKVVITNLEDGSITDLDAKKWPDAQEDDASAFHKVPFSKIVYIEQSDFRMKDSKDYYGLAPGKSVLLRYAFPIKCTEVILSDDKETVVEVRAEYDSSKKTKPKGVLHWVAEASPGLDPLTVEVRLFDKLFLSENPAELDDWLGDLNPQSKVVVPSAYSVPSLKNAAVGDRFQFERLGYFVVDKDSTPEKLVFNRTVTLRDSYGKGGK

SEQ ID NO: 9382 - protein, 433 aa, Vitis vinifera
  misc_feature (5)..(5): Xaa can be any naturally occurring amino acid
  misc_feature (25)..(25): Xaa can be any naturally occurring amino acid
  misc_feature (36)..(36): Xaa can be any naturally occurring amino acid
  misc_feature (50)..(50): Xaa can be any naturally occurring amino acid
  misc_feature (60)..(60): Xaa can be any naturally occurring amino acid
  unsure (1)..(433): unsure at all Xaa locations
MAHIXAPSVQCQVRVVPTSSFTARXMTAKLWNSLLXNQRKKGTSRSSARXRVLALQSESXTVNRLKDLLNLDITPYTDKIIAEYIWIGGSGIDLRSKSRTISKPVKHPSELPKWNYDGSSTGQAPGEDSEVILYPQAIFKDPFRGGNNILVICDSYTPAGEPIPTNKRHGAAEIFSSQKVINEVPWYGIEQEYTLLQTNVKWPLGWPVGGYPGPQGPYYCGAGADKSFGRDISDAHYKACLYAGINISGTNGEVMPGQWEYQVGPSVGIEAGDHIWCSRYILERITEQAGVVLSLDPKPIEGDWNGAGCHTNYSTKSMREDGGFEVIKKAILNLSLRHEVHISAYGEGNERRLTGKHETASIDTFSWGVANRGCSIRVGRDTEKNGKGYLEDRRPASNMDPYVVTSLLAETTILWEPTLEAEALAAQKLSLKV

SEQ ID NO: 9383 - protein, 672 aa, Vitis vinifera
  misc_feature (132)..(132): Xaa can be any naturally occurring amino acid
  misc_feature (148)..(148): Xaa can be any naturally occurring amino acid
  misc_feature (164)..(164): Xaa can be any naturally occurring amino acid
  misc_feature (182)..(182): Xaa can be any naturally occurring amino acid
  unsure (1)..(672): unsure at all Xaa locations
MVLKKKQDYGFNGFHVSTIPRAPRSIRRRGSIKKPVEDSQICAIDLLATLAGKLLQESESSSASSNVAAGKDRLNISKDGIKQELQDDDKPLKGECLDQGSCEGIVFVSELASQDLSPKYTVEAISTCFASXDYLDKVGCDVMVTCKXKNIFGKVPCKVERGSXDCGETCGDLENGAEIRQXAEGEESGGLTMANRCSSKDSVELCMKNPAQINSDSNVKLSLNRDSIPNASFPKHRNDVKIGIIDDDENSYRCNQHGTKIKAFRSSPCIGDQRIRKLLTSRYWKVAPKLKDCELSNTDGGIKPVFRKRKICGTRKRYQRETTFKRRKLFERHMVVASDGGISSESVTNSPEKNMNTEMGGSAAMLHGVKFSIKSFRVPELFIEVPETETIGALKRTVMEAVNSIFGGGLHVGMFLQGKKVRDDYKTLRQTGISHNDNLDTLGFALEPSPIHPSPPLHTEDPPFLLPSDTSQLLTRSPDPPTFDSGFSDATPDPSPLTNLGNQVEKIHDSVPSPTDILTDKTMPDSRALVAVPAMSLEALAVVPMNMKTNRADLVQRRTRRPFSVSEVEALVHAVEELGTGRWRDVKLRAFDNAKHRTYVDLKDKWKTLVHTARISPQQRRGEPVPQEVLDRVLSAHAYWSEHQAKQHGKHQVGTLRITGPLAERDGIGQDI

SEQ ID NO: 9384 - protein, 345 aa, Vitis vinifera
  misc_feature (280)..(280): Xaa can be any naturally occurring amino acid
  misc_feature (298)..(298): Xaa can be any naturally occurring amino acid
  unsure (1)..(345): unsure at all Xaa locations
MKRLGSSESLGALMAICPTTDEHSPRNNHVYSREFQTMFDGLDEEGCVEESGQIVEKKRRLSVDQVKALEKNFEVENKLEPERKVKLAQELGLQPRQVAVWFQNRRARWKTKQLERDYGILKANYETLKLNYDAIQHDNEALLKEVWDILPTMRMIRELKSKLNEEKTESNLSVKEELVVSESDEKVKVMEQSETAMGAGVGGSDAKDLSNDDSFKDGNGGGRVSVFPDMKDGSSDSDSSAILNEDNSPNAAISSSGVLQNNHHHHLLMSPPSSSLRFNXSSSSSINCFHFSDSSRPXLGNTQKAYQPQFVKMEEHNFFGADESCNFFSDDQPPTLPWYCPDQWT

SEQ ID NO: 9385 - protein, 186 aa, Vitis vinifera
  misc_feature (173)..(173): Xaa can be any naturally occurring amino acid
  unsure (1)..(186): unsure at all Xaa locations
MPQSSGSKALTITSLVVRLLTLIFLLASLIVIATDSATMKIDFTEVKIRLKNVYSYRYMVSVAVIGLAYTFLQIPFAVHYACTGKRLGAHDGLLKFEFFGDKVISYLLATGVGAAFGATFDLKKNLDDLERLVRRMNIYGSALLFSEIRSKLDDFFNLAYVSAGLLLLGFLCXGVSSIISSLALSK

SEQ ID NO: 9386 - protein, 342 aa, Vitis vinifera
  misc_feature (342)..(342): Xaa can be any naturally occurring amino acid
  unsure (1)..(342): unsure at all Xaa locations
MQNEHQEADDVLWTWVSFEQMELPRLLSKLPYMQERLHSQVTVCNVKFIRNGQCSHQTDLSKVLTSYPYQDPHNVGIMTSYGPQAMVHPHLFGMHQPRMPLPLEMEEEPVYVNAKQYHGILRRRQSRAKAELEKKAIKVRKPYLHESRHQHAMRRARGCGGRFLNTKKLDNNDANTTAEKGSVSGAALSTQSASSSGSEHLPTNSSRNLDSSSVQQEEKGRTIQDMLEAHTYSNGNRNGHGLSSAYHSSNGSEGGEAGGAVSTLRTETLMVTWHFPGNSFLALVTWRFWGDTRDGDTWFGLCCLHSNPTSISTIHPFCIKRQKPKIVGLTSRDSVNLEILNX

SEQ ID NO: 9387 - protein, 333 aa, Vitis vinifera
MSQILSSLALYEIKESGSHHTPKNGDGDDAEQAKLRVGLNFAIITEKPNVQWSDVAGLESAKQALQEAVILPVKFPQFFTGKRRPWRAFLLYTKAVATEADSTFFNMSSSDLVSKWTVLLPSFSLMKLIPYVGQRGEGNESEASRCIKTELLVQMQGVGHNDQKVLVLTATNTPYSLDQAIRRRFDKRIYIPLPDLKARQHMFKVHLGETPHNLTERDFEHLAYRTDGFSGSDISVCVNNVLFEPVLIIKDASYFVKTFNSIWVPCDPIQRGAVQVTLQEIEVQSLASKVLPPPISRTNFEKVLARQRPTVNKADLIFGEYAQTVVDFPDLWF

SEQ ID NO: 9388 - protein, 887 aa, Vitis vinifera
  misc_feature (116)..(116): Xaa can be any naturally occurring amino acid
  misc_feature (731)..(731): Xaa can be any naturally occurring amino acid
  misc_feature (749)..(749): Xaa can be any naturally occurring amino acid
  misc_feature (753)..(753): Xaa can be any naturally occurring amino acid
  misc_feature (756)..(756): Xaa can be any naturally occurring amino acid
  misc_feature (760)..(760): Xaa can be any naturally occurring amino acid
  unsure (1)..(887): unsure at all Xaa locations
MDSNNTLKSAQFLIQETYPRSRTSEQLRWLTLHVVEEVCQTETLSMPMEQQQQLNIEDGSKTQRAEWVLNSPEPPGLCHEIVSSIKSAVFPNGGKHSSSSTKQTRSTAAGVVSFLXGLFPILTWGRNYKATKFRNDLMAGLTLASLSIPQSIGYATLANLAPQYGLYTSVVPPLVYALMGSSREIAIGPVAVVSLLLSSMIQNVVDPVANAVAYRKLVLTVTFFAGTFQFIFGLFRLGFLVDFLSHAAIVGFMGGAAIVIGLQQLKGLLGISHFTTKTDVVSVLEAVFRSLHHQGRRNKKLFWLPAIAPLISVVLSTAIVFLTKADEHGVKIVKHIKRGLNPISAHELQFSGQHVGQAAKIGLVSAIVALTEAIAVGRSFASIRGYHLDGNKEMVAMGFMNIAGSLTSCYVATVFLSLELLTRLLYFTPIAILASIILSALPGLIDIPEAYHIWKVTISFAKIILNSIRPSVEGLGKLPGTDIFCDINQYPMAIKTPGILIVRINSGLLCFANANFVRERIMKRVTEKDEEGKENSKERTQAVILDMSTVMNIDTSGICALQEVYNKLVSHNIHLAVANPRWQVIHKLKLAKVVDKIGKDWIFLSVGEAVDACSSKMVSMSMPALGFSYPGTVKCCSINIQGNRRSSFTQHKRYGLGKLLTRANIPNGVVFRLKPKQEVPKNIEEKAKIVFGRTENMGAEEEKVQENEKSRPTQNPMSQAQFLSWKRQKMXWGNSMPKSWWSLQEAGAXCGDXNNXFEFXKVGKLLTTYLGLPLGVTFKSLIVWNVVEEWVHKSLAWKIVLEISFGEVVPLEMGHGGNVWGKTGRQYINKKRHFKEAPQRIQEDADVSARRDEAARKRVEDIAAGAVQMNGRELFLHEPWVFDNTRY

SEQ ID NO: 9389 - protein, 247 aa, Vitis vinifera
  misc_feature (4)..(4): Xaa can be any naturally occurring amino acid
  misc_feature (84)..(84): Xaa can be any naturally occurring amino acid
  misc_feature (146)..(146): Xaa can be any naturally occurring amino acid
  misc_feature (204)..(204): Xaa can be any naturally occurring amino acid
  unsure (1)..(247): unsure at all Xaa locations
MAQXRSTGVVRWFSDQKGFGFITPNEGGEDLFVHQSSIKSDGFRSLGEGETVEFQIVLGEDGRTKAVDVTGPDGSSVQGSKRDXYGGGGGGGGRGGRSGGGYGSGWRTGDRGGNGGGGAACYNCGGTGHLARDCVRRNNGGGGGGXGGGGGGGGGGCYTCGQPGHLARDCSRPSGGGGGGGGGGCYNCGDYGHLARDCTLESGXAGRFGGGGGGGGGRFGGGGGGGGCYNCGQEGHFARECPNPNPS

SEQ ID NO: 9390 - protein, 362 aa, Vitis vinifera
  misc_feature (191)..(191): Xaa can be any naturally occurring amino acid
  unsure (1)..(362): unsure at all Xaa locations
MATAVTAAVSLPSSKTTSLSARTSIISPERISLKKVPLFYRDISAGGRVVSIRAQVTTEAPAKVEKISKKNEEGVIVNKFKPKNPYIGRCLLNTKITGDDAPGETWHMVFSTEGEVPYREGQSIGVIADGVDKNGKPHKLRLYSIASSALGDFGDSKTVSLCVKRLVYTNENGELVKGVCSNFLCDLKPGXEVKITGPVGKEMLMPKDPNATIIMLATGTGIAPFRSFLWKMFFEKHEDYKFNGLAWLFLGVPTSSSLLYKEEFEKMKEKKPENFRLDFAVSREQSNAKGEKMYIQTRMAEYAEELWELLKKDNTYVYMCGLKGMEKGIDDIMVSLAARDGIDWIEYKRQLKRAEQWNVEVY

SEQ ID NO: 9391 - protein, 268 aa, Vitis vinifera
MGHLIEEKALGDDHQRGDSLEEKISLFFDEEDEELDRNSEGDWADDEAANNELHDPIERKEFWDSQEALLLEIMERCNSMGAKLREEIGRVVERARETLVCSCSKSNSDGCALCLRRRVVDLLCLKGFSASLRTSKWRHTHKFPGGSHEYIEVMASTPGRKKQIPFLIELEFRTEFEMAKACDEYRRLIAQLPKSYIGKSDYLNAILRVVCDAAKRSMKEQKIHMGPWRKRSFMQMKWSGYNDRKQPSKDQPWNKFSLSGITAAVVVK

SEQ ID NO: 9392 - protein, 678 aa, Vitis vinifera
MVETLVKRSFRDSASASRSFASSFPAMTRELRGLFCPGERERATSFGRKEAEFEVEATHERMMDLCPGWGAELRKRRLWSATCQICVREQKKKPVKLGGFKVKRVGVGRRIQPFGCFALTNVEAPLRIKKMRRFVSGVLSSYQKRSLSHRSLRFFSSTTSLPNSDSPSPSSSSSAAMPTPVTLETINPKVLECEYAVRGEIVTLAQLLQQELQEKPGSLPFDEILYCNIGNPQSLGQQPITFFREVIALCDHPPILDKSETQGLFSADAIERAWQILDQIPGRATGAYSHSQAMIIPPSTMGFWEGIKGLRDTIAAGIEARDGFPSNPNDIFLTDGASPAVHMMMQLLIRTEKDGILCPIPQYPLYSASIVLHGGTLVPYYLDEATGWGLEISELQKQLEDAKSKGITVRALVVINPGNPTGQVLSEDNQRDIVEFCKKEGLVLLADEVYQENVYVPDKKFHSFKKISRSMGYGEEDISVVSFQSVSKGYYGECGKRGGYMEVTGFGADVREQIYKVASVNLCSNITGQILASLVMSPPKTLEDALNSLEGVTCNKAEGAMYLFPRIHLPEKAIKAAEAAKTAPDAFYARRLLNATGIVVVPGSGFRAVWLGLLITPMGVSSYSNSSKSGGHTHLESEIHVPGTWHFRCTILPQEDKIPAVVSRLTEFHKGFMEEFRD

SEQ ID NO: 9393 - protein, 156 aa, Vitis vinifera
  misc_feature (97)..(97): Xaa can be any naturally occurring amino acid
  unsure (1)..(156): unsure at all Xaa locations
MDLRVMGFDSPLFSTLQHMLDAGDDSDKSLNAPTRTYVRDAKAMAATPADVKEYPNSYTFIVDMPGLRSGDIKVQVEDGNVLVISGERKREEEKEGXKYVRMERRVGKFMRKFVLPENANTDKISAVCQDGVLTVTVEKLPPPEPKKPKTIEVKIA

SEQ ID NO: 9394 - protein, 144 aa, Vitis vinifera
  misc_feature (88)..(88): Xaa can be any naturally occurring amino acid
  unsure (1)..(144): unsure at all Xaa locations
SPLFSTLQHMLDAGDDSDKSLNAPTRTYVRDAKAMAATPADVKEYPNSYTFIVDMPGLRSGDIKVQVEDGNVLVISGERKREEEKEGXKYVRMERRVGKFMRKFVLPENANTDKISAVCQDGVLTVTVEKLPPPEPKKPKTIEV

SEQ ID NO: 9395 - protein, 120 aa, Vitis vinifera
MDGPSGVRKGAWTREEDVLLRTCIEKYGEGKWHQVPFRSGLNRCRKSCRLRWLNYLRPDIKRGKFKTDEVDLIIRLHKLLGNRQAPWALIAGRLPGRTSNDVKNYWNTHLSKKFFGMPPF

SEQ ID NO: 9396 - protein, 631 aa, Vitis vinifera
  misc_feature (15)..(15): Xaa can be any naturally occurring amino acid
  unsure (1)..(631): unsure at all Xaa locations
MHGLGGGERVPLLGXEGGRKRNDTLVNGHLTDLEHGDAIPAANVGFCRVLSLAKPDAGKLVLATIALLIASTSSILIPKFGGKIIDIVSREIITPEQKTEALNAVKNTILEIFLIVIVGSICTALRAWLFSSASERVVARLRKNLFSHLIQQEIAFFDITRTGELLSRLSEDTQIIKNAATTNLSEALRNLSTAFIGLGFMFATSWKLTLLALAIVPAISVAVRKFGRFLRELSHKTQAAAALAASIAEESFGAIRTVRSFAQEAYEISRYSSQVEETLNLGIKQARVVGLFFGGLNAASTLSVIVVVIYGANLTINGSMSPGALTSFILYSLTVGSSVSGLSGLYTVAMKAAGASRRVFQLLDRVSSMPKSGNKCPLGDQDGEVELNDVWFAYPSRPDHMVLKGITLKLQPGSKIALVGPSGGGKTTIANLIERFYDPIKGRILLNGVPLVEISHEHLHRKISIVSQEPVLFNCSIEENIAYGYEGKASSADVENAAKMANAHEFISKFSEKYQTHVGERGVRLSGGQKQRVAIARALLMNPRVLLLDEATSALDAESEYLVQDAMDSLMKGRTVLVIAHRLSTVKSADTVAVVSDGEIVESGTHDELLDKDGIYTALVRRQLQGPRNEV

SEQ ID NO: 9397 - protein, 230 aa, Vitis vinifera
MESLGVRKGKWTREEDFLLRKCVEKYGEEKWHLVPLRAGLSRCRKSCRLRWFNYLKPNIKRGKFASDEVDLMIRLHKLLGNRQLCFSRWSLIAGRLPGRTANDVKNYWHHHRFKKMVPIQEKGKDKAQTNSENTLIKPKPCKLFLGFTFKTTAVDASETQGSTCSELQPTLVQPNQDILWWESLFADHTIEDQELIASLLADETASAVDTNGGGNFDFPFEMGLIDEVMR

SEQ ID NO: 9398 - protein, 156 aa, Vitis vinifera
MDLRVMDFDSPLFSTLQHMLDAVEDSDKSLNAPTRTYVRDAKAMAATPADVKEYPNAYAFIIDMPGLKSGDIKVQVEDDNVLMISGERKREEEKEGAKYVRMERRVGKFMRKFVLPENANTDKISAVCQDGVLTVTVEKLPPPEPKKPKTIEVKIA

SEQ ID NO: 9399 - protein, 157 aa, Vitis vinifera
  misc_feature (127)..(127): Xaa can be any naturally occurring amino acid
  unsure (1)..(157): unsure at all Xaa locations
MDLRIVGFDCPFFSTLQNMIDTGDDSDKSLNTPTRTYVRDAKAMAATPADVKEYPNSYAFIIDMPGLKSGDIKVQVEBDNVLVISGERKREEEKEGAKYVRMERRVVGKFMRKFVLPENANTDKISXVCQDGVLTVTVEKLPPPEPKKPKTVEVKIA

SEQ ID NO: 9400 - protein, 356 aa, Vitis vinifera
MALLSDLINLNLSDATDKIIAEYIWIGGSGMDLRSKARTLSGPVSDPHKLPKWNYDGSSTGQAPGEDSEVILYPQAIFKDPFRRGNNILVMCDAYTPAGEPIPTNKRHNAAKIFSHPEVLAEETWYGIEQEYTLLQNSVKWPIGWPVGGYPGPQGPYYCGIGADKAFGRDIVDSHYKACLYAGINISGINGEVMPGQWEFQVGPSVGISAGDELWVARYILERITEIAGVVVSFDPKPIQGDWNGAGAHTNYSTKSMRNDGGYEIIKKAIEKLGLRHKEHIAAYGEGNERRLTGRHETADINTFLWGVANRGASIRVGRDTEKEGKGYFEDRRPASNMDPYVVTSMIAESTILWKP

SEQ ID NO: 9401 - protein, 199 aa, Vitis vinifera
  misc_feature (29)..(29): Xaa can be any naturally occurring amino acid
  unsure (1)..(199): unsure at all Xaa locations
MGLNMIKYKLILYSWDSEKPHELKFLIAXSLRDKLDNVWFLARQAAYVLESCFISSGLLKRYEALNLGNLRYLAIVIESEEAHQIPKVIELLNWLATIGVKHVCLYDNEGVLKKSKEAILEKLTDATLFEGVDENNLLLDQEHITLEFASISDGKGAVTKAANILFMKYLKSADSGGSSAESIFTEPHMAEALKAVGLF

SEQ ID NO: 9402 - protein, 663 aa, Vitis vinifera
  misc_feature (187)..(187): Xaa can be any naturally occurring amino acid
  misc_feature (218)..(218): Xaa can be any naturally occurring amino acid
  misc_feature (524)..(524): Xaa can be any naturally occurring amino acid
  unsure (1)..(663): unsure at all Xaa locations
MKRPSAIRRPVRHYNSFLEFGASVSMTTLIWSGLTFIPLCVTMNPRNLPALNPKAHLVKLSFMLYIFINQVHPMMALKGNKSSTTKNYTFWIIGPTWTSNTTSPREVVEAPLNPDSIRPGFSRTNDRNPIYLCADIYNRSVELPESIKIYLTSKLLIPNVRIRASSWGCNTQLGSTRGKFKAWLNKXGESMLGLSIVVPKYAWVADVLRRVKSLLIAXFLSLLSIVVAECAWVADVLRRSDAVGSGILALSFVVAKYYWVANVLRLEAVDCGILACLDNLLLLCSPLLLLSMRWLLIFQGGGWKWFYWVGMEFLLAKSERSYVPGSKLSKSDAFWLLTGGNYLNCHLETPGGRSISFKVPLRLDSSGKGMGEGLWEFMPKRGLTPKKNEIIFTSPTGEEINSKRQLEQYLKSHPGGPAIQEFDWGTGETPRRSARISEKAKATPPRELEPAKKRSRKSSASKKDNKETETIPDETETKEVHMQEAKKTEDNAEAEIQKDVVNENLIETKDKAEDVNTKTEEAPXEGTQVEQDVKIPDDAEEGKKNAEKEPGEKGGDSEVAQNEKESTEGTEVQENVDEALVKADKDDGPGEHDKPDAVIADEKKPEVEGVEKEKENRSALESEGEIKEKESANGNNVEQHSLKDSEISKKVEEGIENGSQAKP

SEQ ID NO: 9403 - protein, 328 aa, Vitis vinifera
  misc_feature (70)..(70): Xaa can be any naturally occurring amino acid
  misc_feature (298)..(298): Xaa can be any naturally occurring amino acid
  unsure (1)..(328): unsure at all Xaa locations
MCHHGIRQKSFWLLFEGEKPAAWGGRLAVGGVLFGSLQSSGVGRWLSLQICGSLIRQIPELRQLTDHQNXVVANTSFETGGIGQCASNVPDEYRIIKLPNEWSYHVVRTPNEMMQDLGGSIDSHVKALMGKLECSGDSSLQNALNLVRGYLNLIPSYGYREVLILYSALSACDTGDIIPTLPANGVHQAQVLHESIEVAGQSIPCNFYFMRVILFMKSMEDPHLVFGGVPELLRLANKRMIARCEPLVNTGQISRVSVPMNLAFVVVAELDVLIGGLINGYGIEGSSHSYGLFSDTVXAHEIILADGQLVKAQQYTEEEREKVATPLR

SEQ ID NO: 9404 - protein, 755 aa, Vitis vinifera
  misc_feature (276)..(276): Xaa can be any naturally occurring amino acid
  unsure (1)..(755): unsure at all Xaa locations
MVKLASARESRLYGTRLARNRFEYINAGLYVFATIVLLSGFVSQLSRDPKSGLALMMIGLGLLFVVNVHDLVAHMAGIDYRLGLMEFDLQLGLVEFSVPFVQAMGYLLSFLGILFLFLQEEKGYGYFKLERHALNMLIAGPVLWVLGSIHNSCQIYERADGHIQILQQSVHIPFLMGSLLFMVGSIINCHEQARLVHHGIDLLGMAWVWLGMFGSLLFFIGGLMNVVKVFKMQQMDGLRLEKLRGGAQERLIHEREGQIPLILEDQRRRKIHVEEXMPVVVPTPYRDVLGSKGLHISAVSFNQLGLLYGMASVSSQPQFRYTQPPSKVLHLRNLPWECTEEELIELGKPFGKVVNTKCNVGANRNQAFIEFADLNQAIAMISYYASSSEPAQVRGKTVYLQYSNRQEIVNNKTSADVAGNVLLVTIEGADARLVSIDVLHLVFSAFGFVHKITTFEKTAGFQALVQFSDSETASAAKNALDGRSIPRYLLPEHLGPCTLRITFSAHTDLSVKFQSHRSRDYTNPYLPVASSAIDGSGQFSMGFDGRKVEPESNVLLASIENMQYAVTLDVLHMVFSAFGPIQKIAMFDKNGGVQALIQYPDVQTAIVAKEALEGHCIYDGGFCKLHISYSRHTDLSIKVNNDRSRDYTSPVLSSQPSVLGQQPVPIPGPSTHQFEGAQYASPSDQPVIHQPSAGWATSAAAAGAPPPPPQSMPMQQHNHPYMPPGTMPPQPVPGMMPMQTQTGLPQSAAMPPYSH

SEQ ID NO: 9405 - protein, 502 aa, Vitis vinifera
MASLNCSAEQLAQLLGPNGTAAASFICDRFSAVSNNFTDTNYAVDNTYLLFSAYLVFAMQLGFAMLCAGSVRAKNTMNIMLTNVLDAATGGLFYYLFGFAFAFGSPSNGFIGKHFFALKSIPTKTFDYSNFLYQWAFAIAAAGITSGSIAERTQFVAYLIYSSFLTGFVYPVVSHWFWSSDGWASASNSGNLLFGSGVIDFAGSGVVHMVGGIAGLWGAFIEGPRIGRFGHSGRSLVLRGHSSTLVVLGTFLLWFGWYGFNPGSFLKISVAYSGGGNYYGQWSAVGRTAVTTTLAGCTAALTTLFGKRILSGHWNVTDVCNGLLGGFAAITSGCSVVEPWAAIICGFVAAVVLISCNKLAEKVKFDDPLEATQLHGGCGAWGIIFTALFATKDYVSQVYNSGQPGRPYGLFMGGGGRLLAAHIIQILVITGWVSATMGTLFFILHKLKLLRISAEDEMAGMDLTRHGGFAYMYHEDDDSNKHAFELRKIEPAAPTTIVTTTN

SEQ ID NO: 9406 - protein, 386 aa, Vitis vinifera
MAKPVSIEVWNPCGKYRVVSTKPMPGTRWIDLLVQQDCRVEICTQKKTILSVEDIIALIGDKCDGVIGQLTEDWGETLFSALSRAGGRAFSNMAVGYNNVDVNAANKYGVAVGNTPGVLTETTAELAASLSMAAARRIVEADEFMRAGLYDGWLPHLFVGNLLRGQTVGVIGAGRIGSAYARMMVEGFKMNLIYYDLYQATRLEKFVTAYGQFLKASGEQPVTWKRAASMDEVLREADLISLHPVLDKTTYHLVNKERLSMMKKEAILINCSRGPVIDEVALVAHLKENPMFRVGLDVFEDEPYMKPGLAEMKNAIVVPHIASASKWTREGMATLAALNVLGKIKGYPIWHDPNKVEPFLNENSLPPAASPSIVNAKALVACFKAM

SEQ ID NO: 9407 - protein, 394 aa, Vitis vinifera
MGFEKEASSSSYGLDSVPREDTPLLSKSRPLSSQTKTFANVFIAIVGAGVLGLPYTFKRTGWVLGSLMLFAVAILTYHCMMLLVHTRRKLDSLHGFSKIASFGDLGFAVCGSIGRVAVDAMIVLSQAGFCISYLIFIANTLAYVSNSSPSNPILGLTPKSFYIWGCFPFQLGLNSIPTLTHLAPLSIFADVVEIGAMGVVMVEDVLIFLKQRPALRAFGGFSVFFYGLGVAVYAFEGIGMVLPLESEAKDKDKFGKVLALSMAFISVMYGGFGALGYFAFGEETKDIITTNLGQVMERRFRDGAYCLWLRWVAVLGVILVALMVPNFADFLSLVGSSVCCVLAFVLPSLFHLIVFKDQLSRKGMALDVAILVLGLVFGVSGTWSSLLEIVSPSA

SEQ ID NO: 9408 - protein, 582 aa, Vitis vinifera
  misc_feature (64)..(64): Xaa can be any naturally occurring amino acid
  misc_feature (78)..(78): Xaa can be any naturally occurring amino acid
  misc_feature (405)..(405): Xaa can be any naturally occurring amino acid
  misc_feature (468)..(468): Xaa can be any naturally occurring amino acid
  unsure (1)..(582): unsure at all Xaa locations
MGSSSQLLLSATCFSTPFSNDGFMCCNSNRLAATSSLSSTAKWQQIYERLSSSSSPSQSSVVVXNPTSPFHFLLPNHXSNNNNNNNDGGNGGGGWNSSWGSNWNWGWWGNEENALFIFFCSRVLHERGSETAHKLRAVLLFVFSVLYSFFHFQLDAALSKEKEEEGVWEVRGGKWHKIIPDSSKDEFLVVTPGIGAVGAPKSSTLPNLWLQCKELFLRLMLPEGFPHSVTSDYLDYTLWRGVQGVASQISGVLATQALLYAVGLGKGAIPTAAAVNWVLKDGIGYLSKILLSKYGRHFDVHPKGWRLFADLLENAAYGLEILTPAFPHQFLLIGAVAGAGRSAAALIQLLFHTHNHLSSFALLLGSYFPLNNPAIGNSKRKMPTHGEGDGGENVTAFLGGPRLLXGAVSTLALLLQRNFAEVIAKGEAPRNGLVFSEYLLSGQVPSIKEVNEEEPLFPVVPLLNAKPXYKAQSAVLSTEAKDAAAEIERRLQLGSKLSEVVSSKEDVLALFDLYRNEAYILTEHKGRFFASLIRKRPCPPPFHITESSSREILKSLNICNSSPKVSNSQSLEFLESLMFQPP

SEQ ID NO: 9409 - protein, 218 aa, Vitis vinifera
  misc_feature (168)..(168): Xaa can be any naturally occurring amino acid
  misc_feature (170)..(170): Xaa can be any naturally occurring amino acid
  unsure (1)..(218): unsure at all Xaa locations
MDSSFFHHHQISGFSLEPSPFDSLECFSPWDEPLFSDNSLPFNINGSKEMLPEGATDSSQPVSSAGAKEDEESSNAKEAAISKDEKSYRGVRRRPWGKFAAEIRDSNRHGRRVWLGTFDTAEDAALAYDRAAYLMRGSMAILNFPVERVKESLRDMKHDHEDGGSPVXVXAPECGRSKGRKSANRKNEDKDVSPRDVLVLEDLGADYLEQLLCSSGSY

SEQ ID NO: 9410 - protein, 586 aa, Vitis vinifera
  misc_feature (100)..(100): Xaa can be any naturally occurring amino acid
  misc_feature (103)..(103): Xaa can be any naturally occurring amino acid
  unsure (1)..(586): unsure at all Xaa locations
MANPRKGSDILVEALEREGVTHVFGYPGGASMEIHEALARSSMIRNVLPRHEQGGIFAADGYARASGRPGVCLTSSGPGATNIISGIADANFDSIPIVAXTGXVPRGLMGTDAFQEVPLIDITRPITKFNYLVLDVEDIPRTVKEAFLLATSGRPGPVLIDIPRDIQKELVVPNWNKPIMLPGNASRLPKLPEKAHLEEIVRLISVSKRPVVYAGGGCMNCSEELRRFVGLTGIPVASTLMGLGIFACTDDLSLHMLGMHGTIQANYAVDRSDLLLAFGVRFDDRVTGKVEAFARNATIVHIDIDPAEIGKNKKPHLSICTDVKLALEGINTILEKNAAKQPTAENKRGKGTKFNDNVSAWIEEIDEQKEKYPASYKTFGEAIPPQYAIQLLDELTNGNAIICTGVGQHQMWAAQYYKHKNPRHWLSSSGLGAMGFGLPAAMGAALAKPDAIVVDIDGDGSFMMNIQELATIRVENLPVKIMLLNNQHLGMVYQYEYEYGDGDSLHSYMGNPSNQAQVFPDMLMFAEACNITAARVTKKAELREAIEKMLKTPGPYLLDVMVPHQAQVLQLIPDGGTFKDAIKGAQ

SEQ ID NO: 9411 - protein, 383 aa, Vitis vinifera
  misc_feature (66)..(66): Xaa can be any naturally occurring amino acid
  unsure (1)..(383): unsure at all Xaa locations
MAMMKRVAESAVRAFALGSTSGALTKHLHASAGSKKIVGVFYKANEYAAMNPNFVGCVEGALGIRXWLESQGHQYIVTDDKEGPDCELEKHIPDLHVLISTPFHPAYVTAERIKKAKNLQLLLTAGIGSDHIDLKAAAAAGLTVAEVTGSNVVSVAEDELMRILILVRNFLPGHHQVISGEWNVAGIAYRAYDLEGKTVGTVGAGRIGRLLLQRLKPFNCNLLYHDRIKMDPELENQIGAKFEEDVDVMLPKCDIIVINMPLTEKTKGMFNKERIAKLKKGVLIVNNARGAIMDTQAVADACSSGHIAGYSGDVWYPQPAPKDHPWRYMPNQAMTPHISGTTIDAQLRYAAGVKDMLDRYFKGEDFPAQHYIVKEGQLASQYQ

SEQ ID NO: 9412 - protein, 657 aa, Vitis vinifera
  misc_feature (120)..(120): Xaa can be any naturally occurring amino acid
  misc_feature (161)..(161): Xaa can be any naturally occurring amino acid
  unsure (1)..(657): unsure at all Xaa locations
MSSSLSICFSPVSLARPTTRKANPKKLPRNPNPNPNPNPKIRKRTGTRTTSPNEVLPYGDQATTYTSLPPREDFFTTSLNSSFQSSTEIKLSDLSPPTIESEIDKSSHEEDVFDEQLGFXYGKFELYEVNSDPEEEDEDEDEDGEGQVFVGHGELVSVFVXEEEEKEKGLPAVMRCIDRAKIYVKAGDGGNGVVAFRREKYVPFGGPSGGDGGRGGNVYVEVDGSMNSLLPFRNGVHFRAGRGSHGQGRNQNGAKGEDVVVKVAPGTVIREAGSDGVEGEVLLELLHPGQRAMLLPGGRGGRGNASFKSGTNKVPKIAENGEEGPEMWLELELKLVADVGIVGAPNAGKSTLLSVISAAQPTIANYPFTTLLPNLGVVSFGYDATMVVADLPGLLEGAHKGFGLGHEFLRHTERCSALLFQQTYAQLGKLFLDQAKFMQGVKVHVVDGSSQQPEYEFDAVRLELELFSPELAEKPYVVAYNKMDLPEAYERWPSFKERLQARGIGTFCMSAVKGEGTHEVVCAAYELLRNRTESNKEIEDPVNLNHVADMLHKQRSASINEFEIFHEKGSNTWHVVGSGLQRFVQMTNWRYIESDRRFQHVLEACGVNKSLIKLGVKEGDTVIVGEMEMVWHDSADSSGPSNVRKESTDSVKWPQWK

SEQ ID NO: 9413 - protein, 642 aa, Vitis vinifera
MSKLRLVILLFLLHSVALVSAQGSTNGTSSWQTLNGNAPLVIARGGFSGLFPDSSSAAYSLALMTSLSNVVLWCDVQLSKDGAGICFPDMKLENASDISIVFKNRNNVYLVNGVSTPGWFSVDFTLTDLETVALNQGVYSRSGKFDGNLFPILTVQEMVKLTRPPGLWLNLQHDVFYTKHNLSMRNFVLSVSKSVIVDYISSPEVAFLRGVSQRFKATKTKLIFRFLEKEETDPSTNQTYGSLLNNLTFIKTFASGILVPKGYIWPVNKNSYLESSTLVVQNAHKEGLEVFGSDFINDIPFSYNYSYDPIAEVLNFIDNDAFSVDGVLSDFPITPSAAIDCFAHIGKNASGQEKPLIISYNGASGDYPSCTDLAYTKAISDGVDVLDCNVQMTKDGTPICLSSINLMDSTKVAQTPFSTFTTTITELQKGSGIFTFNLTWEDIRSLTPAISNPYSTFRLSRNPAAKTAGKLVSLSDFLSIAKEANSLSGGVLIGIEHAAFLVKVGLSVTDAVLDALSKAGYDNVTTPRVMIQSTNSSVLKEFKEKKKNYELVYRVDENIRDASDATIEDIKKFATSVVISKDSIYPENKAFITGATDIVSRLKKNNLPVYVQRFDNEFISQAWDFFSDATVEINSFVHGSWN

SEQ ID NO: 9414 - protein, 906 aa, Vitis vinifera
MNPEKFTHKTNETLAGAHELAMNSGHAQLTPLHVAVALITDPNGILRQAIIGAGGNEEAANSVERVFNKALKKLPSQSPPPDEIPVSTTLIKVVRRAQSSQKSRGDTHLAVDQLILGLLEDSQIGDLLKEAGVSTSRVKSEVEKLRGKEGKKVESASGDTTFQALKTYGRDLVEQAGKLDPVIGRDEEIRRVIRILSRRTKNNPVLIGEPGVGKTAVVEGLAQRIVRGDVPSNLAEVRLIALDMGALVAGAKYRGEFEERLKSVLKEVEEAEGKVILFIDEIHLVLGAGRTEGSMDAANLFKPMLARGQLRCIGATTLEEYRKYVEKDAAFERRFQQVYVAEPSVPDTISILRGLKERYEGHHGVRIQDRALVVAAQLSSRYITDKAIDLVDEACANVRVQLDSQPEEIDNLERKRMQLEVELHALEKEKDKASKARLVEVRRELDDLRDKLQPLMMKYKKEKERIDELRRLKQKREELLFALQEAERRYDLARAADLRYGAIQEVEAAIANLEGTTDENMMLTETVGPEQIAEVVSRWTGIPVTRLGQNDKERLIGLAERLHQRVVGQDQAVSAVAEAVLRSRAGLGRPQQPTGSFLFLGPTGVGKTELAKALAEQLFDDENLLVRIDMSEYMEQHSVSRLIGAPPGYVGHDEGGQLTEAVRRRPYSVVLFDEVEKAHIAVFNTLLQVLDDGRLTDGQGRTVDFTNTVIIMTSNLGAEHLLSGLVGKCTMQDARDRVMQEVRRHFRPELLNRLDEIVVFDPLSHDQLRKVARLQMKDVASRLAERGIALAVTDAALDVVLAESYDPVYGARPIRRWLEKKVVTELSKMLIREEIDENSTVYIDAGVSGKGLAYRVENNGGLVNASTGQKSDVLIRIPNGPRSDAAQAVKKMKIEEIEDEEDEMDL

SEQ ID NO: 9415 - protein, 211 aa, Vitis vinifera
  misc_feature (55)..(55): Xaa can be any naturally occurring amino acid
  unsure (1)..(211): unsure at all Xaa locations
MALKEKVKEGVKAKEPHFRGVRKRPWGRYAAEIRDPTKKSRVWLGTFDTAEEAAXAYDAAAREFRGSKAKTNFPLPNEVLPFPNTDNLTRSPSPSSTVESSSPHAPLELDLTRRLGSSDGGFPFHYQPHVVNSAAVAGVWPHARPVLFLDAFVGAEGFRVNPVTVAYDGGFGSPVQSESDSSSVVDSVQHESSGATRVLGLDLNFPPPLEA

SEQ ID NO: 9416 - protein, 326 aa, Vitis vinifera
MAHPPDRPSGFSQNLLQNGSSKKLTLYCDSSPNRGPTPRRKLYWASKSKAIYQETSSSHAFQRQLQQLFHLHDSGLDQAFIDALPVFLYKDIVGLKEPFDCAVCLCEFSQEDKLRLLPMCSHAFHIECIDTWLLSNSTCPLCRGTLFNPGLAMENSVFDFEDSREEGGLSSNGDGVSSAQKPPEDDIASEKRVFSVRLGKFRGLNGGGGGGGGEGEGEREEGVRQAVVIWMQGDVSRWVALCPNRADAGSDAVVKLMKGRGGHTGNSSTDGDVEGKKISIGSKDESFSVSKIWLWPKKGKFPSSSDTHIGPSVNVGFPWTERTQAS

SEQ ID NO: 9417 - protein, 200 aa, Vitis vinifera
MEGSSNSAHFLAAFLILFAFHFNSVSAAGPAARKDNTEFIRTSCGTTIYPRLCFTSLSAHANVIQTSPRLLADTALSVTLSTARSTSSVMSNLLLSHGLKPREVVAMKDCVEELSDSVDQLRKAMGEMNQIKGSNFGLIMNDIQTWVSAALTYEDTCTDGFAGNTMDGKLKKAVRARIVKIAHMTSNALALINSYASLHN

SEQ ID NO: 9418 - protein, 189 aa, Vitis vinifera
MAESKRSTGTVKWFSGQKGFGFIAPDDGGEDLFVHQTSIRSDGFRTLSEGETVEFAVDHGEDGRTKAVEVTAVRGSYSSGVGVVVMVDTVAAVMVVVVVVVVGYGRGVRGGRRSGRTDDGYGGGGACYNCGRTGHLARDCYQGSGGGRRGYGGGGGYSAELDLWILNPQQCCLWIPVGTNMMAWLSKGE

SEQ ID NO: 9419 - protein, 946 aa, Vitis vinifera
  misc_feature (319)..(319): Xaa can be any naturally occurring amino acid
  misc_feature (369)..(369): Xaa can be any naturally occurring amino acid
  misc_feature (615)..(615): Xaa can be any naturally occurring amino acid
  unsure (1)..(946): unsure at all Xaa locations
MEEDEEQGNSKEKEKPLDDHIDTKVYEDKVNIGHEENGTCEGLKTMEISPSSTCLPCEIPSCDVKVLEGLTSEVFACAWSPAGSFLASGSGDSTARIWSITNGPCSTMQNGLLNIVLKHFRGRTNEKNKDVTTLDWNGDGTVLATGSYDNQARIWSRVGMLRSTLNKHKGPVFSLKWNKKGDNLDEVNAVKWBPTVFFLASCSDDYTAKALRLHLSALMYYGNGIAYPIVVTRKGGALHVSSNEMLWDVELGCLLYSLNGHRLGSAFCKINSMKAFTYLTRPVNAHYTPSGAVNAKYRSVALLSNFTGGCYICFCAAVXYVSVGTEFDRLQLHQYYAMGDHAAYIEFRVFRHQSLPQIHFYDVYEISRXKSNSLQLPYALRCSNISLVFLSFRTLRLSALMEQIVQPYLPLLNVNGPLVSMYMQVVVCAWNPTCSLLASGSHDSTARIWTIVDGACNSTLQDVLVLTHAGAMTVEDNGFAAICELDWKGDGTLLATGSCTGETRIWTPNGALMASFEEDMGHIVSLQWNQMGNSLLSCGSDKVVVWDINTVGSRQEFSFHSARILDADWRNNISFATCSADRKIHVCEVGLNRPYKTFLGHRAEINGIRWSPTGXLLASCSDDTSIKEVYCIEWSPTGPTTDNPNLTLLLASLTVFLVLCSSSFDNTINVWDVERGNPIYGLTRHRNIIYTIEFSPNGEYLASGSLDNWLYVWSVKEGRLIKSYYGGGGVTDISWNKSSDKIAVSFVNKLVCVLDLKIEEIAELSANNQKSRSEADNNDYGDTGDDDSKVWLTLGVGRNDALMAGNKESQPESASNKVFSCNFCMRKFFSSQALGGHQNAHKRERGAVKRYQSQRMMGIMGLPPCNPSVRSLGFRPHSLVHKPFREAPTMMARFSDASNGFGLPWTSVVPEEATNLIWPGSFRMNSQPPYCKQPSDYPQLDLDLRL

SEQ ID NO: 9420 - protein, 220 aa, Vitis vinifera
MGNGSMEKKKKHLSISGGRSVSRRAELAREKSCQQQAQTLQVVIVVQEVKRAARSQRFLPPTDDDLMTQIKDGFAEGKDLVVSVMSAMGKEQICALCMWIAWGTVSWQMDEAFGCFYETLNCGVKPNDVVFMRLFTACTHARLVEKGLNCFNTMDKEYGVCPKVEHYGCVVDFLSRSGELDKAEDMIYLMPIKPNVIIWGALLGRSLGKKKTGSLSFMDK

SEQ ID NO: 9421 - protein, 409 aa, Vitis vinifera
MTKTRKVDKVGECASPRGFEHTKKSRSKTLSKQKEDESEWEETRCPICWEHPHNAVLLRCSSHKKGCRPYMCNTSDHHSNCLNNFHRTFSKKVEIGDRPSGKKVTHVKCPMCRGKINGWKVVQPARCFMDSKPRSCPCEGCDFRGNYSQLRLHARSEHPFARPAEANPQLVREWARRVSERDLQDALNVLESERIKLKAQSPNPKQLRQFSAIATFLCLADSNIMARSLSNAFLKGISSFPSARFSTMVRTKIYGTVIQFFNQVSGSIFQNGMRYSTTVPNDPDTHDDFKSTNKLESSGLALQDIVEQDVKDNPVMIYMKGVPDVPRCGFSSLAVRVLKEYNVPLSARNILEDPELKIAVKKFSHWPTFPQIFIKGEFIGGSDIILNMHQTGELKEKLKDVSAPQEKSE

SEQ ID NO: 9422 - protein, 303 aa, Vitis vinifera
  misc_feature (212)..(212): Xaa can be any naturally occurring amino acid
  unsure (1)..(303): unsure at all Xaa locations
MPGVAARLPVTPWSSDDTLKFSGDSESLGDMVFGFLGEDSSGSSCNSGGGWVHGEDCGDGADGEEGFDNVEGSKAFWEEQDQLVQAILCRTSSIESKIRQVTKEALRELKLKETYCVCRRRVAGVCQNCAEKEVWGQLQTAGYNSAICKSKWKSSPDIPSGKHSYMEVVDRSSAKKGEVRVVIELNFRAEFEMARASAEYNLLVSRLPEVFXGKSERLKALIKILCHAAKKCMKEKKMHMGPWRKHKYMQAKWFGTCERTAPAPMSPVDFPGRLPRQRVSMLTFDLLENLPAAGLNFKAVEVV

SEQ ID NO: 9423 - protein, 579 aa, Vitis vinifera
MGRWEEGKKQRVEVHGKGVGHLGCLSLKLWSSDQLLVSDYLRSLCGQLTASHKLNIIHQRVFLERDNSPAWNIVRDVRDGFGSLSRRSFDVRLLGHSRGKSIGSFHDMHDQPLVIQNSRWANLPPELLYDIIKRLEESESTWPSRKHVVACAAVCRSWRTMCKEIVRSPEFCAKLTFPVSLKQPGPRDGTIQCFIKRDKSNLTYHLFLCLSPALLVENGKFLLSAKRNRRTTCTEYVISMDAENISRSSSTYIGKLRSNFLGTKFIIYDTQPPHTCAHIPPPGRTSKRFYSKKVSPKVPTGSYNIAHITYELNVLGTRGPRRMHCTMHSIPASSLDAGGSVPGQPELLPRALEDSFRSISFSNSLDHSVEFSSSRFSEVCGPCDDEEGKARPLVLKNKAPRWHEQLQCWCLNFRGRVTVASVKNFQLIAATQPAAGAPTPSQPAPPEHDKIILQFGKVGKDMFTMDYRYPLSAFQAFAICLSSFDTKLAWIDSSHFIVKAGLDITQADGFKMTHETSHNLNTSFFMSIRIALLDSWDSQFDVKPTNKLARQVVFKVYYEHFKSTSLPMWDWDLLERKIS

SEQ ID NO: 9424 - protein, 565 aa, Vitis vinifera
MDNSVAPMVITDDGLQETAISSKTNPSKVVEMAERFAYYGVAGNLFTYLTNVLGEHTATAAKNVNTWVGVSAIFPLLGGFIADSYLGRFKTIIASSVIYLAGLLLMTLSVSVQSLRHHRAVFFTALYILSIGEGGHKPCVQTFAADQFDEDTVEEKKDKSSFFNWWYVGIVVGSTTAILVVIYVQDNVGWGLGFGMLAAAVAAALLLFLIGIRSYRRQRPVGSPLTRVMQVLVATARKLRVNETRYGRGVCLEDEGDGGVEEGGRRGRSLAPTNQFRFLDKATIIDDIDASTKVRNHWRLCPATQVEEVKLLFSLFPIWLSCLTFATVIAQMSTYFTKQGSTLERSIGSHFSIPPASLQVCTGLTILVSVGLYDRVLVPVARKFTGLPSGITMLQRIGTGIFFSMLTMVVAALVETKRISVAIDHGLTDSPRTTLPMKIWWLLPQYMLTGMCDVFTIVGMQELFYDQMPEEMRSIGAALYISTVGVGSLMSSAAISIVQAITSRAGGKWLGDNLNRAHLNYFYSVLAGCSALNLIVYIWVAKRFVYKKTGCDDPKGEQKKAAELA

SEQ ID NO: 9425 - protein, 844 aa, Vitis vinifera
  misc_feature (209)..(209): Xaa can be any naturally occurring amino acid
  misc_feature (258)..(258): Xaa can be any naturally occurring amino acid
  misc_feature (291)..(291): Xaa can be any naturally occurring amino acid
  misc_feature (339)..(339): Xaa can be any naturally occurring amino acid
  unsure (1)..(844): unsure at all Xaa locations
MTLCMFGCFNGNQEAFVSIRCCAESTFTEPSTNISWIPDDGWYSNTLGCQNINKPVENYQGDKIRIFKGDLAKKWCYNLSTTKGHEYLIRGTFLFGDSVRTSLAILFNVSIGVTPIGLVNGSDDSVEVEGVFTARNHHIDFCLLKGTGDPYIYKLELRPLNVLKYLQGGTSSVLKLVKRVDVGNTGEDIRYPVDPNDRIWKAESSSIPXSLLEKTPPNPISSSANVSITTAVPLQVLQTALNHSERLEFLHNDLDIGXYNYNLSLYFLEFIESVDTGQRVFDIYINNVRKXPDFDIMADGSKYREAAFRFTANGSFNLTLVKVSDKSLFGPICNAYEIXQVKDELLKKNQGNKVLGSWSGDPCLPLVWHGLICNNSINNSPVITELDLRHNDLMGKIQESLISLPQLAMFYGNCADQGSSHSAQGILIGTVAGGSFLFTIAVGIAFVCFYRQKLMARGKFHEGGYPLTKNAVFSLPSIDDIVFKSIDIQNFTLEYIEIATNKYKTLIGEGGFGSVYRGTLPDGQEVAVKVRSATSTQGTREFENELNLLSAIQHENLVPLLGYCCEYDQQILVYPFMSNGSLQDRLYGEAAKRKTLDWPTRLSIALGAARGKMFEEYFYCSGLTYLHTFAGRSVIHRDVKSSNILMDHNMSAKVADFGFSKYAPQEGDSGVSLEVRGTAGYLDPEYYSTQHLSAKSDVFSYGVVLLEIISGREPLNIHRPRNEWSLVEWAKPYIRDSKIEEIVDPSIKGGYHAEAMWRVVEVALACIEPYSAYRPCMVDIVRELEDALIIENNASEYMKSIDSFGGSNRFSIEKIERKVVLPPTPTLTDPSPDILQALTPPQPR

SEQ ID NO: 9426 - protein, 530 aa, Vitis vinifera
  misc_feature (218)..(218): Xaa can be any naturally occurring amino acid
  unsure (1)..(530): unsure at all Xaa locations
MANSKYEYVKSFEVEDEVMPPNLIVVRIDGRGFRRFSEVHEFEKPNDERALNLMNSCAAAMLEEYPDIVFSYGFSDEYSFVFKKTTKFYQRRASKIVSLVVSFFTSIYTTKWKEFFPHKELRYPPSFRAWVICCASMEVLQTYLAWRQNDCHINNQYNTCFWMLVKCGKTEEEAQEVLKGTHKQEKNELLFQQFGINYKNLPSMFRQGSCVCKTQVEXIVKYSENGTPVKRLRRKPIIVHSDNIAARSFWNEHPFLLKELGDFREDINNIKPEYVKSFQFENKLMPLTWIVVRIDGCHFHRFSEVHEFEKPNDEQALNLMNSCAVAVLEQFKDVIFSYGVSDEYSFVLKKDSQFYQRRGSEIVTALVSYFTSIYVMKWKEFFPQKELKYPPCFDGRAVLYPTSEILRDYLTWRQVDCHINNQYNTCFWMLVKSGKSKSEAQAYLKGTQAREKNEVLLQQFGIDYNTLPLMFRQGSSAFWNEVIVFSGKKTKQGESSPPHCLSSTGYNLCIQGVSREAFTVLLSTGTLKGS

SEQ ID NO: 9427 - protein, 156 aa, Vitis vinifera
MDLRIMGLDSPLFSTLQQMLDAGDDSDKSLNAPTRTYVRDAKAMAATPADVKEYPNSYTFIVDMPGLRSGDIKVQVEDGNVLVISGERKREEEKEGAKYVRMERRVGKFMRKFVLPENANTDKISAVCQDGVLTVTVEKLPPPEPKKPKTIEVKIA

SEQ ID NO: 9428 - protein, 318 aa, Vitis vinifera
MSRVYVGNLDPRVSERELEDEFRVYGVIRRSAFWRYDWEAPFWTDLLSYIVGGILTSVIRTQTGLSGLTVELDTGNPKKLLKLTKLMGRLSGSPPRDTSNCQGLRGLRLLNHNLLLLTRRVLLSISGKLQQAAIFQQHGYQWLASVWVARRPPGYAFVEFADRRDAVDAIRGLDGKSGWRVELSHNSKGGGGGGGGGGGRDRGRGGGEDLKCYECGEPGHFARECRLRIGSRGMGSGRRRSISPRPRRSPSYGRRSYSPHARKSPRRRSVSPRRGRSYSRSPPYRRARNDSPFANGYVMGPCTEFLAYVAIVIYPLIT

SEQ ID NO: 9429 - protein, 370 aa, Vitis vinifera
  misc_feature (137)..(137): Xaa can be any naturally occurring amino acid
  unsure (1)..(370): unsure at all Xaa locations
MLGALMNLLSLCLKPFGRDSGNVELGSEGREGLLWFRDIGHYASGDFSMAVVQANQVLEDQSQIESGPFGTFVGVYDGHGGPEAARYVCDHLFRNFQAISAESEGVVTTETIRRAFLQTEEGFTALVSQLWISQPNXASVGSCCLVGVIYEQTLFIANLGDSRVVLGKKVGNTGVVAAIQLSTEHNANVEAVRQELKDLHPNDPQIVVLKHGVWRVKGIIQVSRSIGDVYMKHAQFNREPLNAKFRLPEPMNMPILTANPSIISHTLHPNDSFLIFASDGLWEHLSNEKAVDIVHSHPRAGSAKRLVKAALQEAARKREMRYSDLRRIDKKVRRHFHDDITVIVLFLNHDLISRGMVQDPPLSVRSALEH

SEQ ID NO: 9430 - protein, 285 aa, Vitis vinifera
MASKAVVNSALVLRILTLLLLAASVVVMATNNFKFSDGTKTSFTDVIAYRYVAATGAVGFLYTVAQIPFAVYHACTEKRLLRPEFDFYGDKVISLLLGTGVGAGFAVTFEFKRNLNDFVQGVEDLSGQDLSEFKSKTEKFLDRAIIATVTKGMLSKIVGLTIASWRFGTLSREPILQHFTLFVLELRTEIQSIKKDGLIPDEYVVKVKNVVDKLGSIGKPVLDKDQLIYLFQGLGAEYNPFVTSFNDISNQPTIEERQNVVEQLNVNMAQAKLAVFANKKPFKIN

SEQ ID NO: 9431 - protein, 947 aa, Vitis vinifera
  misc_feature (42)..(42): Xaa can be any naturally occurring amino acid
  misc_feature (50)..(50): Xaa can be any naturally occurring amino acid
  misc_feature (174)..(175): Xaa can be any naturally occurring amino acid
  unsure (1)..(947): unsure at all Xaa locations
MEDGSFTPNSVFGGPSDSAMDLNFMDELLFEGCWLETTDGFXFLQPGASXSSALNDSSHHSLTFENPNTPQKSYGDDGQRSSLPENPPPFYPQAEGLVGTQSDNWKTFEAATASGQSESFLVERTELNRRLWIGPSANPGPVSSVKNRLILAIRNLREFTKERDVLIQIWVPIXXGGKNVLTTNDQPFSLDPDCQSLANYRNVSENYHFPAEEDSKEQVGLPGRVFLGKVPEWTPDVRFFKSEEYPRINYAQRYNVRGSLALPVFERGSGVCLGVIEIVTTTQKINYRPELENVCKALEAVDLRSSEVLIPPVKACNELYQAALPEILKVLARVCRTHRLPLAQTWAPCIQQGKGGCRHSDKNYALFLSTVDHAYYVTDPKFKGFNEACFDHHLFRGQGVVGRALTTNQPCFESDITAFSKTEYPLSHHARMFGLRAAVAIRLKSIYNGSADFILEFFLPTDCQETEEQKQVLNSLSIVIQQTCQIFRVVTEKDLEKESILPVGEILVASDERVKQEGSVKLLSPPIKEPSREESSWIAHMMEAQKKGKGVSVSLEYQKEEPEEEFKVTTNWDNTEVELHHGQVFSEFGQPQQNSGAKGSVEGGGDSSFGGQHSSGSRKAREKRRTKTEKTISLQVLSQYFAGSLKDAAKSIGVCPTTLKRICRQHGITRWPSRKIKKVGHSLRKLQLVIDSVQGTQGAIQIGSFYTNFPELSSPNVPGTVPFSSSRMTDDSKQLNPQSEVLFSPGVTTSKSPSSSCSQSSSSSFCCSTGAKQQSTTVNASVSGDVLMAEDPVLLKRTRSDAELHVSNPDEPKLLVRSQSHKSFGEHPCVEPLPPLPKSNSRALRDGGGFRIKATFGEENVRFSLQLNWSFKDLQQEIARRFGIDNMNSIDLKYLDDDCEWVLLTCDADLEECIDVYRSCQSRKIKLSLHHSSRLKLKSSAFSSGPS

SEQ ID NO: 9432 - protein, 258 aa, Vitis vinifera
MASGFGESESMSPASGACGGSGSNDVGDFECNICFELAQDPIVTLCGHLYCWPCLYEWLHHHSHSQECPVCKALIQEEKLVPLYGRGKTPSDPRSKSIPNDSIPSRPAGQRPETAPPVANPVSHLGVGLMRGFAPVRTARFGNFALSAAFGHLSPSLFNIHVHGFPDPRVYGATPGYPFWFSNAMHGGLGHMHRFPHPISQRQRTNYYLKNLLLFTDCGCMLSFTCFLIALSAVIIDNSSLALLELGCLEVLNGRFVF

SEQ ID NO: 9433 - protein, 132 aa, Vitis vinifera
MAVLIQKPHALLHTPILITPTKPRLRIKCQDSSEPQKPSTSAQPTSPGQGFGSASSTVKTAVNKKKEKGRRERASIIRRSPVQKPEFLGVEEQGESKEQGRNESAFLLAWLGLGGIILVEGIVLAASGTLSY

SEQ ID NO: 9434 - protein, 256 aa, Vitis vinifera
MAGHLGWGIIEEGWRKGPWTAEEDRLLTEYVKLHGEGRWNSVARLAGLRRNGKSCRLRWVNYLRPDLKRGQITPHEENIILELHARWGNRWSTIARSLPGRTDNEIKNYWRTHFKKKGKLPSDKSEKAKTRLLRKQQFYQQQQQQQQQQQQQQQQQLNQLDLKRIMALLDQPDIGDTPMAQARQDLGSCIYSTHHAAEEHGYVHLPIPNADVSTQESSSEDMLWDGLWNLDDFHGNLSAACAASKTSLHHLVAPFY

SEQ ID NO: 9435 - protein, 500 aa, Vitis vinifera
MESGTWASYVAAWLATVALILLSTHLRRRRKLNLPPGPKPWPIIGNLNLIGALPHRSIHELSQKYGPIMQLRFGSFPVVVGSSVAMAKLFLKTHDVTFASRPKTAAGKYTTYNYSDITWSPYGPYWRQARKMCLMELFSARRLESYEYIRVEETKSLLSSLYKQSNSPVDLKDHLSTVSLNVISRMVLGKKYLDENVEGSIVTPEEFKKMLDELFLLSGVLNIGDSIPWIDFLDLQGYVKRMKHVLDEHNARRKGVENYVAKDMVDVLLQFAEDPTLEVKLERHGVKAFTQDLIAGGTESSAVTVEWAISELLRKPELFEKATEELDRVIGKERWVEEKDIPNLPYLDTIVKETMRMHPVAPMLVPRFSREDIKIAGYDIPKDTRVLVNVWTIGRDPEIWDQPNEFIPERFIGKNIDVKGQDFELLPFGTGRRMCPGYSLGLKVIQSSLANLLHGFKWKLPGDMKPGDLSMEEIFGLSTPKKIPLVAMAEPRLPAHLYDM

SEQ ID NO: 9436 - protein, 1021 aa, Vitis vinifera
  misc_feature (67)..(67): Xaa can be any naturally occurring amino acid
  misc_feature (595)..(595): Xaa can be any naturally occurring amino acid
  misc_feature (621)..(621): Xaa can be any naturally occurring amino acid
  misc_feature (762)..(762): Xaa can be any naturally occurring amino acid
  misc_feature (827)..(827): Xaa can be any naturally occurring amino acid
  misc_feature (862)..(862): Xaa can be any naturally occurring amino acid
  misc_feature (905)..(905): Xaa can be any naturally occurring amino acid
  misc_feature (961)..(961): Xaa can be any naturally occurring amino acid
  misc_feature (1019)..(1019): Xaa can be any naturally occurring amino acid
  unsure (1)..(1021): unsure at all Xaa locations
MAQNVERSVKKMRTSSRKTIHHNSKDGDLVQVEGDEGQVWELPSSLIFIIDVFVLSSSNTVALKVFXFEQWIFCFEIVLKEDQNLVCACTQLCDLSTPVPERVTMVARDILVFEAVFAFMLKHYLNSEIDRSADGTIEGLCRTEIVASCATRQTPECRVLATVSYFSMASIKRQLSEPEEPESKKPKAALSDSPEHKTKQRVVLNPADCDLDFNIVGDGLQGSALHDHGFAYCWSGARGNVGITGGKYCFGCKIISTQPVDMEDTPPDQQHVCRLGISRGDDAVGNLGETEHSFGFGGTGKFSVAGKFSNYGEKFGVGDTIVCAVNLETKPLASISFSKNGKWLGVAKEFDAGVKGLGVVDSPMRQLHWESALFPHVLLKNVMVQVQFSTEEGLVPEEGYKPWASALYDGNAIMGPSFSSPRDCEVMMMVGLPASGKSTWAEKWVKEHAEKRYVLLGTNLALDQMKVPGLLRKQNYGERFERLMDRATGIFNTLLSRASKTPHNYIIDQTNVYKNARKRKLKPFANFQKIAVVLFPKPEELKFRAEKRFKEMGKEVPADAVNEMIANYVLPGSKDMPGSDEDFDQVLFPELNRGXAQKCLEEMKRALGTASHLNLKSNFSXYSQESSLQSYNSSSLQNQGAPSVPDERSLSYHPPLPQNYYYQRPAHMNSGHQGVALHGRVEPFPRAYQDNQNPFMPRDAPYETSLGYSRNFLSRNDSNSYGTYGYDNSRGSIPGVGMASYQSFGMVDPYRRTNLESRNPIXMGATDPYVSGMVESHDKYNVEGVNHYETQAESMRTSLFSHNTLGGHGSVPGGFGANQLVPRDPRXLPTPSQMSYGSPYGAPLVRPSYGNFPTDMQHPGGXFLGIVFSPVLISTGVLLLTLLRLGVNQQVEGEPSSNEPEQPDXRGRELKCVHPQPEKWPEIHSDFDTKPFFCDSFVGWNVRAPLEVIYEEFEGEEDEDXNVTEETRFLGLERWDQDDREGLIEIALDGKLDAMFHVEEDNLIEIDISPARNHQFSGXKR

SEQ ID NO: 9437 - protein, 592 aa, Vitis vinifera
  misc_feature (577)..(577): Xaa can be any naturally occurring amino acid
  unsure (1)..(592): unsure at all Xaa locations
MGINLEVSKEVKFKAGEEACTLDGTVDCRGNPAIRSRSGKWFAGIIILLNQGLATLAFFGVGVNLVLFLTRVLQQNNADAANNVSKWTGTVYIFSLVGAFLSDSYWGRYKTCAIFQVIFVIGLVSLSLSSYIFLVKPEGCGNEDSPCPSHSSLEIGLFYLSIYLVALGNGGYQPNIATLGADQFDEEDPKEGHSKVAFFSYFYLALNLGSLFSNTILSYLEDEGMWALGFWVSAGSAFLALILFLGGTPRYRHFKPSGNPLSRFCQVMVAAMRKFRVEMPPSAEDLYEGDGKECSNNSIRRILHTDGFKFLDRAAFISSKDSDNQEQGFYNQWRLCPITQVEEVKCILRLIPIWLCTIIYSVVFTQMASLFVEQGAAMKTTVSNFRIPPASMSSFDILSVAAFIFLYRRVLDPLVGRIRKTDTKGLTELQRMGIGLIIAIIAMIAAGIVECYRLKYAQKDCTNCEGSSSLSIFWQVPQYAFIGASEVFMYVGQLEFFNAQTPDGLKSFGSALCMTSISLGNYVSSLLVTMVMKISTEDHMPGWIPGNLNKGHLDRFYFLLATLTALDLVVYVACAKXYKCIKMEBRANEYGV

SEQ ID NO: 9438 - protein, 170 aa, Vitis vinifera
  misc_feature (110)..(110): Xaa can be any naturally occurring amino acid
  misc_feature (116)..(116): Xaa can be any naturally occurring amino acid
  unsure (1)..(170): unsure at all Xaa locations
MTEPSSSTPSPVISLVLRLLTFISILISLIILTNNSATIVVNSTELKLRFKDVHAYRYMLFALVVGLPYILLQIVFGIYHVSMGKRISSSGESLLQFDFYADKVMSYILXTGTGAXFGATLDLKEVFSELGSNYNKFFNKGSAAASFILFAFLFTAVSSVFSSLALPKKL

SEQ ID NO: 9439 - protein, 227 aa, Vitis vinifera
MSAFHLFKLSLLLSLLPNSIIPNSQKSTGSFPPTCSRIECPTYDLIQAGNGYEIRRYNSTVWISTSPIQDISLVDATRDAFLQLFDYIQGKNEYQEHIEMTAPVITQVSPSDGPLCESSFVVSFYVPKKNQANPPPAKGLHVQKWGPAYAAVRQFSGFVSDSEVGEEAAALEASLAGSIWSAAIEKSRPDDPTSTYTVAQYNSPFEYNERVNEIWMMFDMEDEVGAL

SEQ ID NO: 9440 - protein, 2252 aa, Vitis vinifera
  misc_feature (179)..(179): Xaa can be any naturally occurring amino acid
  misc_feature (646)..(646): Xaa can be any naturally occurring amino acid
  misc_feature (676)..(676): Xaa can be any naturally occurring amino acid
  misc_feature (829)..(829): Xaa can be any naturally occurring amino acid
  misc_feature (879)..(879): Xaa can be any naturally occurring amino acid
  misc_feature (990)..(990): Xaa can be any naturally occurring amino acid
  misc_feature (996)..(996): Xaa can be any naturally occurring amino acid
  misc_feature (1018)..(1018): Xaa can be any naturally occurring amino acid
  misc_feature (1211)..(1211): Xaa can be any naturally occurring amino acid
  misc_feature (1288)..(1288): Xaa can be any naturally occurring amino acid
  misc_feature (1609)..(1609): Xaa can be any naturally occurring amino acid
  misc_feature (1754)..(1754): Xaa can be any naturally occurring amino acid
  misc_feature (1780)..(1780): Xaa can be any naturally occurring amino acid
  misc_feature (2124)..(2124): Xaa can be any naturally occurring amino acid
  unsure (1)..(2252): unsure at all Xaa locations
MTRCRLLIVTRVKPLQKPNSESSTSDDLSNVPPMAVFRSLNTLIRSPNSKRLLLTVSASATPFPRLSSILSPLSLSFASRFTYSHSRVLSPLSISIPFRGPLFLSSPPWKLSQSATPLLLQGDVVLRNVEALKLLRNRSFPIRLGGFGSVSAGTGLLGRLDKKQLISGDVGVAYGDFVXSFMNLPNLISFSRLASGPLLAWMILNEWYLSAFVGLAISGATDWLDGYMARKMGINSVIGSYLDPLADKVLIGCVALAMVDKDLLHPGLVGLVVLRDVALIGGAVYKRASSLGWEWKSWFDFFNLDGTHPQKVEPLFISKVNTVLQLALVTAALLQPEFGTQETESYITYLREFEFVRETMHSAISMNKTEVLDDVLNNFSEGYSSLSHENRRKLLLVLAKEYDLNRTQIRELIKQYLGLELPSGEKAQSSGTEEEGSLSAFYRTERNLRHALKPTYEVLFERLNTHPGGLKFLSILRADILCILTEDNIASLRALDSYLKEKLITWLSPAALELHHITWDDSASLLEKIVAYEAVHPISSLTDLKRRLGVGRRCFGYLHPAIPGEPLIFIEVALLKNVAQTIQEVLWNDPPIPECESTCALFYSISSTQPGLAGINLGKFLIKRVIKLVKRDMPHISTFATLSPIXGFMQWLLSKLASQSKLAETETRGMAHSSAXSFGSTFRENILEPEEERALLDSSVEFTAGASGMEVMWNLLTDADFEWINSARLLSVLKPPLMRLCARYLLQEKKRGKALDSVANFHLQNGAMVERLNWMADRSEKGLLQSGGIMVNYVYRLDDIEEYAQSYFSSGHIHTSSDLCCYVEVKRVXIRSSPFRVYLPDFTEGLQPVDETEGTKGCKQHRMIVSVQNGDSEFSYIVXSDLSWGCGMKVIQVKKLWMFLAALASGDASPKPATNPIHKTPTSVFRIWICRNAIQILAFGFHFLVLLCSKANAKCSRGCDLALASYYVWDGSNLTYIRKIFGREISEILXYNPQIXNQDSIDTGSRINVPFRCDCLNXDFLGHTFEYTTQFGDTYDRIAERAFSNLTTEDWVHRVNEYPPTRIPDDVQINVTVNCSCGNRRVSMKYGLFATYPLRDESKCSRTCDLALASYNLWKGVDLNFIATTFSRDVSEIQSFNPQITNIBLIIAGERVNRFNTYAPTNIPIDAPINVTVNCSCGNSSVSKDYGLFVTYPLEPGENLSTIANQSGLPXQLLQDYNPDSDFSRGSGLVFIPGKGISSGVIAGISVAGIVGSLLFAFFLFARICKRKKVKKVLFFPAASEQQYMQHXQAHGSASEETSDSAALVGAASLGLVGITVDKSVEFSYEELATATDNFSLANKIGQGGFGSVYYAELRGEKAAIKKMDMQASKEFLAELKVLTHVHHLNLVRLIGYCVEGSLFLVYEFIDNGNLSHHLRGSGEHYYAHVELKPYLLGRIHCHGSSRVQIALDSARGLEYIHEHTVPVYIHRDIKPANILIDKKFRAKVVKTSVQVWQKVADFGLTKLTEVGSASIPTRLVGTFGYMPPEYAQYGDVSPKIDVFAFGVVLYELISAKEAIVKTNEPIMPESKGLVALFEDVLSQPDPREDFVKLIDQRLGDDYPLDSIWKMAXLAKACTQENPQLRPSMRSIVVALMTLSSSTEDWDVGSFYENEALMNLMSGSIGVESKCSRGCDLALASYNIWNGTTLSFIATAFSTSISEIQSFNPQINDIDLIIVDTRLNIPFSCSCIDGEFLGHTFFYSVDSNDTYNIIARTXYANLTTVEWLERFNRYEATEIPVNAXINVTVNCSCGNSRVSKKYGLFVTYPLQPGESLSSIANESGLPSKLLQDYNPGVDFSLGSGLVFIPGKGISVGVIAGISVAGVAGSLLLAFVLYVGIYKRKMGKAPLLPAAFEDQHMQPGQGYGSTLEKTSDSVALVAAVSLELVGITADKSVEFTYEELAKATNNFSAASKIGQGGFALVYYAELQGQKAAIKKMDMQASKEFLAELKVLTHVHHFNLVRLIGYCVTGSLFIVYEYIENGNLSQHLRGSGNDPLPWSTRVQIALDAARGLEYIHEHTVPVYVHRDIKSANILIDKNLRAKVVKMPVLVADFGLTKLTVAGSSSLPTRLVGTFGYMPPEYAQFGXVTPKIDVYAFGVVLYELISAKEAIIKTNGSTTTEARGLVALFENVLSWPDLREDFCELIDHRLGNDYPLDLIWKMAQLAKACTQEDPQLRPSMQSVVVALMTLSSSTEDWDVRSVYENKALVNLMSGR

SEQ ID NO: 9441 - protein, 297 aa, Vitis vinifera
  misc_feature (267)..(267): Xaa can be any naturally occurring amino acid
  unsure (1)..(297): unsure at all Xaa locations
MNYKLSPNFYASTCPNVQKIVRVEMVQAVIREPRMGASILRLFFHDCFVNGCDASILLDDTATFTGEKNALPNQNSVRGFEVIDTIKTRVEAACNATVSCADILALAARDGVVLLGGPSWTVPLGRRDARTANQSAANNDLPAPFANLSALISGFAAKGLNADDMTALSGSHTIGQAQCFTFRSRIYNDTNIDPNFAATRRSTCPVSGGNSNLAPLDIQTMNKFDNKYYENLEAQRGLFHSDQELFNGGSQDALVRAYSANNALFFXDFAAAMVKMSNISPLTGTNGEIRSNCRVVN

SEQ ID NO: 9442 - protein, 604 aa, Vitis vinifera
MGHCCSKDISVVKDDTVAGESAAGIGGKPTAPLRLVGNGAVDVKRTPAHSFNSPCPSPYPQGSSPLPPGIAPSPARTPRSRVRWPFPPPSPAKPIMSSILKRRGSAKPKEGPIPEEGAGEGETQLDKSFGYAKNFSSKFELGKEVGRGHFGHTCWARGKKGELKGQTVAVKIISKAKVCLNLGFVRSLVFMAFSPMDEKSGCFMTTAIAIEDVRREVKILKALSVHKNLVKFHDACEDASNVYIIMEGGRYREEDAKAIVVQILNVVAFCHLQGVVHRDLKPENFLFTTRDEDAPMKVIDFGLSDFIRTDQRLNDIVGSAYYVAPEVLHRSYNLEADVWSIGVITYILLCGSRPFWARTESGIFRSVLRADPNFDDLPWPAVSPEAKDFVKRLLNKDYRKRMTAAQALTHPWLRDENHAVPLDILVYKLVKSYVRVSPFKRAALKALSKALTEDELVYLRAQFRLLEPKNGRVSLENFKMALMRNATDAMKESRVADILNMMESLSFKKMDFEEFCAAAISPLQLEALQGWEKIATTGFEFFEQEGNRVTTVEELAREMNVGPAAYSAFNGWIRSSDGKLSFLGFTKFLHGSVSRPITRQQQHV

SEQ ID NO: 9443 - protein, 859 aa, Vitis vinifera
  misc_feature (201)..(201): Xaa can be any naturally occurring amino acid
  unsure (1)..(859): unsure at all Xaa locations
MDTVCFWVCFFLLFWLGNVGFCYQDGFLSLSCGATADFVDSTNISWVSDSTYVDTGNTTTIDFIEGTSSSHVPIRFFPDSKGRKCYRLPVKNVSSVVLVRTQFVYKNYDGLAKPPAFSVSLGTAITTTANLTVSDPWTEEFVWSVNQDILPLCLHALPGGGVPVISSLEVRPLPQRAYTSGMEDFPNKSLRKCYRINCGYXNGSLRYPLDSYDRIWDADQSFSPFHLSTGFNIQLSFNLSSIEESPPLAVLQTARVLARRDALAYYFPLDKLGDYYIVLYFAGILPVSPTFDVLINGDVVWSSYTVKNSEATALFFTRKGIKSLSITLKNISFNPLINAIEVYEMVDIPSETSSTTVSALQVIQQSTGLDLGWQDDPCSPTPWDHIGCHGSLVTSLGLPNINLRSISPTFGDLLDLRTLDLQNNSLEGTVPESLGELKDLHLLNLENNKLQGTLPDSLNRESLEVRSSGNLCLSFSISTCSEVPSNPSIETPQVTIFNKKQHDDHNLRTIILGAVGGVLFAVIVTSLLVFLYMRRKRTEVTYSERAGVDMRNWNAAARIFSHKEIKAATNNFKEVIGRGSFGSVYIGKLPDGKLVAVKVRFDRTQLGADSFINEVHLLSQIRHQNLVSLEGFCHESKQQILVYEYLPGGSLADNLYGANGRRITLSWVRRLKIAVDAAKGLDYLHNGSNPRIIHRDVKCSNILLDMEMNAKVCDFGLSKQVTQADATHVTTVVKGTAGYLDPEYYSTQQLTEKSDVYSFGVVLLELICGREPLSHSGTPDSFNLVLWAKPYLQAGAFEIVDESIKGNFDVESMRKAALIASRSVERDAAQRPVMAEVLAELKEAYSIQLSYLASCGHLN

SEQ ID NO: 9444 - protein, 153 aa, Vitis vinifera
MDSRMMGFDSPLFSALQHMLDATDDSDKSVSAPTRTYVRDAKAMAATPADVKEYPNSYTFIVDMPGLKSGDIKVQVEDDNVLVISGERKREEEKEGVKYVRMERRVGKFMRKFALPENANTDKISAVCQDGVLTVTVEKLPPPEPKKPKTIEV

SEQ ID NO: 9445 - protein, 155 aa, Vitis vinifera
MDSRMMGFDSPLFSALQHMLDATDDSDKSVSAPTRTYVRDAKAMAATPADVKEYPNSYTFIVDMPGLKSGDIKVQVEDDNVLVISGERKREEEKEGVKYVRMERRVGKFMRKFALPENANTDKISAVCQDGVLTVTVEKLPPPEPKKPKTIEVKI

SEQ ID NO: 9446 - protein, 149 aa, Vitis vinifera
MMGFDSPLFSALQHMLDATDDSDKSVSAPTRTYVRDAKAMAATPADVKEYPNSYTFIVDMPGLKSGDIKVQVEDDNVLVISGERKREEEKEGVKYVRMERRVGKFMRKFALPENANTDKISAVCQDGVLTVTVEKLPPPEPKKPKTIEV

SEQ ID NO: 9447 - protein, 782 aa, Vitis vinifera
  misc_feature (382)..(382): Xaa can be any naturally occurring amino acid
  misc_feature (434)..(434): Xaa can be any naturally occurring amino acid
  misc_feature (634)..(634): Xaa can be any naturally occurring amino acid
  misc_feature (658)..(658): Xaa can be any naturally occurring amino acid
  misc_feature (662)..(662): Xaa can be any naturally occurring amino acid
  unsure (1)..(782): unsure at all Xaa locations
MKIIRRDLVANGPGSVKMVPVDSDDLWYAYNLIAPGDTVLAVTVRKVLREVASGGRDAERVKLKLEIKVEVADYDKVGSVLRIRGKNILENEYVKIGQFHTLEIEQHRPFVLRKNAFIKGRQILDGSLIANEVIDSWQKRGEKGIVCKLDIEKAYDSINWQFLLKVMQKMGFGSKWIGWMWYCISTVKYSVLVNGVPAGFFSSTKGLRQGDPLSPYLFIMGMEVLSVLITRAAEGDFIKGCRIWRDREQAVKVTHLLFADDTIIFCEAKKEALLHLGWVLFWFEAASGLKINLDKSMVIPVGEVDGVLDMAAEIGCRVGQLPTVYLGLPLGAPNRDVSAWDGVEERTRRRLSLWKRQYLSKGGRLTLIKSTMSSFPLYQMSXFRMPKSVARRIEKLQRDFLWGGANGGTKSHLVKWEAVCVEKEKGGLGLRKIXILNKALLGKWIWRFACAKEELWKKVLEAKYGKEEFGWRTRKANGAFGVGVWKEILKESTWCWENMGFKVGKGSRIRFWTDLWCGNSVLSQDFPNLFSMAAHRNVTVEECWDQNTGQGGWILGLLRDLNDWEVGLVGNILAVLRDYSVTMEDDAVCWKKGEDGLFKIKYAYNVLANSHGLDFPHSNVWVGKVPTKIAFFAXEATWGKVLTLDRLQRRGWHLPNRXFLCXCEZETINHILIHCTVAKGLWNIILALCGVQWVFPNSVKEVLSSWKGSFVGRKRKEVWKAIPLFIFWNIWKERNRLAFKGGVLDCQKLKTSLVYIIWGWAKVYINMESKSLIGFLEWLASK

SEQ ID NO: 9448 - protein, 1795 aa, Vitis vinifera
  misc_feature (922)..(922): Xaa can be any naturally occurring amino acid
  misc_feature (1359)..(1359): Xaa can be any naturally occurring amino acid
  misc_feature (1374)..(1374): Xaa can be any naturally occurring amino acid
  misc_feature (1557)..(1557): Xaa can be any naturally occurring amino acid
  misc_feature (1614)..(1614): Xaa can be any naturally occurring amino acid
  misc_feature (1626)..(1626): Xaa can be any naturally occurring amino acid
  unsure (1)..(1795): unsure at all Xaa locations
MDTTLVSEVLHSEFLNEPRDHLEEREALIKLTEDIEEQEVLLEFLLQVQQRKLVAADKLHGALSCLSSDIGEVMEQQMILNKKGGSFLKLKRDELSVFDKVDYPSQCLAGKGSASLGLRKRIRQGHDPHCVEDWSEHLDEVQKSETQSGNQEAILSKGSRLMKNFKKLESAYFSTRCKPSKPTEKMLTSSPISSTGWGSLVITEGSSVDNLVSKAGYNEGKGSRWINPFLEGLCKYLSFSNLKVRADLKQGDLLNSPNLVCSLSFDRDREFFATAGVNKKIKIFECDMILNENRDIHYPVTEMASQSKLSCICWNGYIKNQIVSSDFEGVVQVWDVSRSQRFMEMKEHEKRVWSVDFSLADPTKLASGGDDGAVKLWNINQAILFLHLVDGGSIGTIKTKANVCCVQFPPDSARSLAIGSADHKVYCYDLRNTRIPLATLNGHSKTVSYVKFINSTTLVSASTDSSLKLWDLSTCTSRVLDSPLQTFTGHMNVKNFVGLSISDGYIATGSETNEIVPIRFDLIDYVLTREEKFGKVVKSWEEEGRRFRLERHAKEAGRFILCSVRDLEAKRVGLGIVGAKEGKRGEAQAEEEEKNRSFVEVAKAKAGRIGDAVWIQLGGRALRSREKQLGRCLVGRWEAEFGRCPDLDCLRTWGRRLWNLKGEVAEETERVLRRGNRHFQNRFLHLERWIPEVGCFRLGIHADQCWVRAVGLPLNFWNWEVFKKFGDSCGGLVAVDGDIANFTQLQWARLLVKTDERDLPGSLHLVVGSLCFAIQLWWEVLPWVSVAVPTQGRGWSKGDEGCMDLHMGRSVGHSRVQGSVGAVEEDRVEQVGAVSVEYGLGMAGNTEAGEGNDGKGKGVVGVSEDGSEGLKRVRAPVSSCVEPRLVEAIVGAASLVAVREKNGADEALLEEAFRRLRCRRCXRIIVRILGVGRCLDWKTLNSRGVSGGVLVLWDKRVLQLLEAGVGTFSVSCRFKSCEDDFCWNFSGVYGLTLKEEREVFWFELGAVRGLWGGPWCVAGDFNVVRFPEENSRRGRLTYSMRRFLEIIEDLELRVLPLHGGSFTWKGGLNNQSHSRIDWFLVSNEWEEHFSGAVQSVLSKPVSNHFPILLDGGESRGGPMLFRFENMWLKEEGFKEKVQAWWVGLNFSGFASFVLAAKLKALKPLLKDWNRLEFGKVEVNKAMALNQEVDARSGANEDFKKWALLEKISWRQKSREVWLREGDRNTSFFHKMANAQRRRNLLSRVKINGSWLTEENEEVLEALKGFCGDKAPGPDGFTMTFWQASWDFVKEEVMGFFREFHNHGRFVRSLNATFIVLIPKKGVAEDLRDCMPISLVGGLYKWLAKVLANRLKMVVGKVVXKAQNAFVEGRQILDXVLVANELVEICVPLDDFDLILGVDFLLRDKVALIPHLGGLMVLEEKQPCFVEALRANDGGKGQPEMLSAIQLKKGLKKGQETYVAALIEINERQSVDVLDSVVKILKEFRDVMPAELPKELPPQRPIDHKIELLPGTKAPAQAPYRMPPAELLELRKQLKELLDAGLIQPSRAPYGVPVLFQXKHDGSLCMCVDYRALNKVTIKNKYLIPLAAELFDRLSKASYFTKLDLRSGYWQVRIXVGDEEKTTCVTXYGSYEFLVGSLPTTYLGLPLGAPHRSMTVWDGVEERMRKNLARWKSQDISKGGRITLIRSTLASMPIYYMSMLSMWGGGALEKKPHLVRWSLVCLEKSNGGLGVKCLSILNKALLCKWSWRFAIEREAFWNRVIRGKYGEEQGGWCSKEARGWGMAWGCGNLLGRFGML

SEQ ID NO: 9449 - protein, 376 aa, Vitis vinifera
MKGMKGKLLKKLKSIRPIGYLKEDRVLQVNASDGFLDGSSWNPSVGVQAQFVCKGTVQNGLDRTGGTEREPEVIDVMELMRDLEGEDMEFDDLMDDKENIGPPVRAKDPVGVKEKSENPVCSEPGFQRKDDGTWEATGNPGHTPLSEIDISSFRRPDLNSGSLFDPNLLAAFQQAVMDQIRINEEERKARMKEEDVEIDDEPPPKARRVEDDTNPLLGFEERCPPGGSDAVVLYTTSLRGIRKTFEDCTSIRFLLESFRVIFYERDVSMHLEFREELWRILDCKALPPRLFIKGRYIGGAEQVLGLHEQGRLRALFHGLPIDHSKGPCEGCAGIRFVMCYKCCGSRKIVSDDGNHGLSNNCPHCNENGLIICPICC

SEQ ID NO: 9450 - protein, 217 aa, Vitis vinifera
MGKNGSGKSTFSKVLVGHPDYEVTGGTVVFKGENLLDMDPEERALAGLFMSFQSPVEIPGVSNIDFLNMAYNAQRRKLGLPELGPIEFYGYISPKLDIVNMKIDFLNRNVNEGFSGGERKRNEILQLAVLGADLAILDEIDSGLDIDALKDVAKAVNGLLTPVNSVLIITHYLRLLEFIKPTYIHVMEDGRIVKTGDISIAKVLEEEGYKAISEAQL

SEQ ID NO: 9451 - protein, 882 aa, Vitis vinifera
MELLFRVFGFLALNMLLHVHAQTGFISIDCGVNEDYIDNTTKLFYSTDAKFIDSGVSKNIPHDFTSPIFEKQLTTVRSFPKGVKNCYTLPAEQGNKYLIRAVFMCGNDQEYNDQLPEFKLYLGVEEWDTVKFNSSYDIFRTEIIYVTRTDEIYMCLVSTDSGTPFISALELRPIDNSIYNKTQSGSLVLFNRLNFGSQTNETVRYGDDVLDRMWVPFNLIYWKAIKAPYSSSVLSENEFKLPATVMETAVKPVNGSLDFYLVGIDSSQEFYMYFHFAEIEEVQDQIREFTVSLNNKTISDPIEPKYMVSDSYFTQSSLSGIQMNFSLAKTNRSTLPPIMNALEIYTIKEFLQSPTEQLDVDAMKKIKSVYQVMKSSWQGDPCLPRSYSWDGLICSDNGYDAPSITSLDLSNNSLNGDVPEFLSEMSSLKTLNLSGNKLTGSVPSALLAKSNDGTLTLSLDGNPDLCQNNSCNTKTKTKNSVAVPVVASIASFVVLLGAIFAIYWHFIRGRKHGTHAGVQPNDQESVSQFDLQKPDVPNEEENLELESEEIQKEMIKPNEKLEAKKQCLSYSEVKRITNNFREVIGHGGSGLVYSGHLSHGIKVAVKKLSPTSHQSFEQFRNEASFSTAQLLSTIHHRNLVSLMGYCDEDSNMLLIYEYMANGNLKEHLSGKIGSVLSWEQRLQIAIEAAQALEYLHEGCNPSIIHRDVKAANILLNEKMQAKVADFGWSRSMPSENPSHVSTTFVVGTFGYLDPQYNRTGQLTKESDVYSFGIVLLELISSRPAIMEENRSILDWVRPIIERGEIEDIVDPRLQGIFNTNSAWRAIETAMCCVPFSSTERKTMSYVVRELKECLKLVEMSSTSNTGISITQPIGPATGPRAR

SEQ ID NO: 9452 - protein, 467 aa, Vitis vinifera
MIREKKRNLQKEKDKESDKEHELVRARVREKERLERQERQERQERQEKQERQERQEIQERQERQERQERQEKEKEREKEKEREKDKDKLEKDKEREKQHDDQIDTEMTTDQEDVVTVKHDENGVSGGPEPMDISTSSTFQACEIPSSDVTILEGHTSEVCACAWSPAGSLLASGSGDSTARIWTIADGTCRSSVQNGPSNVLVLKHVKGRTNEKSKDVTTLDWNVLEQVEPQWMLGDGTLLATGSYDGQARIWSTNELLPLPFLSVTRRFDSLGIEVMKIDGRIGLSTDKPGGGELRSTLSKHKGPIFSLKWNRKGDYLLTGSCDKTAIVWDVKTEEWKQQFEFHAGPTLDVDWRNNVSFATSSTDNMIYVCKIGENRPIKTFSGHQGEVNCVKWDPTGQLLASCSDDITAKIWSIKQEKYLHDLREHAKYAFANINELFCRRYILSDGVPLVQGTNNPNQPLVLAR

SEQ ID NO: 9453 - protein, 1079 aa, Vitis vinifera
  misc_feature (215)..(215): Xaa can be any naturally occurring amino acid
  misc_feature (257)..(257): Xaa can be any naturally occurring amino acid
  misc_feature (322)..(322): Xaa can be any naturally occurring amino acid
  unsure (1)..(1079): unsure at all Xaa locations
MGKGDALKETYWSLGGGFLRIFGEKHRRSGKRLIAIKAVQSERIRAKDDSFILSRVLVILVFQRRSLSDCLHWGYLLVRFSGFWSMASSLLQNLAKVSSPSTAEMSYYEVYMDRCYDLLEVKAKEIAILDDKDGQIHLKGLYRVPISSISHGVLVISVSTPCDDGSSAVVTWKLNLIDLAGNEDNRRTCNEGIRLQESAKINQSLFVLSNVIYAXNNNKPRVPYRENKLTRILQDSLGGTSRALMVACLNPGEYQEXVHTVSLAARSRHISNSVPSAQKQDTPNVKVDMEAKLRAWLESKGKTKSAERMRALGSSLMSKAPXSLSSLKKPCPCHSSTKAKAITNQGASNAKERVLSVQHRBLFYNGDSVDSGTERFNFAAENNTNNTEEEFKAGGDGSASETNTILPDDALANDKKILKLIEEFFYFERLNICSTDWYSPGRFRQLCESNLREDAAVNIVATTLACDQIALIGWQDQKGSVGGSYSDAGFVVMYAWKDVVQASSNPSDDLKRKYEELQDAGSNLYNDEYDSPRMEMGMMRSKPNVQWSDVAGLESAKQALKSHLAKAVATEADSTFFNMSSSDLVSKWTGENEKLVSNLFQMARESEGNESEASRCIKTELLVQMQGVGHNDQKVLVLTATNTPYSLDQAIRRRFDKRIYIPLPDLKAGQHMFKVHLGDTPHNLTERDFEHLAYRTDGFSGSDISVCVNNVLLEPVLKIKDASYFVKTSNSIWVPCDPIQRGAVQVFLQEIEVQSLASKVLPPPISRTNFEKVLARQRPTIKESTLEFMNLLSFLDHGNNVNSNNVSKIDYKDRVSKLEERHYHLKKLSMSAWIKSVQRMGKEDIEALLGFLDERETQNCKVLVQNLNLVDLGGSKYKNSQYNAFEENQIYQEMTQEADMTKFSGTLRSVSQNFGLAAIYDVEIANNSANLQKIPMFDLNADERRTAKPVASSIHREFESDLNWADHKLLKLLVYHLTPCQYVSKDIIKHPPQQPSPQATFTTPFPSALPNELRAPEIQASLLMDKVKGFKFESRHSVTQFNRMRQQVYLVQQNTPAEVAGQGIRRNGEKLKNTVMQST

SEQ ID NO: 9454 - protein, 636 aa, Vitis vinifera
  misc_feature (465)..(465): Xaa can be any naturally occurring amino acid
  misc_feature (584)..(584): Xaa can be any naturally occurring amino acid
  misc_feature (587)..(587): Xaa can be any naturally occurring amino acid
  misc_feature (628)..(628): Xaa can be any naturally occurring amino acid
  unsure (1)..(636): unsure at all Xaa locations
MCGILAVLGCVDNSQAKRSRIIELSRRLRHRGPDWSGLHCHQDCYLAHQRLAIVDPTSGDQPLYNEDKTVVVHGYLGSYRVNGEIYNHKQLREKLTSHQFRTGSDCEVIAHLYEEYGEDFVDMLDGMFSFVLLDTRDKSFIAARDGIGITPLYIGWGLDGSIWFASEMKALSDDCERFMSFLPGHYYSSKRGELRRWYNPPWYSEHIPSTPYDPLVLREAFEKATNEIISIKRCLTKRRHKPIHRRYTRYTKAVIKRLMTDVPFGVLLSGGLDSSLVASVASRYMLQSEAACQWGSQLHTFCIGLKGSPDLKAAREVANYLGTRHHEFHFTVQEGLDALEEVIYHIETYDVTTIRASTPMFLMSRKIKSLGVKMVLSGEGSDEIFGGYLYFHKAPNKEELHQETCRKIKALHLYDCLRANKATSAWGVEARVPFLDKEFINIAMNIDPEWKMARSALAGCSSSGXVHVRPDLGRIEKWVLRNAFDDDQKPYLPKHILYRQKEQFSDGVGYRWIDGLKDHANEHVTDAMLLNANFIYPENTPTTKEGYYYRAIFEKFFPKNAARSTVPGGPSVACSTAKAVEWDXAWXKNPDPSGRAALGVHECAYEEAVDAKNANLINGTTQKPQEGXLEKTTTAI

SEQ ID NO: 9455 - protein, 509 aa, Vitis vinifera
  misc_feature (103)..(103): Xaa can be any naturally occurring amino acid
  misc_feature (505)..(505): Xaa can be any naturally occurring amino acid
  unsure (1)..(509): unsure at all Xaa locations
MEAPSWVVLALAWLASVALLSKVFSFRPPHKQNLPPGPTPWPIIGNLNLIGHLPHRSLHKLSQKYGQIMELRFGSFPVVVASSSEMAKQFLKTNDHLFASRPXTAAGKYITYNYSNITWAPYGPYWRQGRKIFLTELFSSKRLASYEYIRVEERQAFISRLYALSGKPVMLKEHLSRVTLGVISRIVLGEKYFSEFESGRSMLTVEECQKMLGELFLLNGVLNIGDWIPWIAFLDLQGYVKRMKALRDKFDRFYDHVLEKHRARREAEDFVAKDMVDMLLRLADDPDVEVKLTTDGIKGFTQDLIAGGTDTSATTLEWAMSEVLRQPNIAKKATEELDRVIGRDRWVEEKDIAQLPYIDAIVKETMRLHPIVVLLAPHLALQDCNVAGYDIRRGTRVLVNTWSIGRDPNIWDAPEEFRPERFLGKAIDVKGQSFELLPFGSGRRMCPGYSLGLKMIQSSLANMLHGFHWKLPWDMKTEELNMEEVFGLTTPRKVPLVAVMEPRLXNHLY

SEQ ID NO: 9456 - protein, 421 aa, Vitis vinifera
  misc_feature (19)..(19): Xaa can be any naturally occurring amino acid
  misc_feature (82)..(82): Xaa can be any naturally occurring amino acid
  misc_feature (122)..(122): Xaa can be any naturally occurring amino acid
  misc_feature (158)..(158): Xaa can be any naturally occurring amino acid
  misc_feature (199)..(199): Xaa can be any naturally occurring amino acid
  unsure (1)..(421): unsure at all Xaa locations
MELRFGSFPVVVASSSEMXKQFLKTNDHLFASRPHTAAGKYTNYNYSNITWAPYGPYWRQGRKIFLTEMFSSKRLESYEYIXVEERQAFISRLYALSGKPVMLKEHLSRVTLSVISRIVLGXKYFSEFESGRSMVTVEECQKMLVELLLLNGVLNIGXWIPWIAFLDLQGYVKRMKALRHKFDRFYDHVLEKHRARREXEDFVAKDMVDMLLRLADDPDIEVKLTTDGIKGFTQVLRQPNIANKATEELDRVIGRNRWVEEKDIPQLPYIDAIVKETMRLHPVAVLLAPHLALQDCHVAGYDIRKGTRVLINTWSIGRDPNLWDAPEEFFPERFLGKAIDVKGQNFELLPFGSGRRMCPGYSLALKMIGSSLANMLHGFHWKLPGDMKPEELNIEEVFGLTTPRKVPLVAFMEPRLPSHLY

SEQ ID NO: 9457 - protein, 169 aa, Vitis vinifera
MQEQATSSLAASSLPSSSERSSSSALQAEVKEGMESDEEIRRVPEIGSGDPAGPSASGREAALVAGPDRVQASGDGQRKRGRSPADKENKRLKRLLRNRVSAQQARERKKAYLNELEVRVKDLERKNSELEERLSTLQNENQMLRHILKNTTASRRGGSSNNSNADGSL

SEQ ID NO: 9458 - protein, 156 aa, Vitis vinifera
MDLRVMGFDSPLFSTLQHMLDAGDDSDKSLNAPTRTYVRDAKAMAATPADVKEYPNSYTFIVDMPGLRSGDIKVQVEDGNVLVISGERKREEEKEGSKYVRMERRVGKFMRKFVLPENANTDKISAVCQDGVLTVTVEKLPPPEPKKPKTIEVKIA

SEQ ID NO: 9459 - protein, 220 aa, Vitis vinifera
  misc_feature (81)..(81): Xaa can be any naturally occurring amino acid
  misc_feature (88)..(88): Xaa can be any naturally occurring amino acid
  unsure (1)..(220): unsure at all Xaa locations
MAPRDKPTGVTAGATGNKEIRYRGVRKRPWGRYAAEIRDPGKKSRVWLGTFDTAEEAARAYDAAAREFRGAKAKTNFPSPXDLAAAAXTTANRSPSQSSTVESSSREALSPGAIAGPPALDLNLSHPAAAGQFSAVRYPAVGVFPIAQPLFFFEPFSRPEKPKTHRDMFDLDRAVADFHPAIAGSVHSDSDSSSVVDFNYHDRSTRLLNLDLNHPPAEVA

SEQ ID NO: 9460 - protein, 333 aa, Vitis vinifera
MEEGELSRSSSDSLAFELHNGQIMAATAAFHNASTLLPLFAVMSEEASHGNLWQNHSCDFLNSDSNSGGSGGEKLGEKPPDSSSNSPVENRQGMALVGRKRGRRAKASDGGGGESEHETHIWTERERRKKMRNMFSSLHALLPQLPPKADKSTIVDEAVNYIKTLQNSLIKLQKQRHEMQQGATAVDCEQSIITSQALAPDTRETSLPAGDRSLKNYFSLPTNKPNLLSVPSSSLCFQTWFSPNVVVSMCGNDAHISVCSSRKPGLLATIFYILEKHKLDVLSAHISSTQQRSIYMIHAHASGVSDDQLPKGLTVEEIFKLAVGEMTLWLSSC

SEQ ID NO: 9461 - protein, 213 aa, Vitis vinifera
MGGVLVIWLLLFAGAVELSLGISHEIHLLRPQLGSSGHHVPGLSCLSWRLGVEAHNIIEWSTVPQACESYVGHYMLGHQYRKDSRAVVYEALTYAQSLKLAVDGKDIWVFDVDETSPSNLPYYAKHGFRVEAYNSTQFNNWVYEGKAPALPESLKLYKKLLSLGIKAVFITGRPEAKEMSQQPIYEMWDITLGRSSYSSKQILTLQDVFHWAY

SEQ ID NO: 9462 - protein, 255 aa, Vitis vinifera
MGVLVQLLFLLASTVELSPGISLEIHLLRPQLGSSGHHVPGLSCLSWRLGVETHNIIEWSTVPQVCESYVGHYMLGDQYRKDSGAVVYEAISHAQSLKLAGDGKDIWVFDIDETSLSNLPYFAKHGFGVEAYNSTQFNNWIYEGKAPPLPESLKLYKKLQSLGIKPVFITGRPEAQRNVTAANLQNAGYHTWEKLILKGSSVTGTAVAYKSNERKKLEQSGYRIVGNIGDQWSDILGTNVGNRTFKLPDPMYYIS

SEQ ID NO: 9463 - protein, 446 aa, Vitis vinifera
MKKVTRKVGKYEVGRTIGEGTFAKVKFAHNTETGESVAMKVMAKSTILKHRMVDQIKQEISIMKIVRHPNIVRLHEVLASQTTIYIILEFVTGGELYDKIVHQGRLSENESRRYFQQLIDAVSHCHSKGVYHRDLKPENLLLDSNGNLKVSDFGLSALPKQGVGLLHTTCGTPNYVAPEVLSNQGYDGAAADVWSCGVILYVLMAGYLPFNEIDLPSLYKKINAAEFSCPFWFSSGSKSFLCRILDPNPKTRIRIEGIKNDPWFRKNYVSSKCREDEEVNLDDIHAVFDDIEENYVSEQSGNNDTGPLIMNAFEMITLSQGLNLSALFDRRQDYVKRQTRFVSREPAKVIISTIEAVAESMNFKVHTRHYKTRLEGISANKTAQFAVVLEVFEVAPSLFMVDVRKAAGDTLEYHKFYKNFCAKLEHIIWKPKEAMTNSSLLRTMTC

SEQ ID NO: 9464 - protein, 380 aa, Vitis vinifera
MSFRSIVRDVRDGFGSLSRRSFDVRLPGHHRGKSHGSVHELQDQPLVVQNSRWAGLPPELLRDVIKRLEASPGPRDGTIQCFIKRDKSNLTYHLFLCLSPALLVENGKFLLSAKRNRRTTCTEYVISMDADNISRSSSTYIGKLRSNFLGTKFIIYDTQPPYNGSQLSPPGRTSRRFYSKKVSPKVPTGSYNIAQVTYELNVLGTRGPRRMHCTMHSIPASSLEPGGTVPGQAELLPRNLEDSFRSISFSKSIDNSTEFSSSRFSDIIGPRDEEDEGKDRPLVLRNKPPRWHEQLQCWCLNFRGRVTVASVKNFQLIAATQPAAGAPTPSQPPASDHDKIILQFGKVGKDMFTMDYRYPLSAFQAFAICLSSFDTKLACE

SEQ ID NO: 9465 - protein, 419 aa, Vitis vinifera
  misc_feature (21)..(21): Xaa can be any naturally occurring amino acid
  misc_feature (25)..(25): Xaa can be any naturally occurring amino acid
  misc_feature (57)..(57): Xaa can be any naturally occurring amino acid
  misc_feature (67)..(67): Xaa can be any naturally occurring amino acid
  misc_feature (85)..(85): Xaa can be any naturally occurring amino acid
  misc_feature (122)..(122): Xaa can be any naturally occurring amino acid
  misc_feature (188)..(188): Xaa can be any naturally occurring amino acid
  misc_feature (197)..(197): Xaa can be any naturally occurring amino acid
  misc_feature (278)..(278): Xaa can be any naturally occurring amino acid
  misc_feature (295)..(295): Xaa can be any naturally occurring amino acid
  unsure (1)..(419): unsure at all Xaa locations
MKAGCRNYLLRSHQSGAFNLXLLCXSRLALGSLCFTCLHSISILSPFFRGTGIHSDXRCTLDASTFXPISLWEFAGAALSCHDTXVDGMAKDGLWDVYNDFGMAICAEICADQHKITREQQXDLCVDYHTSFFLKVTVNGFENTNRVHVTLPSALVDKDEGLGKDGGSVTAGNASSISDGAAALVLVXGKKAVELRXQVIAKIAGYGDAAQAPELFTTTPALAIPKAISNAGLKASQIDYYEINKAFAEKVNVHGGSISLGHPIGCSGARILVTFLSXRSCIYQLQFALTGGASXRAEYEGNLKEILGYTKDDVVSSDFIGDRRSSIFYAKAGIALNDNFIKLVSWYDNEWVYSWLRRGWNSPVIIVGAEDKEYQLTIEDIDLSFVFIGAEDAAELSIKGVQLEHRKVQPGNISILGYC

SEQ ID NO: 9466 - protein, 550 aa, Vitis vinifera
  misc_feature (24)..(24): Xaa can be any naturally occurring amino acid
  misc_feature (144)..(144): Xaa can be any naturally occurring amino acid
  unsure (1)..(550): unsure at all Xaa locations
MLRALSLRRSLRAFHHYHHHHHQXTSPHSNLLKALSSTTSPNPNPNLTRPFSSLSSSPSSEAEFRKYLGYFALLLGCGIATYYSFPFSDSAKHKKAQLFRYAPLPDDLHTVSNWSGTHEVQTRVFHQPESLEELEQIVKEANEXKQKIRPVGSGLSPNGIGLTRAGMVNLALMDNVLDVDVEKKRVRVQAGIRVQQLVDAIKDYGITLQNFASIREQQIGGIVQVGAHGTGARLPPIDEQVISMKLVTPAKGTIEVSKERDPELFYLARCGLGGLGVVAEVTLQCVERQELVEHTVVSNMKEIKKNHKKLLSENKHVKYLYIPYTDTVVVVTCNPVSKWKGPPKFKPKYSRDEAIQHVRDLYQESLKKYSEPDINELSFTELRDKLLALDPLNKDHVIQVNQAEAEFWRKSEGYRVGWSDEILGFDCGGQQWVSETCFPAGTLAKPSMKDLEYIEDLKKLIEKEEIPAPAPIEQRWTQSSKSPMSPASSSAEDDIFSWVGIIMYLPTMDARQRKEITEEFFHYRRLSQTQLWDLYSAYEHWAKIEVFTRS

SEQ ID NO: 9467 - protein, 437 aa, Vitis vinifera
MAVWSSMDDIEIPQYFLCPISLQIMKDPVTAMTGITYDRESIEQWLLTAKDTTCPVTKQPLERDFVLTPNHTLRRLIQAWCAANATNGVDQIPTPKTPLDRTHVVKLIRDLGVAQLYLKTLQKMEALTRDNERNRNCMADAGAAKAIVLLIIKCFKENKTTGVEEGLRILHLIWSPTSEMKLLLKENYDFVDAVTWALGCETDNYVAVRSNAVLVLKNIVEVASPNLLERLKFEFLNRLIRTMREKISQAAMKAALYVLMEVCPWGRNKWQMIEAGAVFQLIEMELENPEKKITEIIFCLLGHLCSCADGRAQFLAHAGSMAMLSKRILRVSNTTDDRALHIIALISKFSGTNEVLMEMLRVGAVSKLCMVLQADCAKYLKEKAREILRLHSKKSGKFWQIINNLSVVGGLNDTDEEDIRWSLEAWISKKGKNVLYN

SEQ ID NO: 9468 - protein, 877 aa, Vitis vinifera
MDGRPTLIWLLIISLHSPGWVSGTFHGIQSGRRELTAGKGFISIDCGIAPGSNYIDDKLQIPYISDEEFIDTGVNYKVSKDYSDEDALKQFMNVRSFPEGNKNCYTLRPEGGKGNKYLIRARFMYGNYDSNNHLPKFKLYLGTDEWVTVNIEDASAYIREEIIHVPTTDDIYVCLVNIGGGTPFISTLELRPLNNSIYDQSEQGSLLLFNRWDFCKPENALHRPDDVFDRIWNLSAWSNEWDTLEAAYEISSLSHSEYKLPMSVMMDAVIPVDISEPWNFSLDLDDDPSQNLYIYMHFAEVQKLREGDIREFTVSLNEDDSWGGGEPVIPNYMVSNTLHHPSAVSGSTTNELSFALKKTNRSTLPPLINAMEVYKIKDFAQSSTKQGDVLAVKNIRSAYRLTRHWQGDPCLPLDFPWDGLQCSYSSDSPTIISLNLTGNQLTGSVPQTIMEMFKDKDRTLSVWFDGTLDFNYILFCASLGANPNLCPSVSCQGKEKKKKNRFLVPVLIAILTVTVILVLITALAMIIRKFKRRETKATTIETVSERPKEGSLKSGNSEFTFSDVASITNNFSRTIGRGGFGQVYLGTLADGTQVAVKMRSESSMQGPKALRAEVKLLTRVHHKNLVRLIGYCNDGTNIALVYEYMSNGNLQQKLSGRAAADVLNWKQRLQIAVDAAHGLEYLHNGCKPPIVHRDMKSSNTLLTETLEAKIADFGMSRDLESGALLSTDPVGTPGYLDPEYQLTGNLNKKSDVYSFGIVLLELITGQPAIKNPGSIHIVGWVSPMIERGDIQSIVDPRLQGDFHTNSAWKALEIALACVALTGMQRPDMSHVLADLKECLEIEMASRRTQSVSHSIGSGNFLEDSPLTLGTQSAPRAT

SEQ ID NO: 9469 - protein, 105 aa, Vitis vinifera
MSWSKLVSPNGKRRRGRNPVDREYRRLKRLLRNRVSAQQARERKKVYVNDLESRAQELQDRNSKLEEKISTLVNENTMLRKVLMNTRPKMDDSSTESKHDQLGKS

SEQ ID NO: 9470 - protein, 226 aa, Vitis vinifera
MDSSSFYHQYQSSEFSPESSSFGSSEYFSSWDEPLFHHNSLPFNINDSDEMILFDMLAEGARDSSETASSVGGAAKEEEVTSNAKEPTPNKKEKEKTYRGVRKRPWGKFAAEIRDSTRHGVRVWLGTFDSAEAAALAYDQAAFSMRGTMAVLNFPVERVVESLRDIKYACEDGGSPVVALKRRHSMRRKSTGRKNKSKEVKAQNVVVLEDLGADYLEQLLCSSESR

SEQ ID NO: 9471 - protein, 1180 aa, Vitis vinifera
  misc_feature (422)..(422): Xaa can be any naturally occurring amino acid
  misc_feature (472)..(472): Xaa can be any naturally occurring amino acid
  misc_feature (589)..(589): Xaa can be any naturally occurring amino acid
  misc_feature (919)..(919): Xaa can be any naturally occurring amino acid
  misc_feature (926)..(926): Xaa can be any naturally occurring amino acid
  misc_feature (956)..(956): Xaa can be any naturally occurring amino acid
  unsure (1)..(1180): unsure at all Xaa locations
MAIDTPANPTHVSHVRNSPRQVQPGAKVPWSTGLCDCFSDVPNCCMTFWCPCVTFGRIAEIVDSGSSSCALNGLLYTLVAFTTGCACLCSCFNRSKMRKQYKLEGNDCKDCLAHYFCEACALCQEYRELKNRGFDMTLGNPTLSQLTDGMEICRNRAVLRQQLRFRRWKEACTARLQVLICLRSSSLDLDSGKTIGNAEECSGLYILKERHDPQEQPQMTVGSNSFSVSCQNNDSAIRLWHYRLGHPNVMYLKHLFPSLFNKNPQSFECEICQLSKQVRSHFPIQPYKESSPFSMIHSDIWGPSRIKNVTGTRWFVSFIDDHTRLTWVFLMKEKSETSQIFKNFKNMIQTQFQSKIQILKSDNARDYFNSILGEFLAQEGIVHLSSCVDTPQQNGIAERKNRHLLEVARSLMFSMNVPKLFXGQAVLTAAYLINRMPSRVLKFQTPCQTLLKSFPTTRLISTVPPKIFGCSXFVHINQQHRSKLDPRSLKCIFLGYSSNQKGYKCYSPVTRKFYNSMDVTFFETQPYYPKNDIQGENSTQEYQFWDLESFSESPITTENHIPPESFNQPESIVDLWDKEHIQEETEERXLSQQTHEAEPGPNPSKLPGNNAPDGTVDSELENDILNMPIAWRKGVRSCTQHPIGNFISYDKLSPTFRAFTSSITEIQVPQNIHEAFKYPKWKAAVDEEVRALEKNGTWEITDLPRGKKPVGCKWIFTVKYKADGNVDRYKARLVAKGFTQSYGIDYQETFAPVAKLNTVRVLLSLAANLDWSLHQLDVKNAFLNGDLEEEVYMDIPAGLETTSNFNKVCRLRKSLYGLKQSPRAWFERFTKVVKRYGFVQCQSDHTLFVKHFPEGKLAIIIVYVDDIILTGDHEEKIDLLKKLLTKEFEIKDLGNLKYFLGMEIARSKKGIAVSQRKYXLDLLNEXGMLGCKPAETPMDTTVKLEESDGSAPIDKXRYQRLVGKLIYLSHTRPDIGFSVSVVSQFMNNPTEKHMTAVIRILRYLKMTPGKGLFFQRTTKKEIEIFSDADWAGSVTDRRSTSGYCSFVWGNLVTWRSKKQSVVARSSAEAEFRAMAQGICEGIWLNRLLEELRVPLKHPMVLYCDNQAAISIAKNPVHHDRTKHVEIDRHFIKEKIEEGVFKVSYTPTNCQTADILTKALARVNFEDLTEKLGMINIYNAA

SEQ ID NO: 9472 - protein, 180 aa, Vitis vinifera
  misc_feature (52)..(52): Xaa can be any naturally occurring amino acid
  unsure (1)..(180): unsure at all Xaa locations
MYSSDDYRRFMTTPPPEPAPPSFNGAGTATGIPVELPRAILLRETLPSSTSXQGCITCWCPCITFGQIAEIVDKGSSACGVNGALYTLIACVTGCACCYSCFYRAKMRQQYLLKPSPCGDCLVHCCCEYCSLCQEYRELKNRGFDMTIGWHGNVERQNRGVEMSSMSSQTAPTMEEGMSR

SEQ ID NO: 9473 - protein, 404 aa, Vitis vinifera
MASLSLSAPSYHAESLVSRYSLRQSSFLPNESRYQFPTYSATKQSLFLFIKCDMNESLKFENGKPCVPVLNDRTFPSFLESRRMEKSVSRNSDRLKIFSGTANPTLSKEIAWYMGKELGKINIKRFADGEIYVQLEESVRGCDVYLVQPTCPPANENLMELLIMIDACRRASAKTVTAVVPYFGYARSDRKARRESIAAKLVANVITKAGADRVLACDLHSGQSMGYFDIPVDHIYCQPVILDYLASKTICCNDLVVVSPDVGGVARARAFAKKLSDAPLAIVDKRRQGHNVAEVMNLIGDVKGKVAVMVDDMIDTAGTITKGAALLHQEGAREVYACCTHAVFSPPAIERLTSGLFQEVIITNTIPTLEKNYFPQLTVLSVANLLGETIWRIHDDCSVSSIFL

SEQ ID NO: 9474 - protein, 219 aa, Vitis vinifera
MSRVTGTVKWFNDQKGFGFITPDDGGDDLFVHQSSIRSEGFRSLGEGEAVEFVVESSDDGRTKAVDVTGPDGNPVQGSRGGGGGRGGRGGGGYGGGGGGGGYGGGGGGYGYNGGGGRGGGRGGRGGGGGGRSSGGYGGGGYGGGGGYGGGGGGGGGACYNCGEEGHLARDCSQSSGGGGGGGRYSSGGGGGGGGGGGGGGCYRCGEAGHFARECPNNAR

SEQ ID NO: 9475 - protein, 717 aa, Vitis vinifera
  misc_feature (348)..(348): Xaa can be any naturally occurring amino acid
  unsure (1)..(717): unsure at all Xaa locations
MEYGSGGGGGGGGSGGSGGDPDGSDSRRKKRYHRHTAHQIQRLEGMFKECPHPDEKQRLQLSRELALAPRQIKFWFQNRRTQMKAQHERADNCALRVENDKIRCENIAIREALKNVICPSCGGPPIGEDSYFDEQKLRVENAQLKEELDRVSSIAAKYIGRPISQLPPVQPVHISSLDLSMGSFGGQGMGSGPSLDLDLLPGSSSAMPILPFQGTGISDMDKSLMADVAGNALDELLRLLQTNEPLWMKSTTDGRDVLNLESYERIFPRANSHLKNPNVRIEASRDSGVVIMNSLALVDIFMDSNKWMELFPTIVSMARTLEVLSSGMMGGQSGSLQLMYGELQVLSXLVPTREFYFLRYCQQIEQGSWAIVDVSYDFPRDNQFAPQNPSHRLPSGCLIQDMPNGYSKVTWVEHVEIEDKTPTHRLYRDLIHRGLAFGAERWLATLQRMCERFACLMVKGTSTRDLGGVIPSPDGKRSMMKLAQRMVNNFCASISTSNGHRWTTLSGLNEVGVRVTIHKNTDPGQPNGVVLSAATTIWLPVSPQNVFNFFRDERTRPQWDVLSNGNAVQEVAHIANGPHPGNCISVLRAFNTSQNNMLILQESCIDSSGSLVIYCPVDLPAINIAMSGEDPSYIPLLPSGFTISPDGRLDQGDGASSSSSTTASMGRSGGSLITVVFQILVSSLPSAKLNLESVTTVNNLIGNTVQQIKAALNCPSS

SEQ ID NO: 9476 - protein, 417 aa, Vitis vinifera
MASFLHMYDHFIEDDPFGGTMLSNCMDPDFKPTISEAHPETMDFLSRAWCNFAVQAIQPELQDQSVVILDNPIKKFGNDTKAPFPKIDNSVKMDDAGIKSPPPWKTNDVKSWIWMQQAMHPELNYNSHFRKKWISWKIMPLGSNISIKKWFKDIKLKRKEEDRLQRAEVYAAISVAGVAAALAAIAAENPKQDHSNATKESAVASAAALVAAQCAQVAEAMGAKREQLSTVMCSAMSGTSASDILTLTAAAATSLKGAATLKGRAGYKNRLNGSAPVLPIEESNELDSDLEKHRSMLAKGAQLTFHTSDGRCLLRSVSIILNSQAKVILKIRKLNLMNTFSRKKESIIQDLHAELYDSSEADERNTCYLIMLTTNRGTIKLDMGDDYHLYKIWATTVNHMLTLSTSFTRYELQFYKT

SEQ ID NO: 9477 - protein, 460 aa, Vitis vinifera
MDRTRVKTNQTMIKSEVLEQFINKGTPWKCCCEFWGQRIKMMIGESRRPNPTVLVPPWPHFDDPTVDISFPYPVSGVSVNSNANANGLQGGEHSPFLLGEALTALQRYLPSNDVDVDSDSDISGREADIPVDAYSCDHFRMFEFKVRRCARGRSHDWTECPYAHPGEKARRRDPRKFHYSGTACPDFRKGNCKKGDSCEFAHGVFECWLHPARYRTQPCKDGPNCRRRVCFFAHTAEQLRVLPQQSPRTPGSVESYDGSPLRQALEASCAKTLPFMSSPGSVSPPGSPPPESPPMSPITSSLSRSLGSNSINEMVASLRQLQLSKVKSAPSSWCVHMGSPGGFGSPRASIIRPGFCSLPSTPTRAPKRHGLGFVDLFEEEPAMERVESGRDLRAKMFEKLSKENSLDRPDPSASGAGPDVGWVSELTWRWGFDRTTIHHPLAPLGVLKSWKEIDDDESVM

SEQ ID NO: 9478 - protein, 587 aa, Vitis vinifera
MASMACLNIFQKGRGKTRNEQEECTFDGSVDRHGHPAVRARTGNWVTAILILVNQGLATLAFFGVGVNLVLFLTRVLGQDNATAANNVSKWTGTVYIFSLLGAFLSDSYWGRYKTCAIFQVIFVIGLVLLSLSSYIFLLKPNGCGDKEFPCGSHSTFEISFFYLSIYLIALGNGGYQPNIATFGADQFDEDNPKESHSKVAFFSYFYLALNLGSLFSNTILGYFEDGGRWVLGFWASSASAILALILFLFGIPRYRHFKPSGNPLSRFCRVVVAATRKWKVEMPPEGEDLYEVDGDDCSGNCRRKMLHTQGFKFLDKAAVLTAKEREQEDKESRSPWRICTVTQVEEVKCILRLLPIWLCTILYSVVFTQMASLFVEQGAAMKTTLLGFHIPPASMSSFDIVSVAAFIFIYRRVLDPLVARLKGTKARGLTELQRMGIGLIIAIIAMVAAGIVEWFRLKYAKKDCRQCESESSLSIFWQIPQYVLIGASEVFMYVGQLEFFNDQAPDGLKSFGSALCMTSISLGNYVSSLLVTIVMKFSTRDQMPGWIPSNLNKGHLDRFYFLLAALTMADFGVYIICAKVVTSPSS

SEQ ID NO: 9479 - protein, 1508 aa, Vitis vinifera
MFFSANVLYTHIWYVYYSCIFSSCISLRLLIVFALNPMFILATFFQYGFIAWLLSTCVGLLLSFLSKSSVLLGLSLTFPLMVACLSVSIPIWIHNGYQFWVPRVESAGHPGHHRTPGKKEGVVLVICILVFAGSIFALGAIVSVKPLEDLRYKGWTGDQRTFTSPYASSVYLGWAIGSVIALVVTGVLPIISWFATYRFSLSSAVCAGIFSVVLVAFCGASYLEVVKSRDDQVPTKGDFLAALLPLVCFPALLSLCTGLYKWKDDDWKLSRGVYVFVIIGLLLLLGAISAVVVIVEPWTIGVACLLVLLLIALAIGVIHYWASNNFYLTRTQMFFVCFIAFLLALAAFLVGWYEDKPFVGASVGYFSFLFLLAGRALTVLLSPPIVVYSPRVLPVYVYDAHADCGKNVSVAFLVLYGIALATEGWGVVASLKIYPPFAGAAVSAITLVVSFGFAVSRPCLTLKMMEDAVHFLSKETVVQAIARSATKTRNALSGTYSAPQRSASSAALLVGDPTVMRDRAGNFVLPRADVMKLRDRLRNEEVAAGSFFCRVRNGRTFWHESTSDIGYRREMCAHARILALEEAIDTEWVYMWDKFGGYLLLLLGLTAKAERVQDEVRLRLFLDSIGFSDLSAKKIKKWMPEDRRQFEIIQESYIREKEMEEEILMQRREEEGRGKERRKALLEKEERKWKEIEASLISSIPNAGSREAAAVAAAVRAVGGDSVLDDSFARERVSSIARRIRMAQLARRALQTGVTGAVCVLDDEPTTSGRNCGQIDPTICQSQKVSFSIAVTIQPESGPVCLLGTEFQKKVCWEILVAGSEQGIEAGQVGLRLITKGDRQTTVATGVEYQCNKWHIVTMTIDADLGEATCYLDGGFDGYQTGLPLRVGNGIWEQGTEVWIGVRPPIDIDAFGRSDSEGAESKMHIMDVFMWGRCLTEDEIAAFYGAMGSAEYSMIDFPEDNWQWADSPSRVDEWDSDPAEVDLYDRDDVDWDGQYSSGRKRRSEREGMVVDVDSFARRLRKPRMETREEINQQMLSVELAVKEALSARGETHFTDQEFPPNDQSLFVDPENPPLRLKVVSEWMRPTDMVKESYLDAGPCLFSGAANPSDVCQGRLGDCWFLSAVAVLTEVSRISEVIITPEYNEEGIYTVRFCIQGEWVPVVVDDWIPCESPGKPAFATSRKGNELWVSLLEKAYAKLHGSYEALEGGLVQDALVDLTGGAGEEIDMRSAQAQIDLASGRLWSQLLRFKQEGFLLGAGSPSGSDVHVSSSGIVQGHAYSLLQVREVDGHKLVQVRNPWANEVEWNGPWADSSPEWTERMKHKLKHVPQSKDGIFWMSWQDFQIHFRSIYVCRIYPPEMRYSLRGQWRGYSAGGCQDYDTWHQNPQFHLRATGPDASFPIHVFITLTQGVSFSRTTAGFRNYQSSHDSMMFYIGMRILKTRGRRAAYNIYLHESVGGTDYVNSREISCEMVLEPDPKGYTIVPTTIHPGEEAPFVLSVFTKASVTLEAL

SEQ ID NO: 9480 - protein, 1090 aa, Vitis vinifera
  misc_feature (218)..(218): Xaa can be any naturally occurring amino acid
  misc_feature (356)..(356): Xaa can be any naturally occurring amino acid
  misc_feature (970)..(970): Xaa can be any naturally occurring amino acid
  unsure (1)..(1090): unsure at all Xaa locations
MDQVPIWVLFISFLLLFHTTSSIEPDVRQALINFLGSLSGSNGQAAQAAGWNLDTDPCLDGWNGVTCDKKNQSVQKISLDGLSLAGILDVGSLCTKQSLAASLNYLSVGNNSISGDVRKEIADCKQLARLNISGNRFSGKLPDSLPMLNNLKKLDISNNHLSGDLPDLSRISGLTTFLAQNNQLTGKVPKLDFSNLEQFDVSNNLFRGPIPDVEDRFXESSFLGNPGLCGDPLPNKCPKKVSKEEFLMYSGYALIVLVLIMFVVFRLCKRRTKEEKVDATNKIVAVDDSGYKTGLSRSDFSVISGDQSALVSSTSLVVLTSPVVNGLKFEDLLTAPAELLGRGKHGSLYKVIFDKXMTLVVKRIKDWAISSDEFKKRMQRIDQVKHPNVLPALAFYCSKLEKLLIYEYQQNGSLFQLLSGDQPLGWSSRLNLAATIAEALAFMHQELHSDGIAHGNLKSSNILLNRNMVPCISEYGLREADSKELPSLSATNSRRAIEQTGATSSNSTFNADIYAFGVILLELLTGKLVQNSEFDLARWVHSAVREEWTVEVFDKRLISHGASEARMVDLLQVAIKCVNRSPETRPTMRKVAYMINAIKEEEERSMVFEANLISRVKSFKSPEGWSLIWLQERHRVLALHLLFLLHGKLVSAKNNCLLTSQLVSLIGQSHIKNQVIQESRRLVTHLAPRETQGQLGCQRSLTLKLKKREHRWFFGHTHLKMSWIQHQIKQKDGYLTYPPPLTPSSSSPYTAAFHKGSTAPSSSSSSGTRISPAVLFIIVIVAVLFFISGLLHLLVRFLIRHPSSSTSSQSNRYPEISESDALQRQLQQLFHLHDSGLDQAFIDALPVFLYKEIVGLKEPFDCAVCLCEFSEKDKLRLLPVCSHAFHINCIDTWLLSNSTCPLCRGTLFAPGFSMENPIFDFDDLREEDGFPGHGENGFASGPKTVEIEEVVGEKGVFPVRLGKFRKVADXSGETAGGETSSSNLDARRCYSMGSFQYVVGDSILRVALNHEQQHPDGKIVKGIENNANPSINEETEGTRNSFVTKGDSYSVSKIWLWSKKGKFPSSSDNTQTGMPSLNVDLPWMGRKQEM

SEQ ID NO: 9481 - protein, 333 aa, Vitis vinifera
MDKVAKNMGTRSARSRSLRSSEFGSYGSLRISLESCKYGEWEGQSRSDASEPKGSRSMLSFEDVRAGKRPDNPFFCQFDHDENGDEDLDEYFHQPEKKRRLTADQVQFLERNFEVENKLEPERKVQLAKDLGLQPRQVAIWFQNRRARWKTKQLEKDFGALQASYNSLKAEYENLLKEKDELKTEVILLTDKLLVKEKERGNLEVSNTDTLSQELPQVVVADSVSEGEVSKVSLVVCKQEDLSSTKSDVFDSDSPHYADGGHSALPEPGDSSYVFEADQSDVSQDEEDNFSKSLLPPSYIFPKLEDVDYPDPPTNPCSFGFPVEDHAFWSWSY

SEQ ID NO: 9482 - protein, 211 aa, Vitis vinifera
  misc_feature (3)..(3): Xaa can be any naturally occurring amino acid
  unsure (1)..(211): unsure at all Xaa locations
MEXCILRNPSAFHVLSSLFFTLLLFNSITLTSSANTSTISLTISKQFIKTSCNSTTYPGVCYKSLSSYASKVQTSPLKLANVALTVSLKAARNASSTITLLLERKGMTRMETSIVKDCVENFGDCIDELQQSLQEFKSLGGGKNVAFQMANIKTWVSAALTDEYTCSDGFEGQKVSSSLQQQIKNYISNVAKITSNALALINNLSVTDIKS

SEQ ID NO: 9483 - protein, 202 aa, Vitis vinifera
  misc_feature (19)..(19): Xaa can be any naturally occurring amino acid
  misc_feature (26)..(26): Xaa can be any naturally occurring amino acid
  misc_feature (43)..(43): Xaa can be any naturally occurring amino acid
  misc_feature (45)..(45): Xaa can be any naturally occurring amino acid
  misc_feature (50)..(50): Xaa can be any naturally occurring amino acid
  unsure (1)..(202): unsure at all Xaa locations
MYGHTTFDSDVAFLESVRXYLLEDSXLPHPFSANAPAYSATTXTXTENWXNPPVLDAAAAGGVVGEAKAEPQEAAAPEEWRRYRGVRRRPWGKYAAEIRDPAKNGSRVWLGTYETAEDAALAYDRAAFRIRGSRALLNFPLRVGSGEPEPVRITPRRRSPQQSLSAAAAAALKRRKCDVDWTAEVEAATENVVDMFQLHQYG

SEQ ID NO: 9484 - protein, 857 aa, Vitis vinifera
MASRSCANFLDLASGNLLDIPHTPRPLPRVMTVPGIISDLDGYGSNDGDSDVCHERKIIVANMLPLHAQRDKVTAKWCFSLDEDALLLHLKDGFSPETEVIYVGSLKVEIDASEQEEVAQKLLEDFNCVPTFLPHDLHKKFYHGFCKQQLWPLFHYMLPMCPDHGDRFDRVLWQAYVSANKIFADKVREVINPDDDYVWVQDYHLMVLPTFLRKRFHRVKLGFFLHSPFPSSEIYRTLPVRDEILRGLLNCDLIGFQTFDYARHFLSCCSRMLGLDYESKRGHIGLDYSGRTVYIKILPVGVHMGRLESVLNLHSTSTKIKEIQKQFEGKKLILGVDDMDIFKGISLKFLAVEQLLQQHPELQGKLVLVQIVNPARSTGKDVQEAKRETYLTAERINETYGSPNYEPVILIDRPVARYEKSAYYAVAECCIVNAVRDGMNLVPYKYIVCRQGTPHMDKETGMNLVSPPTSMLVVSEFIGCSPSLSGAIRVNPWDTDAVAEALNLAITMPNSEKQLRHEKHYRYVSSHDVAYWARSFMHDLDRACKDHYSKRCWGIGLGLGFRVVSLSPSFRKLSIDHIVSTYKRTTRRAIFLDYDGTVVPQSSIIKSPSPEVISVLSTLCSDPKNTVFIVSGRGRSSLSEWLAPCERLGIAAEHGYFMRWNESTKWESCNLAADLDWKKVVEPVMRLYTETTDGSNIEIKESALVWHHQDADPDFGSCQAKELMDHLENVLANEPAVVKRGQHIVEVKPQGVSKGLVAEKVLSTMVNDGKPPDFVMCIGDDRSDEDMFEGIFRTISSPSLSMSPEIFACTVGQKPSKAKYYLDDTTDVVRLLQGLATASNPKPRYIAQIQVSFESSI

SEQ ID NO: 9485 - protein, 104 aa, Vitis vinifera
MSATGGAAGGQEEDKKPTDQGAHINLKVKGQDGNEVFFRIKRSTQLRKLMSAYCDRQSVELNSIAFLFDGRRLRGEQTPDELEMEDGDEIDAMLHQTGGNLIGH

SEQ ID NO: 9486 - protein, 199 aa, Vitis vinifera
MLSFAFLLIQYCFITNISVLYLLLQSHFKELLLEHAPPPPAIAEFAIANLIKMGFPQRAAEGVISICSCHKEAKVGGGYTCPRCKARVCELPTECRICGLTLVSSPHLARSYHHLFPIPPFDEVSLSLLNNPHQRSSRACFGCQESLLIPGNKPTLCVACPKCKQHFCLDCDIYIHESLHNCPGCESFRHSKIVSVTEE

SEQ ID NO: 9487 - protein, 364 aa, Vitis vinifera
MEEIDVPPFFLCPISLEIMKDPVTVSTGITYDRESIEKWLFSGKNNTCPATKQVLSADSDLTPNHTLRRLIQAWCTLNASNGVERIPTPKIPINKVQIVKLLNDAKSPQLQMKCIGKLRALAAESDANKRCIESAGAVEFLASIVSKANFTTFEEESDKGLESRSASSEALSILHYLQVSEAGLEKLVGKNGEFVGCLDHISHQATKATLKLLIEVCPWGRNKVKAVEAGAVSILTELLLASSEKRACEMILTVLDQLCGCAEGRAELLKHAAGMAIVSKKILRVSHVASERAVKILYSISKFSATPSVLQEMSQLGVVAKLCLVLQVDCGSRTKEKSRDILRLHARAWKNSPCIPTNLLSSYP

SEQ ID NO: 9488 - protein, 479 aa, Vitis vinifera
MRPIFCGNFDYDARQSDLERLFRRYGKVDRVDMKTGFAFIYMEDERDAEDAIRGLDRTGFGRKGRRLRVEWTKQERGIRRPSGSRRSSTNLRPAKTLFVINFDPYNTRTRDLERHFDPYGKILNIRIRRNFAFIQYESQEDATRALEATNMSKLMDRVISVEYAVRDDDERRNGYSPDGRRRDKSSERSYDKGRSLSPYRRERGSPDYGRGSSPSAYRRERASPDYGRDPSPSPRRRDRAIPDHGRSRSPSHHRRERTSHDSARGPSRSPYRSERSDRAIPDYGRGRSPSPGRREKIMPDYPDRPSLSPERKEKTGRSEKAIPDYGRGASPSSPRRERTNSDYVRANSRSRSRSQSQSPRQRERTKPDYGHERSVSPEQREKANPDYGRGPSRSSPQRREYDRGPSQSPQQGERALPDYSRGPSDSPYQRESISPDYDRGPSPNSKREERDSPNYGGSASPMNGRYRSRSPPARERSRS

SEQ ID NO: 9489 - protein, 335 aa, Vitis vinifera
MGRTPCCDKNGMKKGPWTVEEDQKLLDYIQKHGHGRWRTLPKNAGLKRCGKSCRLRWTNYLRPDIKRGRFSFEEEEAIIQLHGILGNKWSAIAARLPGRTDNEIKNYWNTRIRKKLLRMGIDPVTHAPRMDLLELASLLGSSLYNSSLQLNVPAGSLGMGPMVNDDVLTLATALLSSHCENPELQLQNLLENQLRNPQVQNQFESFQGNNLQSSIQEVQACPTSSAASTPFLNETQLMQAIAEHLSQNPTDFAYQNSLPNLWQVHGGHPITAASFTNPTLSFDSIPSSITGHQTLKSNAVSNNTQNFSFDSVLSTPSSTSTPLELITDDLCQGEH

SEQ ID NO: 9490 - protein, 184 aa, Vitis vinifera
MLDSFDEEDCAEETGLITEKKKRLSFDQVKALERSFEIENKLEPERKVKIAEELGLKPRQVAIWFQNRRARWKTKQLERDYGILKANYDALKLDYESLEQEKEALVAELRELKAKLQGGNMELNQSVKEEALWERDRPKAAVTMTLNSSKSELPLSEDGPITPSFCHPRLTVNALWNLACQPLS

SEQ ID NO: 9491 - protein, 377 aa, Vitis vinifera
MIDQPQYPTIMQKVAGHLHHSQNIQAFHGRFQQPTLQQRHSAYGNYTNAALQYPMCGATFDPLMVGSNVSPVFVPAPKEKGLAGFAIDFLMGGVSAAVSKTAAAPIERVKLLIQNQDEMIKTGRLSEPYKGIGECFSRTIKDEGFMSLWRGNTANALNFAFKDYFKRLFNFKKDRDGYWKWFAGNLASGGAAGASSLLFVYSLDYARTRLANDAKAAKKGGERQFNGLVDVYRKTLKSDGIAGLYRGFNISCVGIIVYRGLYFGMYDSLKPVVLTGGLQDSFFASFALGWLITNGAGLASYPIDTVRRRMMMTSGEAVKYKSSFDAFAQILKNEGAKSLFKGAGANILRAVAGAGVLAGYDKLQVIVFGKKYGSGGA

SEQ ID NO: 9492 - protein, 202 aa, Vitis vinifera
MHGYTTFDSDFALLESVRRYLLEDSDLPHPFSANAPAYSATTLTFTENWGNPPVLDAAAAGGVVGEAKAEPQEAAAPEEWRRYRGVRRRPWGKYAAEIRDPAKNGSRVWLGTYETAEDAALAYDRAAFRIRGSRALLNFPLRVGSGEPEPVRITPRRRSPQQSLSAAAAAALKRRKCDVDWTAEVEAATENVVDMFQLHQYG

SEQ ID NO: 9493 - protein, 462 aa, Vitis vinifera
  misc_feature (47)..(47): Xaa can be any naturally occurring amino acid
  misc_feature (158)..(158): Xaa can be any naturally occurring amino acid
  unsure (1)..(462): unsure at all Xaa locations
MSLSIRLHISSNLSLNFHPQTTIRRTNHSTSIRPRPIYHSNPLAPAXLRRAMSAIPSHKSSSSSTIKSSLIEPDGGALVBRVVPESERAAKALEAESMPKVGLTQIDLEWVHSLHFNCIRMKDGTIVNMSLPIVLAIDDEAKERIGASQDVGLVGPTXDLVGILRSIEIYKHNKEERVARTWGTTAPGLPYVEEVITPAGNWLIGGDLEVLKPIKYNDGLDHYRLSPQQLRKEFDKRQADAVFAFQLRNPVHNGHALLMNDTRRRLLEMGYKNPILLLHPLGGYTKADDVPLDVRMEQHSKVLEDGVLDPETTIVAIFPSPMHYAGPTEVQWHAKGRINAGANFYIVGRDPAGMGHPTEKRDLYDPDHGKKVLSMAPGLEKLNILPFRVAAYDTVGKKMAFFDPSRAKDFLFISGTKMRTYARNGENPPDGFMCPQGWSVLVRYYESLQAEDTTQQSAVVSA

SEQ ID NO: 9494 - protein, 243 aa, Vitis vinifera
MGRGKVELKRIENKINRQVTFAKRRNGLLKKAYELSVLCDAEVALIIFSNRGKLYEFCSGSSMPETLERHQRCSYSALEASQPAKETQNSYQEYLKLKSKVEVLQRTQRNFLGEDLGHLGTKELEQLEHQLDKSLKQIRSTKTQFMLDQLSDLQRKVQILMEANNALRRKLGESSAESGLGSTWEAAAHNLPYNREPVQSEDFFEPLQCDSTLQIGYNPVLRVEMNGASTTQNVNGFIPGWMV

SEQ ID NO: 9495 - protein, 426 aa, Vitis vinifera
MLPIRTPTTVQGSLRRRFVVEILKVVTWGSPLRLAAYKPPGVARLTTMMIGEPTRSNPTVQVPPWDPYDDPTAGMGSPFPVSGVNFNGNAASPTGGDYNPFIISEAFSSLQRYLPSNEFGTESGDESETVVDAFSCDQFRMFEFKVRRCARGRSHDWTECPYAHPGEKARRRDPRKFHYSGTACPEFRKGNCKKGDSCEFAHGVFECWLHPARYRTQPCKDGSGCRRRVCFFAHTPEQLRVLPQQSPRNHGSAESYDGSPLRLAFDPYLSKGSFISSPTSTLISPPVSPPSDSPPMSPNSPSFTGSFNSMSELVASMRNLQVGKAKMSPQSWGVQMGSGFGSPRGSTLRPGFCSLPSTPTRTPARSGLGGLDVWDKTCEEEPAMERVESGRDLRARIYAKISKENSLDRDSSPSAPDFGWVSELVK

SEQ ID NO: 9496 - protein, 598 aa, Vitis vinifera
  misc_feature (205)..(205): Xaa can be any naturally occurring amino acid
  misc_feature (461)..(461): Xaa can be any naturally occurring amino acid
  misc_feature (471)..(471): Xaa can be any naturally occurring amino acid
  misc_feature (477)..(477): Xaa can be any naturally occurring amino acid
  misc_feature (525)..(525): Xaa can be any naturally occurring amino acid
  unsure (1)..(598): unsure at all Xaa locations
MATAVNAAVSLPSSKSSSLPIRNHIICFLYSRNVCVGRKVVTIKAQVTTEAPAKVEKVSKKNDEGVVVNKFRPKNPYIGKCLLNTKITGDDAPGETWHMGKSHIERGQSIGVIPDGIDKNGKPHKLRLYSIASSALGDFGDTKTKLLKSFKPHAAFLDILCLGTCRCYEYAERSSLSFEIDLGDLKPGADVKITGPVGKEMLMPXDPNATVIMLATGTGIAPFRSFLWKMFFEKYEDYKFKGLGWLFLGVPTTSSLLYKDEFEKMKEKAPENFRVDYAVSREQTNEKGEKNGMEKGIDDIMVSLAARDGIDWTEYKRQLKKSEQWNVELRRCRERRGEENGSSADTPPEAVAEIAQPPFPIVRSQIAERSGAVTSPRNRRRAGFRCQKEPQRKEARSSARRPLGDGTRRLLNPSNQTNSQRLGPDVREGKRRQFNYIGRLLRGVQPELMDALIQASKDGDXSRLQALSGLXTRVVEXDGEEDEABEEDYEEEDEESNTYIDIATRWSDGLINKDIDVTNEVYSVXSVEFDRQLHFLFKSSELDDFLSLVREELRKLVRKVHSIQGHQAIIKEEEDVALLGAKKSLFQFLYTLAKAVAN

SEQ ID NO: 9497 - protein, 591 aa, Vitis vinifera
  misc_feature (503)..(503): Xaa can be any naturally occurring amino acid
  misc_feature (507)..(507): Xaa can be any naturally occurring amino acid
  unsure (1)..(591): unsure at all Xaa locations
MAAIQTALSSIFFSKYLHSLSQTPHRLRKRMLATWTSDQELNQVRLRSGADMKRKLGWYDLVALGVGGMLGVGVFVTTGPVALHHSGPSVFISYIIAGISALLSSMCYTEFSVEIPVAGGAFSYLRVTFGEFVGYFAGANILMEYVLSNAAVSRSFTEYLSCAFGGNLNSWRVEVHGFTKGMISLYLNTIIFFKSLLCCFAVFIDLRAEGFSASNVFALTCVTKESSILNFVMTIFHVVFFGFIIIAGFLKGSAKNLVNPDGLAPFGVKGVLDGAAQVYFSYIGYDSVSTMAEEISNPSKSLPVGIMGSVFIVSGLYCLMSFALCMMLPYNQIPEKASFAIAFQRMGWKWASNIVGAGASLGIVASLLVAMLGQARYLCVIGRARLVPLWLAKVHPSTGTPLNATLFLGAFTASIALFTELEIVVDMVNLCTLLVFYLVANALIYRRYVITVNNPPFHTLLFLSLLSCSSIAFSLSWKLKQWWGLPLFGGIMIIITACFHYFXPYPXQPSKWSVPFMPWPAAMSIFLNVFLMTTLKKLSLQRFGVWSCLIILFYVLYGVHSTYRAEEMGMDAGGVNPNSSAQQTKLDIQLL

SEQ ID NO: 9498 - protein, 292 aa, Thinopyrum intermedium
MLLNPASEALVLDSIRQHLMEETAAVAAPAEARRQRPAYCRSTSFGSLVADQWSESLPFRADDSDDMVVYGALRDAFSCGWLPDGSFAAVKPEPLPSPDSYACDGPSCFGFLEPETPPATPPGEGEEATAFMGEAAAAVARGKHYRGVRQRPWGKFAAEIRDPAKNGARVWLGTYDTAEDAAVAYDRAAYRMRGSRALLNFPLRIGSEIAAAKAAAAAAGDKRPSPEPATSDSSSSSSGSPKRRKRGEAAAASMAMALVPPPSQLSRPAQAWYPAAPVEQVAMAPHVQQLVS

SEQ ID NO: 9499 - protein, 303 aa, Triticum aestivum
MLLNPASEALVLDSIRQHLMEDTAAAAAPVAEARRQRPAYCRSASFGSLVADQWSESLPFRADDSDDMVVYGALRDAFSCGWLPDGSFAAVKPEPLLPSPDSAYACDGPSCFGFLEPETPPATSPGEGEEEGAAFMGEAAAAVARGKHYRGVRQRPWGKFAAEIRDPAKNGARVWLGTYDTAEGAAVAYDRAAYRMRGSRALLDFPLRIGSEIAAAHAAAAHAAAAAAGDKRPSPEPATSDSSSSSSSSGSPKRRKRGEAAAASMAMALVPPPSQLSRPAHAWYPAAPVEQVAMAPRAQQLVS

SEQ ID NO: 9500 - protein, 669 aa, Solanum lycopersicum
MYSTVFYTSVHPSTSVLSRKQLPLLISKDFSAELYHSLPCRSLENGHINKVKGVKVKATIAEAPVTPTEKTDSGANGDLKVPQKKLKVLVAGGGIGGLVFALAAKKRGFDVLVFERDLSAIRGEGQYRGPIQIQSNALAALEAIDLDVAEDIMNAGCITGQRINGLVDGISGNWYCKFDTFTPAVERGLPVTRVISRMTLQQILARAVGEEIIMNESNVVDFEDDGEKVTVVLENGQRFTGDLLVGADGIRSKVRTNLFGPSEATYSGYTCYTGIADFVPADIDTVGYRVFLGHKQYFVSSDVGGGKMQWYAFYNEPAGGADAPNGKKERLLKIFGGWCDNVIDLLVATDEDAILRRDIYDRPPTFSWGRGRVTLLGDSVHAMQPNLGQGGCMAIEDSYQLALELEKACSRSAESGSPVDIISSLRSYESARKLRVGVIHGLARMAAIMASTYKAYLGVGLGPLSFLTQYRIPHPGRVGGRVFIDLGMPLMLSWVLGGNGDKLEGRIKHCRLSEKANDQLRKWFEDDDALERATDAEWLLLPAGNGSSGLEAIVLSRDEDVPCTVGSISHTNIPGKSIVLPLPQVSEMHARISCKDGAFFVTDLRSEHGTWVTDNEGRRYRTSPNFPTRFHPSDVIEFGSDKAAFRVKAMKFPLKTSERKEEREAVEAA

SEQ ID NO: 9501 - protein, 600 aa, Synechococcus sp. WH 7803
MALLVQKFGGTSVGSVERIQAVARRIAACKEDGNDLVIVVSAMGHTTDELTAKARAISSNPPQREMDMLLATGEQVSIALLSMALHALGVPAISMTGAQVGIVTESAHGRARILDVRTDRLRSRLAEGQVVVVAGFQGTSQSSGGTAEITTLGRGGSDTSAVALAAALGADACEIYTDVPGVLTTDPRKVADAQLMPEVSCDEMLELASLGAAVLHPRAVEIARNYGVTMVVRSSWSEDAGTTLTSRSARPIGRDGLELGRPVDGAELVEGQAVLALSHVSDQPGVAAQLFESLSAGGVNVDLIIQSTHEGNSNDITFTVAESELEKARGICADQLQTLGGELVAEAGMSKLSISGAGIMGRPGIAAGLFQTLSRVGINLRLIATSEVKVSCVVEASAGAKALQATQDAFELESDLISLNPLPSGEGDPEVRGIALDRDQAQVSVRHVPDKPGTAGALCNALADAGISLDGIVQSERQHADGSRDISFTLKRDDRAAADRALSHLLAQWPGALLEDGPAIARVSAVGAGMPATAGTAGRMFRYLADAGVNIEMIATSEIRTSCVVAESDGIAALQAVHTGFELGGSTRHQAQGTESPLES

SEQ ID NO: 9502 - protein, 352 aa, Synechococcus sp. WH 7803
MQDLALVINLGSSSLKAALVDSTGAFPWHSGRSLQPEESLDGVLSRWLEPELAPYREGITLVGHRVVHGGERFTAPTRIDAALEATLEELVPLAPLHNPPALKGLAWARGWAPDLPQWACFDTAFHSTLPAAASTYALPAELRQRGFRRFGFHGINHQHVADTVAAQWQQQGRDANKLRLISAHLGAGASLAAIRGGRCIDTTMGYTPLEGLVMASRSGSVDPGLLLELLRDGMGEAELSHLLQKQAGLKGLSGLSGDMREIREQAAAGHQGAQLALDVFRQRLLQLIGAMAASLRGVDVLALTGGIGEHDQALRAELTDALSWLPNLEMVIVPADEEGMIALLCRRSAAVG

SEQ ID NO: 9503 - protein, 340 aa, Synechococcus sp. WH 7803
MAENADQLDPAIVSALTRCLQEEAAAIAAAAARLHADQVEGALTLLERCADRKAKLVITGVGKSGIVARKIAATFSSIGLMALYLNPLDALHGDLGVVAADDVCLLLSNSGETAELLDLLPHLKRRGTARIALVGRADSSLARGSDVALDASVDREVCPLNLAPTASTAVAMAIGDALAAVWMERRGISQADFALNHPAGALGKQLTMTVADLMVPVAQLPSITPATPLAEVISGLTQGAIGSGWVEDSSQPGRLQGLITDGDLRRALRDHGPERWPTLTAGELMTADPITVSADLLAVEAIQRMEHNRRKPISVLPVVDEKDGLLGLLRLHDLVQAGLA

SEQ ID NO: 9504 - protein, 526 aa, Synechococcus sp. WH 7803
MSDPTNLGDGPVSAGPWWRRPPLWIGAGPLLAFLVLAAVDLTLAQQFTSSGKAIVSGSLGGLWQWMVLLLFVIAVVMAISPVGRLRLGGVDAKPSLKFFDWCAVLICTLLAGGGVFWSAAEPLFHFRTPAPYFSAVKGSTAAAVDPSLAVSFLHWGFLAWALVATTVTITLSIQEQRGEPLRPRTLLVGLLPHRWVEGPLGDLADGLSVVAAIAGTVGPLGFLSLQLSNAAGMLPGLSDSAGLQSLVVVLLTAVFATSTVSGIQRGIKWLSEVNVWLTLGLAAALLLLGPGVWLIQHFASSFTLYVSNLVPMALAPNRGPDNWVNAWTVFYWGWFLGYAPLMGLFTAGVSRGRTLRELVLAVAILCPIVTNLWFTLLGGTGMQLELSNPGAISGPLAASGEAGALLAILGQLPLPWLLIPVGLILVVLFMATSADSMSYAAAMVVSAQRKPPALLRLFWALMIGSLTLVLLRIGTSLGDSTSINALQAFIVISAVPVTPLVLITLWTAPRLAWKEWQQRQQAPGSS

SEQ ID NO: 9505 - protein, 503 aa, Synechococcus sp. WH 7803
MTTALHSPSRRSKSRLQEVSLLNGPMLLLKSIRGLRSHRALAWLACAPIALLGLGVFNLSARAGVGLGNLDGAQAAKFLADNLWLLVAAALVIFMNAGFAMVEAGMCRQKNAVNILAKNLFVFGLAVTAYWVVGYSLMYGSSVVDGWLSFQGFFFDWNAADALTCAAGQGEEGCSQLVPSVDFLFQAAFAGTAATIVSGLVAERVKFGEFVIFSLVLTAVIYPIAGSWEWNGGWLNNVGNKEFIDFAGSSIVHSVGAWAGLIGAVLLGPRIGKYVNGRTQAIPGHNMAIATLGALILWIGWYGFNPGSQLGMDEWVPYIAVTTTLAAAGGAIGATIISTLTSGKPDLTMIINGILAGLVSITAGCANLTWVGAWVAGLIGGIIVVFAVSALDKAGIDDPVGAFSVHGVCGIWGTLVIGLWGFDIQGEGTALGLFNGGGIEQLGIQALGTAAYAIWTVVTCLITWSIIGTVFGGIRVSEEEETMGLDIGEHGMEAYPDFASSGN

SEQ ID NO: 9506 - protein, 244 aa, Synechococcus sp. WH 7803
MPEVIRGFSRTVPQQGRIGNVSLANAPAPTSRTLLEVIRDLDGANTELIERNKTIFFPGDPAEKVYLIRRGAVRLSRVYESGEEITVALLRENSLFGVLSLLTGHRSDRFYHSVAFTRVEMVTAPATSVRQAIEADTSVGLLLLQGLSSRILQTETMIETLTHRDMSSRLVSFLLVLCRDFGIPGSQGITIDLRLSHQAIAEAIGSTRVTITRLLGDLRNSGLVEIDRKKITVLDPIALAKRFS

SEQ ID NO: 9507 - protein, 389 aa, Synechococcus sp. WH 7803
MTASTTSTQPSGVIAPYGGTLVNLMVAEADRGAVKATATTSLECSDRNACDVELLCVGGFSPLRGFMHQEDYDAVVGGHRLAAGQLFGLPIVMDTDRDDIEVGSSVLLTYKGQDLAVLQVEAKWEPDKVAEAKGCYGTTSIEHPAVRMITMERKRFYLGGSLKGLELPQRVFPCKTPAEVRAGLPEGEDVVAFQCRNPIHRAHYELFTRALHAQNVSENAVVLVHPTCGPTQQDDIPGAVRFQTYERLAAEVNNDRIRWAYLPYAMHMAGPREALQHMIIRRNYGCTHFIIGRDMAGCKSSLTGDDFYGPYDAQNFAKECAPELTMETVPSLNLVYTEEEGYVTAEHAEARGLHVKKLSGTQFRKMLRGGEEIPEWFAFRSVVEVLRAS

SEQ ID NO: 9508 - protein, 1532 aa, Synechococcus sp. WH 7803
MSHPTGSLWPYSDSAAPEAVAGEKDACGVGFLAQLSGETSHWVLQQALRGLGCMEHRGGCGGDGDSGDGAGVLCQIPWTYLKAVWPEAASARGLGMMFMPQDPERRELARRFCKEEAEALGLTSAGWRVVPVDSSVLGPMARDTAPVIEQWSLAGGPDGDAFEALLLRLRRRIGARARQAWGFEGSRDLYVASLSSRTVVYKGMVRSEVLAQYYADLRDPRFEVSFAVYHRRFSTNTLPRWPLAQPMRLLGHNGEINTLLGNLNWAKASEASLADVWGEAANDLNPVVNPAFSDSANLDATLELMVRSGRSITDSLITLVPEAFRNQPDLEDRPAVTAMYEFNAGIQEPWDGPALLVFADGKRVGATLDRNGLRPARWCTTADGFVIMGSETGVVDLSGKTVVQKGRLGPGQMVAVDLENGQLLDNWTVKEDAAGRFPYGDWLQHHRRSVEAQPWTQDRQIGELDLLRLQTAMGFTAEDFDLVIEDMAGLGKEPTYCMGDDIPLAVLSDKPHLLYDYFKQRFAQVTNPPIDPLREKLVMSLEMHLGERRPALKPQAEAAAVIHLDTPVLNEAELAAISEQGLPVATLSTHVAVEACAGGLSSALQRLCESAEEAVRGGAQVLVLSDRVDGSGAAAQLTATSVAMPALLAVGAVHHHLLRQKLRLRCSLVIDTAQCWSTHHMACLIGYGASAVCPWLTWETTRHWLAHPKTQKRIEQGKLPALDADKVQANVRVSLENGLRKILSKIGISLLASYHGAQIFEAIGLGADVIDTAFSGTTSRVAGMTLAELANETLSLHAKAFPELNRSKLEFMGFVQYRTGGEYHLNSPDMAKALHAAVKTGPGYDHFSTYKTLLENRPVTALRDLLEFKLAPTPLPLDQVESAESLCKRFCTGGMSLGALSREAHEVLAVAMNRIGGKSNSGEGGEDPARFQVLHDVDAEGRSQAFPSIGGLRNGDTACSAIKQIASGRFGVTAEYLRSGKQLEIKVAQGAKPGEGGQLPGPKVDDYIAWLRNSKPGVALISPPPHHDIYSIEDLAQLIHDLHQVHPKAPVSVKLVAEIGIGTIAAGVAKANADVIQISGHDGGTGASPLSSIKHAGSPWELGLTEVHRSLLENGLRDRVLLRADGGLKTGWDVVIAALLGAEEYGFGSVAMIAEGCIMARVCHTNNCPVGVATQKEALRKRFTGVPEHVVNFFWYVAEEVRQLLSLLGVAKLEDLIGRSDLLQPRAVQLAKTQGVDLSSLLAPIQGSEERSWLRHSAEAHGNGPILEDQLLADAELMAAVESHGSLSRTIAIINTDRSVGARLAGEIAQRHGNRGFKGQLNLTFQGAAGQSFGAFLVQGMNVRLEGEANDYVGKGMNSGRISLVPSDGCANPGDQVILGNTCLYGATGGELFAHGRAGERFGVRNSGARTVVEGAGDHCCEYMTGGVVVVLGSTGRNVGAGMTGGVTFLLDEGDRVTARVNPEIVAVCSLTTSQQEETLKELLEAHVAATGSSKASALLADWAAAKGRFKVLIPPSERAAMGLVDQQAVAA

SEQ ID NO: 9509 - protein, 617 aa, Synechococcus sp. WH 7803
MTLTSAPKVDAASGNGDGCRMTGAHALMDALRRHGVDTIFGYPGGAILPIYDALHVAESEGWLRHVLVRHEQGGTHAADAYARATGRVGVCFGTSGPGATNLVTGIATAQMDSVPMVVITGQVPRTAIGTDAFQETDIFGITLPIVKHSWVVRDPADLASVVAQAFHIAASGRPGPVLIDIPKDVGQEEFDYVPVEPGTVIPAGFRATPPPDLAAVADALALIKAANRPLLYVGGGAVAASAHDSLKVLAERYQLPVTTTLMGKGAFDENHPLALGMLGMHGTAYANFAVTDCDLLIAVGARFDDRVTGKLDTFAPRARVIHFEIDPAEIGKNRRADVAVLGDVGASLAALVELSLQDTPETRTAAWLERIKDWKQRYPLTIPPAEGSIYPQEVLLAVRELASDAIVTTDVGQHQMWAAQYLRNGPRGWISSAGLGTMGFGMPAALGAQVACPDRRVVCIAGDASVLMNIQELGTLAQYDLPVKVVIVNNHWQGMVRQWQESFYEERYSASDMLKGMPDFEMLARSFGVEGVKIVERSELKSGLAAALASPHPTLVDVHVRRGENCYPMVPPGCSNAQMVGLPSHPELAMDPKRNCPACGAVTSSDHRFCPSCGSAL

SEQ ID NO: 9510 - protein, 722 aa, Synechococcus sp. WH 7803
MTDQNPEGSYESLEKYGRDLTAAARDGKLDPVIGRDEEIRRTIQILSRRTKNNPVLIGEPGVGKTAIVEGLAQRIVNGDVPQALQNRQLIALDMGALIAGAKYRGEFEERLKAVLKEVTASDGGIVLFIDEIHTVVGAGATGGAMDASNLLKPMLARGELRCIGATTLDEHRQHIEKDPALERRFQQVLVDQPTVEDTVSILRGLKERYEVHHGVRIADSALVAAAVLSSRYIADRFLPDKAIDLVDESAARLKMEITSKPEEIDEIDRKILQLEMEKLSLGRESDAASQERLERLERELAELSEQQSTLNAQWQHEKGAIDDLSNLKEEIERVQLQVEQAKRSYDLNKAAELEYGTLATLQKQLAEKETALAAADDGSQDKSLLREEVTEDDIAEVIAKWTGIPVAKLVQSEMAKLLSLETELHERVVGQQQAVTAVADAIQRSRAGLSDPNRPIASFLFLGPTGVGKTELSKALAAQLFDSEEAMVRIDMSEYMEKHTVSRLIGAPPGYVGYEAGGQLTEAVRRRPYAVILFDEVEKAHPDVFNVMLQILDDGRVTDGQGRTVDFTNAVLILTSNIGSQSILDLGGDDGQHGEMERRVNEALRAHFRPEFLNRLDDQIIFHSLRRDELRQIVTLQVERLRARLDERKLGLNLSEAATDWLANAGYDPVYGARPLKRAVQRELETPIAKAILSGRYGDGDTVHVDVEAVTGHENQQQLALR

SEQ ID NO: 9511 - protein, 562 aa, Synechococcus sp. WH 7803
MPPSVVTYVLDRLADLGIGHVFGVPGDYSFPLNDAVEVHPRLQWVPSANELNAAYAADGYARRRGAGIVCTTYGVGELSALNGVMGSMAERLPVFHLVGTPSVRIVRQGLICHHTLGDTRYDRFEAISAAAGCVSARLTPENAVVELERVIDKALEDSRPAYLTVPMDLALMPITGTPIQGTPIGSIDQHASVTVELDAVLDLVMERLAKATRPLVMPTVTLKRFGLVETFATFLEVSGLAYATTPMDKALLSEGHPAFLGMYNGVRSTPAALQSVVEGADVLLDVGGLVMEDLNTGLWSGYLDSRRVISLHADWVQAGDQVFTSVSLSEVLAGLIKRFQAADAKPSQWGEQRPVQPEPLIPLAGEGDQPTASANVYPRLQRFLRPTDLLMSDTGTSLLKLNAMRLPDGVAIETQTLWGSIGWATPAALGCALADAERRVVLVTGDGAHQLTVQEIGVMGFMKVKPVVIVLNNGLYGVEALLSETGHAYNDLPPWRYAQLPEAFGCQGWWCGKASTVAELEQALAAINAHNGAAYLEVSIPPEESLPLPEAMIETLHQTATP

SEQ ID NO: 9512 - protein, 637 aa, Synechococcus sp. WH 7803
MNQRWRQILLWGLPITIALVLAWQVLGSGGLNGLKPGGPTVAPRNTAVARMSYGRFLDYVQAGRVTSVDIYDGGRDAVVEAVDPDLDNRVQRLRVDLPGLAPELINTLKAEGISFDIHPPKTAPPALGLLGNLLFPLLLIGSLIFLARRSNNMPGGPGQAMQFGKTKARFAMEAETGVMFDDVAGVNEAKQDLQEVVTFLKQPEKFTSVGAQIPKGVLLVGPPGTGKTLLAKAIAGEAGVPFFSLSGSEFVEMFVGVGASRVRDLFKRAKENSPCLIFIDEIDAVGRQRGAGIGGGNDEREQTLNQLLTEMDGFEGNSGIIIIAATNRPDVLDSALMRPGRFDRQVTVDAPDIKGRLSILEVHSRNKKLDPELSLDSIARRTPGFTGADLANLLNEAAILTARRRKETISLSEIDDAVDRIIAGMEGQPLTDGRSKRLIAYHEVGHALVGTLVKDHDPVQKVTLIPRGQAQGLTWFSPDEEQMLVSRSQLKARIMGALGGRAAEDVVFGRSEVTTGAGGDIQQVASMARQMVTRFGMSNLGPMSLEGGSQEVFLGRDLMTRSDVSEAISKQVDDQVRNIVMQCYQETLELVGAQRELMDDLVELLIEKETLDGDEFRDMVAKVTNIPEKERFSPVLN

SEQ ID NO: 9513 - protein, 496 aa, Synechococcus sp. WH 7803
MLINEGKSDFIILYHRTPFDESTDELGNRIWRDQKSPNGIIPTLRNLFRSRENGTWIAWRRVDDVKNERDERIVMNNPATFSLRRIPLEQEQISSFYHVTSKESFWPILHTFPTYFDVNNANWQIFEEVNQRFANAACAEAAEGATVWIHDYNLWLVSGFIREKRPDLKIAFFHHTPFPGNDVFAILPWRKQIIESLLACDVVGFHIPRYTENFARAASCLLGVEKGPKESVATKFLKFGSALTEPTETPWLKYKNRKVKLVSSPVGTSPDVIQTLAVRNDVAELSKKIDEDTKKGRKLILSASRVDYTKGNEELLLAFERLLERRPDLHGKVVLMLACVAAASGMKIYEETQRLIEETAGRINGRFSLIDWVPIRFSTNRIPYEEMIAWFSKSDICWITPLRDGLNLVAKEYVAARKGRDGVLVLSEFTGASVVLDGALLTNPYSHKQMDDAIETALALPQEEQVSRMKKMVDAVDEFTVTDWANEQMQSLETVD

SEQ ID NO: 9514 - protein, 393 aa, Synechococcus sp. WH 7803
MDKADARPIYLDACATTPLRPGVQQRMVAVQNQAWGNPSSLHCFGIAAAEALERTRVEIASLLGAEANEVLITSGATESIHLGLRGLASSLPPGRIVISAVEHPAVTAAAQALTPLGWQVCMAPVDAQGTIQLDRFAELLQPPTRLVSVIWGQSEVGTLQPIQTIGALCRQHGIPLHTDATQVISQALPDWSTLPVDLLTASAHKCGGPRGVGLLLVRGAWKQQLTALLTGGGQESNLRSGTESAVLLAGMAEALSQIQRCGVDALSNSGNGIRRLRDALELQLGQRFGVATIGQPDQRLPHHLALLLRDRSGQPLSGRRMVRVLDREGLAVSSGSACSSGRDTDSSVLTAMGLPREMRRSSLRLSLGFWNSDDQIESIVERFERALLTCSEA

SEQ ID NO: 9515 - protein, 107 aa, Synechococcus sp. WH 7803
MDAQTKSRIEALISSSPVFVFMKGTKLMPQCGFSNNVVQILNALGITFETFDVLSDMDVRQGIKEFSDWPTIPQVYVKGEFMGGSDILIEMYNNGELKEKLEIALAS

SEQ ID NO: 9516 - protein, 338 aa, Synechococcus sp. WH 7803
MLVGLQACATLGEGGASRLDLVRQRGELRCGVSGKIPGFSFLDREGRYAGLDVDMCKAFAAAFVGDANKVEYRPLTAPERFTALRTGEIDLLSRNTTFNLSRDASGGNGVAFAPVVFHDGQGLLVRRDSGIKRLEDLRNQTICVGSGTTTEQNLNDVFQAKGIPYKPVKYQDLNQLVAGYLQKRCAAMTSDRSQLASARSGFEQPGNHQILPEVLSKEPLAPLSSGGDQRLADAMRWVVYALVTAEEMGITQNNVDAKLQEAINDPSKTALRRFLGVEGELGSKLGLPNDFVVSVLKATGNYGEIYNRHLGPQSAVPIPRGLNQLHRDGGVLIAPPFQ

SEQ ID NO: 9517 - protein, 580 aa, Synechococcus sp. WH 7803
MLNPSEAGFRRLLPLLRPHSIQLLWGAISMILFVGSWPLLMDLVGRLIPALGSGDLAVVLPVIGLVLVVFLLQKLAQFAQDSLLAGPALQVSQSLRRDLFRQLQQVELGALEKLSAGDLTYRLTEDADRVSEVIYKTLHDTIPSALQLVAVLGYMLWLDWKLTLAILLLAPLIVWLISLFGGRVMAATERSQKKVSELAGLLGEAIEGLPLVRAFAAEPWLQGRFEQEIDQHRRARYNTYRLVALQHPVVGIIEVLGIAVVLVLAAYRLSNGDLDSKGLTSYVTGLVVLIDPIAHLTTNYNEFQQGQASLRRLRAIEKEPSEPADPNPALALDRLRGDLVFKHVQFGYRPDQPVLHDLNLTIDAGTVVALVGPSGAGKSTLFSLVLRFNTAQRGEVLLDGKNLALVKARDLRQQVALVPQRSSVFSGTIAEAIRFGRAASQEQVMEAARLANAHDFIIKLPQGYATHLEERGTNVSGGQLQRIAIARAVLGDPAVMLLDEATSALDAEAEAAVQVGLRQAMRGRTVLVIAHRLATVQEADRIVVLENGSIIEQGTHDALMQQNGRYRELCERQMIRDRQR

SEQ ID NO: 9518 - protein, 392 aa, Synechococcus sp. WH 7803
MSRPLSLSSRAEALQPSLTLAISARAKALQKEGRDICSLSAGEPDFDTPDFIVEASVEALRNGMTRYGPAAGDPHLRELIANKITSENGIPTSAAEVLVTNGGKQAIYNLFQVLLNPGDEVLIPAPYWLSYPEIARLAGARPVAVPSSAADGFRLDLNALDAAITPASRVLVINSPGNPTGRVLSRDELLSIAELMRRHPRLVVMSDEIYEYLLEDGVTHHSFASLAPDLQDRCFMVNGFAKGWAMTGWRLGYLSGPESVIKAASALQSQSTSNVCSFAQQGAVAALTGPRDCVQTMAESYNRRRSFLVSGLQAMDGITLVPPQGAFYAFPQLPDGCGDSMNFCRRALEEEGLAIVPGAAFGDDRCIRLSCAVSRETITDGLHRLNRLLKAG

SEQ ID NO: 9519 - protein, 606 aa, Synechococcus sp. WH 7803
MTQTHPQAAVPCAVDLTVSELPSESLPNEEVFTTVIAPCSDADSEATSEGESAESASGFAGFGFSEALLKTLDAKGYKEPSPIQKAAFPELMLGRDLVGQAQTGTGKTAAFALPLLERLDGRSNTPRVLVLAPTRELAMQVADSFKAYAAGHPHLNVLAIYGGSDFRSQIHALKRGVDVVVGTPGRVMDHMRQGTLDTTGLRSLVLDEADEMLRMGFIDDVEWILDQLPEERQVVLFSATMPNEIRRLSKRYLREPAEITIKTKDREAKRIRQRSITLQNAHKIEALNRVLEAVTGEGVIIFARTKAITLTVAESLEAAGHDVAVLNGDVPQNQRERTVDRLRKGTVNILVATDVAARGLDVDRIGLVINYDMPFDSEAYVHRIGRTGRAGRTGEAILFVTPRERRFVGNLERAVNQSIEPMDIPSNAEINQSRLDRLRDRLSQAAACEANDETSLLQELIQRVGQEHELTADQLALAAMKLAVGDQPLLVSGDESWLQTPLRNDRRDDRRGDRGRDRRRPDREARPPEDNMTRYRVEVGHRDRVKPGNLVGAIANESGLQGRMIGRIQIFESHSFVDLPKGMPEDVFNALRRLKVLNRELQITQA

SEQ ID NO: 9520 - protein, 359 aa, Synechococcus sp. WH 7803
MAPVRVIRGSGAWQDALPQIRALCSSPLFLGRSSATQPLRNTLISSLTSAGMKVAPALLRHDCCNEDLSRLQSEWSVHRSDGVIAAGGGKVLDAGKLLADRLDLPCITVPLSASTCAGWTALSNLYSPDGAFFGDQALKYCPDLLVFDHDLLRQAPPRTLASGIADALAKWYEASVSSGASQDGLILQAVQMARVLRDQLLIDSVDAMQNPGGDAWIRVIEACGLTAGVIGGLGGARCRTVAAHAVHNGLTQLQACHGSLHGEKVGFGVLVQLRLEERLGGNRLAEQAHRQLLPLLKQLGLPVSLDDLGLSKASLSDLQQVCDFACREGSDLHHLPFSVTPGALLEALVGASEPSVRRP

SEQ ID NO: 9521 - protein, 465 aa, Synechococcus sp. WH 7803
MSLLRLLRASNQRFALHLPVHGRGEALPPALRGLLRQQPGRWDLPELPDIGGPLEADGAVADTQARLAARMGVECCWFGVNGATGLLQAALLAMAAPGDAVLLPRNVHRSLIAACELGGLLPVFLPVPFDALRGHPGAMTADGLSRSLDALPDLGCRLAAAVLVHPTYHGYAAEIAPLVNRLHAHGLPVLVDEAHGTHLAFAPGLGLPPSSLTTGADLVVHSLHKSAPGLAQTAVLWQRTTRISATALRLSLQRLQSSSPSALLLASCEATLDWMLSSRWTRLLQQRLETARRLQDRWRCQGVPLHESDDPLRIILNTASIGVSGLEADTWFMNRGLIAELPEPLCLTFCLGLARHRGLATRLQRLWQLFLEDRGGPPLAPVAAPPLDAVNVVELSPAAVSHRATLACPLSQCADRIAAEMICPYPPGIPLLVPGERIDQARVQWLQRQHARWPEQVPGMVKVLA

SEQ ID NO: 9522 - protein, 331 aa, Synechococcus sp. WH 7803
MTGFLTAARAEQEKIQHDTRRLRLFSGTSNPGLAREIAAYLGVPDGPRVCKRFADGELYVQIQESIRGCDVFLIQPTCAPVNDHLMELLIMVDACRRASARQITAVVPYYGYARADRKTAGRESITAKLTANLLVKSGVDRVLAMDLHSAQIQGYFDIPCDHIYGSPVLVDYLSAQELGEVVVVSPDVGGVARARAFAKQMNDAPLAIIDKRRTGHNMAESLTVIGDVNQRTAILIDDMIDTGGTICAGARLLRQQGASRVIACATHAVFSPPASERLSTDGLFEQVVVTNSIPIPSDRMFPQLQVLSVANMLGEAIWRIHEESSVSSMFR

SEQ ID NO: 9523 - protein, 392 aa, Synechococcus sp. WH 7803
MRVSSAANNTYNERVFTLVVVGLQSSNQRRSEQTFTVSYDRLQSTVQRINACGGRILSVTAGNASAPAHSPGSSASNVPKAPATSTVTDTPSKPAHKTVPVNLYKPKAPFIGTVTENYSLLKEGAIGRVQHITFDLSGGDPHLAYVEGQSIGIIPEGEDAKGKPHKLRLYSIASTRHGDNMEGNTVSLCVRQLEYKNEAGEEIKGVCSTYLCDIEPGTKVKITGPVGKEMLLPDDEDANVIMLATGTGIAPMRTYLRRMFEPTEQEKNGWTFRGKAWLFMGAPKTPNLLYDEDFEHYERQYPDNFRYTKAISREQQNTKGGRMYIQDRVLEHADEIFSMIENPKTHVYMCGLRGMEPGIDEAMSAAAAAKGLDWSELRPQLKKAERWHVETY

SEQ ID NO: 9524 - protein, 372 aa, Synechococcus sp. WH 7803
METAVGETRVAASPETVKKFIALGCRVVLERGAGQTSGFLDEAYAEAGAQLVTPGDSQAWGEADVLLCVQSPSPVDLGRLRRGALVVGLLAPYANIELDAALKRCGLSAMALELLPRISRAQSADALSSQANIAGYKSVLLASAALDRYFPMLMTAAGTVQPARVVVLGAGVAGLQAVATARRLGAVVYVSDIRPAVKEQVESLGARFIDPPEMEDKPAESGGYAKQASDAFLAAQRQQLSDQLSEADVAICTAQVPGRRAPRLISEDMLDRMRPGAVVVDLAVAQGGNCADTLPSQTVDRKGVKLIGANDLPCSVPNHASFLYSKNLLALLQPTLKDGQLNLDLEDELIAGCLISQDGTIRRSDVLTPGAN

SEQ ID NO: 9525 - protein, 312 aa, Synechococcus sp. WH 7803
MQVTPSAAGHRSGFVALIGRPNVGKSTLVNQLVGDKVAITSPVAQTTRNRLRAILTTDEAQLILVDTPGIHKPHHLLGERLVQSARSAIGEVDQVLLLLEGCEPPGRGDAFIVNLLRQQRLPVQVVLNKWDQVPTAQRPEADAAYRDLLAESGWPIHHCCALTGEGCPELVQAVSALMPEGPQLYPPEMVSDQPERLLMAELIREQVLLLTREEVPHSVAVSIDRVEEMPSKGKGGGRTAVLATVLVERKSQKGILIGKGGAMLKAIGQGARLQMQTLIDGPVYLELFVKVVPDWRSKPQRLAELGYAEEGR

SEQ ID NO: 9526 - protein, 563 aa, Synechococcus sp. WH 7803
MRLASLAPGLVALRGYRPSQDLFRDVFAGLSVAAVALPVSIAYAELAGLPPVTGLYASILPLLAYALFGTSRQLMVNPDAATCAMLAAAVTPLAGGDPGLYAAMVMVLTLFTGLFCILASLFRLGVLADFLSRPILIGFLNGISFSIVLGQIGKLLGFSVHSGGIIPRLLEIIQKLPQTHTPTLLLGLFSFAVLLLSQRLLPRIPAALLVLVLGALAVWLLDLTSINVAVLAPVQAGLPPLKLPSAPLSALPSLAGSSAGVALVLFTSGTITCRSFASRGGYRIDVDRELVAYGVANMASALSGGFAVTGADSRTAMAVTSGGRSQVTGLVAAAALASILLWFTAPMQFVPLAALGAVLMLAAYSLFDLASLKRLWTLDRKEFALSLITSLGVVTLGAINGILIAVALAVIRFVKHTARPRVELLGRVKGLQGFHSLQTHPDGKAVPGLMLFRFNAPLVFFNADHFLEQSRRAVAEATPKPQWFVVDAIPMDRIDISGVNALQQLNQFLESEGIRLVLAGRRSEFIQGLKAMGMDSPTLEQKLFPTLHQAVRAFRMTPGQPGM

SEQ ID NO: 9527 - protein, 124 aa, Synechococcus sp. WH 7803
MAETSTSQSAAPDTGTYAIVEASGQQFWLQPNRYYDLDRLQADVDATVTLDNVLLVKDATGTTLGKPYVKDASVELKVMAHRRGPKVIVYKMRPKKKTRRKNGHRQELTRVMVQSISVGGKSIS

SEQ ID NO: 9528 - protein, 528 aa, Synechococcus sp. WH 7803
MTKVLVSDPIDQAGIDILGQVAQVDQRTGLSAEELKSIIGDYDALMIRSGTQVTADVIAAADRLRIIGRAGVGVDNVDVPAATQRGVLVVNSPEGNTIAAAEHALALLLSLSRHVPQAHGSMRAGAWDRKKYVGNELYKKVLGVVGLGKIGSHVARVAKAMGMEVIAFDPFISADRAQQMQVRLTTLEDLFRQADYITLHIPRTPDTENLVNAELLRSMKSTARIVNCARGGIVDEAALAEAIENGVIAGAGLDVYASEPLSEDSPLRAVERGLVLTPHLGASTEEAQENVATDVAEQIRDVLLGLPARSAVNIPGLSAEIMERLKPHLQLAETLGLLVSQLSGGQVQELEVRLQGEFALHPSQPLMVAALKGLLTNALGDRINYVNASLEAKGRGIHVLEVKDDASRDFAGGSLQLTTRGGQGGHSVTGAVFADGELRVTNIDEFPVNVPPSRHMLFTRHRDMPGIIGHLGSLLGEHNVNIASMQVGRRIVRGDAVMVLSIDDPIPPALLATIHGINGIQEAHPVTL

SEQ ID NO: 9529 - protein, 379 aa, Synechococcus sp. WH 7803
MAHSVLTAPMASIGVPTEIKADEQRVALTPDGVRELVTQGLEVRVQHGAGAGAGIGDDAFAAAGARMVDRDEAWAAHLVVKVKEPQVEEFGLLRDDMVLFTYLHLAAYPQVGQALLDAGTTGVAYETVQLENGSLPLLAPMSEIAGRLAAQVGARLLERPNGGRGVLIGGCTGVQPARVVVLGAGTVGWNAARLAAAMDAEVMLLDRSPERLRSLEADRRGRLMSVVSSRGLLERLVPTADLLIGAVLTPGGRAPTLVDDDMVKQMKPGSAIVDVAIDQGGCIATSRETTHTDPTINIHGVQHYAVGNMPGAVPFTSTEALVSVTLPYILGIAGRGLEEAVTERPELLSGLNTVKGAVCHPGVAKALNVPPRHPMACLR

SEQ ID NO: 9530 - protein, 329 aa, Synechococcus sp. WH 7803
MQFIDQARITVRGGRGGDGIVAFRREKYVPAGGPSGGDGGHGADVVLEADSNLQTLLDFKYKRLFAAIDGRRGGPNRCTGASGQPLVIKVPCGTEVRHLTTGILLGDLTNPGERLTVAFGGRGGLGNAHYLSNRNRAPEKCTEGRDGEEWPLQLELKLLAEVGIIGLPNAGKSTLISVLSAARPKIADYPFTTLVPNLGVVRRPSGDGTVFADIPGLIAGAAQGAGLGHDFLRHIERTRLLIHLVDSGADDPVGDLRVVEKELEAYGHGLVSRPRLLVLNKLELLDEQGRDDLLERLEASSGHRPLLISAVMGKGLDALLDQVWQLLGV

SEQ ID NO: 9531 - protein, 262 aa, Synechococcus sp. WH 7803
MIRPDAELLLDISDLHASVEDQPILKGVNLQVRAGEIHAVMGRNGSGKSTLSKVLAGHPAYRVTGGSVRYRGDDLLTLEPEQRARLGVFLGFQYPVEIPGVSNLEFLRVSTNARRETQGQEELDTFDFEDHVRERLKVVQMDPAFLDRSVNQGFSGGEKKRNEILQMALLEPVVSILDETDSGLDIDALRIVASGVNQLSSPETASILITHYQRLLDEITPDYVHVMAAGRILRTGGRELALELEQIGYDWVDEQLAAEGVV

SEQ ID NO: 9532 - protein, 248 aa, Synechococcus sp. WH 7803
MTASAPTKETILVVDDEASIRRILETRLSMIGYNVVTACDGTEALECFQECEPDLVVLDVMMPKLDGYGVCQELRKESDVPIVMLTALGDVADRITGLELGADDYVIKPFSPKELEARIRCVLRRVEKEHAAGIPNTGLIKVSDLKIDTNKRQVFRADERIRLTGMEFSLLELLVSRSGEPFSRGEILKEVWGYTPERHVDTRVVDVHISRLRSKLEDDPANPELILTARGTGYLFQRIVDSVASEGP

SEQ ID NO: 9533 - protein, 392 aa, Synechococcus sp. WH 7803
MLPTTSADLIPGDLIQLDHQATTPCHPLVVKAMEPWWEQDWGNASSRQHRLGLTAAAAVASARSRLASHLGVEANDLIFTSGATEANNLALLGHARARAQAEGRCGHVVTLATEHHAVLDPMHQLQREGFALTVLHPKDTGLIDANALKGVLRDDTQLVSVMVANNEIGVVQPMRELAELCQSRGITLHTDAAQAFGHLRLNRDELGCDLISLSAHKLNGPKGIGALVKRRNVSIQPLFWGGGQEQELRPGTLPVPLIVGFAAAADLAHADLETRQDQLATLRDQLWQGLKSRHPQLRMNGAPEPRLAHNLNITVPDVSGVRLHRCLKRSLACSSGSACSRGQPSHALQAIGLSRREAEASLRLSLGRTTTVADIHRAVDAISACITQLQGE

SEQ ID NO: 9534 - protein, 921 aa, Synechococcus sp. WH 7803
MTSAYEGSFQPPASLTAEPERFSDQAWDLLLSSQDVARRWRHGDLDVEHLLQVLFADPRYQAEVAVLSVPRDRLLDQLEAFLAEQPTARGQDLFIGEDLERLLESADAVRGLWGSRLIDLSHLIIAIGRDPRIGEDLLSRFGLTPDRLEAELRRAPDPGPGATIQVPAQGASSQAPSFPVPPSAPAPPPAPAAPPAPAQTTDALPEPAPAAEATALERFGRDLTAEAADGQLDPVVGRDVEIRSLIKVLSRRGKNNPVLIGAPGVGKTAIAELLAQRMVAGEVPESLQGLRLVALDAGALIAGAKFRGQFEERLREVLQEVSDPEAGVVLFIDELHTVVNSDRSSADAGSLLKPALARGDLRCIAATTPEDYRRTVEKDPALNRRFQQVPIAEPSIDHSIEILRGVKERYELHHGVTITDAAVTAAARLADRYISDRCLPDKAIDLIDEAAAQLKMDVTSKPQVVEDAEMALRRVELSVLAAEQAPEAERVQLQRQRLEATTHLSRLRERWQAERAQLEELRQLLQEDEDLRHAMAEAEREGDLEEAARLQYDQLHRLQQRRDALEQSLSDAQAAGTALLREQVEAADIADVVARWTGIPVQRLLAGERQKLLELDQRLQERVIGQPEAVQAVAAAIRRARAGMKDPRRPVGSFLFLGPTGVGKTELAKALSGQLFDEEEAMVRLDMSEFMERNAVARLLGAPPGYVGYEEGGQLTEAVRRRPYALLLLDEVEKAHPDVFNVLLQVLDDGRLSDSQGRTVDFRHTVVVMTSNLASRAILEAARSGQESDPQAASPSLDAAVDEALNSHFRPEFLNRIDEVIRFRPLDQQDLSRIVRLQLADLSRLLREQGLSLEVDAAVIDALVSLGYEPEYGARPLRRVLRRRLENPLATELLEDRFHGAQTVLVHAGASPAEPFRFEPA

SEQ ID NO: 9535 - protein, 294 aa, Synechococcus sp. WH 7803
MTTNGLDSVGAEEMFDQDGAIFMGARRDPSDCQVGVFGVPYDGTTSFRPGTRFGPAAIREVSSGLETYCPQLDRDLDTLAYADLGALNIAYGAPEPVVQAVEQATARILALGLKPLMLGGEHSITSGAVAAVAREHPDLVLVQLDAHADLRQTWLGASHSHACAMRRCLEVLPSEDLLQIAIRSGTADEFSELHRSSRLVPLHQLHQRLSALRGRPIYLTVDLDWFDPAVMPGTGTPEPGGFTWPDFAALVDALQHHNLMAADVVELAPQLDPSGISSVLAAKVTRSLLLLMTQ

SEQ ID NO: 9536 - protein, 513 aa, Synechococcus sp. WH 7803
MTISSPSRPYLDGKKLNKIEQNKAAKDGLLVGPEIEKFAEIGWEQVDETDLQLRLKWYGMFWRPKTPGQFMLRLRVPNGVLSAQQLRVVASIVERYGESGSCDITTRQNLQLRGVLLNDLPEILKRLKEAGLSSIQSGFDNPRNVTGNPLAGIDPHEIVDTRPYTTELQNFLTNNCQGNPDYSNLPRKWNTAVAGAKDNFLLHNDIVFHPVEHNGEMGFGVWIGGILSSQMNAYAIPLNAWVKPNEICRMTDAVISLWRDNGERDKRPKGRFRLYLDSVGIDAFRSDVEQIFGPLTPDPGSVFATEPRSHYGLHPQKQEGLSFAGLHVPVGRLTAQDLQDLATASLQYGSGEVRLTEDQNVIVVGLPAEAIEAFKADPLVQRFPLEPGTLAAGTVSCTGNTYCSFGLTNTKDQALTIAQELDQELNLPEEVKIHWTGCPNTCGQAFMGAIGLTGTKAKNSEGVMGEGYMLTTGGSQGENPTVGEVKQKAIPADQIKTVLKDLLVEQFGATAKT

SEQ ID NO: 9537 - protein, 293 aa, Synechococcus sp. WH 7803
MDYVLPNELVDGMIAAGGKKANVSVKDLLLRGFYSGAILGLAVILALTVGIQSKLPFLGSVLFPFGFASIVLFGMELVTGNFALLPMATWAGRSSWGATFRNWSWVWIGNFIGTLVVAVIMAISLTSGGTVDPAADGGVWQKVAQKIMTLNIANVEKKYEALGSLGFGLAILRGLVANWLVCLGVTMALVSKSVPGKLLACWLPITAFQTMGMEHIVVNQFLHTAGPILGSGVPFWKCIFWNFLPVTIGNIIGGMVFIGMLFYSTHRTTMDNVLPKEHDEKLERELAAELGAR

SEQ ID NO: 9538 - protein, 638 aa, Synechococcus sp. WH 7803
MGKVVGIDLGTTNSCVSVMEGGKPTVIANAEGFRTTPSVVAYTKNQDQLVGQIAKRQAVMNPDNTFYSVKRFIGRRVDEVNEESKEVSYGVEKAGSNVKVKCPVLDKQFAPEEVSAQVLRKLAEDAGKYLGETVTQAVITVPAYFNDSQRQATKDAGKIAGLEVLRIINEPTAAALAYGLDKKSNERILVFDLGGGTFDVSVLEVGDGVFEVLSTSGDTHLGGDDFDKVIVDHLADSFKANEGIDLRQDKQALQRLTEAAEKAKIELSSATQSEINLPFITATPEGPKHLDLTLTRGKFEELASNLIDRCRIPVEQALKDAKLSSGELDEIVMVGGSTRIPAVLELVKRVTSKDPNQTVNPDEVVAVGAAIQGGVLAGEVKDILLLDVTPLSLGVETLGGVMTKMITRNTTVPTKKSETYSTAVDGQTNVEIHVLQGEREMASDNKSLGTFRLDGIPAAPRGVPQIEVTFDIDANGILSVTAKDKGSGKEQSISITGASTLSDSEVDKMVKDAEANASADKEKRERIDLKNQAETLVYQAEKQMGELGDKVDDAAKAKVEEKRTKLKEATEKEDYDAMKTLLEELQQELYTVGASVYQQEGAAAGAAPGADAGAGAGAAGGSSDAGDDVIDAEFTETK

SEQ ID NO: 9539 - protein, 401 aa, Synechococcus sp. WH 7803
MGRAKKVVLAYSGGVDTSVCIPYLKQEWGVEEVITFAADLGQGDELEPIRRKALEAGASQSLVGDLIQPFIEEFAFPAIRANALYEGRYPLSTALARPLIARRLVEVAREVGADAVAHGCTGKGNDQVRFDVAIAALAPDLKVLTPAREWGMSREETIAYGERCGLPAPVSKKSPYSIDLNLLGRSVEAGPLEDPMQAPPEEVFAMTVSIDAAPSEAEEIEIAFEAGNPVSINGQRLDPVALIREANRLAGSHGIGRLDMIENRVVGIKSREIYETPGLLLLIQAHQELESLTLAADVLRTKRQLEMQWADLVYQGLWFGPLKEALDGFMDRTQSEVNGVVRLRLHKGNAIVTGRGSSDSSLYVPEMASYGSEDQFDHRAAEGFIYVWGLPIRLWSAARRR

SEQ ID NO: 9540 - protein, 670 aa, Bradyrhizobium sp. BTAi1
MGFHEQPGGLTAVSWFLAVAFLVISVSRAPAQMEGGHGAPHSEMSVPPTPSPNQRGLGMPGMGEMGSGAMGASPRGEMGGSMGEMGGMGEMGRRPAKEFYPSLMNLPTLSAEQRRMIEAQAQAQITNGTTEIANAESALRQARSAGDSAAVEQAAGRLRDGLSNVKSGATTLRALAEGKSPPQIAQAWFKSQLSIPSATASDSLSALGLSWFHVITMAVVATFATAMLAIYFLRMRRASALVERLTRVPAVAASSGRPPIPLTAASKIPPGSTPATGPGSTSAPPAAAEARPEPLSFPAARTTTANAGPWKGKLRVAAIFPETKDVKTFRLKNPDGGPVPFSFLPGQFLTYSAEIDGKLVRRSYTIASSAAQSAYVETTIKREEPGIFSDYMHDKVVEGDLLEVAAPSGTFTFTGKEADSVVFIGGGVGITPLMAAIRYLFDTTWKGETFLVYGAQSTAHFIFRDELEYLQRRMHNLHVAATMARAAGTSWMGAEGHITREFLLQSVPEITSRRVHLCGPPGMMQAMKKLLAELGVPPDQVKTEAFGPARGAVPPPGVTQIVQGGAAGSGAGALQPTAPAIGPATATIRFAKSDKLVPLPPDKTVLEVAESIGVPIDYSCRIGICGTCKTKLLEGKVTMEVEEALTPEDKAQNIVLACQAKSVGNLVVEA

SEQ ID NO: 9541 - protein, 597 aa, Bradyrhizobium sp. BTAi1
MGGMMGGGCMGGGCMGGGRKEFYPSLMALPSLTPEQRQNIEAQARGWISSGTDEIARAQDALRHANAAGDTAGAEQAASRLRDALNQVKSGTTTLRSLAEGTPPQQIALDWFKGQMSLVADRHDQDVVGPLGLSWFHLITMSLVATFAAAMLAIYLVRMRRANALVDRLVSAAPAHFAAAPSLAGTTPPAPASSGGTSGPANPTTPPSPAPAGPPSSVAGFAPAGQPARTGLWKGKLRVAAIFDETPNVKTFRLRDPGGGPIPFSFAPGQFLTYSAEIDGKLVKRSYTIASSAAQTAYVETTIKREDKGIFSDYMHQKVSEGDLLDVMGPSGAFTFTGKEADSVVLIGGGVGITPLMAAIRYLDDTAWPGEIFLIYGAQTTEHFIFRSELEDRQRRMRNLHVAATMARAAGTSWMGAEGQINRDFLTQSVPDLVKRRIHLCGPPGMMQAMKKLLTEIGVPAGQIKTEAFGPALGAVPPPGLTVVSELRSPVSPQATVSAPSEANAPVTGPATALIRFSKSNKVAPLPPDKSVLEVAESVGVPIDYSCRAGICGVCKTQLIEGKVTMEVQEALTADEKAHGLILACQAKSIGNLVVES

SEQ ID NO: 9542 - protein, 333 aa, Bradyrhizobium sp. BTAi1
MSARKKPLVVVTRKLPDSVETRMRELFDARLNLDDEPMSQDQLADAVRTAEVLVPTVTDHISADILNQPDCKLRMIANFGNGVDNIDVAAAVARGITVTNTPKVLTEDTADMTMALILAVPRRLIEGASILTEGKNWAGWSPTWMLGHRIGGKRLGIIGMGRIGQAVARRARAFGLQIHYHNRRPVAPVIADELGATYWESLDQMLARMDIISVNCPHTPATFHLLSARRLKLIRKDAYIVNTARGEVIDEETMTRLIEAGDIAGAGLDVFEHEPAVNPRLVRLAKSGKVTLLPHMGSATIEGRVEMGEKVIINIKTFLDNHRPPDRVLPSML

SEQ ID NO: 9543 - protein, 631 aa, Bradyrhizobium sp. BTAi1
MGKVIGIDLGTTNSCVAVMDGKSSKVIENAEGMRTTPSIVAFSDDGERLVGQPAKRQAVTNPERTFFAVKRLIGRRYDDPMVEKDKKLVPYKIVKAGNGDAWVEADGKTYSPSQVSAFILQKMKETAEAHLGQKVDQAVITVPAYFNDAQRQATKDAGKIAGLEVLRIINEPTAAALAYGLDKTKAGTIAVYDLGGGTFDVSILEIGDGVFEVKSTNGDTFLGGEDFDMRLVSYLADEFQKEQGINLRNDKLALQRLKEAAEKAKIELSSTTQTEINLPFITADQSGPKHLTMKLTRAKFEALVADLVEKTIEPCRKALKDAGLTAGEIGEVVLVGGMTRMPKIQEMVKQFFGKEPHKGVNPDEVVAIGAAIQAGVLQGDVKDVLLLDVTPLSLGIETLGGVFTRIIDRNTTIPTKKSQVFSTAEDNQNAVTIRVFQGEREMAADNKMLGQFDLMGIPPAPRGMPQIEVTFDIDANGIVNVSAKDKATGKEQQIRIQASGGLSEADIDKMVKDAEANAAADKKRREAVDAKNHADALVHSTEKALAEHGSKVADTERRAIEDAVSDLKEALKGDDAEAIKAKTNTLAQASMKLGEAMYKQQAESDAARDAAKDDVVDAEFTEVDDDKKKSA

SEQ ID NO: 9544 - protein, 445 aa, Bradyrhizobium sp. BTAi1
MTTILKGLPKGEKVGIAFSGGLDTSAALLWMKQKGARCFAYTANLGQPDESDYDEIPRKAMSFGAEKARLVDCRTQLVHEGIAAIQSGAFHISTGGATYFNTTPLGRAVTGTMLVAAMKEDGVNIWGDGSTYKGNDIERFYRYGLLTNPNLKIYKPWLDQQFIDELGGRAEMSAFLTANGFDYKMSAEKAYSTDSNLLGATHEAKDLENLNSGIRIVNPIMGVPFWREDCVVKPETVVVRFEEGQPVALNGQTFTDPVALFLEANAIGGRHGLGMCDQIENRIIEAKSRGIYEAPGMALLHIAYERLLTGIHNEDTIEQYRINGLRLGRLLYQGRWFDSQALMLRETAQRWVASAITGEVTLELRRGNDYSLLNTESPNLTYQPERLSMEKVEDAAFTPADRIGQLTMRNLDITDTRTKLKLYSETGLLTGSEGAQIFQLGHDKG

SEQ ID NO: 9545 - protein, 356 aa, Bradyrhizobium sp. BTAi1
MKFLDEAKVYVRSGDGGNGCVAFRREKFIEFGGPNGGNGGRGGDVVIEAVDGLNTLIDYRYQQHFKAQRGGNGSGKDCHGAGGKSVVLKVPVGTQIFDEDRETLIHDFTTVGERFVLAQGGNGGFGNAHFKSPTNRAPRHANPGQPGEERWIWLRMKLIADAGLVGLPNAGKSTFLSKVSAAKPKIADYPFTTLHPQLGVVNADGREFVLADIPGLIEGAHEGAGLGDRFLGHVERCRVLLHLVDATCEHAGKAYKTVRHELEAYGGDLTDKVEIVALNKIDAVDPDELKKQKDRLKRAAKKTPLLISGATGEGVKEALRKLADVISEQPVSIKAKSTSDSAATEEPWAAPLPPQG

SEQ ID NO: 9546 - protein, 127 aa, Bradyrhizobium sp. BTAi1
MFAVIKTGGKQYRVAPDDVLEIGKIDGEPGTIVQLNEVLVVGGDTPVLGVPAVAGASVAVEVLDHKRGPKVIAFKKRRRKNSRRKRGYRDELTLIRVSEILTDNAKPTKGPRPKKAKAEAPAADAAE

SEQ ID NO: 9547 - protein, 545 aa, Bradyrhizobium sp. BTAi1
MPALAHVLLAALRDHGAREIFGIPGDFVLPLFKVIEESRILPAVTLSHEPAVGFAADAAARYHGGLGVAVVTYGAGAFNLVNSVAGAYAERSPVVVIAGAPGARERVSGFLLHHQARTVDTQLAVFKEITCDQAVLSDPATAPAQIARVLRSAKEMSLPVYLEFPRDMVDVEAEPVVPLPPRRADQDALGECVEEILGRIARAERPVIVVDVEIRRYGVEARIAALARKLGLPLVTTFMGRGLLDQADDVVAGTYLGAAGNPAITALVEDADLVLMLGVILSDTNFALSNRAPDPRRMILAASCEVQIGHHVYRDMPLGDLIDALDDRATPRAAPADRVRQRSAYPRGLVADSNPIAPSDIATAINDMFDRHGRMPMTADIGDCLFTAMEIDNTALAAPGYYAGMGFGVPAGIGVAATGLRPLILVGDGAFQMTGWELGNCRRYGLDPIVVLFNNCSWEMLRVFQPESRFNDLDDWHYADIAKSIGGVGERVTTRAELVAALERAVERRGQFSLVEVMLPRGKTSDTLARFVAGFKSARERMAGG

SEQ ID NO: 9548 - protein, 225 aa, Bradyrhizobium sp. BTAi1
MMSKQAEFAVILKMNPMFADLGADELQRLSNLCHTQHLSSGEVLFQKGDPGNALFGVRRGQIRIETGATDGSRLTLNFMGPGDLFGEVAVLDGQERTADATAGETTELFVLRREDFLSFLEREPKVAIKIIQLLCQRIRWQSERMEESVLQPLPIRLARRLCALAEDFGSEVHISQEQLGIFVGAARESVNRQLQAWRKDKILDLQRGRILLHDLTKLNTIARNE

SEQ ID NO: 9549 - protein, 443 aa, Bradyrhizobium sp. BTAi1
MRDGAQMEPIAQIEQLGQGALALLDLPAAHYAGYYEGFANSALWPALHSRSDLISVSHDDYRSYREVNAFVARALLRFHKPETLFWIQDYHFLSLGVELRTLGVKSPIGFFLHTPWPARSVIDSVPNHRDLVTAMLAYDLIGFQTEDDRDNFCACIRADLGLQVRDGVVKSRHGRTRLAVFPIGIDADKFAASAAKAASHPDVSRLRRSLHGEKLAIGVDRLDYSKGLVNRITAFDRMWTMHPTLLRAASLLQIATPSRESIEAYGNLQSDVARLVSEVNGRHGEADWTPIRYLNKGYGQGVLSGLYRSAQVGVVTPLHDGMNLVAKEYVAAQSPVDPGVLVLSKFAGAANELDAALLVNPHDIDGMARTIAMALSMPLNERRMRYEIMMTKLRRHSIQQWFTDFLEALQDSDAPETAEIAPLPTAPAGLLSSRLASSSARYH

SEQ ID NO: 9550 - protein, 401 aa, Bradyrhizobium sp. BTAi1
MSFPAMRRTRHAGLQGHRRSLRRHHPDFDKMATQGWQALEAEGKLPSNGWRKERQWALDMGLPGADTLTDRDIPTFARGELPHFAGINTFMKAPYVENVRDVGKYDAAVIGIPFDSGTTYRPGTRFGPQGIRRISALYTPYNYELGVDLREQMTLCDAGDVFTIPANLEKSFDQISRGVAHVFSSGALPIMLGGDHSIGFPCVRGIAQCTDKKIGIIHFDRHIDIQEKDLDERMHTTPWYWATNLPNVSPTNLVQLGIGGWQVPREGVEVARKRNTNVLTIADIEKIGLEKTAEIALELAWKDADAVYISFDVDSIDCGFVPGTGWPEPGGFLPREALKLLGLVAAEGLCGLEVVEVSPPYDTSDITALIGVRVVVEALGSMVAHGKLGSHKHIINKPVSY

SEQ ID NO: 9551 - protein, 321 aa, Bradyrhizobium sp. BTAi1
MAATHSLGWIGMGRMGYPMAERLLKADLKLSIWNRTRAKAEPLAAKGGVIVDRPSDLATCDIVFSMVSTGKDLEQVYFGDNGLVASSLGPRPRILVDCSSIGIEQSEAIAARLKRLDCAFVRAPVSGNGKCVKAGKLSSVVSGPESAFEIIAPYLAKIAVSGVSYVGEGELARICKIAHNVFLGVVIQNLAEITILAQKAGVPRHAFLDFMNASVMGSTFTKYKSNALVNLDWTTTFTPTLLRKDLDLGLSAARQLDVAMPVAAATREALQAHVGAASLQADPAGYLDKDFAALLETVALAAGVKLQPENVPMPTGLETEG

SEQ ID NO: 9552 - protein, 209 aa, Bradyrhizobium sp. BTAi1
MLLPFDDATRRKIASCCAGFARRGDDVSAPALKRAAVAIALAPDHETGATTLLLTLRAAVLRSHGGQWALPGGRCDAGETPVAAALRELAEELGLIASPEAVLGLLDDYPTRSGYLITPVILWAANGRTLRPNPDEVASVHRIGLDTILADDAFDFTVIPESTRRVVRFHAREGLIHAPTAALIYQFREVLAGRETRVHELEQPVFAWK

SEQ ID NO: 9553 - protein, 409 aa, Bradyrhizobium sp. BTAi1
MNVLAKQPSPFKPAQRLSAIGVSEILKVTGLAAQMKREGQNVIILGAGEPDFDTPEPIKDAAARAMRDGATKYTALDGSPELKAAIRAKFKRDNGLDFAQDEITVSAGAKQVLFNAMMATLDPGDEVIIPTPFWVTYADIVAIAGGTPVLVPCSEANGFRLSPEDLARAITPRTRWLMLNSPSNPSGAAYSEHQYRPILDVLLKHPSVWLMVDDIYEHIVYDGFRFVTPVAIEPALRNRTLTVNGVSKAYAMTGWRIGYGAGPSALIKAMAVVQSQSTSCPSSISQAAAIEALTGPQDVIADRCRSFQQRRDLVVDALNSIEGISCCVPEGAFYTFASCAGLIGRTTPDGRVVEDDTVFADYLLRAAGVAVIPGSAFGLAPYFRISYATSAAELRDACQRIAAAAARLL

SEQ ID NO: 9554 - protein, 595 aa, Bradyrhizobium sp. BTAi1
MKMNGATALVSMLSGYGVDVIFGVPGDTNVALYEALRMTKGAPRHILCRDERSAVFMADCYARLSGKPGVAEVPSGAGALYGLPGVAEANKSSVPLILLVNDIPQPGVGRGTLTELPVQDLFKPISKRAETLAHVRKLPEVVRRAFREATGGRPGAVVLALPEDILYQDLPSEGVSLHVEPQCRQAPSYRSRPADADLDSALNAILAAERPLIVAGGGANRSAAAEAITAFAERLGIPVVTTITGQGVIRDDHKLGIGIIGDNGFHPHAVWALGRADLVIYVGCRMGSVATMNWQWPVPNGETRIVQVDLEPEVIGNTYAIDFPLVGDARAVVEALIAKAPADHASVTAAWVDEINSRRADFWDVMAPHLQSDEVPLRPERVIETLNRCLPMPCNVVSDAGTPTPYATRFLRLRDPQSKLVIPRFYGGLGYAIPAVIGAYFAAPHLRPVGLFGDGSLGMSAGELETLSRLQVPAVLIHFNNACFGWIKALQRVVDRDRARKASEHSPAVPVNDPTFSVDFGKYDMSRLASVYGIRSFRVETPAQLEAALREAFELNEPVFIDVAVESIADRLPPVFSWLKKVGADPAAVGVQAAL

SEQ ID NO: 9555 - protein, 333 aa, Bradyrhizobium sp. BTAi1
MPRSKPLTEAPPANADIQSALRTLDAGSNGIAAISAALHGPLGAAFAAAVALIRQAKGRAILTGLGKSGHVARKMAATLASTGTPAFFVHSAEAGHGDLGMITSDDVVIALSWSGEQPEMKTLVNYTKRFAIPMIAITSNAQSSLGQAARIVLELPKAREACPHNLAPTTSTLMQAAIGDALAIALLEGRGFTALEFANFHPGGKLGAMLKHISDLMRSGDAVPLKPLGTGMADALAEMSAKGLGCVVIVDGRGHVAGIITDGDLRRKMRADLLSVTVDEIMTANPRTVGREALASEALEILNSAKITTLIVTDGAKPVGILHMHDLLRAGVA

SEQ ID NO: 9556 - protein, 332 aa, Bradyrhizobium sp. BTAi1
MALMTRQLRIEPDGIAIDMADHETILQAARRAGVALPYECGWGSCGTCKVTLVAGQVDLIFPGAPAVNPRDARRNRILACQSRATSEVTIARGPGAWSMPAPGCVERQAILRDVVDLAPEVRQFSFETAEPIDFRPGQYAILHLGADLRRCYSMSNLPGGNLLQFIARRYDGGTGSNALAALAPGAVITIEAPFGTCTLRRRPGRKVFVAGGTGIAPILAMMREAAEARLDFGSPVDIIYGARGPADLAAHDVLRAVIARIAQARYLPVVENAPSGWPHAAGFVTDAIKATIPDPAAAEFYVAGPPIMVDAVKSLLRSADVPITQVHYDSFG

SEQ ID NO: 9557 - protein, 71 aa, Bradyrhizobium sp. BTAi1
MAMTGTVKFFNGERGYGFIKPDDGGRDVFVHITAVERAGLKDLSEGQRISFEVEPDKKGKGPKAVNLVLSS

SEQ ID NO: 9558 - protein, 317 aa, Bradyrhizobium sp. BTAi1
MSAKNGSIKLVAGNSNPALAAGIAAELGLPLTKAVVRRFADMEIFVEIQENVRGSDVFILQSTSYPANDLLMELLIITDALRRASARRITAVVPYFGYARQDRKSGSRTPISAKLVANLITHAGVDRVMTLDLHAGQIQGFFDIPTDNLYAAPLMVRDIKDRFDLSSVMVVSPDVGGVARARGLAKRINTPLAIVDKRRERPGESEVMNVIGDVSGRTCILIDDIVDSGGTLVNAADALLKHGAKDVYAYITHGVLSGGAATRITSSRLKELVITDSIMPTEAVRNAPNIRALPIAPLIAEAIGRTAAEESVSSLFD

SEQ ID NO: 9559 - protein, 401 aa, Bradyrhizobium sp. BTAi1
MMSFLAAALDRVKPSATIAVTDKARVLKAAGRNVIGLGAGEPDFDTPDNIKDAAIKAIQAGKTKYTAVDGIPELKEAIIGKFQRENGLTYKPNQVIVGVGGKQVLYNALMATINPGDQVIIPAPYWVSYPEMVALAGGEPVPVVCTAAHGFKLQPEALEKAITPKTKWLILCSPSNPTGAAYTKAELKALTEVLVKHPHVWIMTDDMYEHLVYDDFVFTTPAQVEPSLFDRTLTVNGVSKAYCMTGWRIGYAGGPANLIKAMATIQSQSTSNPCSIAQWAAVEALNGPQDFIPANNKVFKERRDLAVSMLNQASGIECPRPEGAFYVYPSCAGTIGKTAPSGKVIDNDETFVTELLETEGVAVVHGSAFGLGPAFRISYATKTSDLEEACKRIQRFCGNLR

SEQ ID NO: 9560 - protein, 529 aa, Bradyrhizobium sp. BTAi1
MSKPKVLISDALSPAAVQIFKDRGVEVDFQPNLGKDKDKLADIIGDYDGLAIRSATKATAKIIERAKRLKVIGRAGIGVDNVEIPAATAKGIIVMNTPFGNSITTAEHAITMMLSLAREIPQADASTQAGKWEKNRFMGVEITGKTLGVIGCGNIGSIVCDRAQGLRMKVIGFDPFLTEERARDLGVEKVELDELLKRADFITLHTPLTDKTRNIIDAAAIAKMKQGVRIINCARGGLIDEQALLAALNSKHVAGAALDVFAEEPATSNPLFGHPSVICTPHLGASTTEAQENVALQIAEQMSDYLLTGAISNAINFPSITAEEAPKLKPFIALAEKLGSFAGQLTESSITKIQITYEGQVAEMKTKALTSAVLAGLLRPMLGEVNVVSAPVIAKERGMIVDEVLRAGESDYESLITVAVTTEQQERAVSGTVYADGKPRLVDIKGIRVDAEFGKSMIYVTNEDKPGFIGKFASLLGDAKINIATFHLGRVAAGSDAIALVEIDGAVPAELLAKIQALPQVKQAKALTF

SEQ ID NO: 9561 - protein, 570 aa, Bradyrhizobium sp. BTAi1
MKISPDSAAALIARLLKRRGVSRVFALCGGHIMPIWMRLDAEGIRIIDVRDERAAVHMAQAHAELTGELGVALVTAGPGMTNAITGIANAHVSRAPVLVISGGNPRPQENRGGLQDMDHTQLVRSITRYARTVREPSLVLQELDEAISRAFGDGGEPGPVFIDFPVDTLRGIVPEALQLEEHLAPKPRAAPRPDPAEVEKAVELLWSARRVLVISGRGARGAGPELIGLLDRLGAVYLDTGESRGLVPDDHPSVVGAMRGAVMGDADVVLTVGRKLDFQLAYGSPAVFKDAKFVRISDSASELRDNRRGAAEILASPAETLRAMVALAGNRESAVDRQWAAKLRAGHQERAAKLKQSMAAAPAGSDGRLHPNRVLSALQDAIGNDAVVITDGGDFLSFARVGLSAPLMLDPGPFGCIGIGVPYGIAASLAFPDRPVVVATGDGAFGFNAIEVDTAVRHKAPVLIVVANNGAWQIEVHDQTVTHGKVVGTKLQFADHAAMARAFGMHAERVETAEQLGPAIKRALANRPALLDMVVTPEAVSSDAKTGLAWVPDLQPLAAWDEAERKWRGT

SEQ ID NO: 9562 - protein, 415 aa, Bradyrhizobium sp. BTAi1
MPLSLPKQKIRVLLLEGVNDSAVRMFEANGYTEIERLPKALGSAELKRMLSGVHMLGIRSRTHLTEDVLQAADRLMVVGCFSVGTNQVDLDAAKRLGIPVFNAPYSNTRSVAELTIAEVVMLMRRIFPRSVAAHAGGWDKSANGSREVRGKTLGIVGYGNIGSQLSNLAEAMGMRVIFFDLTDKLRHGNTEPVESLDELLAMSDVVSLHVPETPATANMIGERQIRHMKDGAYLINNSRGTVVDIEALASALRDGKLAGAAVDVFPVEPASNADPFVSPLQGLPNVILTPHVGGSTEEAQDRIGGEVARKLIDYSDVGSTFGAVNFPQVQLPARPTGTRFIHVHRNVPGVLRQVNEAVSRHNINILAQYLQTDPEVGYVVLETDVVGGEGEELLSELRAVEGTIRVRVLYDHDRP

SEQ ID NO: 9563 - protein, 320 aa, Bradyrhizobium sp. BTAi1
MSDTLHTVVVARKAIEAHNMASFELVPADDHPLPGFTPGSHIDVTLPNGLTRQYSLLNSAAERNRYCIGVWKDANSRGGSKALHLDIKEGDRLQVSRPRNRFKIPKDTKRALLVARGIGVTPILSIADTLKAKAIPFELHYVFALMSPDSFRGTIEGSSFAENTRYYTESSEDNQLLKAADLLADRPDDTQLFICGVDWWMDPIIAQAKQKGFAEERIHIERFTAKAAAALLDKVFDVTIKSSGATFKIPGDKTVTAFLEEHGVKIATSCEQGLCGTCKTRVVEGEIDHRDKRLSAAQRAEGYFLPCVSRAKGDRLVLDL

SEQ ID NO: 9564 - protein, 397 aa, Bradyrhizobium sp. BTAi1
MTMRHILTLNAGSSSIKFALFEDAAGPVEILRGQVEGLGTATPHLEARSSSRILADERLDPERATDHEAALTVVIDVLQRAAGRATVDAIGHRIVHGGLAFTRPIVVADEDLTRLEALNPLAPLHQPHNLSGVRAAHRAFPGALQVACFDTAFHRSHPWVNDTYALPRELYEQGVRRYGFHGLSYEYVISRLQEIAPQAEKGRVVVMHLGNGASMCAIRDGRSIGSSMGFTALDGLPMGTRCGQLDPGVVLYLLQEKRMTAAAVTDLLYNHSGLKGLSGLSQDMRELEAADTPEARQAVDYFVDRIRRELGAMAAVLSGVDAIVFCGGIGEHAWRVRERVCRDFEWLGIALDARRNRASATVISSEGSDISVFVINTNEELMIARHTAQLLAAGGKT

SEQ ID NO: 9565 - protein, 470 aa, Bradyrhizobium sp. BTAi1
MDMSDETKPTLSKSLTGLHLWGIAVGLVISGEYFGWSYGWDKAGTLGFLVTTIFIAVMYTTFIFSFTELTTAIPHAGGPFAYSYRAFGPLGGFVAGFATLIEFVFAPPAIALAIGAYLNVQFPALSPKAAALGAYVVFMALNIAGVSIAATFELFVTILAIAELLVFMGVVSPGFSFANFAANGWAGESTFSLTSIGGIIAAIPFAIWFFLAIEGAAMAAEETKNPTKTVPLAYIAGILTLVVLAFGTMIMAGGVGDWSKLANINDPLPQAMKIVVGENSGWLHMLVWIGLFGLIASFHGIIMGYSRQIFALSRAGFLPAKLAALHPTCRTPHWAILAGGVVGIAAIFSDELIQFAGQTLTANIVTMSVFGALVMYIMSMAALFRLRATEPNLVRPFKAPLYPVLPAVALVCATLSLLTMVWFNLQVFAAFVVLFAAGLLLYRLTAGKRTNAANDNLLDIALNEARAMAD

SEQ ID NO: 9566 - protein, 211 aa, Bradyrhizobium sp. BTAi1
MNSVEFFARGRERLRFDVPKALLDPDVIPTSGDSGTDRMLEIIAREQPIRPAAVLIPVVDHPEPTVLLTQRSPNLSSHAGQIAFPGGKIDVTDASPLDAALREAEEEVGLDRSFVDPIGYLDVYGTAFGFRILPTVARVRPGFTLKINEGEVDDAFEVPLAFLMDPTNHQLHSKEFRGMERSYYAMPFAERYIWGATAGILRVLYERIYLP

SEQ ID NO: 9567 - protein, 405 aa, Bradyrhizobium sp. BTAi1
MTDAILTINAGSSSIKFAAYEIATAGLRPLARGHIDDIGDDTTFTAGPADGPAERQPIDASKGTVDHRSALELAVDWLRRHEDGCHVVAVGHRVVHGGPDHAEPVVIDDGTLLRLRKFVPLAPLHQPHNLAGIAAALHAFPDAAQVACFDTAFHRQHPFIADTFGLPRRLYDEGVRRYGFHGLSYEYVSRRLRSVAPMLASGRVIIAHLGNGASVCALRDGRSVASTMGFTALDGLPMGTRCGQLDPGVVLYLLTEKGMSPDEITHLLYHDSGLKGLSGLSNDMRELEASHAPAAREAIDYFVARVRREIAGLAATIGGVDAIVFAGGIGEHAFRVREQILGDMGWLGVGLDRDANARNAQTVSLPDSRVAVLVIPTDEDRMIAEHTAEILGLIHSAADSTRLTD

SEQ ID NO: 9568 - protein, 474 aa, Bradyrhizobium sp. BTAi1
MTQTIRNKSWAELEVGDKAAIERTCAVQDLILFAHVSGNTNPMMLPDGSANHGSKEVIAPSMWVGSLISAVLGNVMPGPGTLYRSQSLEFKKRVHVGDRLRITVTCCEKREAPVALFRAEITDQAGDLVCAGLAEIDAPTVSIETPVRELPALIVDHADHFAKLVDLAAQLPPLKTVIVCPEDRNSLGGALLSTERGLIHPVLIGDPDRISAAAREIEADISGWALVPETDHRAAAARAVAMVLAGDAHAVMKGAIHSDELLAAVVKKDGGLRTNGRISHVFALDVPTLDEILFISDAAINIAPDLMAKVDIVQNAIDLARACGLDRPRVGVLSAVETINPNIHSTLDAAVLSKMAERGQIKGGIVDGPLAMDNAIDMEAAKTKGIASLVAGHANVLIVPNLEAGNMLAKELTFIARAEAAGLVIGARVPVMLTSRADNDRARLASCALAQLYNHWRREGRAFAGSAQAKAAAE

SEQ ID NO: 9569 - protein, 438 aa, Bradyrhizobium sp. BTAi1
MTKTANPARRNGLSRRQLLKAGAGTAALLAAAKLNLPGGAFAQGAGPEVTSAKLGFIALSDAGPLFVAKDKGMFAKYGMPDVDVQKQASWGTTRDNLVLGSEGNGIDGAHILTPMPYLISSGKVTQNNQPTPMYILARLNLDAQCISVAKEYADLKLGLDTAPFKAALEKKKASGKAVKAAMTFPGGTHDLWIRYWLAAGGIDPDKDIETIVVPPPQMVANMKVGTMDCFCVGEPWNAQLVNQGIGYTAVTTGEIWNKHPEKSFAMRSAFVDKYPKAAKALTMAVMEAQQWCDKMENKQELATIMAKRQWINCPVEDVAGRSAGKFDYGTGKVVENSPHIMKYWSDFASYPFQSHDLWFITEDIRWGKYEAGFDAKALIAKVNREDIWREAAKDMNVAASEIPTSKSRGKETFFDGKVFDPEDPAAYLKSLSIKRVDA

SEQ ID NO: 9570 - protein, 141 aa, Bradyrhizobium sp. BTAi1
MTPSQITLVQESFAKVAPISDQAAVLFYDRLFEVAPPVRAMFPEDLTEQRKKLMGTLAVVVGGLSNLDTVLPAASALAKRHVNYGAKPEHYPVVGAALLWTLEKGLGEAWTPEVAEAWTAAYGTLSGYMISEAYGNAQAAE

SEQ ID NO: 9571 - protein, 337 aa, Bradyrhizobium sp. BTAi1
MSLTFAIPNELAADYRFAPGQYLTLKTMLGGEEIRRSYSICSGPDDNEIRIAVKRVDGGAFSSFVTDELKRGDEIDVMTPTGRFGVALQPEAARTHVGFAAGSGITPILSIVKAVLAREPHSRFFLFYGNRTTAGMLFREQLEELKDRFLERFSVFHVISGEEQDLPILHGRLDGEKVRMLLRSLVPAESVDHVFICGPTGMSEDIEVACRAMGIADERVHIERFVSGSGGKPRPKMVVPDSAPPKAIAALIIDGKRREVPVADGEAILDAALRAGVDLPFACKGGMCSTCRAKLVEGNAEMELNYSLEPWELQAGFVLTCQARPVTERVVVDYDHM

SEQ ID NO: 9572 - protein, 316 aa, Bradyrhizobium sp. BTAi1
METHPLTLKVLSIAAETPHVRSLVFGVEGGAVPDWQAGAHIRVALPNGGDRPYSLLALPELPAGALALGVLREAASTGGSHYMHALRAGDVVKASAPVNNFPLHAGAAPALLFAGGIGITPILSMAAELSARGHPFRLHYAGRAPGGLAFLPQLQAICGRSLSIHYDSDESRLDIAAALAAAALGSHVYVCGPAGMIEAVKAAALTKGVPPDRIHFELFRAETPSSPDRPFEVELRSTGQVVTVAADQTIIQALEAAGLDVLYDCQRGDCGICQCGVIAGVPDHRDVILSDEEKRSNKLMQICVSRAKSDRLVLDL

SEQ ID NO: 9573 - protein, 425 aa, Bradyrhizobium sp. BTAi1
MRDGSTRIQEIRMTAQSVAAPADEPRLVRSLTLTHAVLYGMGVTIGAGIYVLVGIAAGRSGMHAPLAFIGAALVMSFSAASFAELGTRMPVSASEAAYVQAAFQRKWLSLGTGLLVVLTATVSAATVSRGSAGYVAVFVSAPAPLIVCGVVLAMGAVACLATVQSVTLAGIMTLVEVSGLVLIIVAGLLYGNGVITRLPEVWPATSDVGAWIGIAGTTLIAVFAFIGFEHLVNVAEELKNPSRTLPWALFLTLGLTALIYALVVWIAVTAVPPPELANSPAPLALVFKNLTGLPLPTMSAIAVTATLNGIIVHMIMIGRVIYGLADQGALPKVLARVNSRTKTPVLATAIGIGAILLLALAVPLAGLADLTARLTLVVFALVNIALIRIKSAGEPPPAGAFVCPKWVPFAGLLSSALLIVLDSIS

SEQ ID NO: 9574 - protein, 387 aa, Bradyrhizobium sp. BTAi1
MISQNKVFADLPVTIFEQMSQLARDNNAINLGQGFPDDPGPEDIRRAAADAVLNGYNQYPSMMGLPELRQAIAAHYKHWHKLDLDPMSEVMVTSGGTEALTSAILSVVEPGDEVICFQPVYDSYLPIIRQAGGIPRLVRLEPPHWRLSEEMLRQAFSPKTKAVLFNNPLNPAAVVYPREDLELLARFCQEFDAVAICDEVWEHVVFDGREHIPLITIPGMRDRTIKVGSAGKIFSLTGWKIGFVCAAPQLLRVAAKVHQFLTFTTAPNLQMAVAYGLGKSDDYFLDMRAELARSRDRLTAGLERLGFPVLKAQGTYFLTVDLSPLGLNETDEQFCRRIVHDYKVAAIPVSAFYEKDAVTSVVRFCFAKKDATLDTALERLSDAIHRR

SEQ ID NO: 9575 - protein, 395 aa, Bradyrhizobium sp. BTAi1
MASSDPVVILSAARTPLGRFIGELSPLSAHKLGAHVIRAAIERATIAPDAVQEIFMGNVLPAGQGQAPARQAARGAGLPDATGATTINKVCGSGMKATMLAHDIITAGSAEIVVSGGMESMSNAPYLLTKARSGYRAGHDRILDHMLLDGLEDAYESGRSMGDFGEATAEAYQFSRADQDAYAIETLTRARQAVESGAFKAEIAPITLTEKAGPRLIANDEHPLKVDPAKIPTLKPAFRKDGTITPAASSANADGAAALVLATRSRAVRDGLPVIAEIKGHATHSQEPQWFTTAPIPAIRKLLDKVGWRVEDVDLFEINEAFAVVAMAAQRDLGIPRDRLNVNGGACALGHPIGATGARLIVTLLHAMEARGLKRGVASLCIGGGEATAIAVERP

SEQ ID NO: 9576 - protein, 356 aa, Bradyrhizobium sp. BTAi1
MSMSVGTKAVVTDVQVHKVRFEPVGIEMEVEEGETVLDAAFRQGISLMHGCKEGQCGSCKSKLVDGDIELLKYSTFALPDYESENGHVLLCRTHAYSDVSFELLNYDEDMLRRSIAVKAFRGRVAAITALTSDIRLLEIEIDKPMKFWAGQYVDLTIDDGRITRAFSMANAPGEGTRLSFIIKKYPNGAFSAQLDGGLGVGDVVMAKGPYGTCFRREERPGPMLLIGGGSGMSPLWSILADHIASGEQRPVRFFYGARTRADLFYLDELAAIGRQLNDFKFVPALSHASPEDGWDGETGFVHEVVARHLKQENLAGAIDAYACGPTPMIDAVLPVLQINGVEPDHIYFDKFTPAVR

SEQ ID NO: 9577 - protein, 413 aa, Bradyrhizobium sp. BTAi1
MSIEAAGSPAESQRLLRSLSLTQAVLYGLGVTIGAGIYVLVGIAAARSGMHAPLAFIGAALVMAFSAASFAELGTRMPVSASEAAYVQAAFGRKWLSLGVGLLVVATATISAATISVGSSGYVAVFLPISAPWIISGVVLAMGVVACLATAQSVTFAGIMTVVEVGGLVLIIVTGLGHGTDVVTRLPEMWPPTRDTEAWIGLGGTALIAVFSFIGFEHVVNIAEEMKEPSRTLPRALFLTLGLTALIYALVVWIAVTAVPPQELARSSAPLALVFERLTGLPLVTMSAIAIVATLNGIIVHMIMIGRVIYGLADQGNLPRVFARLNSVTQTPLLATAFGIGAILVLSLAVPLGGLADLTARFTLVVFAIVNIALIRIKGRRQPAPSGAFICPMWVPCFGLASSLLLLVVDLVA

SEQ ID NO: 9578 - protein, 647 aa, Bradyrhizobium sp. BTAi1
MCGLAGVWCWDTPIDRPAIARALGLLDHRGPDGNGLWISEDGKVALGHTRLSIIDLVTGEQPLSHPNGKLQLVVNGEFYDYERIRNDLTARGARFRTRSDSEIALWLYDESGTRCFADLNGEFAFILWDAGAGRLIAARDRFGIKPLFYAVQSGRILLASEIKALLAMGVPAQWDVEGYLDAAHVLQNGTLFSGIRQVPPGCYLSATRHGITIQRYWDAPFASALSPIEDEHGALDQIRAQMSRATRWRMRADVPVAAYLSGGIDSMSVLALAAATTNRAPDAFTIAYEDAAYDESHRAESFATQLGTRFHRVPVNGAALADHFATSLWHSETACFNPHGTAKFILSKAVRDAGYKVVLTGEGADEIFAGYAPSRVDALGGSAAMQAMIATRDRATYAVTPQHTATDQLPLIAQRFGTVPTWLRHQMAHLLGVADLLRDDLRTAWSTDRPLAAFLKYLEPWTVPALDTVDLGIALMLKTTLPNYVLVTLGDRMEMAHSIEGRLPFLDHQVVELAWRLPSHLKIRDGVEKFALRQAMRNLLPADAVDRQKHPFIAPPTATDAKHPFGAMIRDVLHGPALAALPFFEPRKVRKLIDRLTSLPPEDRLRLEPLLVEIASLCIIHDLFKMSSSSDPSAQLSIQMPSTEALA

SEQ ID NO: 9579 - protein, 140 aa, Bradyrhizobium sp. BTAi1
MLTAEEIACVRSSFDMVFANATDMTTTFYQRLFELAPECRSMFPDNMDVLKRDFIATLAVLVGSLDRMTGLLSSTDILGRNHARYGVRPEHYPLVGEALLWSLAKGLGPQWTAEVEQAWRKVYEIISQRMIAISAGPRLP

SEQ ID NO: 9580 - protein, 69 aa, Bradyrhizobium sp. BTAi1
MPSYKGSVKWFNPTKGYGFIKPAGGDKDVFVHISAVERAGLTTLNENQAIEYDLVESRGKTSAENLKLS

SEQ ID NO: 9581 - protein, 769 aa, Bradyrhizobium sp. BTAi1
MSSYSEDLRSAALAYHRLPRPGKLEIQASKPLANQRDLALAYSPGVAAACTEIANNPAEAASLTARANLVAVVSNGTAVLGLGNIGPLASKPVMEGKAVLFKKFAGIDVFDIEIAADTIDRVVETVAALEPTFGGINLEDIKGPECFEIEARLKERMKIPVFHDDQHGTAIIVGAAIKNALSLAGKQLSEVKIVTSGAGAAAIACLNLLVSMGAQRKNIWVCDIDGVVHEGRNTLMDPWKAVYAQKTDKRTLAEVIGGADIFLGLSAGGVLKPELLKQMAEKPLIMALANPNPEIMPEEARAARPDAMICTGRSDFPNQVNNVLCFPFIFRGALDVGATAINEAMKQAAVDAIAQLAQDPPSDAVSRGFDTGETQGFGPGSLIPSPFDPRLILRIAPAVAKAAMDSGVATRPIKNFDEYTALLERFAFRSGLIMKPVFAKAKTQPVRVIYAEGEDERVLRATQVVLEEKLARPILVGRPSVVEARIKRFGLSIKAGQDFDLINPEDDPRYRSYVQSYIEVAGRRGVTPDAARTVVRTNATVIAALAVVRGEADAMICGVEGRYMSHLRHVREIIGFMPGVSDFAALALTITSKGAYFIGDTQVRPNPTAEELAEMASLAANHVTRFNIKPKIAFVSHSDFGGYDTESSRKMRQATALLKQHRPDLEADGEMQGDTALSATARKAILPHSDLEGSANVLIMPNLDAANVAYQMIKVLADAVPVGPILIGPARPAHILTPSVTARGILNMTAVAAVEAQERAGRAQPTLFA

SEQ ID NO: 9582 - protein, 387 aa, Bradyrhizobium sp. BTAi1
MADRVYLDWNATTPLRPEARAAMIAAMDHLGNPSSVHAEGRKARRLVEDAREVIARGLGAMARRVVFTSGGTEANVLALSPGLKAPAGRIERLLVSAVEHASVLAGGRFDPAKIQSIPVDPSGVVDLGRLDLLLAGGPPALVSVMAANNETGVLQPVSQVAELVRRAGGVLHVDAIQAFGKIPLDINQMGADLVSLSAHKIGGPKGVGALVLGSGVEEPIPVLRGGGQERGRRAGTENVLGIAGFGAAAGAALVGLESDQARLGELRDRLEAGLRQVAEVTVFSCGVPRLPNTTLFTADRMKAETAVIGFDLEGIAVSSGSACSSGKVQPSHVLEAMGVGPAVAQGAVRLSLGWSTTEADVDRCLQAWRKLSLTLLKRSDETVLERF

SEQ ID NO: 9583 - protein, 250 aa, Bradyrhizobium sp. BTAi1
MALLEIKNLQVRVEEREILHGLTLTIDAGKVHAIMGPNGSGKSTLSHVIAGKPGYEVTGGEILFKGEDLLAMAPDERAAKGVFLAFQYPVEIPGVATMTFLRTALNAQRKARGEEEYSTPDFLKKVREISKQLNIPQDMLKRGVNVGFSGGEKKRNEVLQMALFQPSLCILDEMDSGLDIDALRIAADGVNALRSPERSMIVITHYQRLLNYIVPDVVHVMSKGRVVKSGGKELALELEASGYAQFEDAA

SEQ ID NO: 9584 - protein, 332 aa, Bradyrhizobium sp. BTAi1
MTTRTATNKNKILVTESFSAKGRALLTARDDVEMIEFPNMISAADFSALLKSHAPVHGVALGATRFGEPELLAAGDMKVVTRIGVGFDAVDVPALSKHKVPLMVAGTANSPSVAEQALFMMLTLAKRANEMHAMVRDGTWGSRLGVLPFDLYGKTVLIIGFGRIGTRTAKRCQAMEMQVLVYDPYKPAADITAAGCEPVADLDAALPRADFVSIHCPKTPETIGLFNAARLRLMKPTAYLINTARGGLIDEAALYDALSSRRLAGAGLDVFEQEPPPVGHALHALPNVIMAPHVAGVTREAVDRMSEQTARNILSVLDGDPIRQNVINQDVL

SEQ ID NO: 9585 - protein, 604 aa, Bradyrhizobium sp. BTAi1
MAAGASSAIMKIEPLSVGFNDEQKRYLEGLAAGLKVNLAGRAQTATAPLAEPSGPDAIHIKAQDKVLAAGRKLADQEKVKREQHPFDAYPRLKQQAHSNAAPSAADNFRWRYFGLFHVAPAQDSYMCRLRIPNGILKHWQLTGLADLADQLCGSYSHVTTRANLQLREIPPKHAVMLLEGLSDLGLTARGSGADNIRNVTGTPTAGIDPQELLDTRAYAREWHFHILNDRSLYGLPRKFNVAFDGAGRIAALEDTNDIAFSAVEVKDGFGVAPGVWFRLGLGGITGHKDFAKSTGIIVEPERATEVADAIVRLFIETGDRTNRLKARLKYVLDSMGHDKFMEAVESRLGRKLARVADEAIKPRPEADRMAHIGVHPQKQQGLNWIGVVLPLGKLTTDQMRALARIAADLGDGEIRLTVWQNLLLPGVRDENVAMACAAIEQIGLSTKASHIRAGLIACTGNSGCKFAASNTKRHAAEIGDWCESRVEVDTPLNIHLTGCHHSCAQHYISDIGMIGAKVPVGDGDETVEGYHLFAGGGFGPQADIGREVYRDLKAEDAPRTVEKLLKAYLAHRLSPDETFLSFARRHDGETLRKLADAQTSEVAA

SEQ ID NO: 9586 - protein, 293 aa, Bradyrhizobium sp. BTAi1
MTRVAFIGLGRMGHGMAGRYLDAGYSVAVWNRSEAKAEDLLARGARWSTSPADAAIDADAVVTMLADDDASRAVWLGPDGAAATMRVGTIAIECSTVSRDHALRLSRELNARGVTYIDCPVTGLPDAAAAGKLTLLVGADAADLARARPFLAPIGSTIRHFGAVGTGTVYKLINNLLGAMQIAGLAEGLAIAEQAGLDMNLVLEAIQGGVAASPQVLRHAPRMVARNFADASFTAALRHKDAAYALQLAEQLLGERPVMAQAAVDSYARAKAAMPDEDEGRMIELVSRPKDPS

SEQ ID NO: 9587 - protein, 357 aa, Bradyrhizobium sp. BTAi1
MLGSHLSIRQRGSMTKYKLEYIWLDGYKPVPNLRGKTQIKEFSSFPTLEQLPLWGFDGSSTMQAEGHSSDCVLKPVAVYPDAARTNGVLVMCEVMMPDGKTPHPSNARATILDDPDAWFGFEQEYFFYKDGRPLGFPEYGYPAPQGPYYTGVGFKNVGDVARKIVEEHLDLCLAAGINHEGINAEVAKGQWEFQVFGKGSRTAADQMWMARYLMLRLTEKYGIDIEFHCKPLGDTDWNGSGMHCNFSTKYMREVGGKEYFEKLMDAFKEARADHIAVYGPDNHMRLTGKHETASIDTFSWGVADRGASIRVPHSFVNNGYKGYLEDRRPNSQGDPYQIASQVLKTISTVPTGAKAAA

SEQ ID NO: 9588 - protein, 600 aa, Bradyrhizobium sp. BTAi1
MDASTYRVLVIGGEAAAPLLAAGGSEGGDKAEFDLSRASTIAEARRRLETASYDTILMNLASSQVAAAFPEELYALASASPVVLFNQSADGHDGAGQARLRLPLGAPATRALSAESHRHFGQLLEAVPDALIVTNQDNEVAFVNRAAHELFGKARDDFIGERVSFAVSEGAVSEIEVYRGKDVRRCELRVSRCEWEGAPAQLLLIQDVTEQKRLNEELRQSQKMEAVGVLAGGIAHDFNNLLVVMMIYAEMLREECLGDDPRLPDVMELIKAIERGRDLTRQLLAFSRKQPATPTLLDLGATLADLQKMFRRLLPSNIEISIDVEEQSWPVIADRVQVEQLIMNLALNARDAMPSGGQLTIRLANRTIQCGDEGMEPGDYVMMTVSDTGTGIPPDDLDRIFDPFFTTKVRGGGTGLGLATCYGIVKQAGGSIAVRSAIGEGTSFIVLLPRANETIQTEAAPAPPVQQARGGERILLVEDNSLAQRATAAMLTRAGYSVQSTSNGEEALRFLREHADAVDLVLSDVVMPRLSGPELARQLAVSHPDLPVLFMTGYSNDPIIADAGEHRIGGRRTIMKPFKREDLLAFISDAIERKRCAEAS

SEQ ID NO: 9589 - protein, 233 aa, Bradyrhizobium sp. BTAi1
MSALLEVKGLKSGYGRIPILFGVDLTVADGEYLGILGHNGMGKTTALRTLMGHLPTTDGSVVFAGKTITHLKPHERSRLGIGLVPQGREIFPDLSVMENLRMGLAAAPKEDRSVIDTVLQDFPRLVRLLDRRGGALSGGEQQLLALARCLCTKPKLILLDEPTEGIQPSIIEEIIETLLALKTRWKLSLIVVEQNLEFITSLSDRILHIQKGRITEELDRESLLAREGQMVPS

SEQ ID NO: 9590 - protein, 563 aa, Bradyrhizobium sp. BTAi1
MTTTTDTAATAEAGRDFIRDIVQADLDSGRHKTVVTRFPPEPNGYLHIGHAKSIGLNFGIAKEFGGRCNLRFDDTNPTKEEQEYIDSIQADVRWLGYDWGDNLFYASDYFERLYEWAEGLIKAGLAYVDDQSQEEIRLARGTLTEPGKNSPFRDRTVEENLDLFRRMKAGEFPNGARVLRAKIDMAAGNINLRDPVLYRILHAHHPRTGDTWKIYPSYDYAHGQSDAIEGVTHSICTLEFEDHRPLYEWLLDKLPVPSHPHQYEFARLNLTYTLLSKRVLTRLVQDGHVAGWNDPRMPTIAGLKRRGVPPAAVREFIKRIGIAKANSIVDVGMLEFCIREELNRTALRRMAVLRPLKVVIENYPEGQVEELEAINHPDDPSAGTRKIAFGRELYIEQDDFMENPPKKFFRLSPGTEVRLRYAYFIKCREVIKNAAGEIVELRCTYDPATKGGNAPDGRKVKATMHWLPAAQSLTAEIRIYNQLFANPSPNAADFTADLNPNSLEVLTDARIEPAIAAANSDAPMQFERQGYFVRDPDSTPDKLVFNRTIGLRDTFAKEVAKGG

SEQ ID NO: 9591 - protein, 308 aa, Bradyrhizobium sp. BTAi1
MTAEQHAGPGAETRCGFVALIGAPNVGKSTLVNALVGSKVTIVSRKVQTTRALIRGIVIEGTSQIILVDTPGIFSPKRRLDRAMVTTAWSGAHDADLVCVLLDAKKGLDDEAQAIIDKAAAVAHQKILVVNKVDLVPREKLLALVAAANEKLPFARTFMISALSGDGVDDLKQALAAMVPPGPFHYPEDQMSDAPMRHLAAEITREKIYSHLHQELPYQSTVETDSWTERKDGSIRIEQTIFVERDSQRKIVLGKGGATIKSIGAQSRKEIAEITGVPVHLFLFVKVRENWGDDPDRYREMGLEFPRE

SEQ ID NO: 9592 - protein, 499 aa, Bradyrhizobium sp. BTAi1
MQPVVELKSVTKEFHGIPALRDISFDLRPGEVHALLGENGAGKSTLTKIMAGVYEVTSGELIVNGTKVSFKTPAEALRSGIAMVFQETSLVPSLTVAQNIYLGNERFLNRLRGIYIAAQQFLQSLNFGVDPTMYVSQLGAAQKQMVEIARAVHHKARVIIFDEPTATLTPEEKHHFFALVKRLKRDGVSIIFISHALEEALSISDRITIMRDGQHVVTDDAKNFDRDKIITAMVGRTLSDELYGKAGDGHATRPYGRKMLSVQNLSMGRMVRNNSFSVYAGQITGIFGLIGSGRTETAKIISGVVKRDFFHGGEVKLEGRSVRYRVPRQAVRDGIVYVTEDRKIEGFFETKSIAENIYLNLLAADLNKSVVISYAEMMELAATWTKRLNVRAISNAARVVELSGGNQQKVVIARALVQQPKLVIFDEPTRGVDVGAIAELHHVINELADAGLAVVVISSYLPEILNLADRILVSRQGRVVEEFSADEATEEKIMYAAVH

SEQ ID NO: 9593 - protein, 281 aa, Bradyrhizobium sp. BTAi1
MDTTRALRIPDPILRPPVVESRNEVRPKRAAVERQAVTEPTVKLSGDSALFLSEGVAGLNVGAHFLDRLSNAERQRIAAAGRDVVVPLGGTVFNQGDAHDGIFIIRRGQVRVYYTAPSGREVTLAYWTPGHFIGGPEISGGGVHMWSGVAVEPCEITALPGASVQTLLAEMPSFALALIDGLVAKGKCYSSMAQMLGTRSVIERLAQHLLNLAELHGVRDGETVLINRRITHDQIAAMVGSTRQWVTMMLKRFQTKRIIAIEGSSIRIRRVDLLETMLSKD

SEQ ID NO: 9594 - protein, 322 aa, Bradyrhizobium sp. BTAi1
MVPNDMPDKVLIYSRLPKSMTQRFADRFDLLDSGGRPAHEVFPAEEVARVRALITAGATPLGAANMDRLPSLGAIVCYGTGYDGVDLKAAAARNIAVGHSPGANAAAVADVAVMLMLATTRRLVVADRYVRDGSWAEAKPSPLMKPPPSLGGCKVGVYGMGAIGRKIAARVAAFETDIGYFSRTRYDDLPYRYFQSLDALAEWCTVLMIAVRAGAETTHAVNADLLKKLGPDGHVVNISRGSVIDQAALLSALKDGSIAGAGLDVFETEPHVPDELTAQPNLVVTPHIGGNTHEAHVAMQACVVANLAAFFAGEKLPYQVKS

SEQ ID NO: 9595 - protein, 395 aa, Bradyrhizobium sp. BTAi1
MTEAVIVSTARTPIGKAYKGALNHTGGATLLGHAISAALSRSGVDGAEVEDVVMGCAMQQGTTGSNIARKALLRAGLPVSVAATTIDRQCASGLQAIALAARSVLFDGVTVAIAGGGESISLVQNDKMNAFHAVDPELHAMKADAYIAMLDTAEVVAERYGISRERQDEYSLESQRRTAAAQQAGRFNDELAPISTTMAVADKATGTISYQPVTLSTDEGPRPDTTAAGLAGLKPAKGPGFTVSAGNASQLSDGASAAVIMSDTLAAQKGLKPLGIFRGFVSAGCEPNEMGIGPVLAVPRLLARHGLKVDDIDLWELNEAFAVQVVYCRDKLGIDPERLNVNGGSIALGHPYGMTGARLVGHALIEGRRRKAKYAVVTMCVGGGMGAAGLLEIVH

SEQ ID NO: 9596 - protein, 399 aa, Bradyrhizobium sp. BTAi1
MASRTIFVAGAGIGGLTAALALATKGFRVVVLEKAERLEEVGAGLQLSPNASRILIDLGLGPRLASRVVVPEAVSILSARAGGEIARLPLGAAASEAAGAPYWVVHRADLQAALAAEAMAHPDVELRLGCQFEDVAAHAKGLTVVHRRGDERRQDVALALIGADGVWSAVRHHLFPQVRAEFSGLIAWRGTLDARQLPRDHASARVQLWMGPGAHLVAYPISAGRQVNVVAVVPGTWNRPGWSAEGDPAELKAAFGPPRWPATARLLLNAVDGWRKWALFGVPEGIAWTAGNVALLGDAAHAMLPFAAQGAGMAIEDAAVLAKTLSEARPDGPGAIEGALQRYARLRRPRVGRVQRTARQQGRVYHMTGPLALARDLSIKALGPQRLSARQSWIYDWRL

SEQ ID NO: 9597 - protein, 461 aa, Bradyrhizobium sp. BTAi1
MSIFDDPFDADSRVNAGCICGQHRSPAEHEHALRALRCEPVVESAEKRYENVVASAVLRAVFPQAATRRAFLKSVGAATALAAVSQFFPLKTATEAFAEAGAPEKKDLKVGFIPITCATPIIMAAPLGFYAKAGLNVEVVKTAGWAVIRDKTINKEYDASHMLAPMPIAISLGLGAQPIPFTVPAIENINGQGIVLSMKHKDKRDPKDWKGLKFAIPFDYSMHNYLLRYYLAEHGIDPDTDVQLRSVPPPEMVANLRADNIDGFLAPDNICQRAIYDGVGFLHILSKEIWDGHPCCSFAASREFITSAPNSFAALTRAIVDATAYASKADNRKQIAEAIAPANYINAPVTVLEQVLTGTYADGLGGVKTDPKRVDFDPFPWQSFAVWMLTQMKRWGQIKGDVDYKAVAEQIYLATDTRKVMTEMGLTPPKDSYKSFSVMGKPFDPTKPDDYVASFKIKKAS

SEQ ID NO: 9598 - protein, 230 aa, Bradyrhizobium sp. BTAi1
MPAIPPTKPYRIGRSKTGLGLFATKPIKKGTKIIRYFGPLLDSKKADEDAIENKYLFELDKRWTIDGSIRENVARYINHSCKPNAESDVKPRKKKIFIRAIKDIEPGEEINYDYGTDYFKAYLKPIGCKCEACEKKRAKKKAEARADRVLQKAKDERKAKKKAEKLTKDTARDPAKDKAKQRSKAKASTKAGGDAQARGKAKSRRPVPTVGKRVKTRSTVKTLTSRAKAA

SEQ ID NO: 9599 - protein, 656 aa, Bradyrhizobium sp. BTAi1
MCGIAGLFRPGGADDSALAGIVGRMTAALAHRGPDASGSWVSGRQGIALGQRRLAILDLSEAGAQPMHSACGRYTITFNGEIYNHLDLRAELEDAAAAPNWRGHSDTETLLAAIRQWGLVPALQRLIGMFAFALWDAETRQLILARDRFGEKPLFYGWSGADLVFGSELKALAAHPGWAPSLDRAALTDFMRYSYVPAPATIWRDVRKLPPASFVAFVADAGPGTSPTAQSYWSLRDTVVAAQGDRISGESEAIARLEQLLSTAVKRQCLSDVPLGAFLSGGVDSSTIVALMQAQASQPVRTFSIGFAEGGYNEAEDARKVAQHLGTDHTELYVDARTAMEVVPKLPRIYDEPFADSSQIPTHLVAQLARRHVTVALSGDAGDELFGGYNRHVWGSALQARLGRVPMPLRRAIGAALGAIAPEPADTLLNMLQPVLPARLRVRHAGDQVAKLARIVAADGFDGLYRTLCSIDQDPRATVVAGEERASWAASEMKQLRGQISLLDRMTLADSLSYLSDDILQKVDRAAMAVALETRVPFLDRDVVEFSTRVPASMKVRDGRGKWLVRQVLYRHVPADMIDRPKTGFSIPLDAWLRGPLKSWAGDLLSPARLKRQGLFAPTRVTRMFEEHLSRRHNHAYWLWNVLMAEAWYDEWGRAG

SEQ ID NO: 9600 - protein, 175 aa, Bradyrhizobium sp. BTAi1
MTKAQLKPAAFLDRDGVINHDDNYIGSPERIRWMPNVAPAIRRLNDSGYHVFLFTNQSGVARGLFTEDDVLSLHDWMRTELTAQGAVIDDIRYCPYHTEGTVERYLREHPWRKPAPGMILDLMQHWPVQREGSFVIGDRASDIAAAEAAGLPGFLFAGGDLDAFVADIIAQTSRR

SEQ ID NO: 9601 - protein, 243 aa, Bradyrhizobium sp. BTAi1
MTEEKKASGRAAGGGKLSVLRQHPIFRELEPDALDQLCRYAKPTSLKRGATIFSKGDPGSSLYAVISGTVKISVSSPDGRNAILNLIGPGEIFGEVAVLDGGERTADATASTNCEILVIDRREFLPFVKQQPVLAMKFIELLCDRLRWTSDQVEQVILQDLPRRLASALLGLTEKRKLDPSSRTIAITQQEISEMVGMTRESINKQLRSWAARDWVRLEHGAIVLLNPEPLRGLAEAGQDDDQ

SEQ ID NO: 9602 - protein, 324 aa, Bradyrhizobium sp. BTAi1
MTHVDKASPSRVAVLGAPIDLGASVRGTLMGPAALRTAGLVPLLESLGLDVTDYGDVGIADMTDLSDDPPAKAKHYRQIQRWSRVLARRSHELAHTGAIPVFLGGDHSLSMGSVNGVARHCRDVGQELFVLWLDAHADYNTPETTITANMHGMSAAFLCGEPGLDGLLGGDVRATIPTEHLELFGIRSIDKAEKELLRMRRISVADMRAIDEFGVGVLTRRILDKVRARNGVLHVSFDVDFLDPEVAPGVGTTVPGGATYREAHLIMELLHDSGLVRSVDIVELNPFLDERGKTARVAVELIGSLFGQQITDRPTPTNAIVPDL

SEQ ID NO: 9603 - protein, 109 aa, Bradyrhizobium sp. BTAi1
MSTSERIQKLIDSNDIVLFMKGVPAAPQCGFSAAVAQILAKLDVSYESVNVLADPFIREGIKEFSNWPTIPQLYVKGEFVGGCDIVREMFQAGELATLLADKGIKAPAS

SEQ ID NO: 9604 - protein, 404 aa, Bradyrhizobium sp. BTAi1
MRPVYLDNNATTRVAPAVVAAMLPFFTDQFGNASSSHAFGSEVAGAVRQARKSLQALLGAAFDHEIVFTSGGTESDNTALLSALETQDGRDEIITTAVEHPAILSLVEHLRDRRGVTVHLIGVDAAGRLDLDAYKRALGPRTAIASVMWANNETGTLFPIPELARLAHDAGALFHTDAVQAVGKIAIDLKSAGVDMLSLSGHKLHGPKGIGALYVRKGTPFAPLVRGGPQERRRRGGTENVPAIIGLGKAAELAAHHLADEQGRVRALRDRLEQGILQGAGHCAVLGDPAQRLPNTANIAFQHVEGEPIVMRLNQAGIAASLGSACASGSMEPSHVLRAMNVATDLLRGAVRFSLSRDTTDDDIDRVLQVLPDIVGRLRETSPAWLQHHPSPSADALRPTELTQ

SEQ ID NO: 9605 - protein, 253 aa, Bradyrhizobium sp. BTAi1
MTALLEIKGLHAEIAGGRKIIQGLDLTVNKGEIHAIMGPNGAGKSTLSYVLAGKPGYEITAGEVYLNGEDLLAMEANERAAKGVFLAFQYPLEIPGVATLTFLRAAFNAQRKARGEEELSSPDLIKRVREIAKTLNIDAEMLKRPLNVGFSGGEKKRNETLQMALLQPSLCVLDETDSGLDIDALKVVANGVNALRSGERGMIVITHYQRLLDYIVPDIVHVFAAGRIVRTGGADLARELEATGYGQYQSEAA

SEQ ID NO: 9606 - protein, 563 aa, Bradyrhizobium sp. BTAi1
MTLSTRNEDGQHWPLLRSLAGWRISSLPADLAAGLTLAAIAIPEQMATAKLGGFTPETGFFAFMAGSLGFALFGANRFLSCGADSTITPIFAAGLALLAATGTPEYGSLAAALALLVGVLLVLAGGFRLGGIANLLSVPVTVGFLAGIAVHIIVSQLPSVLGLPSPGGPTLARIAGLAGELGKTNIHTLIIGFGVLATVMVCERISARIPGALIALVASTLYVASAGLEAKGVHVIGEISGTIPMPSMPLIGAEQWAKLVPLAFLIAVVVMVQTSATTRSFPSAPDHPADVDRDFLGAGAGSLLAGLFGAFPVNASPPRTGIVVETGGRSQVAGLLAAIIVLLLVLFGARLLAHVPEAALGGVLLFVAQRIIRVAQIARVYRASKGEFLLIMATAAAIVVLPIEQGVALGITLSLLHGIWSTTRAHLITFERVPDTTIWWPAHPHIRGEQLSDIAVIGFQAPLSFLNAATFRADLQHLLQRRSPRLLVLEASAMVEIDYTAAQALHEVIEQCNKDGIVFAVARLESLRAQEAFERFGLYDVLPRDRVFRSVDLALRKLRGTTG

SEQ ID NO: 9607 - protein, 393 aa, Bradyrhizobium sp. BTAi1
MNAPLKQHLIDPEICIRCNTCEETCPEDAITHDNNNYVVDATKCNFCMDCIQPCPTGSIDNWRIVAQAYSIDDQYSWNELPKQAELASGAEGEAVDAEVLALIDAAHTGAGGKSVAPASAAKPAINLYNRDAAAVATVTGNYRLTHDESDVDVHHVILDFADQPFPVLEGQSIGIVPPGLDADGKPHRIRLYSIASPRHGERPNTNNLALTVKREPNGVCSNYICDLKKGDKVQVTGPFGATFLMPNDPAANIIMICTGTGSAPFRGFTEWRRRAMPGASGRMMLFFGARRPQDLPYFGPLQKVPESLLRKHFAYSRVPGEKKVYVQDLLRREEAAVSGLLASAATHIYVCGLKGMEQGVDAALDDICRGSELRWHELRSQMRAEGRYHVETY

SEQ ID NO: 9608 - protein, 66 aa, Bradyrhizobium sp. BTAi1
MAKGTVKWFNPTKGYGFIQPAAGGKDIFVHISAVQKAGLTTLNEGQTIEYEEIANRGRSSAENLKV

SEQ ID NO: 9609 - protein, 239 aa, Bradyrhizobium sp. BTAi1
MAAIDRSLVAHLPLFTGLSAEDLTEVLREARSIRVPRNAAVFEQGADATSFFLLLHGHVRASKTTPTGDQIVVRYVVPGDTFGVAPAIGLQHYPATATAVDDSIVLAWPSAAWPRLVARFPSLGANTLQTVGQRLQETHARVIEMSTQQVEQRIAHALLRLANQAGRKLDRGVQIDFPISRQDIAQMTGTTLHTVSRILSGWEQLGLVESGRQKIVLREPHKIVLLAEQSAGDTTASRP

SEQ ID NO: 9610 - protein, 375 aa, Bradyrhizobium sp. BTAi1
MKIAVAKEIDPLEPRVAASPDTVKKFKALGAEVVIEPGAGIKSGVPDAEFTAAGATVSADALKDADIIIKVKRPEASELANYRRGALVFAIMDPYGNDAALKAMADAGIASFAMELMPRITRAQVMDVLSSQANLAGYRAVIEGAEAFGRAFPMMMTAAGTVPATKVFVMGVGVAGLQAIATARRLGAIVSATDVRPATKEQVESLGAKFLAVEDEEFKNAQTAGGYAKEMSKEYQAKQAALTAEHIKKQDVIITTALIPGRPAPRLVTMEMVKSMRPGSVLVDLAVERGGNVEGVKLGETVEIDGVKIIGFPNLAGRVAASASGLYARNLFAFIETMIDKKEKTLAVNWDDELVKATALTKDGAIIHPNFQPKA

SEQ ID NO: 9611 - protein, 638 aa, Bradyrhizobium sp. BTAi1
MNANLRNFALWVIIVLLLLALFTLFQNPGQRASSQDISFSQLLSEVDQGNVRDVVIQGPEIHGTFKNGSSFQTYAPSDPNLVKRLYDAKVSITAKPPGDNVPWFVSLLVSWLPFIALIGVWIFLSRQMQGGAGKAMGFGKSRAKMLTEAHGRVTFEDVAGVDEAKQDLQEIVEFLRDPGKFQRLGGRIPRGVLLVGPPGTGKTLIARAVAGEANVPFFTISGSDFVEMFVGVGASRVRDMFEQAKKNAPCIIFIDEIDAVGRHRGAGLGGGNDEREQTLNQLLVEMDGFEANEGVILIAATNRPDVLDPALMRPGRFDRQVVVSNPDIIGREQILKVHVRKVPLAPDVNLKTIARGTPGFSGADLMNLVNEAALTAARRNKRMVTQAEFEEAKDKVLMGAERRSMVMTEEEKMLTAYHEAGHAIVGLNVPSHDPIHKATIIPRGRALGMVQSLPEADRHSHTREWCVSKLAMMFGGREAEVQKFGPEKVTNGATGDIQQATNLARAMVMEWGMSDKLGRVRYQSNEQEVFLGHSVARSTNISDDTARLIDSEIRGLIEAGEQEARRIITEKREDWEAIAQALLEYETLTGEEILDLLKGKKPNRESAIEPSTPRASAVPPAGKPRPRPDPGLEPQPQA

SEQ ID NO: 9612 - protein, 619 aa, Bradyrhizobium sp. BTAi1
MSAVERLDERQSVVPPGQDPVGDAAAAVEALIEPTTPVRRSKLRPLLALAPYIARYRGRALLALISLTIAALTTLLVPVAVRRMIDFGFTPKGIELINSYFSVMIAVVAVLALASAARYYLVMTIGERIVADIRRDVFAHLMSLSPSFFDSARSGELVSRLTVDTTQIKSAAGASVSIALRNLLLFVGATGMMVFTSPKLSGFVLLAIPLIVMPLVAFGRWVRRLSRNAQDTLADASAYASELVGAIRTVQAYTSEKLAAGRFGGEVEQAYEAARVSTQARGVLTAIIIFIVFSSVVAILWVGSHDVLTGNISAGRLGQFVLYAAFAAAGLGQLSEVWGEVSAASGAAERLFELLHVQPDIKAPAHPAALPEPARGDISFDRVSFAYPSRRDVRVLEDVSFAIRAGEKVAIVGPSGAGKSTLFHLLLRFYDPASGAISVDGVPVRAADPRKVRERIALVPQESVVFAASARENIRFGRPEASDAEVERAADLAHASEFIRRLPEGFDTPLGERGVTLSGGQRQRIAIARAILRDAPLLLLDEATSALDAESETLVQTALEGLMKDRTTLVIAHRLATVLSCDRILVMDRGRIVEQGTHSSLVAANGLYARLARLQFEGV

SEQ ID NO: 9613 - protein, 551 aa, Bradyrhizobium sp. BTAi1
MYAYDDIDRTLVNERVAEFRDQVKRRLSGELTEDEFKILRLQNGVYLQLHAYMYRIAIPYGTLSSEQLRRLAHVARRYDRGYGHFTTRQNIQFNWIKLAELPDAMADLAEVGIQSMQTSGNNMRNVTSDQWAGVAPGEVEDPRIWAELLRQFTTLHPEFSFLPRKFKIAITASAHDRAAIKIHDIGLRLLKNEQGETGFEVLVGGGLGRSPFIAKTIKPFVHGHDILSYVEAILRVYNQYGRRDNIYKARIKILVHELGIETFAAEVEEEWQQIRDGVLKLDDGIVEDIRSRFFYPAYETLPHMPDELRQAAHDPKFEAWRKNSVVAHKVQGYAIVTVSLKPIGKPPGDATADQMDALADIADKYSFGEIRVGHEQNLALPHVRKRDLPAVWKALDAIGLAIPNVNLVSDIIACPGLDYCSLANARSIPIAQEITRRFANHDTANLIGRLHINISGCINACGHHHVGHIGILGVEKNNEEFYQITIGGRADEGAVLGTLIGPAVPYAEVADVVEDIVEAYLALRASPEELFVDTVARLGVEPFRERVYATR

SEQ ID NO: 9614 - protein, 395 aa, Bradyrhizobium sp. BTAi1
MTDAVIVSTARTPIGKAYRGALNATGGATLLGHAIGEAVKRAKVDPAEVEDVVMGAALQQGSTGGNIARKALLRAGLPVSVGGTTIDRQCASGLQAIALAARSVIFDGVEIAVGGGGESISLVQNDKMNAFQATDPALLEIKGDVYMPMIDTAEIVSKRYGISREKQDEYALESQRRTAAAQQGGKFNDELAPITTKMAVTDKATGNVSFKDITLSQDEGPRPETTAEGLAGLKAVRGDGFTITAGNASQLSDGASACVIMSDATAAKRGLQPLGIFRGFVAHGCEPDEMGIGPVFAVPRLLKRHGLTVDDIGLWELNEAFAVQVLYCRDKLGIDPDKINVNGGAISVGHPYGMSGARLTGHALIEGRRRKAKYAVVTMCVGGGMGAAGLFEVLQ

SEQ ID NO: 9615 - protein, 390 aa, Bradyrhizobium sp. BTAi1
MAEAYIVAAARTAGGRKGGRLAGWHPADLAATVLDALVERSGAAPDQVEDVIMGCVMQTGEQSTNIARNAVLASKLPESVPGTSIDRQCGSSQQALHFAAQAVMSGAMDVVIAAGVESMTRVPMGLASTLPAKNGFGHYMSPNMQSRYPNIQFSQFTGAEMMAEKYGLSKDELDEYAYNSHQRAIAATQAGHFKDEIVPLQITRADGSTDTHHIDEGIRFDVSLDGIKGVKLIAENGKLTAATASQICDGASGVMVVNERGLKSLGVKPIARVHHMTMMGGDPVIMLEAPLPATQRALQKAGMSIDDIDLYEVNEAFASVPTAWLKTTGADPERLNVNGGAIALGHPLGGSGTKLMTTLLHALKQRNKRYGLQTMCEGGGMANVTIVERL

SEQ ID NO: 9616 - protein, 569 aa, Bradyrhizobium sp. BTAi1
MNDAMQARGPDAAGLYVQGGVALGHRRLSILDLSAAAQQPMIDAAFGLGIVFNGCIYNFRELRTELQAKGYRFFSDGDTEVILKSYHAWGKGCVQRFKGMFAFALWERDSGRVVLARDRLGIKPLYYAEGAGFFRFASSMPALLAAGDVDTSLDPTALHHFFSFHAAVPAPRTILNGVKKLAPATLLTIDPDGTQHRERYWSFNVGEQRPTDRAMSQEEWSDALLDEMTVAVDRRRVADVPVGVLLSGGLDSSLLVALLSKLGHQDIRTFSIGFDAVDEHSGDEFRYSDIIARTFGTDHEQIRIGGDRALEALPNAIAAMSEPMVSHDSVAFYLLSSEVAKRVKVVQSGQGADEVFGGYSWYPGFLAANDAVHQYQNAYFDWQHGDLRRLLAPDLLGDDVSLELVERFFADHAGVSAVDKVLQIDTEIMMVDDPVKRVDNMTMAFGLEARVPFLDHEVVELAARMPAELKVTHGGKHILKEAARRCVPAEVIDRPKGYFPVPSLRYLRGPFLAYVRDVLSDEKARSRGLYQRDFIDHMLQNPEAEMSPKGHSRLWQAGLLEAWLQTHGL

SEQ ID NO: 9617 - protein, 472 aa, Bradyrhizobium sp. BTAi1
MADEGMIENRTFDEIRVGDTASMTRTLREEDIKLFALVSGDVNPTHLDADFAATDIYRRVIAHGMWGGGLISAVLGTELPGPGAVYLSQSLRFIRPVGLGDTITASVTVAEKRPEHSVVVFDCRCVNQNGEEVISGRAEVKAPKDKVRRPRIALPDVHLAEHRGYRRLVEKTTGGEAVATAVAHPCSAAAITAAVEAAEAGLITPILVGPEARIRKAAEEAGKDIAALRVVPAAHSHDAAEKAVALVRAGEARLLMKGSLHTDELMGAVVVSTTGLRTERRISHAYVMDVPDHPVPLIITDAAINIAPTLEEKADIIRNAIDLAHVLGVEEPKVAILSAVETINPAIGSTLDAAALCKMADRGQITGGILDGPLALDNAISAAAAKEKGIVSPVAGQADILVVPNLEAGNMLAKQLTFLGDASAAGIVLGARVPIILTSRADSLRTRLASCAVAVLMARTATKAAPGLPASA

SEQ ID NO: 9618 - protein, 396 aa, Bradyrhizobium sp. BTAi1
MKAIFSLNSGSSSIKFALFTLDGANNPMLSAGGKIERIGIAPSLRVRSADGDIVLERDWPDGASLSHAELLKDIFAWAAERLGDRQVIAIGHRVVHGGTEFAAPRLVDDAVLDALEKLNPLAPLHQPHNLAAIRAIAQLRPGLPQVACFDTAFHHDKPPVAARLPLPRAFHEQGIRRYGFHGLSYEYIARRLREIDPVLAAGRMIAAHLGNGASLCAMRDGKSIDTTMGFTALDGLMMGTRCGAIDPGVVLHLQTQLGMSAADVEDLLYRKSGLLGVSGISSDMRTLSDNSGPEAEEAIELFCWRVAREAGGLIASLGGLDAFVFTAGIGENHADVRRRICERLAWSGLWIDESANLGSALRICEANSPVAVLVIPTNEERMIALHTLNVVREDHS

SEQ ID NO: 9619 - protein, 621 aa, Bradyrhizobium sp. BTAi1
MTDNRNTILAVILSGLVLILWQVFYNGPQMEKQRAQAQMQAELAKKQAPAVQPEATPSATPQPNAAASGSPSAPGGAATTATGVVARDAAIAATPRVKIDTPRLSGSISLKGARIDDLAFVQYRETVDPKSPAIVLFSPSNTAEPYYAEFGWVGAPGAKVQVPDQNTVWQQDGTNALTPTTPVKLSTTNADGLTFKRTISVDEHYLFTIKDEVTNAGSAPVTLYPFGLISRHGTPHVSGYYILHEGLIGYLGEKGLQEYTYKKMDDDKAAKFDVTNGWLGITDKYWATALLPMTDARLTANYSSKLVDNQHRYQTDYVETPQTVPAGGAASVSTRLFAGAKEAGVVGINFPIGGLGGYNQQLGLNHFDLLIDWGWFYFLTKPMFLALDFFFRFFGNFGISILLVTVLVKLLFFPLANKSYASMAKMKAIQPQLQALKERYPDDRMKQQQEMMEIYKKEKINPVAGCLPVVLQIPVFFSLYKVLFVTIEMRHAPFYGWIKDLSAPDPTNLFTLFGLIPFDPTQLPLFGHYLALGIWPIIMGITMWVQMKLNPAPPDPTQAMIFNWMPIIFTFMLAGFPAGLVIYWAWNNTLSVLQQGFIMRRNGVKVELFDNIRGTFKKKAA

SEQ ID NO: 9620 - protein, 327 aa, Bradyrhizobium sp. BTAi1
MAATSSDKIDVLIYGPLRPILEKGFPDSFNVHHATTQADLEALPAEVKGRIRGVAVTFHTVKTDAAVMASLPRLEIIASFGVGYDHIAAAHAGQHGIVVTNTPDVLTEEVADVALGLLIATCREFIKADRFVRSGEWTSKPYPLSVGSLRDRTVGMVGMGRIGQAIARRLEASLVPVVYHSRNAAAGVANKHYPDLLQMAKDVDTLVVIVPGGASTNKIVNAEVLKALGPRGVVVNVARGSVIDEAALVDALKSGTILAAGLDVFEKEPAVPDELKAMDNVVLLPHIGSAAIVTRNAMDQLVVDNLKVWFAGKPPLTPVPETPVKGR

SEQ ID NO: 9621 - protein, 69 aa, Bradyrhizobium sp. BTAi1
MPQGTVKWFNGQKGFGFIQPQDGGTDVFVHISAVERAGLGGLAEGQKVNFDLKTDKMRGKVSAENLSLA

SEQ ID NO: 9622 - protein, 418 aa, Bradyrhizobium sp. BTAi1
MGRLVLKFGGTSVANIDRIRNVARHVKREVDAGHEVAVVVSAMSGKTNELVAWCTEASPMHDAREYDAVVASGEQVTSGLLAIVLQSMGIQARSWQGWQIPIKTSDAHASARIVDIDGSELIQRFQERKEVAVIAGFQGINPATNRITTLGRGGSDTSAVAIAAAIKADRCDIYTDVDGVYTTDPRVVPKAKRLDKIAFEDMLELASQGAKVLQVRSVELGMVHNMPIFVRSSFDKPEDIDPHAKQPPGTLICSEEQIMENHVVTGIAFSKDEAQISVRQIEDKPGIAASIFGPLADANINVDMIVQNVSEDGKTTDLTFTVPATDYNRARETIAAAKDKIGYQRLDTATDVAKVSVIGSGMRSHAGVAAKGFAALAARNINIRAITTSEIKFSVLIDAVYTELAVRTLHTLYGLDQA

SEQ ID NO: 9623 - protein, 392 aa, Bradyrhizobium sp. BTAi1
MSDDVVIVSAARTAVGSFNGAFANLPAHELGAVAIKAALERAGLEPGRVSEVIMGQILTAAQGQNPARQASIAAGIPVDSPAWGINQLCGSGLRSVALGYQALKNGDSDIVVAGGQESMSMAPHAQYLRGGVKMGALEFVDTMIKDGLWDAFNGYHMGNTAENVAKQYQITRAQQDEFAVASQNKAEAAQKAGRFKDEIAPVTVKSRKGDVVVDTDEYPRHGATLDSMGKLRPAFEKDGTVTAGNASGINDGAAAVVLMTAKQAAKEGKTPLARIVSWGQAGVDPKIMGTGPIPASRTALKKAGWNIADLDLIEANEAFAAQACAVNKDLGWDPAKVNVNGGAIAIGHPIGASGARVLVTLLHEMQKRDAKKGLATLCIGGGMGIALCVARD

SEQ ID NO: 9624 - protein, 402 aa, Bradyrhizobium sp. BTAi1
MRDVFICDAVRTPIGRFGGSLAKVRTDDLAATPLKALKAKHPNLDWAAVDEVFFGCANQAGEDNRNVARMALLLAGLPDSIPGQTLNRLCASGLDAVGAAGRAIRAGEVDLAIAGGVESMTRAPFVQGKATEAFSRSAEIFDTTIGWRFINPLMKQQYGVDSMPETGENVAEEFQVSRADQDAFAIRSQQRAGQAIASGYFAAEITPVSVPGGKAGPITVDKDEHPRPETTLEGLAKLKPIVRNPGTVTAGNASGVNDGAAAMILASEAAVKKHGLTPRARVLGLASAGVPPRIMGIGPVPAVRKLMERLGLKITDFDLIELNEAFASQGIACLRQLGVAEDADFVNPHGGAIALGHPLGMSGARIAMTAVHGLEVRGGKRALATMCVGVGQGVALAVEKLD

SEQ ID NO: 9625 - protein, 629 aa, Bradyrhizobium sp. BTAi1
MMAKAIGIDLGTTNSCVAVMEGNQAKVIENAEGARTTPSMVAFTDTGEVLVGQPAKRQSITNPENTIFAIKRLIGRRYDDPMTQKDKGMVPYNIVPGPNGDAWVEVRGKKYSPSQISAFILTKMKETAEAYLGTKVTEAVITVPAYFNDAQRQATKDAGRIAGLDVLRIINEPTAAALAYGLEKKGTGKIAVYDLGGGTFDISVLEVGDGVFEVKSTNGDTFLGGEDFDKRIIDYLADEFKKENGIDLRGDRLALQRLKDAAEKAKIELSSATQTEVNLPFITADQHGPKHLTIKLSRAKLEALVDDLIQKTVPPCQAALKDAGIAASQIDEVVLVGGQTRMPKVQETVQKLFGREPHKGVNPDEVVAVGAAIQAGVLQGDVKDVLLLDVTPLSLGIETLGGVMTKLIERNTTIPTKRSQVFSTAEDNQTAVTIRVFQGEREMAADNKLLGQFDLVGIPPAPRGLPQIEVTFDIDANGIVNVSAKDKASGKEQTIRIQASGGLTEADIQRMVKEAEAHAEEDKRRKELVEARNQADATIYGAEKRLQEVGNQVAPDAKTAVEQAISAAKDAMAGEDVGGIRQATEKLAQEAMRLQPTGGGTSTSSGASSAPESDVVDAEFEEVDKRKSG

SEQ ID NO: 9626 - protein, 280 aa, Cucumis melo
NFGDYNMWLAAENGMFLRPTKGEWMTTMPENLHMDWVESVKHVFEYFTERTPRSHFELRETSLVWNYKYADVEFGRLQARDLLQHLWTGPISNASVDVVQGSRSVEVRAVGVTKGAAIDRILGEIVRDKGINKPIDYVLCVGHFLTKDEDVYTFFEPDLPTEVPAAVARTTVTNPFGGVPVPKIPNTVVSPSRSARLKKQRSLSILERKANSHGSAVFWRPVVQDRLSLHEGSSVLDLKGDNYFSCAVGRKRSNARYLIGSSDDVVTLVKELSECSECQI

SEQ ID NO: 9627 - protein, 139 aa, Oryza sativa Indica Group
EEDEEPGASSPNSTLSSLSGKRGAPSAATAAAAAASDDEDSGGGSRKKLRLSKDQAAVLEDTFKEHNTLNPKQKAALARQLNLKPRQVEVWFQNRRARTKLKQTEVDCELLKRCCETLTDENRRLHRELQELRALKLAT

SEQ ID NO: 9628 - protein, 127 aa, Oryza sativa Indica Group
ELERSGSGVDDDDGADGAGGRKKLRLSKDQAAVLEECFKTHSTLNPKQKVALANRLGLRPRQVEVWFQNRRARTKLKQTEVDCEYLKRWCERLADENKRLEKELADLRALKAAPSPASASAMQPSSS

SEQ ID NO: 9629 - protein, 159 aa, Oryza sativa Indica Group
PRQVEVWFQNRRARTKLKQTEVDCEHLKRCCERLTRENRRLQREVAELRGALRTTTSSYPPLYGLHHLPAAAGTVFRVCPSCEHSKVVAAAASESFSPRVFAGGGAPAAITAAAAVPSPGAGSPPSSSAALFGARRPHFGPFAAAVIPPVLRRQPSATS

SEQ ID NO: 9630 - protein, 136 aa, Oryza sativa Indica Group
AEEEQDDVAGAALSSSPNNSAGSFPMDDFSGHGLGGNDAAPGGGGGDRSCSRASDEDDGGSARKKLRLSKEQSAFLEESFKEHSTLNPKQKLALAKQLNLRPRQVEVWFQNRRARTKLKQTEVDCEYLKRCCETLT

SEQ ID NO: 9631 - protein, 175 aa, Oryza sativa Indica Group
ERKTELARKLGLQPRQVAVWFQNRRARWKTKQLERDFDRLKASFDALRADHDALLQDNHRLHSQVMSLTEKLQEKETTTEGSAGAAVDVPGLPAAADVKVAVPDAEEPALEEAAAAFEEQQEQQVKAEDRLSTGSGGSAVVDTDAQLVVGCGRQHLAAVDSSVESYFPGGDEYHD

SEQ ID NO: 9632 - protein, 150 aa, Oryza sativa Indica Group
MPLLPAAKRSEVVAAEEERAGLRGGGGSDEEDGGCGIDGSRKKLRLSKDQSAVLEDSFREHPTLNPRQKATLAQQLGLRPRQVEVWFQNRRARTKLKQTEVDCEFLKRCCETLTEENRRLQKEVQELRALKLVSPHLYMNMSPPTTLTMC

SEQ ID NO: 9633 - protein, 115 aa, Oryza sativa Indica Group
AQEDVGHLSDAGLALGLSLGGGGGGTTDAAAVKRERAEEADGERVSSTAAGRDDDDDGSTRKKLRLTKEQSALLEDRFREHSTLNPVRHKQKVALAKQLNLRPRQVEVWFQNRRA

SEQ ID NO: 9634 - protein, 89 aa, Oryza sativa Indica Group
LGGGGGGTTDAAAVKRERAEEADGERVSSTAAGRDDDDDGSTRKKLRLTKEQSALLEDRFREHSTLNPKQKVALAKQLNLRPRQVEVWF

SEQ ID NO: 9635 - protein, 112 aa, Oryza sativa Japonica Group
AQEDVGHLSDAGLALGLSLGGGGGGTTDAAAVKRERAEEADGERVSSTAAGRDDDDDGSTRKKLRLTKEQSALLEDRFREHSTLNPKQKVALAKQLNLRPRQVEVWFQNRRA

SEQ ID NO: 9636 - protein, 131 aa, Oryza sativa Indica Group
AKQLNLRPRQVEVWFQNRRARTKLKQTEVDCEYLKRCCETLTEENRRLHKELAELRALKTARPFYMHLPATTLSMCPSCERVASNPATASTSAPAAATSPAAAPTAAARTAVASPEPHRPSSFAALFAAPL

SEQ ID NO: 9637 - protein, 649 aa, uncultured bacterium
MWVVIAMVLVAVFNTMTSTDGDGVREIDYSTFVTQVHQGNVAKVRINGSVIEGRYHNGGAFSTYSPGDPQLVNDLLEKGVTIDVEPPEKTSLLMNILISWFPLLLLVGIWIFFMRQMQGGGGRGALSFGKNRARLLTEDKNKVTFADVAGVEEAKEEVGELVEFLSDPSRFQKLGGRIPRGVLMTGNPGTGKTLLAKAIAGEAKVPFYSVSGSDFVEMFVGVGASRVRDMFEQAKKNPPCIIFIDEIDAVGRQRGAGLGGGHDEREQTLNQLLVEMDGFEGGEGIIIIAATNRPDVLDPALLRPGRFDRQVHVPLPDIRGREKILQVHMRKVPVADDVDTAVLARGTPGFSGADLANLINEAALFAARSRKRRVTMREFELAKDKVVMGVERRSIVMPEEERRNTAYHESGHAVVAKVLEHADPVHKVTIIPRGRALGVTMQLPEQDRYSHNRGYLHDKIAVLMGGRIAEELFMNQMTTGASNDFEVATDIAHNMVARWGMSEELGPRVYSENDSQVFLGRDMITHRNLSNATAEKVDREVTRIVDQQYARAREILQSNTDKVEAMAGALLEWETISAEQIDDIMAGRQPRPPAPEPEPKTKSAAGGEGEGEGEGEAGDETPAAANDDGDAQSAADARLAPQRGRGRRR

SEQ ID NO: 9638 - protein, 219 aa, Listeria monocytogenes
IGLVFWGAAEPLSHYAVQAPGGEVGTQAAMKDALRYSFFHWGISAWSIYAIVALALAYFKFRKNAPGLISATLYPILGKHAKGPIGQLIDIIAVFATVIGVATTLGLGAQQINGGLTYLFGVPNNFTVQFTIIVIVTILFMLSAMSGLDKGIQLLSNVNIYVAGVLLVLTLILGPTLFIMNNFTNSFGDYLQNIIQMSFQTAPDAPDARKWIDSWTIFY

SEQ ID NO: 9639 - protein, 157 aa, Ageratina adenophora
MSIIPSFFTGSRSSVFDPFSSEIWDPFQGFSSAISNLPESSRETAAIANARIDWKETPEAHVFKADLPGLKKEEVKVEVEEGRVLQISGERSRENEEKNEKWHRVERSSGKFVRRFRLPENAKLEEVKAAMENGVLTVTVPKAEEKKPDVKSIDISG

SEQ ID NO: 9640 - protein, 286 aa, Hordeum vulgare subsp. vulgare
MQDFQSIPGLAGRLFGGAAAADIRRAQGPASRCGVFSQAASAQPEAAVKCPRCESTNTKFCYYNNYNLSQPRHFCKSCRRYWTISRVLRNVPVGGGCRKAKRSSSAASAPSTPAATDAKSQRRASASSSSRSNSGSASPTATGEETTTADPPPPTPSSNSNANTVAFGNRSTNYPFAADVPPPAPIFADQAAALASLFAPPPPPPLPVFSFSAEPKMEEAIGSLLLPGQAPAQEPEEPACASTVADMAPFMSLDAGIFELGDASPADYWNGGSCWTDVQDPSVYLP

SEQ ID NO: 9641 - protein, 309 aa, uncultured haloarchaeon
MAIPVLKWAGGKRQLLDELYKRFPQEYTHYHEPFFGGGALFFDLEPVNGTINDTNSRLINFYTQVRNHPEDLIERLQEFDDPESDPNPKRDFSKTNRKGREIKNYFYQQRELFNNRPYGDDYDPLEEAALLLYLNRTCYNGLYRENRSGGFNVPIGRYSNPDWVRADEIRNASDILSGTDIHNTDWSYVIDEAEPGDLVYFDPPYEPMSPTANFTDYSADGFGKDDQQELCDAAVKLSENGVNIILSNSGVMYEMYNDAGFTVNIEGATRAINSDGENRDEVDEIIATNVSQESRQTIGQQTLTDITNQ

SEQ ID NO: 9642 - protein, 752 aa, uncultured haloarchaeon
MAGGTPAIPIMNEVQLEVAKAYPNDSGRGIARLDPDTLLHLKLSPGDIIEIEGADTTAAKVWRADRQDWNTDTVRVDGFTRQNADVSIGERVTIRKAETTKAEKLVLAPPEEASVQFGSDAAGMVKRQILKRPVVERDIVPVMSSTNHPFMRSPGQAIPLIAVNTEPDGVCLVTEDTEVELREEPISGFEKTGGGITYEDIGGLQNEIQRVREMVELPMKHPQIFKKLGIEPPQGVLLHGPPGTGKTLLAKAVANETSASFFSIAGPEIISKYYGESEQQLREIFEDATEESPSIIFIDELDSIAPKREDVTGEVERRVVAQLLTMMDGLETRGQVIVIGATNRVDSVDPALRRPGRFDREIEIGVPDEVGRKEILQIHTRGMPLSDDVSLDYLADETHGFVGADIESLTKEAAMKALRRYLPEIDLDEEDVPPSLIDRMIVKRADFNDALSDVEPSAMREVLVELPKVSWDDVGGLEGPTQKVKESVEWPITSRGRFERMGIDAPKGVLLYGPPGTGKTLIAKAVANETNANFISVRGPQLLSKWVGESEKAIRQTFRKARQVSPTVIFFDELDSLAPSRGGGTGNNVSERVVNQLLTELDGLEENGNVMVVAATNRPDMIDPALIRSGRFDRLVLIGQPGEEGREQILKIHTRNSPLAPDVSLREIAEITDGYVGSDLESIAREAAIEALREDGDAQEIEMRHFRKAMESVRATITDDLMNYYEDMQEEFKGGTQNRLTGGRQDGRIGFQ

SEQ ID NO: 9643 - protein, 477 aa, uncultured haloarchaeon
MSTTTLPDSLTRRVPGGDAGIIIATLAATYLAYVLIGIGLGYSLRGQLNTIAVLTFYIGVFAMLALALNLHWGYTGLFNIGIVGFMAVGIYVMALVSKPVYQAGGASQVGGLGLPVIIGIIAGMIAASLLGLLIALPALRLRADYLAIVTIAMSEIVRFSFLSGQLQQFNLAGRRVGFGGGSGLILDYTDPLELFFSFFGLWDAYLGLVETFGIIIPNNPKPVVDGLVYGAVLLSFVGLYFWLLKRTGESPFGRVLKAIREDEEAASSLGKDTNGFKIKAFMLGCALMGLAGILWFMRSGAVTPNTFRPRITFFVWIALIIGGAGSNTGSVLGGAIFAALLYQGPRYLKNLIDTVLPSASSPSSFGPAIAPLISNLDITPLLFYTIDNIRQLQLVFMGVVLIWLMHNRPEGLLGHRTETASPITLSAPIAQTVASESRSTTADADTDPDPDTTEDIAPDGGSNSTTDTNNGGINSNE

SEQ ID NO: 9644 - protein, 119 aa, uncultured haloarchaeon
MSQRQFFYAKIHRATVTQTNPDYDGSITIDDQLLTAASIKPFERVQVVNVDTGARLETYTLEGDSGVIELNGAAAHRAKVGDTIIIIAYTLTPANNRPVPTIVHVTDTNEIETIRRHTL

SEQ ID NO: 9645 - protein, 329 aa, Pseudomonas sp. KL28
MRVLFFSSQTYDQDSFSNTPADHGLELHFQPARLSEDTAPLASGHEVVCAFINDDLSAPVLKRLAAGGTRLIALRSAGYNHVDLAAAKQLGLAVVRVPAYSPHAVAEHAVALILALNRRLHRAYNRTREGNFSLHGLTGFDLHGKTVGVVGTGQIGAAFARIMAGFGCQLLAYDPYPNPELLALGARYLELPELLSQAQIISLHCPLTEQTRHLINPQSLAQLQPGAMLINTGRGALIDTPALIEALKDGQLGYLGLDVYEEEAQLFFEDRSDLPLQDDVLARLLTFPNVIVTAHQAFLTREALAAIAATTLDNITRWAAGNPQNLVEG

SEQ ID NO: 9646 - protein, 294 aa, Brassica rapa subsp. chinensis
MGRSPCCEKAHTNKGAWTKEEDERLIAYIKAHGEGCWRSLPKAAGLLRCGKSCRLRWINYLRPDLKRGNFTEEEDELIIKLHSLLGNKWSLIAGRLPGRTDNEIKNYWNTHIRRKLINRGIDPTTHRPIQESSASQDSKPTHLEAITSNTINISFASSSSTPKMEIFQESTSFPGKQEKISMVTFKEEKDECPVEENFPDLNLELRISLPDVVDHHHQGFVGEGKTTTPRRCFKCSLGTINGMECRCGRMRCDVVGGSKGSGKGSDMSNGFDFLGLAKKETNTCLFGFRSLEMK

SEQ ID NO: 9647 - protein, 173 aa, Picea abies
MARFREPLVLGRVIGDVVDMFMPSVNLTVAYGSRQVNNGCEIKPSAISSAPRVDVGGDDLRTCFTLIMTDPDAPSPSDPTLREYLHWIVTDIPATTAASFGRELMRYEAPRPTIGIHRYVFTLFKQMARETVYPPQSRVNFSTRDFAEMNGLGLPVAAVYYNAQKETAPRRRF

SEQ ID NO: 9648 - protein, 222 aa, Prunus persica
MGGGKIEIKRIENTTNRQVTFCKRRNGLLKKAYELSILCDAEVALIVFSSRGRLYEYSNNNSIRNTIERYKKACSDSSGSTSITEINAQYYQQESAKLRQQIQMLQNSNRHLMGDALSTLSVKELKQLENRLERGINRIRSKKHEMLLAEIEYLQKKEIELENENVCLRTKISEVERLQQANMVGPELNAIQALASRNFFSQNMMEGGATYPQQDKKILHLG

SEQ ID NO: 9649 - protein, 516 aa, Lolium rigidum
ITNHLFRHEQGEAFAASGYARASGRVGVCVATSGPGATNLVSALADALLDSIPMVAITGQVPRRMIGTDAFQETPIVEVTRSITKHNYLVLDVEDIPRVIQEAFFLASSGRPGPVLVDIPKDIQQQMAVPVWDAPMSLPGYIARLPKPPATELLEQVLRLVGEARRPILYVGGGCSASGEELRRFVELTGIPVTTTLMGLGNFPSDDPLSLRMLGMHGTVYANYAVDKADLLLAFGVRFDDRVTGKIEAFASRSKIVHIDIDPAEIGKNKQPHVSICADVKLALQGLNALLTGTKAHKSFDFGSWHEELEQQKREFPLGYKTFGEAIPPQYAIQVLDELTKGEAIIATGVGQHQMWAAQYYTYKRPRQWLSSAGLGAMGFGLPAAAGAAVANPGVTVVDIDGDGSFLMNIQELALIRIENLPVKVMILNNQHLGMVVQLEDRFYKANRAHTYLGNPENESEIYPDFVTIAKGFNVPAVRVTKRSEVRAAIKKMLETPGPYLLDIIVPHQEHVLPMI

SEQ ID NO: 9650 - protein, 516 aa, Lolium rigidum
ITNHLFRHEQGEAFAASGYARASGRVGVCVATSGPGATNLVSALADALLDSIPMVAITGQVPRRMIGTDAFQETPIVEVTRSITKHNYLVLDVEDIPRVIQEAFFLASSGRPGPVLVDIPKDIQQQMAVPVWDAPMSLPGYIARLPKPPATELLEQVLRLVGEARRPILYVGGGCSASGEELRRFVELTGIPVTTTLMGLGNFPSDDPLSLRMLGMHGTVYANYAVDKADLLLAFGVRFDDRVTGKIEAFASRSKIVHIDIDPAEIGKNKQPHVSICADVKLALQGLNALLTGTKAHKSFDFGSWHEELEQQKREFPLGYKTFGEAIPPQYAIQVLDELTKGEAIIATGVGQHQMWAAQYYTYKRPRQWLSSAGLGAMGFGLPAAAGAAVANPGVTVVDIDGDGSFLMNIQELALIRIENLPVKVMILNNQHLGMVVQWEDRFYKANRAHTYLGNPENESEIYPDFVTIAKGFNVPAVRVTKRSEVRAAIKKMLETPGPYLLDIIVPHQEHVLPMI

SEQ ID NO: 9651 - protein, 132 aa, Potamogeton distinctus
VYRGIRRRVWGRWASEIRDPNKGGRVWLGTYDTPEEAARAYDVAALKIRGKKAKLNFPNYVHGHVRYKSTVRETNTTIQIAPPTSPLTCWSEELSSSTDPFLALQNDSDESDVAIGWSSQEISGDDFFPSAF

SEQ ID NO: 9652 - protein, 89 aa, Potamogeton distinctus
GKDVADSVTEKAKAFCSGFHNIKVETKVQRGDPRDVICDMVEKLGGDMLVMGSHGYGLIKRALLGSVSNYCAQNANCPVLIVKKPKPKH

SEQ ID NO: 9653 - protein, 243 aa, Trochodendron aralioides
MGRGRVQLKRIENKINRQVTFSKRRSGLLKKAHEISVLCDAEVALIVFSTKGKLFEYSTDSSMERILERYERYSYAERELVAIDAESQGSWSLEYTKLKARFEVLQRNQRHFLGEDLGSLSLRELQNFEQQLDSALKLIRSRKSQLMYESISELQRKEKALQQQNNLLAEKLKEKKALAQQAHWEQGNQVQNPSTFLLPQSLPSLNISGTYQARGTGGEDEGSQPHNRTNTLMPPWMLRHMNE

SEQ ID NO: 9654 - protein, 230 aa, Trochodendron aralioides
KINRQVTFAKRRNGMLKKAYELSVLCDAEVALIIFSNRGKLYEFCSTSSMLKTLERYQKCSYGALEASQPAIETQNSYQEYLKLKGRVEVLQRSQRNLLGEDLGPLNTKELEQLEQQLEMSLKQIRSTKTQFMLDQLSDLQRKEQMLQEANRALGRKLGESSAENTLRLSWEAGGQSIPYSRQPAEPEGFFQPLECNSSMHIGYNPVGPDQITVAAPGQNVNGFIPGWML

SEQ ID NO: 9655 - protein, 304 aa, Antirrhinum majus
MKSDKNSNKTSASFQWFRTNQPQFSLSKTVTTELETAAESHFHLKDSDFPYQEPDSSSTLSTEQSHSEATTLARSNLNMQNISFQPGFYGTHKKNGEDSVKLGMPFGSADYMSHHIQLEHNQSPACMSYPPAASYFGGIIASYGPNSIVYPQMVGIAQERGVLPLDCTEGPIYVNAKQYHAILRRRQTRAKLEARSKMAKSKKPYLHESRHLHALKRARGTGGRFLNTKTTQQAKPPGPTQHKNLSFQKINGDAYEPEFQNSESTCSDVSDIFNSDDIFQQPEFTDSISSFPTVHARARIRAGT

SEQ ID NO: 9656 - protein, 257 aa, Antirrhinum majus
MPSSGQQEEGSVTSTTLRSPGNDAGAIKETEAGAVQSGVNGSSNEREQQNLDLVSHSIMLASYPYSDPQYGGIMTYGAPVHPHLFGYNQARMPLPLEMEEEPVYVNAKQYHGILRRRQVRAKAELEKKMIKNRKPYLHESRHQHAMRRARGSGGRFLNTKKGESNEKNSSSGEQLYSGAAPSTQSYSSASAQSSSNNNATSGQREDGTSTVQEMHNDPRMFSNGNNNGVSFYYPTSPRRGTGNGHTSEDNWNLRCGK

SEQ ID NO: 9657 - protein, 159 aa, Petunia x hybrida
KQYHGILRRRKSRAKEMEKKALKPRKPYLHLSRHLHAMRRPRGCGGRFLNTKSMKGSMKGGKTNDTGECQYFYPTGSQNSEVLQSDSSNLSSPKETTGSRFCDSSEVTNMYSRGNLDPFPFQNLRPSVQAIPDMMNTGHGILMAGKWVSAADSCCNLKV

SEQ ID NO: 9658 - protein, 135 aa, Petunia x hybrida
KQYRRILQRRQSRAKAELERKQIKARKPYLHESRHQHAMRRARASGGRFARKTDGDASKGTGSGSAFSSQSVSSSGSEPLQFNAADVHKRQENGRLAELQHSYSNGSSYGNQSSFQESKDESQSAESREGGSLRK

SEQ ID NO: 9659 - protein, 132 aa, Petunia x hybrida
KQYNGILRRRQIRAKLEAQNKLVKNRKPYLHESRHLHAVNRVRGTGGRFLSTKKGHHSDPITPTNSTSSRDSVEREGSTSAFSSVRQDVHNGISFQQPDHRAFNVSSHMDVTMQDRGGFTCNGTQQRAPVVR

SEQ ID NO: 9660 - protein, 142 aa, Petunia x hybrida
KQYQAILRRRQYRAKLEAQNKLSKSRKPYLHESRHRHALNRARGPGGRFLNIKKLRESKSPDLIDDQRVPVSNELQLNTKMLEPDVYQSTPASSGITSCSNGDAIYHQQSLKYSAFSLHIRGSLEQDKGKNDLNTNPCLPSF

SEQ ID NO: 9661 - protein, 140 aa, Petunia x hybrida
KQYSAILKRRQVRAKLEAQNKLVKDRKPYLHESRHRHAMKRARGSGGRFLNTKNMQQSRPSSPKYDKNIFKQHTGGNFSSSMVQHSESGSWGTSTQSGSDVTSIFSGDDMFQQPEFRVSSFPFHMAATMQEAEDFMRGGT

SEQ ID NO: 9662 - protein, 145 aa, Petunia x hybrida
KQYHGILRRRQIRAKAELEKKAIKARKPYLHESRHQHAMRRARGTGGRFLNTKKLNDMDCTSEDPKKSGATIPTHSGNSSGSGSYDQQEKDMHKGHSHSFLTGNNHGSSVYLSQNTGNEQGNGHYGRVSWSLLVNQASRGAVSNN

SEQ ID NO: 9663 - protein, 534 aa, Petunia x hybrida
MGQKEDTRSLSDEYEVTDILGRGGFSVVRRGRTRSSEEVAIKTLRRFGPPEKKEFSRSTTHVNSRPAAQALISETLLTNELLVMRKIVEDVSPHPNVIHLYDVCEDSSGVHLILELCCGGELFDRIVGQARYNEAGAAAVVRQIAKGLEALHGASIVHRDLKPENCLFLNKDENSPLKIMDFGLSSIEDFANPVVGLFGSIDYVSPEALSRGNITSKSDIWSLGVILYILLSGYPPFFAPSNRQKQQMILNGEFSFDEKTWKNISSSAKQLISSLLKVDPNMRPTAQEILEHPWVTGDLAKQEQMDAEIVSRLQSFNARRKFRAAAMASVLSSSFSLRTKKLKKLVGSYDLKPEELENLSHNFKKICKNGENATLLEFEEVLKAMEMSSLVPLAPRIFDLFDNNRDGTVDMREIIGGFSSLKYSQGDDALRLCFQMYDTDRSGCISKEEVASMLRALPEDCLPMDITEPGKLDEIFDLMDANSDGKVTFDEFRAAMQRDSSLQDVVLSSLRPTLIPLLFNFPFSILVVLISNLL

SEQ ID NO: 9664 - protein, 642 aa, Chlorella vulgaris
MTTPAIGIDLGTTYSCVGLWQHDRVEIIPNEQGNRTTPSYVAFTDTERLIGDAAKNQVAMNPINTVFDAKRLIGRKFSDPTVQHDISHWPFKVVSGPGDKPMIQVSHKGEEKTFAPEEISSMVLVKMKEIAQAYVGADKEVKKAVVTVPAYFNDSQRQATKDAGVIAGLEVMRIINEPTAAAIAYGLDKKGTTSGEQNVLIFDLGGGTFDVSLLTIEEGIFEVKATAGDTHLGGEDFDNRLVNFFVQEFKRKHRKDISSNPRALRRLRTSCERAKRTLSSSTQASIEIDSLYEGIDFYSSITRARFEELNMDLFRKCMEPVEKVLRDAKMDKGQVNEVVLVGGSTRIPKVQQLLQDFFNGKELCKSINPDEAVAYGAAVQAAILNGETHEKVQDLLLLDVIPLSLGLETAGGVMTVLIARNTTIPTKKEQVFSTYSDNQPGVLIQVYEGERSRTKDNNLLGKFELTGIPPAPRGVPQINVTFDVDANGILNVSAEDKTTGNKNKITITNDKGRLSKDEIERMVQEAEKYKSEDEQARRKVEAKNGLENYAYSMRNTLKDTNIAAKIDASDKERLEKMVEDAIEWLDHNQLAEEEEFEHKRQDLESACNPIIAKLYQGGAPPEAAAADSGAASGPGPKIEEVD

SEQ ID NO: 9665 - protein, 642 aa, Chlorella vulgaris
MTTPAIGIDLGTTYSCVGLWQHDRVEIIPNEQGNRTTPSYVAFTDTERLIGDSAKNQVAMNPINTVFDAKRLIGRKFSDPTVQHDISHWPFKVVSGPGDKPMIQVSHKGEEKTFAPEEISSMVLVKMKEIAQAYVGADKEVKKAVVTVPAYFNDSQRQATKDAGVIAGLEVMRIINEPTAAAIAYGLDKKGTTSGEQNVLIFDLGGGTFDVSLLTIEEGIFEVKATAGDTHLGGEDFDNRLVNFFVQEFKRKHRKDISSNPRALRRLRTSCERAKRTLSSSTQASIEIDSLYEGIDFYSSITRARFEELNMDLFRKCMEPVEKVLRDAKMDKGQVNEVVLVGGSTRIPKVQQLLQDFFNGKELCKSINPDEAVAYGAAVQAAILNGETHEKVQDLLLLDVIPLSLGLETAGGVMTVLIARNTTIPTKKEQVFSTYSDDQPGVLIQVYEGERSRTKDNNLLGKFELTGIPPAPRGVPQINVTFDVDANGILNVSAEDKTTGNKNKITITNDKDRLSKDEIERMVQEAEKYKSEDEQARRKVEAKNGLENYAYSMRNTLKDTNIAAKIDASDKERLEKMVEDAIEWLDHNQLAEEEEFEHKRQDLESACNPIIAKLYQGGAPPEAAAADSGAASGPGPKIEEVD

SEQ ID NO: 9666 - protein, 647 aa, Planomicrobium okeanokoites
MRFIGSKVNLLDNIQEVIEENVKDDAHVFMDLFSGTGIVGENFKKDYQVLSNDSLYFSYILLKAKIENNSIPNFSELKKIGIKEPLHYLENEEFEISHEFFLTHNYSPYMGCERMYFTVENASRIDFIRLTLNRWKNESLINELEFAYLLAILIEAVPFISNISGTYGAYLKHWDKRALGKLKLRTLDIVNNHYANKTYNEDANSLIEKVYGDILYIDPPYNGRQYISNYHLLETIALYDYPEIYGKTGLRPYVESKSLYCQKKEVGNAFNHLIEKANFRHILVSYSSEGLLLEEEIESILKSHGLPETYRIYKMPYRKYKSKHKQEASELHEYIFYIQKDIALTNSVKSNKKIEVGKHKTNSYIKSPLNYVGGKHKLLNQIVPLFPDKIDTFVDLFSGGFNVGINVNANKIIATDINTYVVEVLDTMKKTSVEEVIAHIERRIEEYGLSKSNEEGFKAFRNYYNKTKKPLDLYTLICYSFNYQFRFNNNQEYNNPFGRERSQFSPALKKKLVLFIEALHEKNVQFVCSEFEHFNFSQLDQNDLVYCDPPYLITTGSYNDGNRGFKDWNRLQEIKLLDILDHLNSKGVYFALSNVLSHKGLENELLLEWSKKYNIHHLQHSYSNSSHNTTRGESQEVLITNYTNYTK

SEQ ID NO: 9667 - protein, 386 aa, Aristolochia tomentosa
DLEPVNLADAQVSASGALKSYKLASKAISRLQSLPSGNITLLCDVLVREVRDLTGYDRVMAYKFHEDEHGEVIAECKRPGLESYLGLHYPATDIPQASRFLFLKNKVRMIYDCSAVPVNVIQDKCLAQPLCLGGSTLRAPHGCHAQYMANMGSIASLVMSVTINEDDDETGRKLWGLVVCHHGSSRFVPFPFRYACDFLMQVFGIQINKEVELAAQMREKHILRTQTLLCDMLLRDAPVGIVDKSPNVMDLVKCDGAALYYKNRFWLLGTTPTEAQIRDTAQWLLQYHNNTTGLSTDSLVEAGYPGAQYLGDAVCGMAAVKITNRDFLFWFRSHAGKEIKWGGAKHDPEENDGDGKKLHPRSSFNAFLEVVKWRSKPWEDVEMDAI

SEQ ID NO: 9668 - protein, 386 aa, Aristolochia manshuriensis
DLEPVNLADAQVSASGALKSYKLASKAISRLQSLPSGNITLLCDVLVREVRDLTGYDRVMAYKFHEDEHGEVIAECKRPGLESYLGLHYPATDIPQASRFLFLKNKVRMIYDCSAVPVNVIQDKCLAQPLCLGGSTLRAPHGCHAQYMVNMGSIASLVMSVTINEDDDETGRKLWGLVVCHHGSSRFIPFPFRYACDFLMQVFGIQINKEVELAAQMREKHILRTQTLLCDMLLRDAPVGIVDKSPNVMDLVKCDGAALYYKNRFWLLGTTPTEAQIRDIAQWLLQYHNNTTGLSTDSLVEAGYPGAQYLGDAVCGMAAVKITNRDFLFWFRSHAGKEIKWGGAKHDPEENDGDGKKLHPRSSFNAFLEVVKWRSKPWEDVEMDAI

SEQ ID NO: 9669 - protein, 368 aa, Thottea siliquosa
  misc_feature (269)..(269): Xaa can be any naturally occurring amino acid
  misc_feature (363)..(363): Xaa can be any naturally occurring amino acid
  unsure (1)..(368): unsure at all Xaa locations
KSYKLAAKAISRLQSLPSGNINLLCDVLVREVKDLTGYDRVMAYKFHEDEHGEVIAEARTSELQPYLGLHYPATDIPQASRFLFLKNKVRMICDCSAPPVKVIQDKQLAQPLCLGGSTLRAPHGCHAQYMVNMGSIASLVMSVTVSEDDGEAGRNLWGLVVCHHSSPRFVPFPLRYACEFLMQVFGIQINKEVELAAQMREKNILRTQTVLCDMLLRDAPMGILTKSPNVMDLVKCDGAALYYRKEFWLLGTTPTETQIRDISEWLLQXHSSTTGLSTDSLVEAGYPGAYDLGDAVCGMAAVRITNQDFLFWFRSHAAKEVKWGGAKHDPRDNDGDGKKLHPRSSFKAFLEVVKWRSTPWEDXEMDAI

SEQ ID NO: 9670 - protein, 386 aa, Asarum europaeum
DLEPVNPSDVPVTAAGALKSYKLAAKAISKLQSLPSGNISLLCDVVVREVSDLTGYDRVMAYKFHEDEHGEVIAECKISDLEPYHGLHFPATDIPQASRFLFMKNKVRMICDCSAPPVKVIQDKRLAQPISLGGSTLRAPHGCHAQYMANMGSIASLVLSVTISEDDDETGRKLWGLVVCHHTSPRFIPFPLRYACEFLIQVFGIQLNKEVELAAQMRETHILRTQTMLCDMLLRDAPMTIMTQSPNVMDLVRCDGAALYYRKESWLLGVTPTKAQIQDLAEWLLKYHNGTTGLSTDSLVEAGYPRAHNLGDMVCGMAAVRITSQDFLFWFRSHTGKEVKWGGAKHDPADKDDDRGKMHPRSSFKVFMEVMKRRSLPWEDVEMDAI

SEQ ID NO: 9671 - protein, 386 aa, Asarum speciosum
DLEPVNPSDVPVTAAGALKSYKLAAKAISKLQSLPSGNISLLCDVVVREVSDLTGYDRVMAYKFHEDEHGEVIAECKISDLEPYHGLHFPATDIPQASRFLFMKNKVRMICDCSVPPVKVIQDKRLAQPISLGGSTLRAPHGCHAQYMANMGSVASLVLSVTISEDDDETGRKLWGLVVCHHTSPRFIPFPLRYACGFLIQVFGIQLNKEVELAAQMRETHILRTQTMLCDMLLRDAPMTIVTQSPNVMDLVSCDGAALYYRKESWLLGVTPTKAQIQDLAEWLLKYHNGTTGLSTDSLVEAGYPRAHNLGNMVCGMAAVRITSQDFLFWFRSHTGKEVKWGGAKHDPADKDDDRGKMHPRTSFKAFMEVVKRRSLPWEDIEMDAI

SEQ ID NO: 9672 - protein, 386 aa, Piper magnificum
  misc_feature (381)..(381): Xaa can be any naturally occurring amino acid
  unsure (1)..(386): unsure at all Xaa locations
DLEPVNPADVPVTAAGALKSYKLAAKAISRLQSLPSGDIALMCDVLVREVSDLTGYDRVMAYKFHEDEHGEVIAECKRSDLEPYLGLHYPATDIPQASRFLFMKNKVRMICDCLAPPVKVVQDKRLGQPISLAGSTLRAPHGCHSQYMSNMGSIASLVMSVMVSEGDEDSNRKLWGLVVCHHTSPRFIPFPLRYACEFLIQVFAIQLSKEVELAAQMKEKHVLRMQTVLCDMLLRDAPMGIMTQSPNVMDLVKCDGAALYYRSQCWLLGTTPTENKIRDIAEWLQQYHGSSTGLSTDSLVEAGYPGGHELGDAVCGMAAITITSRDFLFWFRSHTAKEVKWGGEKHDPKTKDAFTSKMNPRTSFKAFLEVVKRRSIPWEDXEMDAI

SEQ ID NO: 9673 - protein, 133 aa, Prunus dulcis
PSILMRGLVACTGNQFCGQAIIETKARALKVTEEVERHVAVTRPVRMHWTGCPNTCAQVQVADIGFMGCMARDENGKPCEGADVFLGGRIGSDSHLGDVYKKSVPCKDLVPLVVDILVKHFGAVPREREEGED

SEQ ID NO: 9674 - protein, 174 aa, Prunus dulcis
MSSSLSVQFLSPPLSSALPCCKQTRLAAATTPLAPVSTNVEAARLEPRVEERDGYWVLKEKFRGGINVQEKVKIQKEPMKLFMENGIEELAKTSFEELEKSKDSKDDIDVRLKWLGLFHRRKNHYGRFMMRLKLPNGVTTSAQTKYLASVIRKYGEDGCADVTTRQNWQIRGVV

SEQ ID NO: 9675 - protein, 271 aa, Prunus dulcis
VLPDVPEILKGLAEVGLTSLQSGMDNVRNPVGNPLAGIDPEEIVDTRPYTNLLSQYITANSLGNPTVTNLPRKWNVCVVGSHDLFEHPHINDLAYMPAAKDGRFGFNLLVGGFFSPKRCAEAVPLDAWVSADDVIPLCKAVLEAYRDLGTRGNRQKTRMMWLIDELGIEGFRAEVAKRMPFQELERASSEDLVQKQWERRDYVGVHPQKQEGLSYVGLHIPVGRLQADDMDELAHVADKYGTGELRLTVEQNIIIPNVENSKLEALLKEPL

SEQ ID NO: 9676 - protein, 336 aa, Pseudomonas aeruginosa
MLPKLVITHRVHDEILQLLAPHCELMTNQTDSTLPREEILRRCRDAQAMMAFMPDRVDADFLQACPELRVVGCALKGFDNFDVDACTARGVWLTFVPDLLTVPTAELAIGLAVGLGRHLRAADAFVRSGKFQGWQPQFYGTGLDNATVGILGMGAIGLAMADRLQGWGATLQYHEAKALDTQTEQRLGLRRVACSELFASSDFILLALPLNADTQHLVNAELLALVRPGALLVNPCRGSVVDEAAVLAALERGQLGGYAADVFEMEDWARADRPRLIDPALLAHPNTLFTPHIGSAVRAVRLEIERCAAQNIIQALAGARPINAANRLPKAEPAAC

SEQ ID NO: 9677 - protein, 692 aa, Arthrobacter oxydans
MAKGIYVSATTPGSGKSLVALGLADTLHRHADRIGFFKPVVHGPDAAADPMVALMKSRFALEDERCRGGLTHEEVRTLLAEGNRAEIDARCVEIFADISRHCDVVIVEGTDLVGQDSAVEFDLNARLANNLAAPIVAVVGAKGRTVAEAAAAVEVARKELAAERCSLLAIMVNRADPADLDAIAAAVKPGASKRPVYILPELEAIARPTTGEVAAALGVRQIAGRPDMERDVKDIKVAAMNVGNFLNVLDEGALVIVPGDRADVMVACLAASFSPEFPVASALILTGGLAPDANIYPLLAQAPFPVFAAREDTYTTARRVSEVRSEIWSGHRRKVASALGLWSRRVDEAELVERLHLPRAERMTPLRFLHDLIERARSQRRHVVLPEGTDVRILRAAEILHRRDVCDLTVLGPESEVRELAAARGIDLSGINIVDPATSDLRQKFAEKYAELRAHKGVDLPKALEIMQDVSYFGTMMVQLGVVDGMVSGAAHTTAHTIRPALEFVKTREGVKIVSSVFLMLMPDRVLVYGDCAVNPDPNVEQLADIALASAETAAQFGVEPRVAMLSYSTGGSGSGEAVDAVRQATELVRQRRPDLAVEGPIQYDAAVDASIAESKMPGSSVAGQATVFIFPDLNTGNNTYKAVQQSSGAVAVGPVLQGLRKPVNDLSRGCTVEDIVNTVAITAIQAQAPAS

SEQ ID NO: 9678 - protein, 414 aa, Variovorax sp. Pal2
  misc_feature (272)..(272): Xaa can be any naturally occurring amino acid
  misc_feature (326)..(326): Xaa can be any naturally occurring amino acid
  unsure (1)..(414): unsure at all Xaa locations
MTTATTTTTSSRESHPFLAGRVLGAKPSATKEMTRLANQLKREGRNVIALSQGEPDFPTPDHVREAGKQAIDRGESRYTDVAGTFALREAVVRKFERDHGLRFDPEQVQVGCGAKQILYNALQATIDPGDEVVVPTPAWVSYPEMVLLAGGTPVIVRCGAASGFKLTPRQLEEAITPRTKWLMLNSPSNPSGAVYSHDELAALGAVLLRHPQVWVMADDIYEKIRYQTGAFATPAAVMPELASRTLTINGVSKAYAMTGWRVGFGAGPLELXKAMNLVQSQSTSHTSSISQAAAVAALDGPMDFLPQFVEAFRRRRDSVVGQLNRXEGIACDLPPGAFYAFPGCQGLLGRRDPAGHLIATDADLALYLLREAGVAIVPGSAFELPGHFRVSYAASDAELDEAMARIAAACGRLG

SEQ ID NO: 9679 - protein, 338 aa, Malus hupehensis
MSIFGRRGIHFLHKLNAENVPVALIEKGQSRVIDASLTLIRERAKLKGQLVRALGGAVASTSLLGVPLGHNSSFLQGPAFAPPRIREAIWCGSTNSTTEEGKELNDPRVLTDVGDVPVQEIRDCGVDDDRLMNVISESVKLVMEQDPLRPLVLGGDHSISYPVVRAVSEKLGGPVDILHLDAHPDIYHAFEDNKYSHASSFARIMEGGYARRLLQVGIRSINNEGRVQGKRFGVEQYEMRTFSRDRHFLENLKLGEGVKGVYISIDVDCLDPAFAPGVSHIEPGGLSFRDVLNILHNLQGDVVAADVVEFNPQRDTVDGMTAMVAAKLVRELAAKISK

SEQ ID NO: 9680 - protein, 213 aa, Gossypium hirsutum
AADGYARSRGVGACVVTFTVGGLSVLNAIAGAYSENLPLICIVGGPNSNDYGTNRILHHTIGLPDFSQELRCFQTVTCYQAVVNNLEDAHEMIDTAISTALKESKPVYISISCNLPAIPHPTFDREPVPFSLSPKLSNKIGLEAAVEAAAEFLNKAVKPVLVGGPKLRVAKACEAFVELADASGYAVAVMPSGKGLVPEHHPHFIGTYWGAVS

SEQ ID NO: 9681 - protein, 586 aa, Saccharomyces cerevisiae
MSRKSSTEYVHNQEDADIEVFESEYRTYRESEAAENRDGLHNGDEENWKVNSSKQKFGVTKNELSDVLYDSIPAYEESTVTLKEYYHHSIKNNLTAKSAGSYLVSLFPIIKWFPHYNFTWGYADLVAGITVGCVLVPQSMSYAQIASLSPEYGLYSSFIGAFIYSLFATSKDVCIGPVAVMSLQTAKVIAEVLKKYPEDQTEVTAPIIATTLCLLCGIVATGLGILRLGFLVELISLNAVAGFMTGSAFNIIWGQIPALMGYNSLVNTREATYKVVINTLKHLPNTKLDAVFGLIPLVILYVWKWWCGTFGITLADRYYRNQPKVANRLKSFYFYAQAMRNAVVIVVFTAISWSITRNKSSKDRPISILGTVPSGLNEVGVMKIPDGLLSNMSSEIPASIIVLVLEHIAISKSFGRINDYKVVPDQELIAIGVTNLIGTFFHSYPATGSFSRSALKTKCNVRTPFSGVFTGGCVLLALYCLTDAFFFIPKATLSAVIIHAVSDLLTSYKTTWTFWKTNPLDCISFIVTVFITVFSSIENGIYFAMCWSCAMLLLKQAFPAGKFLGRVEVAEVLNPTVQEDIDAVIS

SEQ ID NO: 9682 - protein, 390 aa, Pichia norvegensis
MSAAKQLFKIVPLTPTEINFLQSLAPVVKEHGVTVTSTMYKYMFQTYPEVRSYFNMTNQKTGRQPKVLAFSLYQYILHLNDLTPISGFVNQIVLKHCGLGIKPDQYPVVGESLVQAFKMVLGEAADEHFVEVFKKAYGNLAQTLIDAEASVYKTLAWEEFKDFRVTKLVKEAEDVTSVYLTPVDGFKLKPIIPGEYISFRWDIHNPDITDIQPREYSISQDVKENEYRISVRDIGIVSDYINKKLQVGDIVPVHAPVGTMKYDSISKKGKVAVLAGGIGITPMIPIIEHALKDGKDVELYYSNRSYQSEPFREFFSNLEKENNGKFKLNNYISAENQKLQVKDLEHINPDEYDVYLLGPVAYMHEFKTYLVGKGVSDLKMEFFGPTDPDC

SEQ ID NO: 9683 - protein, 279 aa, Picea sitchensis
MDMSLQAKNTAYSEKLIQGTAVRTTGGREIWNILALFCWHALHLTFIVIAYVATIINKSWSLLFAKESLEKSRASQRKKPQIVGVVIESEEAETEMSKVCKLLMWLADVGVQHVSLYDMEGLLKQSKRSLEKTLGNLNTQIQLVSTWEEHEKWTSESQSTEQPIMTVELLSICDGKEGIAKAARYLCANTLQKINSEGQHIDLKLTEADINRGLEAAGCAGPEPDLLLVFGFTRCLLGFPAWRLPFTEIIYMGMLKSLTLDSLLNAVDEFSTKNQRYGK

SEQ ID NO: 9684 - protein, 418 aa, Picea sitchensis
MPPIKNIIQDMKGGIGSISKRSFDVKLSYNRRSRSHSQGVAAASGDENHCKTAADILHESCWANLPYELLRDIIERIEGSEITWPARRNVVACASVCRTWREIIKEIVKPPLLSGVLTFPVSLKQPGPKDLPVQCFIKQDRTASAYYLYLGLTSTICENGKFLLAARKFRKATSTDYIISFNAEDMSRGSNTYVGKLRSNFLGTKFTIYDSYPPHSGGVATSHAGRRVGSKQVSPRVPASSYNVAHIAYELNVLGTRGPRRMQCTMHSIPASAIEAGMSSSTVEIPSSTLVEPLASFRSSRSKSVISESSASSGPLNSGNLKDDPLILKNKAPRWHEQLQCWCLNFRGRVTVASVKNFQLVAATEPAQSVSQSDQDKVILQFGKVGKDVFTMDYRYPLSAFQAFAICLSSFDTKLACE

SEQ ID NO: 9685 - protein, 669 aa, Picea sitchensis
MAMASLKLSPIFPVPHCMPAKNNPSFQKVSLPVKVSHEGTIRTKRGLRLQADKTTAPIVERTSQEWSESAVELKDPSQTSVKSLPSSFTSRYADSEPRKGADVIVEALEREGVEHVFAYPGGASMEIHQALTRSKTIKNVLCRHEQGEVFAAEGYARSTGKVAICIATSGPGATNLVSGLADALLDSIPLVAITGQVPRRMIGTDAFQETPIVEVTRSITKHNYLIMDVDDIPRVIREAFYLAASGRPGPVLVDIPKDVQQQMTVPDWNKAIKLHGYMERLPKAPQISQLEQILRLVFNSKKPVLYVGGGCLNASQELREFVDHTGIPVASTLMGLGSFPSSHEKSLGMLGMHGTVYANYAVDKADLLLAFGVRFDDRVTGKLESFASRASIVHIDIDPAEIGKNKQPHISLCADVQLALQGLNYLMKKREDRPDFYAWIDELEEQKTKWPLTYQNFEEAIPPQHAIQLLYELTHGNVIITTGVGQHQMWSAQWFKYDRPRQWLTSGGLGAMGFGLPAAVGAAVGNPGVTVVDIDGDGSFMMNVQELATIKVENLPVKIMILNNQHLGMVVQWEDRFYKANRAHTYLGDPSQECEIFPDFLKMAESCNIPAGRVTDKAHIRDAIATMLETPGPYLLDVIVPHQEHVLPMIPAGGSFKEIITEGDGRISY

SEQ ID NO: 9686 - protein, 471 aa, Picea sitchensis
MSMATASISPCLPLAHQRASISRPSYSSFLTPRRPLFESRRVKVKVRFSLQQLPPPDQLDAYVDIPRLVSRAEGLLYTLADAAVATSDSVAPAQKTNGSWFGFIADGLEGFLKVLKDGLTTVHVPYAYGFAIITLTVLVKIATFPLTKKQVESTLAMQNLQPKIKAIQERYKGDQERIQLETSRLYKQAGVNPLAGCLPTLATMPVWIGLYQALSNVANEGLLTEGFFWIPSLAGPTTIAARQNGTGISWLFPFVDGQPPLGWSDTFAYLVLPVLLVGSQYISMQIMQTPQANDPSQKNTQIALKFLPLMIGYFSLSVPSGLSIYWLTNNFLSTAQQLWLRKLGGAKPIVSEDGNGIISAGQAKRSSSKAVTDLKEARRGERFRQRKAEEARKKADPERQTTTDVEEQNVYQTVSLSSERDDYQEEKDGKAKTISSEQESLEQVYAASVNGIDANNPRPKRSKRSKRRRVT

SEQ ID NO: 9687 - protein, 446 aa, Picea sitchensis
MATMKEENNDAIVLEEWNASSTSNFVRTAVLIADKSGGFTIHRERGRMLEVWGKLSAAFLPEGFPNSVTSDYLPFQIWDSLQGLSTYIRCMLSTQALLSAIGVGETTATVVGATFQWFLRDFTGMLGGILFTLYQGSNLDSNAKMWRLIADLMNDLGMLMDLVSPLYPASFVIILCLGSIARSFTGVASGATRAALTQHFALQHNAADISAKEGSQETMATMIGMLLGMLLAHVTAGHPGAMWSSFLLLTFFHMFANYQAVRCLCLNSLNEGRTSVLLKCFITNGQVLNPKDVSSMEYLLPNWMQLRMLTKGRPFNATFKLGAKISSLSQSDMSKLLKLSASCYGKGKYLLLCRNGTIEVILNKDSVSADILQSYIHGLVLSYHMGSSSSVNDANNADSCLWMEKYYSMFISKQLQASGWNTGRLLVPSVDWRAHWVESLVDGKAT

SEQ ID NO: 9688 - protein, 482 aa, Picea sitchensis
MGSQTTHSLVFCISVVAVLMLQCLLMGSSVAPDHDNYHLIPVENFKWKDPQGFAKCPASSAGQEALKPGVKIRLDHIHGACSPLRPINSSSWIDLVSQSFERDNARLNTIRSKNSGPYTTMSNLPLQSGTTVGTGNYIVTAGFGTPAKNSLLIIDTGSDLTWIQCKPCADCYSQVDAIFEPKQSSSYKTLPCLSATCTELITSESNPTPCLLGGCVYEINYGDGSSSQGDFSQETLTLGSDSFQNFAFGCGHTNTGLFKGSSGLLGLGQNSLSFPSQSKSKYGGQFAYCLPDFGSSTSTGSFSVGKGSIPASAVFTPLVSNFMYPTFYFVGLNGISVGGDRLSIPPAVLGRGSTIVDSGTVITRLLPQAYNALKTSFRSKTRDLPSAKPFSILDTCYDLSRHSQVRIPTITFHFQNNADVAVSDVGILVPVQNGGSQVCLAFASASQMDGFNIIGNFQQQRMRVAFDTGAGRIGFASGSCAA

SEQ ID NO: 9689 - protein, 350 aa, Picea sitchensis
MGDSSSSVSVDIEIIPWGGQEEVVQTSYGPVSVFVCGDQGKPALITYPDVALNYMSCFQGLFFCPEASSLLFHNFCVYHIDAPGHELGAAAISSNLPVPTVDDLAEQVAEVLDHFGLHEVICMGVTAGAYILTLFSIKYRERVAGLILVSPLCREPSWTEWFYNKLMINLFYFYGICGVVKETLLQRYFSEQELRSTQSGKSDIVQACRRLLDERQSKNVMRFLQAIDKRHDLSEGLKKLRCRTLIFVGENSPFHQEALHMNAVMDRRYNALVEVQVCGSLVTEEQPHAMLIPIEYFLMGYGFYRPPQLSPGLGSSPISPTDSYISADLLSPESLGLKLKPIKTRLAADE

SEQ ID NO: 9690 - protein, 471 aa, Picea sitchensis
MSMATASISPCLPLAHQRASISRPSYSSFFTPRRPLFESRRVKVKVRFSLQQLPPPDQLDAYVDIPRLVSRAEGLLYTLADAAVATSDSVAPAQKTNGSWFGFIADGLEGFLKVLKDGLTTVHVPYAYGFAIITLTVLVKIATFPLTKKQVESTLAMQNLQPKIKAIQERYKGDQERIQLETSRLYKQAGVNPLAGCLPTLATMPVWIGLYQALSNVANEGLLTEGFFWIPSLAGPTTIAARQNGTGISWLFPFVDGQPPLGWSDTFAYLVLPVLLVGSQYISMQIMQTPQANDPSQKNTQIALKFLPLMIGYFSLSVPSGLSIYWLTNNFLSTAQQLWLRKLGGAKPIVSEDGNGIISAGQAKRSSSKAVTDLKEARRGERFRQRKAEEARKKADPERQTTTDVKEQNVYQTVSLSSESDDDQEEKDGKAKTISSEQESLEQVYAASVNGIDANNPRPKRSKRSKRRRVT

SEQ ID NO: 9691 - protein, 620 aa, Picea sitchensis
MEGKERDNKMVLSKPTPSRPTTVRISCPTTTLASFPTVPPAAADHYDRDPDCRSFSELLAGAMASSPPPAESPARTAGTSGGVALRPKTVRLKPLATLPPPPPPPSPPLHVPAAQKMPAQTEDSCAPAMEAPPEPQASDNHVEAKERTTVVFKPLAKLGTMNPALSSLANLGSFGISHQQALAQVQAQARAQAQVQSQPVSSLMPVSSSAATFPVHQVSSSAALTTPTSLSSAPGFNAYFVQQKPSLKSETKQTIESPNPVPQNTEQIQRSLPPIPIADRPSFDGYNWRKYGQKQVKGSEYPRSYYKCTHPNCPVKKKVERSHDGQITEIVYKGEHSHLKPQPTRRLPTGSTQHPNGLDVSGREMESPRGEKNEYFDVNADQSSPGFYADPVGRTERLALTNVSDPSTPARGVSYGNGSPELSPCLSDDGEGVNRADDEDDDEPVSKRRKKDKKMKDLLAPERPNREPRVVVQTSDADILEDGFRWRKYGQKVVKGNPYPRSYYKCTSLKCTVRKHVERASDDPKAVITTYEGKHNHDPPVARNSNQDAAGISSAGLSGNGANAAQEKQIQNRLTSFARVSQSAVEGEDRMHVGEVGGVQLMRNNRQSHGEDIEKEGSWQ

SEQ ID NO: 9692 - protein, 327 aa, Picea sitchensis
MASNGVRFNASNRNLIVMVNETPSFEADSTPLTSLDGVMKSVSKRPFYNTLDAEEAGDEDLLDECVHQPGKKRRLSADQVHFLEKSFEVDNKLEPERKTQLARDLGLQPRQVAVWFQNRRARWKTKQLEREYDILKSSYDTLRVDYDNLLKEKEKLRSEVICLTDKLHAKEKGLEIQTNDLETTCKKTFIQSNSQFESLEKSGIVSKGMTAPFDQQLVSYSIEDPLSSGTDGSAVVDEESPHHIDSGHSSVVGYVTSTHISPFEADLSDFSHVDEEEEEGGISEKLLLPQDCHMKMECILFPEAPTTSCTYVFAMDDQENLSWWDWP

SEQ ID NO: 9693 - protein, 802 aa, Picea sitchensis
MASVMGVSSSLQALSLEVSRRVPMPVSGALSSSSSSFLNSVDRGHFLGLPVSKNSTKRTIESLLKRGCTEFHVYEFTKFSPSPGLKSSTLQSSAAVSSPNSIISEEAFKGLGLSSGSSLNLSDDYDYEDEIGNDVVVDNNDGNLDLSGLNLSQELVEALANRGITHLFPIQRAVLVPALEGRDLIGRAKTGTGKTLAFGIPIIERLTKDNKENKLLRQSRRLPRVLVLAPTRELAKQVEKEFKESAPFLSTACIYGGVSYVSQQNALARGVDVVVGTPGRIIDLVNSKSLKLNEVQFLVLDEADQMLAVGFEEDVEIILDNLPAERQSMLFSATMPGWVKKLSRKHLNNPMTIDLVGENEEKLAEGIKLYAVATTTSSNSKRSILGDLITVFAKGGKTIVFTQTKRDADEISLGLSSTIACEALHGDISQHQRERTLAGFREGKFSALVATDVAARGLDITNVDLVIHYEFPNDPETFVHRSGRTGRAGKEGIAILMYPSNGKRKVRSLEHEVGCRFEYINPPRQEDVLETSTQHVAKALGSVHPELINIFLPTANKLMEEKGTNALAAALARLSGFSQPPSSRSLITHEEGWTTLQMTRESTMPDGRQQLNARELMGILSEMWPAAADKVGKIRTYGDGKAEGAVFDLPKDVAKELLLKQALPGYTVSKITQLPVMEDEEPPSDRRGRYSDRSASYRSFGGGRGRNTNSWGKRSNDDGDWSGGWKPRRSYGEKSSSGMGRGSSRPFSMSDSNRRSYGEKSSSGMGRGSSRPFSMSDSNRSFRGSCFVCGQSGHRASDCPQN

SEQ ID NO: 9694 - protein, 505 aa, Picea sitchensis
MSSQRKFMKFVVNLFIAHIIISLISSVQLNCNGAPASARVKYFPGYHGNLNSEIYAGYVTVGEVNGIELFYYFVKSERNPAKDPLLLWLTGGPGCSSFTGFAYELGPMSFDLNNNSGNLPTLISNPHSWTKVSNIIFLDSPVGTGFSYSNTTTDYVTGDFKSVSDIHTFLIKWFEAFPEFLSNPIYVGGDSYSGMVVPLVVHEIANGNEAGIKPTLNLKGYLVGNGGTDEAFDNAQVPFAHGKGLISDELYQAVKETCNNSYLYSTNASCLSNLLAMWKDLIGINTAHILDPICFPISKKQESLSSQKILTKRYEKLEVFDQLLESRRRMSSHGWFTKSSEDGYLTVQLQLGYQDRPCPTVDKYQLSYIWAKNPYVRKAIHAQSEEITGEWKRCTPRFKYNYDVRSVIEYHRNLTRKGYRALIYSGDHDLIVPFIGTQAWIRSLNYTIVDDWRPWWVDRQVAGYTRLYDNNLTFATVKGGGHTAPEYKPRQTFVMFKQWTSGEPL

SEQ ID NO: 9695 - protein, 490 aa, Picea sitchensis
MDREGTQTSLELELPSRNHASDIEDHRRHHGHSLDSQRFDDDGRPRRTGTLWTASAHIITAVIGSGVLSLAWCMAQLGWIAGPAVLIVFPLITLYTSALLADCYRSLDPVNGRRNYNYMAAVKASLGGLQAWFCGFTQYINLYGTAIRYTITASISMAAIKRSDCFHSKGKNYPCHPSNNPFMILFGIVQVILSQIPDFDQLRWLSILAAVMSFSYSLIGLGLGIGEVAKGNFHGTLTGVTVGTITGAQKVWQTFQALGDVAFACSYSTILIEIQDTLKSPPAENKTMKKATVLGVSVTTVFYTLSGCFGYAAFGNSAPGNLLTGFENNPFWLVDFANACLAVHLLGAYQVFVQPLFAFIEEWCSHKWPRSQFIHKNYNINIPGYGLYKTNLFSLVWRTGFVISTTLISMLLPFNNVVGILGAVGFWPLTVYFPVEMYIVQKKIRRFTTKWMLLQTLSVVSFLVSLAAAAGSIEGIIKDLKSYKPFRITY

SEQ ID NO: 9696 - protein, 504 aa, Picea sitchensis
MGSTVKDVQSKEELDGILKEGGGLPALLHFWAEWCEASKQMDRVFSHLCTDTPHAKFLRVEAEQQPEISEAFSVSAVPYFVFFKDGKVVDTLEGANPSELANKVSKVSGSLNHVSSAAPASLGMASGPAVTEEVKEMNEPPQVGSITARSNTALNSRLQQLVDSKAILLFMKGTPDQPRCGFSRKLVNVLKEVGVEFGSFDILSDEEVREGMKVFSNWPTFPQLYCKGELLGGCDITLEMHESGELKTVFEYHGLLPNADKTGVSIVEKAATESKSDAKFSGSDNGAIAADSTGISESLKSRLESIINSSPILLFMKGTPEEPRCGFSKKSVEILREEELEFSSFNILSDEEVRQGLKTYSNWTSYPQLYIKGELIGGSDIMIEMQKSGELKRVVAEKGVMPKESLENRLKRLVNSSPIILFMKGTPDAPRCGFSSKVVNALREEGLNFGYFDILSDEEVRQGLKTYSNWPTFPQLYHKGELIGGCDIVLEMHKSGELKSTLAE

SEQ ID NO: 9697 - protein, 605 aa, Picea sitchensis
MGSDGKEEFGFSMNYKASGSPPSSNWQSAVANVAMNNVQESSLRVPTSSESLSSSFFSLNWEPLIEQSIPFQSSLSPMVSPSPPATSLPSDSIAIRELIGRLGGNICSVSGPLGSTMDTVLNMGTAWNPLNSSPNLNLAVDPSKGALSIQGPKHTPPHNLAQFSSDPGFAERAARFSCFGNRNYPELATPFNFPEGEPSYRSAPVDNSKIPRVQSNQSLKAGLPINLPNMAETKESNASETPHEGSEADPRFTDRKISRISRSSTPVSTDDMKQRLATSGNESDEAEFSTGREESSCSDQIAGREPGSKTLNEVNGRKRRVLSKAKAKDTPSAVASSGGRETKSLEADESPTKRYKGAEVGSNEKDDAKSKAEQSTILSTGESSPKQTKDIVKTPEPPKDYIHVRARRGQATDSHSLAERVRREKISERMKFLQDLVPGCSKVTGKAVMLDEIINYVQSLQRQVEFLSMKLATVNPRLDFNMDGLIAKDMLQSHGSSPRMLFSTDPTAAFPQLHQPQQGPVQVGVTCGTEGHRMGHPVEGALRRTMNAQPPCIDGYGDSIPQVANVWDEDLQSVVQMGFGQNRQSPFTSQGFHGSVPTSHMKIEL

SEQ ID NO: 9698 - protein, 590 aa, Picea sitchensis
MCGILAALGCIDVSQAKRARILELSRRLRHRGPDWSGISHHGNCFLAHQRLAIVDPTSGNQPLYNEDRTIVVTVNGEIYNHEELRKKLGSHKFRTRSDCEVIAHLYEAYGEDFVNMLDGMFSFVLVDTRDNSFIAARDAIGITPLYTGWGLDGSIWFASEMKALNDDCERFECFPPGHIYSSKLGGYKRWYNPPWYSEDIPSTPYDPLVLREAFEKAVLKRLMTDVPFGVLLSGGLDSSLVAAVASRYLAGTEVARQWGAKLHTFCIGLQGSPDLKAAKEVADYLGSFHHEFDFTVQEGIDAIEEVIYHVETYDVTTIRASTPMFLMSRKIKSLGVKMVLSGEGSDEIFGGYLYFHKAPNKEELHRETCRKIKSLHLYDCLRANKSTSAWGVEARVPFLDKEFINISMGIDPEWKMVRPDLGRIEKWVLRKAFDDAENPYLPKHILYRQKEQFSDGVGYSWIDGLKEHAANHVTNMMMANAKYIYPENTPMTKEAYYYRMIFERFFPQNAARLTVPGGPSVACSTAKALEWDAAWSRNPDPSGRAALGVHVDSYKENTDASNNGDEEVTADVSIKKPKLQDGGVKVAVEG

SEQ ID NO: 9699 - protein, 512 aa, Picea sitchensis
MTMVNELGFEWSVPECLYFYTKLVTALLLAWSFLHGRKRRLLPPGPFQLPILGNLHLLLGGLPHRALAALSLKYGPLMSLRLGSTLTLVVSTPEVAKEFLKTHDRLFASRPPTAAAEYMTYNYSDIALAPYGPSWRHLRKVCVLQLLSSRQIEHFRSIREEETSAMIRSLINISDHPVSNITKTASELTNALICRMAFGRKYSDQDLIGGEGIDSMIKESFLLAGSFNIGDYIPFLARMDLQGLNRRFKNIQKTYDYLLEKIINEHASHKNKPNAIPDLVDVLLAASAVETMEFKITRENIKAVINDIFLAGTDTASTTIEWAMSEVIRNPPVLKKLQDEMGRVVGVGRMVRESDLPSLVYLQAVVKETFRLHPPAPLAIPHISVEDCTVLGYEIPRGTCLLINVWAIGRNPKSWGEDAESFRPERFMEDGFLESKVEKFEWIPFGAGRRGCPGQQLGMLVVEFAVAQLVHCFNWRLPNGQELDMTEKYNGITLPRDHELLAVPTLRLPILI

SEQ ID NO: 9700 - protein, 253 aa, Picea sitchensis
MGSQAVLAPSEFRFLQPLERRVEKLHGGGDAGKTNMGDGLLSSPPCAMQRQVSVAAGGSLDQVWRDIHRPNFQTTQAAAVEDFLAQTGVGQREEEEEEEEENGLNRGNNGSLTIFAMDSVLAGQNLQHPEWLQFHNQHQQFGELSAQANSNNDIPLMAASSGSEHPVWKKRGCESIADHTVERRQKRMIKNRESAARSRARRQAYTNELEIEVNKLIEENARLRKEQAAADLLHSIQPGQTKHPLRRTMTAPF

SEQ ID NO: 9701 - protein, 151 aa, Picea sitchensis
MAMDPLLSTVQQLLGVPDDLERILHAPTRSYMRDTEATASTPVDVKEYPNSYVFIVDMPGLKSNDIKVQVEDENVLNISGERKRNEKEEGEVKYIRMERRVAKFMRKFTLPVDCNLEAISAACQDGVLTVTVPKLPPPEPKKPKTIAVKIG

SEQ ID NO: 9702 - protein, 447 aa, Picea sitchensis
MQSRGVALREAIISSPALPFSEGLKPKPHICKLNKPWVRTIMASAVSTANSEQVAVKAQEPPPLQVSRRLEKFKTTIFTQMSILAVKHGAVNLGQGFPNFDGPEFVKEAAIKAIREGKNQYARGYGVPELNSAVAARFKKDTGLTVDPEKEVTVTSGCTEAIAATMLGLINPGDEVIIFSPFYDSYQATLSMSDAKIKTVTLRPPDFAVPEKELREVFSENTRAILINTPHNPTGKMFSQKELELIASLCIENDALAFTDEVYDKLAFEAEHISMASLPGMYERTVTMNSLGKTFSLTGWKIGWAIAPPHLSWGVRQAHSYLTFSTSTPMQWASVAALQAPDSYYEELLKDYRAKKNILVDGLKTVGFKVYDSPGTYFVVVDHTPFGFDNDIAFCEHLIEKVGVVAIPTSVFYVDPNEGKNLVRFTFAKDEDTLKQAIERMKANLKR

SEQ ID NO: 9703 - protein, 581 aa, Picea sitchensis
MPGVSSEECQALSLDSFMPGASFFSDSNGYPNAVIGNGDFVSGIEFQGPELLMDQSQPGAEGFNFSNNETRCLFSKSLSFGSSPSSYRSDDFHHDSFAGSWSEAVKDEAFLSVPMSSSTHVGAMGGSSLAALHKYLPSNNEDEASWPAVDAYSCDEFRMYEFKVRRCMRGRSHDWTECPFAHPGEKARRRDPRRFHYSGTACPDFRKGSCRRGDACEFAHGVFECWLHPARYRTQPCKDGRNCRRRVCFFAHTPEQLRLLPGASVGSRNGFQSKNHEGSNLRHAVSFDGALAVAAYDGGGSSPVNHFGNGGGYFDGSQTGGSSPRGYLCGKSNLSCTSQFQMSSPTSTLVGHAHSPPPLSPPLSPSGSPRESSPNWTYGVPNSSPVAAANKPLHHKSFSFVNMDASSVSASPVVHPSFGLQSPRRHHSITIPPTHDSRGLSSPVSSLSNDGSSQSPSNAVSDLIGSLQSLDLNGGGSSTATVPSGPSQWLQAEASYAALHRSCSPRASNLRHCSYSLPSTPTKSRWEKNWESDFFAQEEPLQRVESGRELRAKIYSRLSRENPDNINAESPDLGWVNELVK

SEQ ID NO: 9704 - protein, 601 aa, Picea sitchensis
MAVASTQRGLILRPPYSRSPSYHSPTFPTALRFPHPSSLETSFFAQQYSLKYSSLHPKTVNSRRPRCLNSSTETANKGSKIKEDAGELDLGPSAKSRGQIFLENALDKHDSAQSNTKEKRKKKKKKVPEMSTEPVCYGCGAPLQSVEVDGPGYVTLETYELKKKHRQLRSVLCGRCRLLSHGHMLTAVGGHGGYSGGKQFISAEQLREKLSHLRHDKALIVKLVDIVDFNGSFLARVRDLVGANPIIMVATKVDLLPKGTDLSVVGDWIVEATMRKKLNVLSIHLTSSKSLSGFVGVVSEIQQQRKGRDVYVLGSANVGKSAFINALLKTMALKDFVAAAARRYKPIQSAVPGTTLGPIQIDAFHGEGKLYDTPGVHLHHRQAAVVHAEDLPLLAPQSRLKGITISIDALTKENQELFYTSKTTSCTVDNGLNGLSIFWGGIVRIDVVKVPLHIRLIMYGPKGVQIKVVPTSEAEEFYHKELGGALKPPTGKDKAKNWPGLKGSHPIDVKMGNNSRPVCDIAISGLGWIAIEPGPSTNVTGAEDLDTLSTIDKQLHLLVHVAKPVEVFVRAPMPIGRLGSTWYEYSELTEEEEETRPKVSY

SEQ ID NO: 9705 - protein, 591 aa, Picea sitchensis
MCGILAVFGCLDTSQAKRARVLELSRRLRHRGPDWSGLYHSGHSFLAHQRLAIVDPASGDQPLYNEDRQIVVTVNGEIYNHEKLREQLNSHKFNTGSDCEIVAHLYEDYGEEFVNMLDGMFSFVLLDTRDQSFIAARDAFGITSLYIGWGLDGSVWFASEMKALHDDCERFESFPPGHIYSSKQGGLRRWYNPPWYSESLIPSTPYDPLVLRRAFEKAVIKRLMTDVPFGVLLSGGLDSSLVAAVAARHLATTNAAKQWGEQLHSFCVGLQGSPDLKAAKEVAEYLGTFHHEFHFTVQDGIDAIEDVIYHVETYDVTTIRASTPMFLMSRKIKSLGVKMVLSGEGSDEIFGGYLYFHKAPNREEFHQETCRKIKALHMYDCLRANKSTSAWGVEARVPFLDKEFINIAMDIDPDWKMVKPDIGRIEKWVLRKAFDEEQNPYLPKHILYRQKEQFSDGVGYSWIDGLKSHAAEHVTDTMLGNAKYIFPHNTPTTKEAYYYRTIFERLYPQNAARLTVPGGPSVACSSAKAVEWDDGWAGNLDPSGRAALGVHASAYQESKNSVAANGSVDMLGKLPPTMKENVGARQIVIKG

SEQ ID NO: 9706 - protein, 103 aa, Picea sitchensis
MGGSTSKNPQIIEMAMGKAKEIVSSNSVVVFSKTYCPYCTQVKQLLSSLGAKTKVVELDTESDGKEIQTALQEWTGQRTVPSVFIGGTHIGGCDGQDISNLAY

SEQ ID NO: 9707 - protein, 403 aa, Picea sitchensis
MDDNGNHHHLHYNASEDKAGTLWTAVANILTALIGAVLFVPWGVAQLGWIAGPVAMIMFALVSWYSALLLVDCYRSPDPISGPIRNCRYRDAVQVNLGERYARLCALVQYIIFYGVCVSSTLTAAISVRAIRQSNCYHKKGHESLCHFPESIYMILYGAIQVILCQIPNFHKIWALSIVAATMSTTYATLGFCISIAKVIENGKILGSLGGITTTTSLTQAQKVWQILQGLAFGENTPGNLLAGFGFYEPYWLIDFANACIVVNMVGSYQVFCQQIFAFIEGWISHKWPSNKLINKGIQIRVPLCGLCRVNILRVCWRIAFVVSTTYIAILFPLFNAVLGILGAVNFWPLVVYFPVEMHIVRNKIPRWTLKWSLLQTLSFISFLVSVVTAAGSIEGLVKDKIT

SEQ ID NO: 9708 - protein, 250 aa, Picea sitchensis
MAAVYSIAVLPRGVNISASQNVHGTIKGQLLPVARHMNFCSSKASSHGGGIFGLQWSKTQRYGDSQMMLRKSPFILTSGNGSRVISGKRSRSTNVQTRAFSEEQEALVKKSWNAMKPNAPQLGFKFFLRVFEIAPSAKRLFSFLQDSDVPIEKNPKLKAHGLIVFKMTCESAVQLREKGTVTFSESNAKDMGKLHLTYGVLDEHFDVVKFCLLETIKDAVPDIWSPEMKIAWDEAYTQLAEAIKSEMKTV

SEQ ID NO: 9709 - protein, 286 aa, Picea sitchensis
MEVEEATRNDGQRRKVLLISAGASHTVALVAGNLVCSWGRGEDGQLGHGDAEDRPMPTFVSALDGCEITSVICGADHTTAYSDSRLVVYSWGWGDFGRLGHGNSSDLFIPHAIKTLQGLQIKQIACGDSHCLAVTINGEVQSWGRNQNGQLGVGDNIDHSFPQRVKLPAEEEVVQVSCGWRHTVAITGKSNVFSWGRGTSGQLGHGDILDRNMPVLIEALSVDGSACEQIQTSKTTVLSGSSWISPSERYAVVPDETGTGQFSAALESSVGDASVPDGDIKRVRTE

SEQ ID NO: 9710 - protein, 186 aa, Picea sitchensis
MVLEATTDTFPPMDLSYESPQAVISPHMSEGTILILLALLCALICLAGLASIVPWHYIWRSRHDHMATRVANTGMKEKSIEALPSVIYGKSIPQLATQCAICLAEFAEGEGVRVLPSCNHGFHMECVDRWLLSHSSCPTCRHYLLDPGCKRVANHIQPRKSNAREVQIHQPGPAQESGEIIDLECG

SEQ ID NO: 9711 - protein, 337 aa, Picea sitchensis
MKPLYCGNVEYETRQSEIERLFGKYGKVDRVDMKSGFAFIYMEDEQDAEDAIRGLDSTEFGTQRRRLSVEWTKNADRGVRRSEDGRRSVTDLKPTKTLFVINFDSYNTKVEDIERHFEPYGKLLNVRIRRNFAFVQYELQEDATKALESTHLSKMLDKVLTVKYAQREDGDRRGRRSSPIRRGRYSRAGEDHDRDRSASPLHGRRAVRGSPDYGRASSPIHGRRPERRSPDYGRAPSPIYARRPERRSPDYGRAPSPIYAKRPERRSPDYGRAPSPIYAKRPERRSPDYGRAASPVYASRRQKNSPDYGRVASPVHEQDRSRSPMRQSRPSIMLNHS

SEQ ID NO: 9712 - protein, 585 aa, Picea sitchensis
MEGVGDNSSSFTDLLLQGGVQSSNPRKQQQQQQQQMNNSQAGGNNAQSRPLYRSNSQSNNNYAKPPPFPPTSVPSFAQMNNVSNPSQNPTHSRSISQPAFLQGNPFGESNSNLPPLTPTTFSLKRETAASPSLSDPDVTMDEHPIPSPRPPVSPFSADSHSRPDASRTGDVLPPRKGGHRRAHSEIPRQVSWDKVGKGVKKEAEWDRDGDLNMEVGDGEDLFSMYIDLDKLNTLNTTSSANPADIGEGSGESGRKTLNADDDNEDDKAGPDDSGGNSVKEKDIDSGDDDAESESNEKKDGHKRSFPGGLDSTGRSHAAASHHHPHHVRSVSMDSVLSSFQNSENPNQKPAPSPTGRNIKHFHSNSMDGSINFKLEFGNGEFSGPELNKIMSNEKLAEIAMTDPKRAKRILANRQSAARSKERKMRYISELERKVQTLQTEATTLSAQLTLLQRDSMGLTNENNELKLRLQAMDQQAQLRDALNEALSEEVQRLKLATGQSISINSHLFQLQQQGPHVAVHQLQQQQQHQQQHQQQVTNSQQSPGHQTNQNEVLQNTYGAFPGSLGSFLKSDGSNIPASQGSNCSF

SEQ ID NO: 9713 - protein, 832 aa, Picea sitchensis
MLGLKHWFGVLVQSSKHRKRQNPLTQPLRYSLRTSISKMVTSDSNSGEILQLFLKIGLDERTAQNAIVNGKVSSNLTDVIHEAGVEDGCIKSVGNLLYMVATKYPANALKHRPFLLQYIISSKIKNPNQLEKALSFLSNTGPESLEVDDFEESCGIGVEVSVGDIKTAVDEVANENMDAILAQRYRINAGNLYGQVRKLQPWADAKVVKEIMDTKLHELLGEKTAADEEKPVKKKKEKPLKVEEKVIDVNNSSSAPALVDTNPFLIFPEPGENIQVHTEIFFSDGSIWRPHNTKEKLEKHLKTTGGKVFTRFPPEPNGYLHIGHAKAMFVSFGLAKERNGYCYLRFDDTNPEAEKMEYIDHIQEIVNWMGWGPFKITYSSDYFQELYDLAVELIKRGHAYVDHQTAEEVKEYREKKLDSPWRNRPIAESLMLFDEMRRGVIDEGKATLRMKQDMQSDNYNMYDLIAYRIKFTPHPHAGDKWCIYPSYDYTHCIVDSLENITHSLCTLEFETRRASYYWLLECLDLYLPYVWEYSRLNMSNTVMSKRKLNRLVTEKLVGGWDDPRLMTLAGLRRRGVSSEAINTFIRGVGITRSDNSMIRVDRLEHDIREEMNNLAPRTMVVLHPLKVVLTNLEASAAMELDAKIWPDAQEGDSASFYKVPFTNVIYIEKSDFRMKDSKDYYGLAPGKTVLLRYAFPIKCTEVIFGDDKETIVELRAEYDPTKSIKPKGVLHWVAEPSPGVDPVKVEVRLFDKLFLSENPSELDDWLADLNPKSKEVIPEAYAVPNLAEAKYGDKFQFERLGYFSVDQDSTPEKIIFNRTVTLRDSYAKLVHK

SEQ ID NO: 9714 - protein, 494 aa, Picea sitchensis
MILLKMMLWSLLAAVQYAAAAPASALVKSLPGFDGEFPSKHYSGYITVDKARGKKLFYYFATSQGNPAEDPLVLWLNGGPGCSSLDGFIYEHGPFNFRRGDQPGSKPVIELNPFSWTKISSIIYLESPAGVGYSYSDTENDYITGDLSTASDNYKFLLQWFEEYPEFVHNPFFIAGESYAGVYVPTLAQQVVNGIEVGVEPSLNFKGYLVGNGVTDVNYDGNAIVPFVHGMGLISESLYEEVKQACNGNYWNATSSLCQSKLGAVHQAVSKLNTYDILEPCYHSPDIQEVVTIQEKLPESFKSLGVTDRPFPVRRRMFGRAWPMWSAVKDGKVPMWPQLGDQLGAQHLICMDTQVSHVWCNDPLVREAIHAESENISGRWQVCADRITYTRDAGSMIKYHRNLTTKGYRSLIFSGDHDMCVPYTGSEAWTRSMGYKITDEWRPWFLNDQVAGYTQGYDHNLTFATIKGSGHTVPEYKPREAFAFYQRWLSGEPL

SEQ ID NO: 9715 - protein, 487 aa, Picea sitchensis
MATYVPSAYRNGTASPDWLNKGDNAWQMVSATFVGMQSMPGLVILYGSIVKKKWAVNSAFMALYAFSAVMICWVTWAYKMAFGDKLFPFWGKAGPALGQKYLIGAANLPASQHNHKDGTLETPMLAPLYPMATMVFFQFSFAAITLILLAGSLLGRMNIKAWMVFVPLWLTFSYTVGAFSIWGGGFLFQWGVIDYSGGYVIHVSSGISGFTAAYWVGPRLTKDRERFPPNNVLLMLAGAGLLWMGWSGFNGGDPYAANIDSSMAVLNTNICAATSLLVWTCLDVIFFGKPSVIGAVQGMITGLVCITPAAGVVQGWAAIAMGVLSGIIPWFTMMVVHKKSTLLQKVDDTLGVFHTHAVAGVLGGALTGLFAEPTLCSLFVAVTNSKGAFYGGPGGVQFLKQLAGACFIIGWNVVVTSIILLVISLVIPLRMTDEQLLIGDDAVHGEEAYALWGDGEKYDNTRHGWYDDTTTLRGGTEQGARGVTIEL

SEQ ID NO: 9716 - protein, 172 aa, Picea sitchensis
MVRRKTQMKRIENAISRQVTFSKRRNGLLKKAYELSVLCEAEVGLMIFSSREKIHEFATPSMQKMLQKYEKYLQECDGNGSTKEHDIEYLKQQFADKAERIMTLESTKRKMLGEELASCSLIELNQLESQAERGLRRIRARKEDCLREENAFLRKKCVSTPPSIGFGGIERI

SEQ ID NO: 9717 - protein, 249 aa, Picea sitchensis
MNGNQQLEVHYINTGFPYTVTDSFMDLFEGLDYVHPDLALAEALQDQESVYWSLQTYSEKQGATGSASSNSRNGHAQTHEGNEHVVNTTDSTRVWDNNSQVNNDEALAHVLQETEDPVDITNMMAATSIEECNRGHRVGSSSSQGTWQDIIDPDNMTYEELVELGEAVGTHNRGLCPDLISSLPVSKYKTKLFSRRKNRDDQCVICHMNYKRGDRMITLPCKHPYHAVCITRWLHINKACPVCYVEVFG

SEQ ID NO: 9718 - protein, 997 aa, Picea sitchensis
MKQSDTRNPDVIRSSREQEGRETTAAMADLLDDSVASVLDAGNWEWDSVLDFSIGSLPHILPWQSEELSDDLSERLLPSQVLEVNQAREVQNASPRNRSQDAEEEEKAAASSRIRKREVQNASPRNRSQDAEEEEKAAASSRIRKRDPRLICSNFLAGRVPCACPEMDNMEEELSRKRAKVVVLRCQVPSCEADISHLKGYHRRHRVCLCCANAATVVLDDVPQRYCQQCGKFHLLTDFDEGKRSCRRKLERHNNRRRRKPVNVVEASVQEQTLRAESALQSADTEPHNNGKSGQASKSFSYPGCGEKQSSSGSEERNISEVEQPYKGDSSLKNVGSRSDDVSKISSSSMPVKVSTELEGKLFPERDIGSGEKFDDEDVRVVENSRAIMLVGPRNGDNGSTYAELNEQSYTGMPMEENSHKDRFPHNISGRSEKDEGAGPLKSSLSSNRHDKHLSYTSVCPTGRISFKLYDWNPAEFPRRLRQQILQWLADMPIELEGYIRPGCTILTAFIALPQFMWEKLFANSPGYIHSLLNGSESILSGKGNMLVYLNDTIMQIKNGEACLVDTKMDMRIPKLLSVHPISFEAGYPIEIVACGRNLLQSKYRFLISFHGNYLHYGTCEAIPLGNPGSSFRSKENIFHSSNHESFKIFIPSTDPRLFGPAFIEVENEYGISNFIPILIGDKEICSEFQMLEQEVVKSGFCCRSNHGLAIGSSNSDICEQNVVKRQSILELLLDIGWVLKDPEPDENKVPVNFVHIQRLNCLFSYLINGHLLAMTEKVLHSPKVVKMLRQVYGKSNEVNGADIKLLQNYVEHAWQSLRKKPNYKVTTDFQWFLDNVVLQGCPSSMKIATLSCNQQPRKVSQESQEMEPLLEIQTETRPSSGIESIDTRVLSVEENNMLTPLLEKECSSSIASDMKYNSTWRGPKIEVAEYTRKMKVCLKGDIRVDRRIFILAITVISVCAGICVVLQHPHQVMEISMSLRRCLSGLRKAHEDISRP

SEQ ID NO: 9719 - protein, 491 aa, Picea sitchensis
MAASFKCPVGTLSGVENISNWDKAIRGINSRTSFTGNSSLQRYPGANKIFFRTCGKKGSCCLFNIRAMADTANGNGVPQLDISLSPRVAALKPSKTMAITDHATALKQAGIPVIGLAAGEPDFDTPDAIVEAGIKAIQEGYTRYTPNAGTMEIRTAICHKLKEENGLSYTPDQILVSNGAKQSIMQAVLAVCSTGDEVIIPAPFWVSYAEIPRLADATPLIIPTLLSEDFLLNPEALSSKLTEKSRLLILCSPSNPTGSVYPREVLEEIAKIVAKHPRLLVLSDEIYEHIIYQPAKHTSFASLPGMWERTLTVNGFSKAFAMTGWRLGYLAGPKHFVTACARIQSQTTSGASSISQKAGVGAMGLGYAGSEVVSTMVKAYKERRDFLVQRLQALEGVKLSVPQGAFYLFPDFSSYYGTEVEGFGVIDCSEALCRFFLEKAQVALVPGDAFGNDDCIRISYAASLDTLRTAINNIEKSLLLLRPAAAASKAS

SEQ ID NO: 9720 - protein, 492 aa, Picea sitchensis
MDREGTQTSLELELPSRNHASDIEDHRRHNGHSLDSEKFDDDGRPRRTGTLWTASAHIITAVIGSGVLSLAWSMAQLGWIAGPAVLIAFSFITLYTSALLADCYRSLDPVNGKRNYNYMAAVKANLGGLQTWLCGFTQYSNLYGTAIGYTITASTSMAAINRSDCFHSKGKNYPCHPSNNPFMIMFGIVQLILSQIPDFDQLWWLSIVAAVMSFSYSSIGLGLSIGKVAEGNFHGTLTGVTVGTITGAQKVWQTFQALGDIAFAYSYSMILIEIQDTLRSPPAENKTMKKATVLGVSVTTLFYTLSGCFGYAAFGNSAPGNLLTGFGFYNPFWLVDFANACVVVHLVGAYQVFVQPLFAFIEEWCSHKWPRSQFIHKSYNINIPGYGLYKANLFRLVWRTCFVISTTLISMLLPFFNDVVGILGAVGFWPLTVYFPVEMYIAQKKIRRFTTKWMLLQTLSVVSFIVSLAAAAGSIEGIIQDLKSYKPFRTTY

SEQ ID NO: 9721 - protein, 463 aa, Picea sitchensis
MNPDKFTHKTNEALAAGLEIATDSGHAQYTPVHLAIALIEDKAGILRQAISSAAGGDETVEAVLRVLRQALKKIPSQDPAPDSIPPNTSLIKSIRRAQSSQKSKGDTHLAVDHLILGVLEDSQVSDCFREAGVSAARVKSEVEKLRGEGKKVDTASGDTNFQALKTYGRDLVEDAGKLDPVIGRDEEIRRVVRILSRRTKNNPVLIGEPGVGKTAVVEGLAQRIVRGDVPSNLLDVRLIALDMGALVAGAKYRGEFEERLKSVLKEVEDAQGKVILFIDEIHLVLGAGRTEGSMDAANLFKPMLARGQLRCIGATTLEEYRKYVEKDAAFERRFQQVYVAEPSVTDTISILRGLKEKYEGHHGVRILDRALVVAAQLSSRYITGRHLPDKAIDLVDEACANVRVQLDSQPEEIDTLERKRIQLEVEMHALEKEKDKASKARLVEVRKELDDLRDKLQPLKMKY

SEQ ID NO: 9722 - protein, 512 aa, Picea sitchensis
MANVFYSERPIMEYAEFYNKFAFAFLLAFAASCGFLIRRRKRRLPPGPFPLPIIGNLHLLLGELPHQALAALSLKCGPLMSLRLGSSALTLVVSSADMAKEFLKNNDRLFAGRPQSMAAKYLSYNFSNVGYAPYGAYWRQMRKICVLQLLSSKRLESFRFIREEEVSTMIRSIISDSEGSLPVSISKAVSTLATSIICRMAFGRKYSDQQLIESIKESFLLAGTFNIGDYIPYLAWLDLQGLKRRFKKIHKTVDHFFDNVIEEHIARNDPNVTPDLVDVLLAICADKDTEFQIKRKHIKGVIADMFAAGTDTSSIGIEWAMSEVLRNPPVLKKLQDELERVVGMGRMVQESDLPSLVYLQAVVKEALRLHPPGPLAIPHLSVEDCTVLGYEIPGGTCVLLNLWAIGRNPKSWEDAESFKPERFMEATGSELDAKVQNLEWIPFGAGRRGCPGQQLGMLVVEFGMAQLLHCFNWKLPDEINGQELDMVERFNGLTLPRAHELLAVPTPRLSLR

SEQ ID NO: 9723 - protein, 478 aa, Picea sitchensis
MRWLDKIFKGSNHRISEGQYQGVFADENSVWDMPSGSLDGHAHSGNEDLDHAIALSLSEEEQRKANNIGGSSEVDDDEELARALQASLDIGSPPRSNQSSIYPSTHAYPTGYKICAGCNTEIGYGRFLSCMGAVWHPQCFRCHACGEPISEHEFSMSGNDPYHKSCYKELYHPKCDVCSHFIPTNRAGLIEYRAHPFWGQRYCPSHEHDNTPRCCSCERMEPRNVQYISLDDGRKLCLECLDSAIMDTNECQPLYLEIRDFYEGMNMKINQQIPMLLVERQALNEAMQGEKEGSHHMPETRGLCLSEEQTVSSISRRPRIGGNRIIDMFTESKKLTRRCEVTAILILYGLPRLLTGSILAHELMHAWLRLNGFRTLSPDVEEGICQVLSHMWLESEVMAGSGSSSHGASTSSGISSSSSSKKGAKSQFEKKLGDFFMHQITMDSSPAYGDGFRAGNAAMLRYGLKRTLDHIRLTGNFP

SEQ ID NO: 9724 - protein, 327 aa, Picea sitchensis
MLRIVMAFFSTMGIRIAVCISLLVIVCSTSVYGQLCPDFYDKSCPNVLSIVNSVVMQAVAKEKRMGASLLRLHFHDCFVNGCDGSILLDDTSTFTGEKTANPNNNSVRGFDVIDTIKTQVEATCSGVVSCADIVAIAARDSVVQLGGPTWTVMLGRRDSTSASKSAANNNIPPPTSNLSALISFFQAQGLTTEDMVALSGSHTIGQARCTNFRNRIYNESNIALLFAGLRKANCPVTGGDNNLAPLDLFTPTAFDNSYYNNLQFQNGLLHSDQQLFKGGSTDNRVSFYAVHPDAFFNDFAAAMVKMGNIKPLTVNNGEIRKNCRKIN

SEQ ID NO: 9725 - protein, 380 aa, Picea sitchensis
MAQTGWENRFCREHDDQQVNCLELALPPAMETYPFGTGVLNFEGSEGYEATSEVKMIMGSVHDHGCSPRSSAASLSLDNGLVDHKDDNIYVADHVELEGIRLNSESEKAAAGIDHPADQYDQLKYNYASLASEDEMIDTWSPHEARKDAALIINRSGAHFQSSDAEIGEPSARLDPVENYLSGGGFPVAQKESSWIRSASKSRKTLFNNEENLQEWPKLGTSFSSSTKDSTTETPLNHGVGGSRNNVPRVCVDCKTTKTPLWRSGPQGPKSLCNACGIRYRKARRALSAFGNSDHIAAEACNSTSPKRKLVDNREKRAEKFNVHFKKRSRLSIPSLKKFVPSPIHLETNSSHSAFQRVFAQDEEEAAVLLMALSCGLVHV

SEQ ID NO: 9726 - protein, 147 aa, Picea sitchensis
MGSLVIPEFVALSAQKFHHPLTATQSRSHGYGIISMCASVGSQIEFSIKDKISENPLIIYSKTRCPYCRAVKTLFNRLGVKPVVVELDELGPAQYQLKNALKRLTGQSTVPNIFIGGKHIGGCSETMALHKKGELIPLLSASGLKVS

SEQ ID NO: 9727 - protein, 235 aa, Picea sitchensis
MSAEVVVGQGGSSATAAQLAPSSSSNGINEGSRELAASPAPSRYKSQKRRDWNTFGQYLKNHRPPLALPRCSGAHVVEFLHYLDQFGKTKVHVPACPFFGHPHPPAPCACPLRQAWGSLDALIGRLRAAYEENGGKPESNPFGARAVRLYLREVRESQAKARGIAYEKKKRKRPPIQQQQQQQQQHVLQHQHQHQHQHQHQLHLQHQHQQQAPTHFVPNDPNSNVPMMIAVPNPN

SEQ ID NO: 9728 - protein, 512 aa, Picea sitchensis
MANVFYSERPIMEYAEFYNKFAFAFLLAFAASCGFLIRRRKRRLPPGPFPLPIIGNLHLLLGELPHQALAALSLKCGPLMSLRLGSSALTLVVSSADMAKEFLKNNDRLFAGRPQSMAAKYLSYNFSNVGYAPYGAYWRQMRKICVLQLLSSKRLESFRFIREEEVSTMIRSIISDTEGSLPVSISKAVSTLATSIICRMAFGRKYSDQQLIESIKESFLLAGTFNIGDYIPYLAWLDLQGLKRRFKKIHKTVDHFFDNVIEEHIARNDPNATPDLVDVLLAICADKDTEFQIKRKHIKGVIADMFAAGTDTSSIGIEWAMSEVLRNPPVLKKLQDELERVVGMGRMVQESDLPSLVYLQAVVKEALRLHPPGPLAIPHLSVEDCTVLGYEIPRGTCVLLNLWAIGRNPKSWEDAESFEPERFIEATGSELDAKVQNLEWIPFGAGRRGCPGQQLGMIVVEFGMAQLLHCFNWKLPDEINGQELDMVERFNGLTLPRAHELLAVPTPRLSLG

SEQ ID NO: 9729 - protein, 423 aa, Picea sitchensis
MELAAEDDTKKTNARSGGGKRGKFNKVVLAYSGGLDTSVIVPWLRENYDCEVVCFTADVGQGVGEMEGLEAKAKASGASQLVIKDLKEEFVKEYVFPCLRAGAVYERKYLLGTSMARPVIAKAMVDVAREVGADAVSHGCTGKGNDQVRFELTFFALNPKLNVVAPWREWDIKGREDAIEYAKKHNVPVPVTKKSIYSRDRNLWHLSHEGDILEDPANEPKKDMYVMTVDPEEAPEEPEYVEIGIVSGVPVSINGKELSPANLLAILNELGGRHGIGRVDMVENRLVGMKSRGVYETPGGTILTTAVRELESLTLDRESMQVKDTIALKYAELVYAGRWFDPLRQSMDAFMEKITETTTGAVTLKLYKGSLSVASRRSQYSLYRQDISSFEEGSGIYNQADAAGFIRLYGLPIRVRAMLENGL

SEQ ID NO: 9730 - protein, 687 aa, Picea sitchensis
MREGFGKAPAMGRKQKCTVFNSTGKDFNGFMFLAAFIIAGFLVSSVIAAEEAAKLGTVIGIDLGTTYSCVGVYKNGHVEIIANDQGNRITPSWVAFTDTERLIGEAAKNQAAMNPERTVFDVKRLIGRKYEDKEVQRDVKLLPYKIVNKDGKPYIQVKIRDDEIKVFSPEEISAMILLKMKETAESYLGKKIKDAVVTVPAYFNDAQRQATKDAGVIAGLNVARIINEPTAAAIAYGLDKKGGEKNILVYDLGGGTFDVSILTIDNGVFEVLSTSGDTHLGGEDFDQRIMDYFIKLVKKKHNKDISKDKRALGKLRRECERAKRALSSQHQVRVEIESLFDGVDFSEPLTRARFEELNMDLFKKTMGPVKKALEDANLQKTEINELVLVGGSTRIPKVQQLLKDLFDGKEPNKGVNPDEAVAYGAAVQGGILSGEGGDETKDILLLDVAPLSLGIETVGGVMTKLIPRNTVIPTKKSQVFTTYQDQQTTVSIKVYEGERSLTKDCRELGKFDLSGIPPAPRGVPQIEVTFEVDANGILNVRAEDKGTKKSEKITITNDKGRLSQEEIDRMVKEAEEFAEEDKKVKERIDARNNLETYVYNMKSTINEKDKLADKIDSEDKEKIEDALKEALDWLDENQSAEKDDFEEKLKEVEAVCSPIIKKVYEKTGGPSGGDGGDDEEDDSHEEL

SEQ ID NO: 9731 - protein, 124 aa, Triticum turgidum
MAQLLQPPALPTTATIVPLCRDAFTSLTSNELIMAIDTEMMVVVARHPTMQMHEREAKVMRYRAKRKRRRYDKKIRYESRKAYAELRPRVNGRFVKVPEAPAPLAPPASPYDHSNLTSDGSSKL

SEQ ID NO: 9732 - protein, 317 aa, Oryza sativa Japonica Group
MIMLLQEMENHPVQCMAKTNYDFLARNNYPMKQLVQRNSDGDSSPTKSGESHQEASAVSDSSLNGQHTSPQSVFVPSDINNNDSCGERDHGTKSVLSLGNTEAAFPPSKFDYNQPFACVSYPYGTDPYYGGVSTGYTSHAFVHPQITGAANSRMPLAVDPSVEEPIFVNAKQYNAILRRRQTRAKLEAQNKAVKGRKPYLHESRHHHAMKRARGSGGRFLTKKELLEQQQQQQQQKPPPASAQSPTGRARTSGGAVVLGKNLCPENSTSCSPSTPTGSEISSISFGGGMLAHQEHISFASADRHPTMNQNHRVPVMR

SEQ ID NO: 9733 - protein, 1214 aa, Nicotiana tabacum
MKPHNSAMYQHHFSLNKIFLLSFSLQPLFILLLIIFFLPPASPASVNGLFKDSQQLLSFKSSLPNTQTQLQNWLSSTDPCSFTGVSCKNSRVSSIDLTNTFLSVDFTLVSSYLLGLSNLESLVLKNANLSGSLTSAAKSQCGVSLNSIDLAENTISGPVSDISSFGACSNLKSLNLSKNLMDPPSKELKASTFSLQDLDLSFNNISGQNLFPWLSSMRFVELEYFSVKGNKLAGNIPELDFTNLSYLDLSANNFSTGFPSFKDCSNLEHLDLSSNKFYGDIGASLSSCGKLSFLNLTNNQFVGLVPKLPSESLQFLYLRGNDFQGVFPSQLADLCKTLVELDLSFNNFSGLVPENLGACSSLEFLDISNNNFSGKLPVDTLLKLSNLKTMVLSFNNFIGGLPESFSNLLKLETLDVSSNNITGFIPSGICKDPMSSLKVLYLQNNWFTGPIPDSLSNCSQLVSLDLSFNYLTGKIPSSLGSLSKLKDLILWLNQLSGEIPQELMYLKSLENLILDFNDLTGSIPASLSNCTNLNWISMSNNLLSGEIPASLGGLPNLAILKLGNNSISGNIPAELGNCQSLIWLDLNTNFLNGSIPGPLFKQSGNIAVALLTGKRYVYIKNDGSKECHGAGNLLEFGGIRQEQLDRISTRHPCNFTRVYRGITQPTFNHNGSMIFLDLSYNKLEGGIPKELGSMYYLSILNLGHNDFSGVIPQELGGLKNVAILDLSYNRLNGSIPNSLTSLTLLGELDLSNNNLTGPIPESAPFDTFPDYRFANTSLCGYPLQPCGSVGNSNSSQHQKSHRKQASLAGSVAMGLLFSLFCIFGLIIVAIETKKRRKKKEAALEAYMDGHSNSVTANSAWKFTSAREALSINLAAFEKPLRKLTFADLLEATNGFHNDSLIGSGGFGDVYKAQLKDGSVVAIKKLIHVSGQGDREFTAEMETIGKIKHRNLVPLLGYCKVGEERLLVYEYMKYGSLEDVLHDRKKNGIKLNWHARRKIAIGAARGLAFLHHNCIPHIIHRDMKSSNVLLDENLEARVSDFGMARLMSAMDTHLSVSTLAGTPGYVPPEYYQSFRCSTKGDVYSYGVVLLELLTGRTPTDSVDFGDNNIVGWVRQHAKLKISDVFDRELLKEDPSIEIELLQHFKVACACLDDRHWKRPTMIQVMAMFKEIQAGSGIDSSSTIAADDVNFSAVEGGIEMGISESIKEGNELSKHL

SEQ ID NO: 9734 - protein, 574 aa, Rhodomonas salina
MLSNTLKQRDKTGSFALIDSLVRHGVKHIFGYPGGAILPIYDELYAWEKEGLIEHILVRHEQGAAHASDAYYRSTGKVGVCFATSGPGATNLVTGIATAQIDSVAMVIITGQVGRSFIGTDAFQEVDIFGITMPIIKHSYIVHHASKMSQIVAASFFIAQYGRPGPVLIDVPKDVGLEKFDYQPIEPGQVHLPGCPDIIKDNSKRIKQAVSLIKQSNQPLLYVGGGAIISGAYKEISELVELLKVPIATTLMGKGVIDEEHPLCLGMLGMHGTVYANYAVSECDLLIALGARFDDRVTGKLDEFACHAQVVHIDIDPAEVGKNRMPQVGIVGDVKESVKAILDVLKKEDYLEPEQTQAWRQRLDRWRKEYPLLVPKSAQSLSPQEVITEISNQAQDAFFTTDVGQHQMWAAQFIKTSPRKWITSAGLGTMGYGLPAAVGAQVAHPNSQVICISGDSSFQMNLQELGTVAQYGLPIKVIIINNRWQGMVRQWQQAFYGERYSHSNMEKGAPNFVQLAESWGIKGVVIKSRKDLNQSIKEILDYDGPIVADIQVISDENCYPMVAPGKSNAQMMGV

SEQ ID NO: 9735 - protein, 819 aa, Rhodomonas salina
MFERFTEKAIKVIMLAQEEARRLGHNFVGTEQILLGLIGEGTGIAAKVLKSMGVNLKDARVEVEKIIGRGSGFVAVEIPFTPRAKRVLELSLEEARQLGHNYIGTEHLLLGLIREGEGVAARVLENLALDLSKVRTQVIRLLGDTAEVTAGGGQNKGKTPTLEEFGTNLTQKAAEGKLDPVIGRQKEIERVIQILGRRTKNNPILIGEPGVGKTAIAEGLAQRITNRDVPDILEDKRVVTLDIGLLVAGTKYRGEFEERLKKIIDEIRVANNVILVIDEVHTLIGAGAAEGAIDAANILKPALARGEMQCIGATTLEEYRKHIEKDSALERRFQPVMVGEPSVEETIEILYGLRDRYEKHHKLVISDEALSAAAKFADQYIADRFLPDKAIDLIDEAGSRVRLMHSQLPPAARELDKELREILKQKDEAVRGQDFEVAGQLRDREMEIKAQIAAIAQSKKGEEDTSKEVSVVTEEDIAQIVAAWTGIPVNKMTRSESEKLLHMEDTLHGRIIGQDEAVVAVSKAIRRARVGLKNPNRPIASFIFSGPTGVGKTELTKALASYFFGSEEAMVRLDMSEYMERHTVSKLIGSPPGYVGYNEGGQLTESVRRRPYTVVLFDEIEKGHPDVFNLLLQILEDGRLTDSKGRTVDFKNTLLILTSNVGSKVIEKGGGGLGFEFSEDQADSQYGRIKALVNEELKQYFRPEFLNRLDEIIVFRQLTKDEVGEIAEIMLKEVFTRISEKGIQLEVTARFKTHLIDEGYNPIYGARPLRRAVMRLLEDTLSEEFLSEKIKEGDTAVVDVDDDGKVQVLLGEKLELAKN

SEQ ID NO: 9736 - protein, 253 aa, Rhodomonas salina
MISDSSKIILDIKDLVATVGTTQIINGLNLSVKEGEIHAIMGKNGSGKSTLAKIIAGHPAYTVNSGDILFEGESVLEIPAEERAQQGIFLGFQYPIEIPGVSNADFLRLSYNARRKFQKLPELEPLEFFEFINKKLEVVGMESSFLNRNVNEGFSGGEKKRNEILQMAVLDTKIAILDETDSGLDIDALKTVASGINKLATAANGIVLITHYQRLLDYISPDYVHVMRNGEIIKTGDSSLAKELELKGYDWID

SEQ ID NO: 9737 - protein, 629 aa, Rhodomonas salina
MGKVVGIDLGTTNSVVAVMEGGKPSVIQNAEGFRTTPSVVAYTKNGDRLVGQIAKRQAVINPDNTFYSVKRFIGRRSEEVTDELRQVSYVVKNDSNGAIKLECPAMKKEFSSEEMSAEVLRKLAEDASKYLGETVKQAVITVPAYFNDSQRQATKDAGKIAGLEVLRIINEPTAASLAYGLDKKNNETILVFDLGGGTFDVSVLEVGDGVFEVLSTSGDTHLGGDDFDNKIVEWLLKEFKEEHSIDLKGDRQALQRLTEASEKAKVELSNLTQAEINLPFLTATETGPKHLERSLSRSKFEDLCSSLIERVKVPVENALSDAKLDASKIDEVVLVGGSTRIPAVQAAVNKILGKQPNQTVNPDEVVAVGAAVQAGVLAGEVKDILLLDVTPLSLGVETLGGVTTRIIPRNTTIPTKKSEVFSTAVDNQPNVEIHVLQGEREFAKDNKSLGTFRLDGILPAPRGVPQIEVTFDIDANGILSVTAKDKGTGKEQSITITGASTLPSDEVDRMVRESEKNAAEDKEKRERIDLKNQSDSLCYQSEKQIKDLGDKVTEEDKNKIEASITKLREAVEKDDYEAMGTLNKVLQDELMEIGKKVYSKAETPNQEPSKSEKTRDNDSVIDADFSETK

SEQ ID NO: 9738 - protein, 248 aa, Rhodomonas salina
MIDTLENHKEKILVVDDEASIRRILETRLSMIGYNVVTAADGEEALNLLKKENPNLIVLDIMIPKLDGYGVCQEIRKESDVPIIMLTALGDVADRITGLELGADDYVIKPFSPKELEARIRSVLRRVERVHFNPGIPTSGVMTVGFLTIDMNKRQVYKSNNRIRLTGMEFNLLELLVSKSGQAFSRADILQEVWGYTPERHVDTRVVDVHISRLRAKLEDDPSNPDLILTARGTGYLFQRVTEINKMN

SEQ ID NO: 9739 - protein, 180 aa, Cucurbita moschata
MPRDRDPLVVGRVIGDVIDSFSRSISIRVAYNSRKVKNGCELKPCQVINKPRVEIGGTDLRTFFTLVMVDPDAPSPSDPNLREYLHWLVTDIPATTEATFGQEIVCYENPRPTAGIHRFVLVLFRQLGRQTVYAPGWRQNFNTRHFAELYNLGSPVAAVYFNCQRENGSGGRRRAGDECS

SEQ ID NO: 9740 - protein, 179 aa, Cucurbita moschata
MPRDRDPLVIGRVIGDVIDSFTRSISIRATYNNREISNGCELKPSQVVNQPRVEIGGTDLRTFFTLVMVDPDAPSPSDPNLREYLHWLVTDIPATTGATFGQEIVCYESPRPTVGIHRLVLVLFRQLGRQTVYAPGWRQNFNTRDFAELYNLGLPVAAVYFNCQRESGSGGRRRSQDDF

SEQ ID NO: 9741 - protein, 333 aa, Clostridium acetobutylicum ATCC 824
MDLIESIWECAKQDKKRIILAEGEEKRNLIAADKIIKEGLAELVLVGDENKIKEKASELNLDISKAEIMDPETSLKTETYARDFYELRKHKGMTIEKSEKMVRDPLYFATMALKDGYVDGMVSGAVHTTGDLLRPGLQIIKTAPGVKIVSGFFVMIIPDCDYGEEGLLLFADCAVNPNPTSDELADIAITTAETARKLCNVEPKVAMLSFSTMGGAKGEMVDKVKNAVEITKKFRPHLAIDGELQLDAAIDSEVAALKAPSSNVAGNANVLVFPDLQTGNIGYKLVQRFAKAKAIGPICQGFAKPINDLSRSCSSEDIVNVVAITVVQAQRGI

SEQ ID NO: 9742 - protein, 401 aa, Clostridium acetobutylicum ATCC 824
MKNLVINCGSSSIKYQFIDMKDETVLAKGLVERIGIKGSVITHKVNGEKYVTETPMEDHKRAIKLVLDALLNDEYGVIKNIDEISAVGHRIVHGGEKYANSVLIDEDVMKSIEDCVSLAPLHNPPHIIGINACKELMPNVPMVAVFDTAFHQTIPDYAYMYAIPYEYYDKYKIRKYGFHGTSHKYVSRTAAEFIGKKVEDLKMVVCHMGNGASITAVENGKSVDTSMGFTPPGGLAMGARSGDMDPAVVTFLMDKLNINASEVNNLLNKKSGIEGLSGISSDMRDIKKGNYVDKDPKAMLAYSVFTYKIKQFIGSYTAVMNGLDCLVFTGGIGENSFENRREICKNMDYLGIKIDDKKNDETMGIPMDISAEGSKVRVLVIPTNEELMIARDTKDIVGKLK

SEQ ID NO: 9743 - protein, 66 aa, Bacillus sp. SG-1
MKQGTVKWFNAEKGFGFIEVEGENDVFVHFSAITGEGFKSLDEGQRVEFEVVEGNRGPQAANVVKL

SEQ ID NO: 9744 - protein, 175 aa, Bacillus sp. SG-1
MEKAVFLDRDGVINEVLSKRVKFVNKPSDIYYLEKVPEAIKMLNDKGYKIFIVTNQGGVGLGYLSKEGLERIHTRMKHDIEKEGGIIEEFSSCIHKPYEGCACRKPEAGMILSLAEKYEIDISQSYMIGDREPDIEAGKKAGCATILIANQDPENLADHYFPSLYEAAKFLYGQS

SEQ ID NO: 9745 - protein, 192 aa, Bacillus sp. SG-1
MKEVIVIIAVFLDRDGTIGGTGGGVHPSEFSMYDFSPHAIKKLNELGIKVFLFTNQTRVGRGYFTEEELLKGLERMKGDLAEHSAFLDAIYYCPHKPDDECSCQKPKAGMLLKAKSEYNLKLEQCYIVGDTGSSDMAAAEAVGAKKVLVKTGWGISSLTTHRHTWQGIEPDAVTEDLVGAVEWIGNDLLLKG

SEQ ID NO: 9746 - protein, 522 aa, Bacillus sp. SG-1
MYRTTQKIRITYGRGMKMKKISSVFWITVAIVLAALIFGVSAPDSFEESTARVQSFITTRFGWYYLILVTSIVIFCIFLIISPIGTIRLGKPDEKPEYNTTTWFAMLFSAGMGIGLVFWGAAEPLSHFIAPPLAEGGTNEAIKEGMRYTFFHWGIHAWAIYALVALALAYFQFRKGEPGLVSATLKPIFGDRVNGPLGTVIDVLAVFATVVGVATTLGFGAAQINGGLSYLLGIPNNFTMQFIIIAIVTVLFMISAWSGLSKGIKYLSNTNMVLAIALLVLMFIVGPTLLILNLFTDTLGAYVQSLVRMSFRIAPLNEDHQSWINGWTIFYWAWWISWSPFVGIFIARVSRGRTIREFLFGVLLLPSLVSMLWFSVFGTTAIELQQLGAVDLTTFATEEVLFAVFNQIPLSAILSVVAVILISTFFITSADSATFVLGMQTTYGSLTPPNTVKLTWGIAQSTVALILMYSGGLQALQNALIIAAFPFSMIMILMMVSLYRALTKEKKELGLYLKPKPRNKIR

SEQ ID NO: 9747 - protein, 207 aa, Bacillus sp. SG-1
MDLAKIKGKFHNRTPRILGSNDYYRFSVLLPLIEVNEDIHILFEVRSEQLRRQPGDICFPGGKVDKEDRTEKFTAIRETCEELGIGEENLSDIYPMDYIVSSFGTFIFPYVAVLEKNADIRPNPSEVAETFTVPLSFFMSNEPNVYKVGFTIEPEEDFPLDLIAGGENYNWQTRKVDEYFYFYEDRVIWGLTAKILKHFTDELKESN

SEQ ID NO: 9748 - protein, 66 aa, Bacillus sp. SG-1
MEKGTVKWFNAEKGFGFIEVEGGEDVFVHFSAIQGEGFKSLDEGQAVTFDIEQGQRGPQAANVSKA

SEQ ID NO: 9749 - protein, 496 aa, Bacillus sp. SG-1
MNNFKSLGISEAVIERLQKENVTTPTPIQEKAIPAVIKGKDVIAQAQTGTGKTLAFILPIIENFDFNQQSIQALIVTPTRELALQITEEVRKLIRHIEGISVLPVYGGQDVEKQLNKLRKNVGIVVGTPGRILDHIGRGTIDLSELNSLVLDEADQMLHIGFLKEVEMIIRETPKTRQTLLFSATIPDEIKTLAKKHMKSPEYISVERKQGPAKSVEQKAVFVNDRAKQATLIEMIKEYRPYLAVIFCRTKRRVTKLYEALASEGFMCDELHGDLSQAKREKVMKRFRDAEFQLLIATDVAARGLDVEGITHVFNYDIPEDADSYVHRIGRTGRAGEKGLAVTFYSPQQKDQLAEIEKELNIRLPKQNIGNIIDRDDTEKRKPKKAASRKEHTSRDKKPREDRKGSRSKQENHSRNGKGKKGEAADSTRSSQKPKTSSKPKKRSNMLEAKEVKRGALHKFADKNSGGKNKRGSTSKSSAEGRRGRSSSGLKNKRNK

SEQ ID NO: 9750 - protein, 444 aa, Bacillus sp. SG-1
MNNGLKRELGKWHGYALMIGGMIGSGIFVVTGEAGAQAGPSVPFGYVVLLPVLLCSALAYLIFMSTPLGNSPGGAYVHISRTFNNYFAGFLFMWFQYIALLGVMAIMAISFGDYISGVIGAGNTAILATALLLVFYLLNIIGVKWFGVVQLVMSAILFVAILVLVVPGVFFIETENFSPMLPNGWSGFVAILPSLFFAYFGFEQLAQAGGEMKDPQKAMPRTMLIGSFATVVIYFLISIVAFGVVPYDQLAQSQSAMFDVASVYLPAGGKWIVMTGIIMAFATTLNSLVMVVSRMLFAFAEDCVIPEGIAKVNKRFNTPHIAITINTIIVLALIWTRTLDYLLNVALQGMFLMYIGHAIAMIALPFVRPALFQTALIKPKLPLVIFCGIFSLSVLLFFSYTLIFSVIKLLLIWTAVGIVIFLLGRRQGKSKQFDYKTQLENAWK

SEQ ID NO: 9751 - protein, 384 aa, Bacillus sp. SG-1
MREVVIVEGVRTPVGRRKGQLKDIRPDDLAALVLQEVVKRAGIESKLIEDVILGCVTQAGEQAGDIARVAALIAGFPIEVPGTTIDRQCGSSQQAVHFAAQAILAGDMDVVIAGGVENMTRVPMGSNYQDAIPFSPKLKERYEIIHQGLSAERIAEKYGFTRTELDEYSAESHRRALSAQAEGYFKREIMPVEITLEDGEKAFVTEDSGPREGTTAETLSGLKTVFKEDGVIHAGNSSQISDGAASLLLMSREKAEELGLKPRFKVHTRVVVGSDPTLMLTGPIPATEKVLQKSGLKIEEIDIFEVNEAFAPVPMAWLKETGADPANLNPNGGAISLGHPLGASGARLMITMMHELERTGGRFGLQTMCEGHGMANATIIERLD

SEQ ID NO: 9752 - protein, 483 aa, Bacillus sp. SG-1
MISLINEEVLATWISDSFSFAVTYLGAFWQLLLLGTFLIGLGLAVSKTGTVRLGKLDSPEIGYFRWMAMVLCTLLASGGVFWAAAEPMYHFLSTPPLFAEEGASPADAVIPALAQSYVHWGFLAWAILGSLTTIILMYAHYHKGYPLKPRAILYPIFGEKIYNSWLGTLADVVSIIAVSAGTIGPIGFLGLQVGYGLHSLFDVPNTLATNIFVILALVAIASISAATGIERGIQWLSRVNVSLTVVLMIAILILGPTMFIIDAFIGAESFHIQNFLRMTLYRADNDWLGWWTVFFWGWFLGYGPMMAIFISRISRGRTIRDIVIGLSVVAPIVSNFWFTVVGGSGIFHEIQKPGSISTALNESGMPAAVIAIMNQIPFGYALSIGFLIVTIVFVATTADSMSYTVGVAITGSDNPAKWIRVFWALIFGALAIVLLSIGEGSIGTLQNFIVVTAVPVSLLLLPSLWLAPKVAREMLVEQERTKL

SEQ ID NO: 9753 - protein, 322 aa, Bacillus sp. SG-1
MNFKVLIPQPIAKEGIDLLEKEGAEVIIPPDYNEETLISHVSDVDAILIRTAKLSRVVIEKASKLKVIARHGIGVDNIDLEAASDRGILVTNAPFANVNAVAEHVLTLILSGSRQLIQVDSALRNGDFEVRNRKFGIELKGKTLGVVGFGNIGQLVAEKCHYGLGMDVLVYDPYVREENVSSYVQLNQSLSEVLASSDIVTIHVPYLPSTHHLINEEALQQMKKDAILVNAARGGIIDEIALEKALGSGEIRGACLDCFETEPPAVDHSLWNLENVIVTPHLAAHTEEAMIEMAVTPAKDIIAIMKGEKPLYPVNEKEIKVS

SEQ ID NO: 9754 - protein, 510 aa, Bacillus sp. SG-1
MKSATNVFYVSLAIMTGLVLMGVFVPEFLESVTSSAQGCILNSFGWYYLAIVTVFVGVCVYLLVSPVGRIKLGRQDDVPEFTRPTWVAMLFSAGLGVGLLFYGTFEPISHFAISSPTGETGTNQGVKDAMRFTFFHYGIHAWAIYGSIALALAYFTFRRGERSLISKTLRPLIGKHVDGAVGTVIDVIAVIATILGVATTLGFGASQINGGLSYLFGVPTNIMVQTIIVGIVTVLFIISASTGLGKGIKILSNLNMGLTAILFLFVFIFGPTLFILNLLVDTVGAYFQNFLNMSFRIAPMNEEARGWINGWTIFYWAWWIAWSPFVGVFIARVSKGRTIREFIVYVLLAPSLICFIWFTTFGGAAITTELTGLLSISSLSPPESLFGLLETYPISMISSLLAIVIIVTFFVTSADSGTYVLGMMTSNGSQNPSNPIKIIWGIYLSGTALVLMYSGGLQALQNTMIIAALPFSIILGLIVISLLKALQREAKELGLGQIKMPDKKKPIKTP

SEQ ID NO: 9755 - protein, 517 aa, Bacillus sp. SG-1
MQMDRSVFRISVGISVVFVLIGVLLPEQLGSAMDVAKGFVLENFGWFYQLVATFFLIFAVFMIFSKYGKIKLGKQDSQPEFSRPTWFAMLFSAGMGIGLLFYGVSEPISHFSSPPLGDGGTAQAGITGMRYTWLHWGLHAWAIYAIVALALAYQKFNRGAPGLMSATLHPVIGEKVKGPIGKTIDVVAVFATLFGVAASLGLGSQQINAGLEYLIGIPNNFFVQFIIMMIITVLFIVSATTGISKGIKLLSNINMSLAVILFIAMLILGPTLFLMNMFTTTMGSYLQNVVQMGLRLSPFNADEAAWTQGWTVFYWAWWISWTPFVGMFIARVSKGRTIREFTIAVLLVPTLVCTLWFTVFGGTGINLQIAEGLDVSGQSLETALFFTYQQLPFGALLSVLTVALITTFFVTSADSATFVLGMLTTGGKLNPANSVKVVWGIILVASTLVLMASGGLTGLQTAIIVSALPLTFVVLVMCYGLVKELGKEYDMQMNHFKTKEKKAEEISHLERKPKITP

SEQ ID NO: 9756 - protein, 496 aa, Bacillus sp. SG-1
MSKATHVFWYALAISLIVVIWGAVAPENLNNFSSNLTGRILSDFGWFYLLIVIAILLFCVFLMFSKFGKLKLGKKDDEPEFSKTSWFAMLFSAGMGIGLVFWTTAEPISHAFISSPMSDEGSNEAIKEALKYSFFHWGVHAWAVYGIVGLILAYFKFNKGAPGLISATLTPLFGEEMMRGALGKIIDVLAVFATVIGVAATLGFGSAQITGGLSYLFGTPNNFTVQILVLAIATVLFIWSAWSGIGKGIKYLSNINMGLALFLLILLFIVGPSMYILNMFTDTLGRYISDFFDMSFRLAPLNEDNRSWINGWTIFYWAWWISWAPFVGIFIARISKGRTVREFLFGVLLLPSVVCFVFFAVFGVSALELEQLGTAAISELTLETSTFGVLAEYPLGFFMSVLTILVIAIFFITSADSATFVLGMLSTNGQLNPGNSVKIGWGLIQSTIAAVVVYFGGTQGLQNMLIIAALPFAVVMILMCVSFFKDIQKEVRSQRK

SEQ ID NO: 9757 - protein, 383 aa, Bacillus sp. SG-1
MIYFDNSATTKPYKEVLQTFLKVNEDYFANPSSIHALGGRVETLITKSRKQVASLLEIKETEVFFTSGGTESNNLALKGTALHYRNRGRHIITTVIEHPSIIETCEQLKELGFDITYLPVDSHGSVRVQDVLDALRDDTILVSIMHVNNEVGSIQPVEAIGKALKSYPKVIFHVDHIQGIGKVPLSFHEAGIDLCSISGHKIHGLKGTGMLYIKEGLKISPLLSGGEQERKIRSGTENTGGIVSFAKALRLHFEKSGKELEYIRKLNAYLRGKLNQIDGITIHSPAAGAAPHIVNFSVQDIRGEIFVHALEEFNIYVSTTSACSSKKNIPSRTLQGMGVNESLLDTSVRVSFSFENTKEEVDAFCSAIEKVKKNLEETTRRRK

SEQ ID NO: 9758 - protein, 395 aa, Bacillus sp. SG-1
MAKMIAINAGSSSLKFQLFEMPQEEVITKGLIERIGLNDSVFSISVNGEKQKEVTDIPNHEVAVKMLLDKLTSAGIIESLDEIEGIGHRVVHGGEIFNDSVIITEEVIEKIEELSELAPLHNPANVTGIRSFQSVLPNVPAVAVFDTAFHQTMPESSFLYSLPYEYYENYGIRKYGFHGTSHKYVSERAAEMLGRPKEQLRLISCHLGNGASIAAIEGGKSIDTSMGFTPLAGVAMGTRSGNIDPALIPFIMEKTGKSADEVLDVLNKKSGMLGVSGLSSDLRDIESQAEEGNERAELALEVFANRIHKYIGSYASRMYGVDAIIFTAGIGENSDIVREKVLKGLEFMGIYWDPARNKVRGEETFINYPHSPVKVMIIPTNEEVMIARDVQRLTV

SEQ ID NO: 9759 - protein, 372 aa, Bacillus sp. SG-1
MRIGVPAEIKNNENRVAMTPAGVVNLTQFGHEVYIESGAGLGSGFTDEDYTAAGGHIVESASEAWSMDMVMKVKEPLPSEYQYFREGLILFTYLHLAPEPELTKALIENKVVGIAYETVEMNRTLPLLTPMSEVAGRMSTQLGAQFLEKIHGGKGVLLSGVPGVSRSRVTIIGGGVAGTNAAKIAVGMGAQVTILDLSPERLRQLDDIFGSDVQTLMSNPLNIEKAVAESDLVIGAVLIPGAKAPKLVTEDMIKSMMPGSVVVDIAIDQGGIFETTDRITTHDDPTYVKHGVVHYAVANMPGAVPRTSTIALTNVTVPYAIQIANKGYKAACLENEALLKGINTLNGYVTYKAVAEAHDLDYSDTKTLLDQI

SEQ ID NO: 9760 - protein, 430 aa, Bacillus sp. SG-1
MCSNVLEGGFFMSNAGCGPGNGSQSQSGDAGKGDLKWWQLSLMGVGCTIGTGYFLGSSIGIKNTGPSIVFAFILAAVGTYIVFNLLAKMTAEDPQEGSFCYYADKAYGKWAGFSCGWNYWASNILIMGSQLMALSLLSQFWFEKVPLWVFAAGYAILSIFVVLLGTKGFDKVEDILAIIKTAAIVMFIILAAAVYFGMLKGGGNKPEFPSSAGKLFPEGFKGFWSSLIYAFYAYGGIEVIGLMAMQLKKKEDAPKAGKIMLIVLMIIYVLSLALTVLLVSVDKFTPDESPFVTALAGSNLDFFPHVFNGAIIIAGFSAMTAALFGVTNLLVTMAKDENAPKLFSKKIKKFKELPLPSLGLAAAGLLLSVITALIVPGKIYEYITTAAGILILYNWAFIIISAFKILENKITGKLLAVFGMLLILAAVTVL

SEQ ID NO: 9761 - protein, 575 aa, Bacillus sp. SG-1
MQFVKPYRLQIIGTLIIGIIKFAIPLLIPILIQYVIDDIVGSDTLSNGEKKDKLLMIMGVMIVIFVIVRPPVEYYRQYFAQWTGSKILYDLRDKLFSHTQKLSFKYYSNTRAGEVISRLINDVEQTKNFVITGLMNLWLDVATIIIAVSIMFTYDVGLTLVSLIAFPFYAISVKYFFGNLRKLTRDRSQALAEVQSYLHERVQGMSVIKSFAVEDHEQNNFRGHNSHFLDKALKQTSWNAKAFAVVNTITDIAPLVVIGYAGLQVINGSLTVGVMAAFIAYIDRLYSPLRRLVNSSTTLTQSIASMDRVFEFMDEKYDVDDVPGAVECRNVKGEIIFDKVHFQYNTEDAEVLRDINLKIPAGETVALVGMSGGGKSSLVSLIPRFYDVTRGKITLDGKNIKDYEVRSLRNNIGMVLQDNILFSESVKENILFGKPGASDEDVIAAAKAANAHEFIMSLPEGYDTKVGERGVKLSGGQKQRVAIARVFLKNPPILILDEATSALDLESEHLIQEAMEKLAKDRTTFIVAHRLSTITHADRIIHIEYGEIAEMGTHSELMKKQGHYHKLFQVQQLDQ

SEQ ID NO: 9762 - protein, 1495 aa, Bacillus sp. SG-1
MFLLKEQRTQWSPELFKDFHNGAHDACGIVASIEKNKIPARENIDRCIEALITMDHRAGFINGEGDGAGIHIDIPRAVWSEKLEAASIDSSLALSPRFTIGHFFIKGIPVNQGTQEIVDKLEKQGFQVLLTDLDSTRPDTLGPIAAQENPHFLQAALLAPENQEKTKTYKQLFELLASIEENSAIHVASLSPDHAVYKVMGAGASLPKYYKDLTNPKVASTMTLGHNRYSTNTLSNFFRVQPFSVIGHNGEINTISKLRAEAKKIDVPLVENGSDSQDLNRTIETLIGRDGYSLFEAMELVFPPIINEIKQYPGHLQDLYTYLRETWGHFAQGPAGIISRFGEEAVFSVDSLGLRPLWLMEIESAYVFASEPGVIKSSEFTGDPKPLSPGEKVGFAWENDRITKYEYKEFQSEIYSRFESRIDFKGYKSRLETLNLPKHIMMSYPTSIENGQYNAFGWEREQVQLVEQMAEKGAEPIRSLGHDAPLAAINPNRKNVTDFIKESVAVVTNPAIDRDRETEHFSTRTIIGKRPHHNSKTEKHLAVELLTPLVIEGKAGWMASETLQQPSYDGLVHLFQQENLCHFISTTFTESETIQEALTRLADEAQEAVSSGKSLLVLDDGNSHHDGNLWLDPHLVLAAIDQRLTDVSLRRDCSLLIRSAAIRSLHDVIVAYGFGADVISPYYMFLTVLEEESNEPVLNLYTSLQKGLEKVISTIGIHELRGYGRLFSAIGLSDEVAETLNIVNFFGSASLAFNYEEMKKDAIQRAADYFDEKQRIAKSFHLFPRIWKAIGDVARTGDYSGYREKITEQEETKPVTIRHLTSLKKSEKTIDPSKVDISVGEHSLPFAIASMSFGSQNEIAFRAYAEAADRLNMVSLNGEGGEIKDMIGKYPKTRGQQVASGRFGVNAELLNSSNLLEIKIGQGAKPGEGGHLPGSKVTAKIAQARNATIGSDLISPSNNHDIYSIEDLAQMIHELKTANDQAKVAVKVPVVPNIGTIAVGIAKAGADIVTLSGFDGGTGAARIHALQHVGLPVEIGVKAAHNALLEAGLRDTVEIWADGGIKSMQDVMKVMLLGANRIGFGTLSMIAIGCTTCRGCHLDTCHVGIATQIESEAQAKDHGLRRFVPRQLDLAVSGLTNLFTAFGEELKALAASIGVQRLQDAVGRSDLLEQVSGKDSMNLSTLLQPLEIGQFHKEAAASLEQPNMLQAVAGEYLDSSVDELHLSREFSGVISNQRVLGSRASGHRVRSKLQNLSSELQPVQLSYKDCSIPGNGLGAYNVDGINITVSGGAQDGLGKSSYGGTITVTKGRTKNNHFFNGSAGKGFGYGAQQGLLMVQGNADARAGIRLSGADMVIGGLITKPIPAKEYGNIGANANIKGFAFEYMTNGRGLVLGDPGPWICAGMTGGVVYLRHQPEMGLTQEALNRRIAKGAKVQLQPLNDQGLEDVTELLTNYINVLENEQPEEAESLRKLLASPGDHFLQVIPSKEQADPSVSTE

SEQ ID NO: 9763 - protein, 481 aa, Bacillus sp. SG-1
MSKKSFADYHVSEEIQRALAVLKYETPTEVQNKVIPSALENQDLVVKAQTGSGKTAAFGIPVSDMIEWEEKKPQALILTPTRELAVQVREDITNIGRFKRIKAVAVYGKEPFSKQKDELKQKTHVVVGTPGRVMDHIERETLDLNQIKYLIIDEADEMLNRGFIDEVEAIIKELPSNRVTMVFSATLPKDVENLCHKYMNNPLQIEIESTGVTADTIEHSLIEVREEEKISLLKDITVVENPDSCLIFCRTKENVDTVYSELEKAGYPCERLHGGLEQEDRFSVMEGFKLGNFRYLVATDVAARGIDIDNVTLVINYDVPMEKESYVHRTGRTGRAGNKGKAITLSTPYEGKFIKAIERYIGFELPAVEAPSHSEVAAGKAAFEEKLSGRRVVRNNKTARINQDIMKLHFTGGKKKKIRAVDFVGTIAKIPGVSADDIGIITIHDQMSYVDILNGKGSLVLQAMEKATVKGKKLKVSKAIK

SEQ ID NO: 9764 - protein, 608 aa, Bacillus sp. SG-1
MMKNKEKVNPNILKRFYYSTDQVIDKPFNWEQLWRLLGYLKPYSKSLLPLSVIMVLLTTGVRLVIPILIGVYTLDKAIIERDTSMLTTLIITIAGLYILSYIANVLRIRWMNMLGQGVIYDLRKHLFSHVQWLSHRFFDQRSAGSILVRIMNDINSLQELFTNGVINLLMDMILLIGIIVILFTLSPPLTLAVLVILPIMFFISTSLRKKIRRSWQMVRLKQSKLNSHLNESIQGIRVTQSFTQEKENMAFFDGVNTESFDSWRNATRKSAMFRPLVEVTNAVGTAVLIWFGATLIQGDSITLGEFVSFAFYLGMFWEPISRLGMVYNQLLVGMASSERIFEFLDEQPNVDEKSNAKQLKDIKGHIEFKNVDFAYDSKRKALNNISLEMKAGETVALVGHTGSGKTTIANLVSRFYDPTGGKVLIDGHDLKDVSLSSLRSQISIVLQDTFIFSGTIRQNILFGRPDASPEDVEQAAKAVGAHDFIIRLPKGYDTEVEERGNILSVGERQLISFTRALLADPRIIILDEATASIDTETEMKIQEALRTLLKGRTAIMIAHRLSTIREADNIFVLDHGEIIEQGNHDELMDQQGEYYHLVKAQFKMLEVI

SEQ ID NO: 9765 - protein, 584 aa, Bacillus sp. SG-1
METFKKLKQFYWPYKKFFFTSIIFLIAVTLITVVYPIILQLTIDEVILKSKFGWVPYLAFGFIFIMALKGVATYIHQYNGDMFGITSVYRLRNELYEKLQYLPFRYYDNAKTGDLMSRLTADVEAFRFFLSFGISELIRFVLLVTVSFGVMFYYSPSLTFVTLATLPFLAVAVYKFDKAVHPAFRGIRKSFGKLNTNVQENISGINTVKSLSREEYQIDKFNSSNGDYKEKYLLTSDVWAKYFPLMELLGNVSVVLLLSYGGFLVMDNSLEPGELVAFYSLLWYIIWPIMNLGFTINQFSQSKASGERLLEILEADEDIQDKENAIKADRLKGEVEFKNVSLRYTKDDEEALEGISFKAQPGKVIGLIGGTGSGKTSITSLLTRFYEPTEGEVLVDGKPVEDYAIKSLRKNIGFVLQESFLFSSTIKTNISYGRPEATMDEIIDAAKRAQAHDFIEELEDGYETKLGERGLGLSGGQKQRIAIARAICTDPSILILDDATSAVDMETEFKIQKGFKEVMADRTTFIIAHRISSLKHADEILVLENGKIVERGVHDFLITNNGPYQRIYDIQYKDQKKILQSQQG

SEQ ID NO: 9766 - protein, 405 aa, Bacillus sp. SG-1
MVKYEASLKEKVLIMEHLLNKQVQEIEISGIRKFFNMVADIDDMVSLTLGQPDFPTPLHVKEAAKAAIDEGFTSYTHNAGFLELREAASEFYKKKYNVSFDPSSEVIITNGASQGIDSTLRTILNAGDEVILPGPVYPGYEPIVRLCGASPIIADTVPNGFKLDAGVLKKYITTRTKCIILPYPSNPTGVSLTADELKEIADLVRGKDIFILADEIYSELTYDRKHTSMASFLKEQTIVINGLSKSHSMTGWRIGMVFAPENLAKHILKVHQYNVSCASSISQKAAFEALTEGINDSDGMKAEYKIRRDYVSKRLTEMGFQVILPDGAFYFFLKIPDYFKADSFTFALTLAKQYKVGVVPGNSFSSAGEGFFRLSYACSMEELYKGMERLQAFVEDTKPTSEGSR

SEQ ID NO: 9767 - protein, 291 aa, Bacillus sp. SG-1
MSIETVKVGFIGTGVMGKSMALHLMKKYNNLHVYTRTKEKAQELLDLGALWSSSPGELASSVDILFTIVGYPQDVKEIYFGEKGILENGKMDLIAVDMTTSKPSLAQEIYKKAKSRRIHTLDAPVSGGDTGARNGTLSVMVGGDQDVFEKAKPFMDSFGENIRYHGQAGSGQHTKMANQIAIASNMIGVCEALVYARSAGLDMEEVLKTISGGAAGSWSLSNLAPRMIAGNFEPGFFVKHFIKDMAIAMEEAERMELSLPGLSLAKDLYEELQSQGAGNDGTQALIKLWKE

SEQ ID NO: 9768 - protein, 593 aa, Bacillus sp. SG-1
MPRHYSNAPKSKPKIKNWKGTVKRIWSYLSKEKGLLSLVILMVFISSFLGLLGPFLVGMAIDDFIVTRDAGGLFQLILWLAVVYVVYSAAMWLQAYWMIGIAQNSVYRMRTELFQQLHKLPIPFFDRRQHGELMSRVTNDMENVSSTLNSSMIQIFSSVLTLLGTVGVMLWLSPLLTLITMLIIPAMFLGLKWITNRTGKLFKETQKNLGDLNGYIEETVSGQRIVKTFSQEEKVMDDFLVKSDRLKASAYWAATYSGFIPKLMNMLNNLSFAVIAGVGGILAVQGIITIGVIVIFTEYARQFTRPLNDLANQFNTLLSAVAGAERVFEILDEEHEEKNERRAASVNEIKGEIEFSHVTFSYDKETKTVEDISFKAKPGQTIALVGPTGAGKTTITNILSRFYDHDEGKITIDGKDLREIKRESLRKHMGFVLQDSFLFQGTIRENIRYGRLNASDSEVEKAAREANAHSFIMKLPDQYDTVLTQDGGGISQGQKQLLSIARAILSDPSLLILDEATSSIDTVTEVKIQEALQRLMKGRTSIVIAHRLNTIQSADQILVLQDGRITERGSHEELLEQKGFYSELYNSQLREIS

SEQ ID NO: 9769 - protein, 394 aa, Bacillus sp. SG-1
MTKEVVIVSAVRTAIGSFNGSLKDISAPELGAIVIKNALEKAGVSANDVDEVIMGNVLQAGLGQNPARQAALKAGMPETVPALTINKVCGSGLKTVHLAAQAIIAGDADIIVAGGMENMSQAPYLLKNARNGYRMGDGKVVDSMISDGLWCAFNDYHMGMTAENLCDRYSISREEQDEFAAWSQEKAAAAMENGKFDSEIVPVEIPQRKGDPIVFKTDEFPRKSSTAEKLGGLRAAFRKEGSVTAGNASGINDGAAAVVVMSKEKAEELGITPLVTIRGNANAAVDPAVMGIGPVSAVKNVLEKTSLSLADMDLVEANEAFAAQSLAVDRELTFNKEKLNVNGGAIALGHPIGASGTRILVTLIHEMGRRDAKLGLATLCIGGGQGVATVVERA

SEQ ID NO: 9770 - protein, 373 aa, Bacillus sp. SG-1
MEVTTLEAKEHRILVINPGSTSTKIGVFDNEISIFEKTLRHDAEKINQFDSIIDQYQFRKETILETLDEEGINISKLSAVCGRGGLLKPIEGGTYSVNEEMLKDLREGYSGQHASNLGGILAYEIASGLNIPSFIVDPVVVDELAPIARISGVSLIERKSIFHALNQKAVARRIAKDLNKQYEDLNLIITHMGGGITVGVHKNGKVVDVNNGLHGDGPFSPERAGTVPAGDLVDMCFSGNYYRDEIMKKLVGQGGLVGYLGTNDAVKVEKMIENGDEKAKLVYEAMAYQIAKEIGSASAVLEGKVDAIVLTGGLAYGKAFVKQISERVNWIADVIVHPGENELQALAEGALRVLKGEEQQKDYPGNLKTKATV

SEQ ID NO: 9771 - protein, 299 aa, Bacillus sp. SG-1
MKKNISIIGVPMDLGQMRRGVDMGPSAIRYAGVAERLENLGHTINDLGNIEIAQPERVHTSNSHLRNLRAVAEGNHKLADKVDEVIKGDDFPLVLGGDHSIAIGTLAGVSKHYENLGVIWYDAHGDLNTSETSPSGNIHGMPLAVSLGIGDESLTSIGGYSPKVKPENIVIIGARSLDEGERELIKERGIKVFTMHEVDRMGMTKVMEEAINYLKDKTDGVHLSLDLDGLDPADAPGVGTPVLGGISYRESHLAMEMLAESHLITSAEFVEVNPILDDKNRTASVAVALMGSLFGEKLL

SEQ ID NO: 9772 - protein, 411 aa, Bacillus sp. SG-1
MTTRSKEGGAAMKEVVIVDAVRTPIGKYKGALKSVRPDDLGAVVIKALLDRNPALSSEHVEEVVLGNANGAGEDNRNVARMSALLAGMPVETSATTINRLCGSGLDAVNYAARAILAGEGEIFIAGGTESMTRAPFVMGKPESEYPRGNMEMFDTTIGWRFINPRLAQRYGTDSMPETAENVAKQYNLTREDQDEFALHSQLKAKEAMESGVFHEEIVPVVYKDRKGNEITVDRDEHPRPDSSMEKLAKLRPLFENGSVTAGNASGVNDGASALLLMTAEKANALGVKPLAKYVVSATAGLEPSVMGLGPIYATQKALNRAHLDKEDLGLIELNEAFASQSLACIRELGLDSARVNVNGGAIAFGHPLGASGARILTTLLYEMKRREVKHGLATMCIGVGQGIATIVERVE

SEQ ID NO: 9773 - protein, 65 aa, Bacillus sp. SG-1
MLQGKVKWFNAEKGFGFIEVEGQEDVFVHFSAIQGEGFKTLEEGQTVSFEIEDGARGPQAANVTK

SEQ ID NO: 9774 - protein, 66 aa, Bacillus sp. SG-1
MEHGKVKWFNSEKGFGFIEREGGDDVFVHFSAIQGEGYKSLDEGQEVTFDIEEGQRGPQATNVQKA

SEQ ID NO: 9775 - protein, 517 aa, Bacillus sp. SG-1
MIDYKIFIPALLILIGIGIPLALYENESLEMLNSIFDSIVSVFGWGYLWYGVLLVAAAIYFSFSKYGQVVLGDPNEKPHFTMFEYASILIAMGVGSTIMRTGMLQWTSVANDPPAGVEPGSAEALLWGNAYSMFLWGFQVFAIFVMIAPAMGYVLHVKKRPLMRISEACRILFGNKFTDGWGGKSLDILFLLSILTGAAVTLGLGAPIITHNLSALFNIEVTFGLTIIVTIVWVILFSFSAYMGIDKGIKRLSTMNMYLAGLFGLFIIVAGPGVFILNYFSDSFSFLLSNYLNFSLNTDSVHLGEASHIQSNTVFWFAYSATWAMLHSVFAAKISKGRTIKEMILTYLLAPTLLSWVATGVLGGLGVHRYLTGDLDILSFIQEEERMAAIPQILSTLPFGEFAIMVFIVVALIFLTTTLDSTTYTVAAYTSTRDMSRFEPTKMLRIVIAAVITGMALLLMRIGGLPPLGVVSGLMGLPVIVIQFLLIYAAKRMMDKDMAWQYNTRNNNYSKDERTVS

SEQ ID NO: 9776 - protein, 457 aa, Bacillus sp. SG-1
MLKKVSCFSAFLLFTATPALAAPTAQSVQTSVDGMWVMVAALLVFFMHAGFAMVESGFTRSKNTLNILMKNFLTISIASILYFLFGFGLMFGSSANGLVGTDGFLLAGREDIGFFVFQAVFAATCATIISGAVAERMKLSSYMLITVVITGVIYPVVGHWVWGGGWLSELGFIDFAGSTVVHLSGAAAAFIAVLFLGPRIGKYTNSKVNVIPGHNIPIGALGVFILWFGWFGFNGGSTLAADPELVPRVITVTLLSASAAVLSSAFYTAFRYKRIDPSLTLNGALGGLVGITAGCANVSIGGSIIIGLVAGVLLVEGVRFIEVKLKVDDPVGAIAVHGLCGIWGTVAIGFFDVTNGLFYGGDASLLGVQALGVAAVVLWISISIGGVIYLINKVDSIRVSSEDELAGLDFSEHGATAYELNETVLTSHSNQPNTAFGKELVRKLDGLSVTPTKKQYH

SEQ ID NO: 9777 - protein, 615 aa, Bacillus sp. SG-1
MCGITGWIDFKKDLRNAEKVLESMTETLSKRGPDDSNVWLDTHAAFGHKRLTVVDPEGGKQPMAKEKAGQRFVICYNGELYNTEDIRKVLHAKGYTFKGHSDTEVLLTSYIEWREECVDHLNGIFAFAVWDSEKQHVFVGRDRLGVKPLFYSEKGNGLMFGSELKALLAHPSVAAEVDREGLAEVLGLGPSRSPGSGVFKGIKELRPGHAMTFSKDGLKIWRYWNVKSAEHTDSFDETVEKVGFLVKDSITRQLVSDVPLCTFLSGGLDSSAITAIAANSYREEGKGSLHTYSIDYEGNDQHFKSNKFQPNSDSKWINLMSETFQTVHHNCIISQEELKNYLTEAVHVRDLPGMADVDSSLLWFCREIKADFTVGLSGECADEIFGGYPWFHNEEDFNRKGFPWMRSVEERQSLLKADLRKKLNLEEYVLSQYNETVAETPILEGETPVEAKRRELFYLNIIWFMTTLLDRKDRMSMGASLEVRVPFADHRLVEYVWNIPWKMKMHENREKGILRKALEGTLPDEVLYRKKSPYPKTHHPVYTSLVKNWLGEVLQDKSSVLYELFDHQQLKALVETNGEAFKTPWFGQLMTGPQLLAHLAQIHVWFKDYNINIVD

SEQ ID NO: 9778 - protein, 391 aa, Bacillus sp. SG-1
MKNVVITSAFRTPVGAFGGAFKDLLPTDLIVPVMKAAAEDSKLGPGDIDEVILGHCIQRTDQPNTARTAALLAGFSDTTTGYTIQRQCASGMQAIISAYMQIQTGMSDIVLAGGVEAMSSSPYVMKGHRWGQRLQHGEIRDTVWEALEDPIHGIMMGETAENLAEIHNITREDQDELAKLSHERAVKAAEEGYFDSQIVPIEVKSRKETKTISKDESPRAGLTMEKLSGLKPAFRQGGTVTAGNSSSLNDGGAAVILMSEEEAEKRGLKPLASISGCSVAGVDPKVMGRGPVPAVEKSLAQTGWSLEEADLVEVNEAFAAQYIAVEKELGLDRNKTNVNGSGISIGHPVGCTGARIVVSLIHELKRRELQKGIASLCVGGGMGATVFIEAL

SEQ ID NO: 9779 - protein, 216 aa, Bacillus sp. SG-1
MKFFIDTANMDEIREAFEWGILSGVTTNPSLVAKEEGVSFHQRLKEIADLVSGSVSGEVIALDAEGMIKEGRELAAIAPNITVKVPMTPEGLKAVSVYSKEGIKTNVTLVFSANQALLAARAGATYVSPFLGRLDDIGHDGMELIEKIAEIFAIHGIETEIIAASIRHPQHITDAALRGAHIATTPFKVLSQLFKHPLTDKGIQAFLDDWNKRAGQ

SEQ ID NO: 9780 - protein, 395 aa, Bacillus sp. SG-1
MGKTVILDGARTPFGKFGGSLSSFTASELGGFAVKEALKRAGVDGSEVEEVILGSVLQGGQGQIPSRQASRHAGLPWNVRTETINKVCASGMRSVTMADQIIRAGDGEVIVAGGMESMSNAPYILPKARWGMRMGDSQVKDLMVHDGLTCSFNNVHMGTYGNSTASEFEISREEQDRWSERSHMLAVKATEEGILSEEIAAVQVPQRKGDPVTVDRDEAPRKDTSIEKLAKLSPVFGSEGTITAGNAPGVNDGAAAMVLMSEERASKEGKEPLAYILGHTAIALEAENFPQTPGLVINELLKKTGKTLEEIDLFEINEAFAAVALTSGKIANLDESKVNVNGGAVAIGHPIGASGARIILTLAYELKRRGGGIGIASICSGGGQGDAIMIEVPKK

SEQ ID NO: 9781 - protein, 412 aa, Bacillus sp. SG-1
MKITVQKYGGTSVRDEIGRKKASAHVMRAIEDGYKVVVVVSAMGRKGEPYSTDTLLSLINGKDTKVSRREQDLLLSCGETVSTVVFTNLLLEQGIKATALTGAQAGFHTNSDHTNAKITDMKCDRLLSELKECQAVVVAGFQGISPKGEITTIGRGGSDTSAAALGAALKAEWVDIFTDVEGVMTADPRVTDKARPLAVISYNEVCNLANQGAKVIHPRAVEIAMEARVPIRIRSTYSDNLGTLVTSLEKKKAKGLESGTVTGIAHVENLSQIKVFAKKEQYNLQSEVFKAMANENISVDFINISPQGVVYTVPSDLTSRAFGVLKNLGHDPLIETECAKVSVVGAGMKGVPGVTAAIVTALSENNIRILQSADSHTTIWVLIKEKDLKTAVNALHDSFQLEADKSTLEIDE

SEQ ID NO: 9782 - protein, 540 aa, Bacillus sp. SG-1
LGFPLAVSWFIDELLPEGNWGRITAVSAGLLTLYVMSSGMQFVVNYWGHKLGINIETDMRRELFNHVQRQSFRFFDNTKTGHIMSRITNDLMDIGELAHHGPEDFFIAIMTFIGAFWIMLTINVKLALVAIIIVPFLVWLISYSNIKMNAAWTKMYGNIADVNARVEDSVSGARVVQSFTNEEYEKERFNKNNLFFRKTKLQAYKVMSWNLSGIYITTRVMTLVILVYGAWLSFTGELSYGELVAFILYLNALFKPIDKISALLELYPKGMAGFRRFSELMDAEPDIENKPDAIEAPALRGDIRFTNVSFGYENNRTILNDMSFSIKAGSTVAFVGPSGAGKTTICSLIPRFYDVEAGAITIDGMDIRDMTKESLRANIGIVQQDVFLFTGTLRENIAYGRLGASQGDIEEAVRKAHLTDLIASLPDGYDTQIGERGLKLSGGQKQRLAIARMFLKDPSILILDEATSALDTETEAIIQEALNDLSKDRTTLIIAHRLATIKKADRIMVITEEGIAEDGSHAELLSQENGLFAKLHAHQH

SEQ ID NO: 9783 - protein, 413 aa, Bacillus sp. SG-1
MEKEKIVLAYSGGLDTSVSIKWIQEKYGYEVIALGLDVGEGKNLDFIKDKALQVGAVKAYMVDAKEMLAQDYIIPALKANCLYEGKYPLSSALSRPLIAKLLVDVAEKEGAVAVAHGCTGKGNDQVRFEVSINALAPDMKVVAPVREWGMTRDEEIHYAQEKGIPIPVDLDNPYSIDANIWGRACEAGVLENPWTEAPEGAFDWTNPIELTPDEAENIEIEFEQGVPIALNGVKMEIVPLIEKLNEIGGKHGIGRIDHIENRLVGIKSREVYENPAALILINAHKELEFLTLPREITSFKTTVDAQMAKLIYEGLWYSPLNKALQAFVDETQKVVSGKIRVKLHKGTHFVTGRQSANSLYNEELATYSKGDAFDHNAAVGFIKLWGLTTKVYSQVNKEDQSEEKTTVTSSAGL

SEQ ID NO: 9784 - protein, 255 aa, Bacillus sp. SG-1
MQDILRSENLSIDFGGHRAVNGVTMSIQEKKFTSVIGPNGAGKTTLFNLLSGQLSPTEGRIFYKGNDITSLTPTDRARQGIGRSFQITNVFPNLTVLENVRLAVQSQQKVRYQVFAHYKHYKSMKEKALNLLEMVLLKEKANTIASSLAHGEKRKLEIAMLLALETDVLLLDEPTAGMSIEEVPAILEVIKKIKKQGDQTIVLIEHKMDMILDLSDEVMVLFHGELLAQGSPEEIMENETVQSAYLGGLYDEHLA

SEQ ID NO: 9785 - protein, 335 aa, Bacillus sp. SG-1
MQALRMNHSTWIYLIIAFLLAVLPFMVTGRSLLFLMMQVFILGIFAMSYDLLLGYTGIVSFGHTMFFGIGAYSTAVMFNKQEPTMLTLLLGILIAVVVAGIVSFIVGVLTLRLKSHFYAMLTLALAGLFLVAAEKWRSVTGGADGFTFSVPDALKDRTTLYLTCLAVMVLVFFGLKRFTESPLGRVLLAIRENEGRTESLGYKVLHYKVIVSVVSGVVASISGVLYMLTLRFVDTSVFATEVTLDALLMTIIGGVGTLIGPIIGAALVEFAHHWLSGLSDVHWIFERWIILFGTVYILAVIFFPKGIAGTLQGIFKKKSGKSHDKAVSSDKKIAG

SEQ ID NO: 9786 - protein, 465 aa, Bacillus sp. SG-1
MSNQNRMPLVEALQYHEKRDPVSFHVPGHKNGKLLNGQAGEFLQYDVTELTGLDDLHAPSEAIREAQELLADHFQTRKSYFLVNGSTVGNLAMIMGVCKEGDIVFVQRNCHKSILNGLKLANVQPVFLHPEFDEETATTTGISQGTLKEAIGKYAKAKAVILTYPTYYGMVYDLHSIIELAHKHGMKVLIDEAHGAHLSNGEPFPASSLRMGADIVVQSAHKTLPAMTMGSYLHINNDQIDAKRVEEYLGMLQSSSPSYPIMGSLDYARHFIASYSSEDLYSFLRIRKDFINRLHEAGFEVIESNDPLKVMIRLRGLSGFQLQDQLENVGIYAELADPHQVLFILPLLKKDTSFPFEEVVKKMSGIKASQAEDTPIVFKKSKSITSLRYSYREMETKTKKWIAIEDAAGKTAGEMLTPYPPGIPLFYPGEEITEESIAELRRLWELGAKFQGEHLLGEGRISIFE

SEQ ID NO: 9787 - protein, 608 aa, Bacillus sp. SG-1
MSKIIGIDLGTTNSCVAVLEGGEPKVIPNPEGNRTTPSVVAFKNGELQVGEVAKRQAITNPNTVISIKRHMGTDYKEKIEDKEYTPQEISAMILQHLKSYAEDYLGEKVEKAVITVPAYFNDAERQATKDAGKIAGLEVERIINEPTAAALSYGLDKMEEDQTILVYDLGGGTFDVSILELGDGVFEVRSTAGDNRLGGDDFDQVIIDYLVEQFKKENGIDLSKDKMALQRLKDAAEKAKKDLSGVSSTQISLPFITAGENGPLHLEVNMTRAKFDELSANLVERTMGPTRQAVKDAGLSVSEIDKVILVGGSTRIPAVQEAIKKELGKDPHKGVNPDEVVAMGAAIQGGVLTGDVKDVVLLDVTPLSLGIETMGGVSTKLIERNTTIPTSKSQVFSTAADNQTAVDIHVLQGERPMAADNKTLGRFQLSDIPPAPRGVPQIEVKFDIDKNGIVNVSAKDLGTGKEQNITIKSSTGLSDEEIERMVKEAEENSEADKKRKEEVELRNEADQLIFTTEKTIKDLGDKVEEAEVKKAEEAKDELKAAIEKDDLEEIRTKKDALQEIVQGLSMKLYEQAAQAQQQAQGAEGQAGGDDDVVDAEYEEVKDDK

SEQ ID NO: 9788 - protein, 323 aa, Bacillus sp. SG-1
MSNLFETLKAKVTGKDLKIVFPEGQDERILQAASRLASDGILTPVIIGNAGNVEAKAQEVNVSLEGCEILDPADNEFMDELVQSFVDRRKGKATEEDAKKILLDENYFGTMLVYTGKAHGLVSGAAHSTADTVRPALQIIKTKEGIRKTSGVFIMVREGEKYVFADCAINIAPDSQDLAEIAIESAKTAEMFDIDPRVAMLSFSTKGSAKSPETEKVTEAVNIAKEKAPELTLDGEFQFDAAFVPSVASKKAPDSVLKGDANVFIFPSLEAGNIGYKIAQRLGNFEAVGPILQGLNAPVNDLSRGCNEEDVYKLALITAAQAL

SEQ ID NO: 9789 - protein, 319 aa, Bacillus sp. SG-1
MPNSYSNSKLKIFSLNSNPSLAEEIAKEVGVPLGQCTVKQFSDGEIQINIEESIRGCDVFVIQSTSAPVNENLMELLIMVDALKRASAKTINIVMPYYGYARQDRKARAREPITAKLVANLLETAGATRVITLDLHAPQIQGFFDILIDHLMGVPILGDYFLEKGFKAEDIVIVSPDHGGVTRARKLAERLKAPIAIIDKRRPKPNVSEVMNIVGNIDGKIAILIDDIIDTAGTITLGANALVENGAREVYACCTHPVLSGPAIERIQNSKIKELIVTNSIPLSEDKMIDKIEQLSVAPLIGEAIIRVYEQQSVSTLFD

SEQ ID NO: 9790 - protein, 223 aa, Bacillus sp. SG-1
MNILVVDDEKDMVGLLNSYLTSNGYYVFPAGNGREAIDVMKSESIDLVLLDIMMPFMDGLEAAQEIRTFSDVPIIMLTAKGNEDDRVTGLKIGADDYVVKPFSPKELLARIEAALRRSKGYKNGNLTSQMISHEELTVDLKGHMVQVDGITVNLTRKEFLLLALLMQNQGQVFSREQLLDQIWGFESEGTARTVDTHIKTLRLKLKAAGSYVQTVWGVGYKFN

SEQ ID NO: 9791 - protein, 351 aa, Bacillus sp. SG-1
MKRVAFHSLLILLKYRKKCKNAGGLGMKPYVYVTRKLPEEVLTSLQEKYEVEMWDDENIAVPREILLEKAGEASGILSMLSDPIDRELFEKSPNLKVVANLAVGFDNIDLKAANEKDVAVCNTPDVLTDTTADLTFGLMMAAARRLIEADKYVREGKWKSWSPLLMAGTDIHHKTVGIIGMGSIGEAFARRAKGFDMNILYHNRSRKPEAEEVLGAKYASLEELLSQSDYVVCLAPLTPETKGLLQKEQFEMMKSSAIFINAARGPIVNEEALYRALVDGEIAAAGLDVFEKEPIDKTHPLLSLDNVVALPHIGSSSVETRMEMMELCISNIKAVLEGGTPKTLVNKEWQK

SEQ ID NO: 9792 - protein, 401 aa, Bacillus sp. SG-1
MWMKWELAERVSALTPSTTLAITAKAKEMKAQGIDVIGLGAGEPDFNTPQHIMSAATASMEEGHTKYTPASGLAGLKNAIIDKFKDDQGISYEPSEVIVTSGAKHGLYTLFQVLLNEGDEVIIPTPYWVSYPEQVKLAGGVPVFIEGKEDNQFKITPEQLKEAVTGNTKAVIINSPSNPTGMLYSKEELEAIGQACLEKNILIISDEIYEKLVYEGNQHVSIAEISPQLKEQTVVINGVSKSHSMTGWRIGYAAGDAKIIKAMTNLASHSTSNPTTTSQYGAIAAYEGTQEPVEEMRKAFEERLNIVFEKLNAIPGFNCIKPQGAFYLFPNVKEAAEMTGYESVDSFVKALLEEAEVAVIPGSGFGTPDNIRLSYATSLDLFEKALERIHSFVNRKIEESK

SEQ ID NO: 9793 - protein, 127 aa, Bacillus sp. SG-1
MFRTMMSGKIHRATVTEANLNYVGSITIDQDILDSVGMLPNEKVQIVNNNNGARLETYIIPGERGSGVFCLNGAAARLVQPGDVIIVISYKLVAEENAHTHVPKVAIMDKDNNIVEMLGTEPEATVY

SEQ ID NO: 9794 - protein, 371 aa, Bacillus sp. SG-1
MGGRKVTKIVCTGCGVGIQTEDKEELGYAPPSSLEKEEIVCQRCFRLKHYNEVQDVSLTDDDFLKILNEIGKGEGLIVKVVDIFDFNGSWLPGLHRFVGNNPVLLIGNKVDLLPKSVKPSKLINWMKFQAKQLGLKPVDVKLMSAEKGQYIEEAVEAIEQYRDGRSVYVVGCTNVGKSTFINRVIHHVTGEKDIITTSHFPGTTLDMIEIPLDDGEALIDTPGIINHHQMAHYVDKRDLKYITPKKEIKPKVFQLNEGQTLFFGGLSRFDYLSGGRRSFVCYLSNELNIHRTKVDKADELYENHAGVMLQPPRKDDMGEFPELVRHEFRVKEGKTDIVFSGLGWVTINDPGATIAAHVPKGVSVFLRKSLI

SEQ ID NO: 9795 - protein, 608 aa, Bacillus sp. SG-1
MVSYFNNSNEPTENIKYNEFITHLEDGEVESFSIQPERGVYQVKGKLTGYTEEQYFLTNVLGNDAGVLERINAAAAETGIEVDVLMAKETSGWVSFFTTIIPFVIIFILFFFLLNQAQGGGSRVMNFGKSKAKLYSEEKKKVRFKDVAGADEEKNELVEVVEFLKDPRKFSEVGARIPKGVLLVGPPGTGKTLLARAVAGEAGVPFFSISGSDFVEMFVGVGASRVRDLFENAKKNAPCIIFIDEIDAVGRQRGAGLGGGHDEREQTLNQLLVEMDGFGANEGIIIVAATNRPDILDPALLRPGRFDRQITVDRPDVKGREAVLKVHARNKPLDESVDLQAIAARTPGFSGADLENLLNEAALVAAREDKKKIDMRDIDEATDRVIAGPAKKSKVVFKKERNIVAFHEAGHTVIGLVLDEADMVHKVTIVPRGQAGGYAVMLPKEDRYFMTKPELLDKITGLLGGRVAEEIIFGEVSTGAHNDFQRATGIARRMVTEFGMSEKLGPLQFGSASGGQVFLGRDINNEQNYSDAIAYEIDLEIQRFIKESYERARKILTENREKLELIANTLLDVETLDAGQIKHLMDHGKLPERAYGEPDKHLRKKMSK

SEQ ID NO: 9796 - protein, 470 aa, Bacillus sp. SG-1
MGFEEATPIQAGAIPLALEGKDVIGQAQTGTGKTTAFGIPMVEKIDVKNPNVQGLIIAPTRELAIQVSEELYKIGQDKRVNVLAVYGGQDIQRQIRAMKKNPHIIVGTPGRMLDHINRRTLKLGNVSTLVLDEADEMLNMGFIEDIESILKNVPDNRQTLLFSATMPGPIRKIANNFMTDPETVSVKSKEMTVPHIEQYFVKAHEKEKFDVLSRLLDVQSPELAIIFGRTKRRVDELARALTLRGYSAEGIHGDLSQAKRMTVLRQFKEGRIDVLVATDVAARGLDISGVTHVYNFDIPQDPESYVHRIGRTGRAGKEGMAMTFVTPREMGYLRIVEKTTKKSMTQMKPPTSNEALEGQQRLAMEKLVETVKSNELQNYRGMAKELLEDHDSVEIVAAALRLMTKEPDDTPVQISEERPLPSKGNGGRGGGKRDFKKGSSSRGGKGGGRQGYSSSRGRSKNPRRKQQRES

SEQ ID NO: 9797 - protein, 414 aa, Bacillus sp. SG-1
MGLIVQKFGGTSVGDIERIKNVAGRVIDEKKQGNDVVVVVSAMGKTTDGLVDLAYQASAKPSKREMDMILTTGEQITISLLTMALQEMGYDAVSMTGWQAGIETEGIHGNARITNINTERINHNLSENRIVVAAGFQGLADNGEITTLGRGGSDTTAVALAAALKAERCDIYTDVDGVYTSDPRYVKSARKLASVAYDEMLELANLGAGVLHPRAVEFAKNYGVPLVVRSSMEKLEGTIIEEEVSMETGLIVRGVAFEEEIIRMTVLGLQNEITSLSSIFTTLAQNHINVDIIIQSKTETDSINLSFSIKRNDLEEAIEVLQSNREELGFSSIEHESGLAKVSIVGSGMISNPGVAAQMFEVLAKNEIPIKMVSTSEIKVSAVVDETHMLKAAEVLHTEFNLDKTEKPQKVSAK

SEQ ID NO: 9798 - protein, 297 aa, Bacillus sp. SG-1
MYKSGFISIIGRPNVGKSTFLNRVIGQKIAIMSDKPQTTRNKVQGVYTTNESQMIFIDTPGIHKPKHKLGDFMMKIAQNTLREVDIILFMINAEEGYGRGDEFIIEKLKGVKTPVFLVLNKIDQLHPDKILPLIEQYNALHDFAAVVPISALEGNNVETLISEIRKELPEGPQYYPADQITDHPERFIVSELIREKALHLTREEIPHSLAVVIDKISTRGDKNVIDVMATIVVERDSQKGIIIGKQGGMLKEIGKRARVDIENLLGSKVYLELWVKVQKDWRNKLSNLRDFGFNDDY

SEQ ID NO: 9799 - protein, 555 aa, Bacillus sp. SG-1
MDLQFIVSTAIILATFALYIGIAVYNKAKATSDFYVAGRGVPPVFNGMAIGADWMSAASFIGLAGTIMILGYDGLAYIMGWTGGYLLLTFLLAPQLRKYGRYTVPEFIGDRYNSHTARVIAALCTIIISFTYSIGQLSGSGVVIGRLFEIDAKLGTVIGVVLIAFYAAFGGMKGITWTQVAQYIILITAYLIPVIFMSLQLTSNPLPWISYGELIGKMGELDRELGISEYFAPFTNGTKWQFIALMFTLMAGTAGLPHVIVRFYTVSTMKAARWSGAWALLFIGLLYLSAPAYAAFSRFILMTKVAGQKISELPSWTTSWVDTGKLQIADANGDGILQWTELVISNDIVVMATPEIANLGVFVIGLVAAGAMAAALSTAGGLMIAISSSFAHDIYYRVFKPTASEKNRLAVARWSIVIATVLAGLVALNPPGVITQIVAWAFALASGTFFPALVLGVWWKRSNAAGVISGLLVGLGVTLTYIFLARAGITMFGIIDTGAGVFGAAAAFLTNIIVSLSTKAPSQKIQEEVIDLRYPEQMTFKDGEVWINDETTISK

SEQ ID NO: 9800 - protein, 261 aa, Bacillus sp. SG-1
MAGSTLTITDLHVEIEGKEILKGVNLEIKGGEIHAVMGPNGTGKSTLSSAIMGHPKYEVTKGSITFDGEDVLEMEVDERARVGLFLAMQYPSEISGVTNADFLRSAINSRREEGQEISLMKFIRTMDSSMEELEMDPDMAQRYLNEGFSGGEKKRNEILQLMMLQPKIAILDEIDSGLDIDALKIVSKGINKMRGEEFGCLIITHYQRLLNYITPDKVHVMMQGRVVKSGGPELAKRLESEGYDWIKEELGIKDETVGQEA

SEQ ID NO: 9801 - protein, 494 aa, Bacillus sp. SG-1
MSNELSQYKTPLFTGLVEHSKKNPVQFHIPGHKKGTGMDPEFRNFIGDNAFSIDLINIGPLDDLHQPKGMIKEAQKLAAEAFGADYTFFSVQGTSGAIMTMVMSVCGPGEKIIVPRNVHKSVMSAIVFSGATPIFIHPEVDEDLGISHGITTDSVARALEQHPDAKGVLVINPTYFGISADLKKIVEIAHSFDVPVLVDEAHGVHIHFHEDLPISAMQAGADMAATSVHKLGGSMTQSSVLNIKTGLVSPKRVQTILSMLTTTSTSYLLLASLDVARKRLATEGRELIENTIQLSETIREKVNRIESLYCVGKEILGTKATFDYDPTKLIISVKQLGISGFDAEKWLREVYNIEVEMSDMYNILCIITPGDTSAEGDKLVEALTELSYQFSDKEGFSETVEVLLPDIPLLSMTPRDAFYADTEVIPIEQTVGRIIAEFIMVYPPGIPIFIPGEIITSENLTYIQKNVEAGLPVQGPEEFDLSHLRVIKEHKAIR

SEQ ID NO: 9802 - protein, 786 aa, Bacillus sp. SG-1
AVYGQYASQDFNKLFQDAAKLKEEMKDDYLSVEHLALALYQQKNHSITVYLDKQQIEQEKLSLIIDDIRGGEKVNTQNPEAKYEVLKKYGRDLIEEVKSGKMDPVIGRDGEIRHVIRILSRKTKNNPVLIGEPGVGKTAIIEGLAQRIVRKDVPEGLKDKQIFELDMGALVAGAKFRGEFEERLKAVLNEVKRSNGNILLFIDELHTIVGAGKTEGAMDAGNLLKPMLARGELHCIGATTLNEYRKYIEKDPALERRFQQVMVKEPDVEDTVSILRGLKERFEIHHGVNIHDKAIVAAAALSDRYITDRFLPDKAIDLVDEACALIRTEIDSMPSELDEVTRKIMQLEIEEAALLKEKDEVSKNRLALLQEELANLKEEGNAMKAKWQKEKEKINSLQEKREELDQLRRQLEEAEGNYDLNKAAELRHGKIPAAERELQQLETDMLNEQENRLLREEVTEEEIAGIVARWTGIPVSKLVEGEREKLLKLESILHQRVIGQEEAVQLVSDAILRARAGIKDPGRPIGSFIFLGPTGVGKTELAKTLAHTLFDSEEQMIRIDMSEYMEKHAVSRLIGAPPGYVGYEEGGQLTEAVRRKPYSVILLDEIEKAHSEVFNILLQVLDDGRITDSQGRTVDFKNTVIIMTSNIGSQFLLDRQDGSEEIDDKTKDLVLGQLRSSFRPEFLNRVDDIVLFKPLSIENIKGIVEKAVKELQSRLQEQNITMKISDAAKEFIAKGAYDPVYGARPLKRYIQKNIETKLAREIIAGHFKPDDEIIIDIENEEIVFEK

SEQ ID NO: 9803 - protein, 380 aa, Bacillus sp. SG-1
MRTIYLDNAATSPMDPRVIEVMTEAMKGTFGNPSSIHSSGRDARQKLDSARMTAAKSVGAGFHEIIFTSGGTEADNLALSGTAHALKEKGRHIITTSIEHHAVLHTCAQLEKEGFEVTYLPVNGQGLVSVKDVEAALREDTILVSIMYGNNEVGTIQPISEIGELVRNRGILLHTDAVQAFGMTKIDVETENIDLLSISSHKINGPKGVGFLYARKEVPLEAKMFGGEQERKRRAGTENLPSLVGMAEAIRLSQQEMDKKIEEYIEFKNTLIETLKEEDIEFYLNGDLQHSLPHILNLSFPGTDVESMLVNLDLAGVAVSSGSACTAGSIEPSHVLLAMFGKDSERLRNSIRFSFGITNTKEDIIYTAKEVAKIVNRLRK

SEQ ID NO: 9804 - protein, 102 aa, Bacillus sp. SG-1
MYAIIETGGKQIKVEEGQSIYIEKLAGNEGETVTFDKVLFVGGDNVKVGSPLVDGATVTAKVEKQGRAKKLVVFKYKPKKNYRRKQGHRQPYTKVTIDKINA

SEQ ID NO: 9805 - protein, 392 aa, Bacillus sp. SG-1
MREAVIVAGARTPVGKAGKGTLATVRPDDLGALVVKETLKRAGNYEGNIDDLIIGCAMPEAEQGLNMARNIGGLAGLPHNVPAITINRYCSSGLQSIAYAAEKIMLGHSDTAIAGGAESMSLVPMMGHVVRPNAKLAETAPQYYMSMGHTAEEVAKKFGITREDQDAFAVRSHEKAAKAIAEGRFQDEIVPVDVVLRSVNDQNKVVEKNITFSTDEGVRPGTNQQVLSKLRPVFNVKGSVTAGNSSQTSDGAAAVMVMDREKASSLGLGPMAKFRSFAVAGVPPEIMGVGPVEAIPKALKMAGLQLEDIGLFELNEAFASQSIQVIRQLGLNEEIVNVNGGAIALGHPLGCSGTKLTLSLIHEMKRRNVQFGVVTMCIGGGMGAAGVFELIG

SEQ ID NO: 9806 - protein, 404 aa, Erythrobacter sp. SD-21
MSDIKRVVLAYSGGLDTSVIAKWLEVGRGLEVVTFTADLGQGEEIEPAREKARAMGIPDEHIFIEDLREEFVRDFVFPMMRANARYEGDYLLGTSIARPLISKRLVEIAHETGADAIAHGATGKGNDQVRFELSAYALDPDITVIAPWREWDLTSRTALIAWAEAHQIAVPKDKRGESPFSTDANLLHTSSEGKVLEDPWQETPDYVYSRTDHPEDAPDTPEYIEIGFEKGDGVSLNGETKSPAELLTALNDLGRTHGIGRLDLVENRFVGMKSRGMYETPGGEIYARAHRGIEQITLDRGAAHLKDELMPRYAELVYNGLWFSPEREMLQAAVDLSQEKVSGTVRLKLYKGNAMVVGRKSDASLYSEAHVTFEDDAGAYDQKDAEGFIKLNALRLRLLAKRDR

SEQ ID NO: 9807 - protein, 643 aa, Erythrobacter sp. SD-21
MSKIIGIDLGTTNSCVAVMDGGKPKVIENSEGARTTPSITAFTKDGERLIGQPAKRQAVTNPDNTLFAIKRLIGRRFDDPMTKKDMELVPYDIVKGPNGDAWVEAAGEKYSPSQVSAFILQKMKETAEEYLGEKVEKAVITVPAYFNDAQRQATKDAGKIAGLEVERIINEPTAAALAYGLDKDDGKTIAVYDLGGGTFDVSILEIGDGVFEVKSTNGDTFLGGEDFDSAIVEWLADQFKKKENMDLRSDKLALQRLKEAAEKAKIELSSAQTTEVNLPFITARMEGGSSTPLHLVETISRSDLEKMVGDLIKRTLEPCKKALADAGIDKGGVDEVILVGGMTRMPKVRETVEEFFGKKPHTGVNPDEVVAMGAAIQAGVLQGDVKDVLLLDVTPLSLGIETLGGIMTKMIDRNTTIPTKKSQTYSTAEDNQQAVTIRVFQGEREMASDNKLLGQFDLVGIPPAPRGVPQIEVTFDIDANGIVNVSAKDKGTGKEQQIRIQASGGLSDSDIDQMVQDAEKFADEDKKRRESAEARNQADSLVHATEKQLEEHGDKIDASLKSEVEEKVAALKTALEGDDAADINAKAQDLSQSAMKMGQSIYEKEQANAGSDAPEGGDAGSDAAQEEEVVDAEFSEVDEDAKN

SEQ ID NO: 9808 - protein, 432 aa, Erythrobacter sp. SD-21
MYSPGVYVALHQHKAYLDDEIFQTKFQTTRTTTSMTQFSATDPVVILSYARTPMGSMQGALADVSATDLGATAVKAAVERSGVAADKFDRTYMGCVLPAGLGQAPARQASIKAGLPKSVQATTVNKVCGSGMQTVIMGAEGLASGTIDYVVAGGMESMTNAPYLLKKHRSGARIGHDTTYDHMFLDGLEDAYEEGRAMGTFAQETANDYQLTREQMDDYSIESLRRANAAIDSGAFADEVVPVTVKTRKGDVTVDKDEAPGRGNPDKIPQLRPAFAKDGTITAATSSSISDGAAAVVLTRESVAKENGQQPVAKIAAMAAHAQEPSEFTVAPIGAIEKVLDKAGWSADDVDLWEVNEAFACVAMFAMRDIGIPHEKINVNGGGTALGHPIGASGTRIIVTLLNALKSQGKKRGVASLCIGGGEATAVAVELV

SEQ ID NO: 9809 - protein, 341 aa, Erythrobacter sp. SD-21
MEPTSESNLAPQKRLTRTPRVTVTRRLGPAVEERMGELFEVRTNASDMPLTREQLVEAMQECDVLVPTVTDRIDAEMIAQAGEDLGLIANFGAGTEHIDLVAAAKRKIIVTNTPGVFTDDTADLTMAGIIGVPRRIREGVQLIRSGEWTGWAPTAMLGRKLGGKTLGIVGMGRIGQAVAHRARAFGLEIAYHNRKRLPVAVERMFGARWVDTLDELVAEADILTLHCPASPESRHMIDARRLSLMKKGACLINTARGDLVDQEALIAALESGQLEGAGLDVYPDEPKVDERLIRHPNVMTLPHIGSATREGREDSGMKVIANIRMWADGHRPPDQVLSGLA

SEQ ID NO: 9810 - protein, 582 aa, Erythrobacter sp. SD-21
MSEERSGAAILIECLKRQGVEFVFGYPGGAVLPIYDELFADSDIRHILVRHEAGAAHAAEGYARSTGKPGVVLVTSGPGATNAVTGIADAYMDSIPMVVITGQVPTGLIGTDAFQEADTVGLTRHCSKHNYLVKDPERLRATIEEAFRIATTGRPGPVVVDIPKDVQIALANWSEQEEAPLPSHRYQPRLVGAADEIAEAVEMLGQAERPVFYTGGGVINAGPRASELLRKLQHATGAPVTSTLMGLGAFPADHTDWLGMLGMHGTFEANMAMNRADLIVAIGARFDDRVTGRLDAFAPEAKKIHIDIDRASINKIVPVDLGIVGDCGHVLEQLLEGWGSRKGRDLSEWQARILGWKARDCLAYPEKSEQIMPQKSIERLFALTKDRDPIITTEVGQHQMWAAQYFGFMGPNKWLTSGGLGTMGYGLPAAIGAQLGNPDSLVIDIAGEASIQMNIQELGTASQFRLPVKVFILNNEYMGMVRQWQELTYESRYSNSYSDSLPDFVKLAEAYGWKGIRIDDESQLDAGIEAMLAHDGPVIVDCQVAKEANCFPMIPSGAAHTDMLLYGDQVGGTMDDEAKALV

SEQ ID NO: 9811 - protein, 421 aa, Erythrobacter sp. SD-21
MKFGGTSMAGTERIRRVANIVRKQTAGGNEVAVVVSAMAGETDRLVNFCREANALYDPAEYDVVVASGEQVTSGLLALTLQSLGAKARSWLGWQLPVRTIEAHAKARVDSIDGEALGKSMAEGEIAVIPGFQGVSDEGRITTMGRGGSDTSAVAVAAAVGADRCDIYTDVDGVYTTDPRIVAKARKLKAVTYEEMLELASVGAKVLQTRSVGLAMKEGVRVQVLSSFVGDDAVPADELPGTMIVSEEEMNELVEKGLVERQHVTGIAHDKNEAKVILTRVPDKPGAVAHIFEPLAKASINVDMIIQNVGRDKGETDVTFTVPQADLARAQALLEDKRDDIGYNRLITDSKIAKISVVGVGMKSHAGVAATMFQALADRGINIQAITTSEIKVSVMIDEDETELAVRVLHTAYGLDAADEAA

SEQ ID NO: 9812 - protein, 603 aa, Erythrobacter sp. SD-21
MDETGSIPKPKRGIFRRKGEREKRSLKPLRMVFDELRKYPGHVGLAVVALVITAMSTLSIPYFLRYAVDEGMGGDGSQLAFWFRILLMIVTVLAFGTAMRFYFVSWLGERVVADVRKRVQANLLRLAPGFFEINSPKEISSRMTSDTAIIETTVGTTVSVALRNLLVAIGGTAYLFYLIPGLTVGMLLIIPAIVIPITLFGRRLRTVSRTSQDRVADIGASVTEVLSAMKIVQGFNQEGREEARFGDTVERTFSVAKRRIALRAALTACIILFVFGGITVLVWRGAEAASEGSITYGTIISFVFTAALVAGAFGALTEVYGDLLRAAGAASRLSELLDEQPEIASPAKPQALPGPPRGSLSFRNVTFRYPTRLEVPALTDFTLEVEPGETVAIVGPSGAGKSTIFQLAERFYDPQAGTIRLDGIPLTKADPAEVRKRIAFVPQEGVLFSASARDNLRYGNWDASEEDIWAAARAANAAEFLENLPQGLDTYLGENGTQLSGGQRQRVAIARALLRDAPILLLDEATSALDAESERLVQGALDRLMENRTTLVIAHRLATVRAADRIVVMEDGQLLEQGTHDQLAGNGGLYARLAQLQFGHAPA

SEQ ID NO: 9813 - protein, 410 aa, Erythrobacter sp. SD-21
MTELRRVSICKPLRTPVGKFLGSLAPLEAGELGAVIIKALVERSGVDPMRVDDVVFSQGYGSGEAPAIGRWSWLAAGYPIEVPGFQLDRRCGSGLQAVATAAMMVQTGVADCVLAGGVESMSNVEHYTTKARHGARLGDMVLWDRLTRGRLMSQPIERFGVITGMIETAENLAKDYAISREASDEFAVRSHQNAAKAWEEGKFDEQLVPVEIPQRRGDPVVFAKDEGFREDADMESLSKLRPIDGKRDPDAIVTAGNASQQNDAAAACLVVAEDKVEELGLEPILWFHSWSAAGCDPSRMGIGPVPAVERLFAKNGLGWDDIGLIELNEAFAPQALAVMKGWGFAEDDSRRDIVNVNGSGISLGHPIGATGIRILADMAHEMQRREVRYGLETMCIGGGQGMAAVFERAA

SEQ ID NO: 9814 - protein, 372 aa, Erythrobacter sp. SD-21
MRIGCPKEIKNHEYRVGLTPESAKELISQGNEVWIETQAGSGIDATDDQYVAAGAKIVDTPDEIFAECAMVVKVKEPQEVERKKLREGQILYTYLHLAPDAPQTKDLVESGVTAIAYETVTGPRGQLPLLKPMSQVAGRMSVQAGATALEKAHGGRGVLLGGVPGVMPGKVVVIGGGVVGFNAAQMAAGLGADVTILDRDPEVLEKVGTHFESRASTRFSNQANLYDAVCGADLVIGAVLIPGASAPKLVTREMLRDMQTGAVLVDVAIDQGGCFETSRPTTHAEPTYVVDDIVHYCVANMPGAVARTSTYALNNVTLPHALRIARMGWKDALDADPHLAEGLNVHRGEVTYEAVARELGYDYRPVSDVLNG

SEQ ID NO: 9815 - protein, 250 aa, Erythrobacter sp. SD-21
MLQIKNLTAEIDGKQILNGLTLEVAAGEVHAIMGPNGAGKSTLSYVLGGRPGYEVTEGSISFNGKNLLEMEPHERAAAGLFLGFQYPVEIPGVSNVQFLREALNAQRKGRGEEPLAGGEFLKLAKEKAGLLKLDMDMLKRNVNVGFSGGEKKRAEMVQMGILDPTFAVLDETDSGLDIDALRVVGEGINAIMRAPDKAVLLITHYQRLLEVVKPDKVSILSKGRIVKTGGPELAVRLEKEGYDAVMAEPA

SEQ ID NO: 9816 - protein, 263 aa, Erythrobacter sp. SD-21
MGYDRGRRRGKDKRDNIGEDSYDPFGGPPSDFGQGGGFGGGDRGGFGGGGGDRGGFGGGDRGGYGGGNRGGGGGGFGGGNRGGGGFGGGPRGGGGGGGNRMPAQVVGTGKGTVKFFNSQKGFGFIQQETGGEDIFVHISAVERAGLEGLAEGQELEFNLVDRGGKVSAQDLQVVGDVIAVEAKSEAPRRELTGEKATGTVKFFNSMKGFGFLTRDDGQPDAFVHISAVERSGLSQINEGERYEFDLEVDRRGKYSAVNLVPAE

SEQ ID NO: 9817 - protein, 213 aa, Erythrobacter sp. SD-21
MLFSALDSALQAHLVRTSRERLFDDGQIIQQRGDPADGFWLIEEGAVRVGQFLPDGEFRAVALLGAGDSYGELAVFSGKPRIVDAVSRGQSRVRLIAARPFLDALANYPASTRALLGALSEQLQDTLAILAGLRHGTNPARLAGLLSAMAGDSAEAAQITITQQELADLLGVTRATAHAALKELQKHALVERGYGAIRIPDPPMLGRYALSQA

SEQ ID NO: 9818 - protein, 754 aa, Erythrobacter sp. SD-21
MAEEKQTGFNTREALFYHETIRPGKIEIIASKPMATQRDLALAYSPGVAAPVEAIAANPQDAARYTARSNLVAVISNGTAILGLGNLGALASKPVMEGKAVLFKRFADVDSIDLELDTEDPEAFINAVALMEPSFGGINLEDIAAPECFIIEQALREKMNIPVMHDDQHGTAIISAAGLINACHLTGRDLDTVKMVVNGAGASALACTALIKAMGVRHENVIVCDRAGPIYPGRDNVDQWKSAHAVETPHRSLEEALEGADVFLGLSAAGALKPEWVAKMADKPIIFAMANPVPEIMPEDAKAVRPDAIIATGRSDYPNQVNNVLGFPFIFRGALDVQATAINEEMKIAAARAIAELARERVPEEVAAAYGVTHQFGEEYIIPAPFDPRLMDVVSSAVAQAAMDSGVAQKPIEDMDAYRHQLKARLNPTTGALTNIYEQAKANPKRMVFAEAEEDVALRAAIQYRDYGYGEPILVGRTEKVLAKLKELGVDDPDDWIIENSNVSDKVPAMVDYLYKRLQRRGYTERDVGRMVNQERNVFAALLVALGHGHGMVSGLTRTFAQTAREVARVIDPKPGATPFGIHMMVGKNQTTFLADTTINERPTAAELAHIAKETAAVARRMGHEPRVAFLSYSTFGNPSGQWLGNIRDAVALLDAEEGLDFEYEGEMAPDAALNPKVMALYPFSRLSGPANVLIMPGLQSANLSAKLLRELGGETTIGPMMIGSEKPVQIAPMTAIAPDLLTLAVLASAGVVG

SEQ ID NO: 9819 - protein, 774 aa, Erythrobacter sp. SD-21
MADANAATASDEKTVRLQVAAARQEESGQGIVRMPRSAFQALGVTEGDPVEIVGKRATVAIAMSAYDEDQTIEVIRLDGLQRGNAEVGSGEHVVVKAAESRPATRVVFAPANRDMRLQGPSQALKRNFAGKPLLAGDLVATTGQQPVRNMPPEVRRMFNAPAYALTQIRLSVVSTTPKGIVHIDENTEVELRAEFEPPRDARAVVNYDDVGGIDDTIQALREMVELPLRYPELFTRLGVDPPKGVLLHGPPGTGKTRLAQAVANESDAEFFTINGPEIMGSGYGESEKALREVFEQATKASPAIIFIDEIDSIAPKRDRVPGEAEKRLVAQLLTLMDGLEARSNLVVIAATNRPEAIDEALRRPGRFDREIVVGVPDEKGRREILGIHTRGMPLGDKVDLTELAKATYGFVGADIAALAREAAIDAVRRIMPKIDLDERTIPPEVLDELYVGREDFLSALKRIQPSAMREVMVQVPNVGWDNIGGVGDAIDKLKEGIELPMKNADAFHRLGIRPAKGFLLYGPPGTGKTLLAKAVAKEAEANFISMKSSDLLSKWYGESEQQIAKMFKRARAVAPCVIFIDEIDSLVPARGSGQGEPQVTGRVVNTILAEMDGLEELQSVVVIGATNRPTLVDPALLRPGRFDELVYVGTPDKPGREQILGIHTASMPLGDDVSLAAIAGKTERFTGADLEDVVRRAGLNALKRAGDDVQNVAAGDFDEALKDSRATVTSKMESEYKKMRGELKKRAAEVQPIGFIHEGMLEPTRDRKHGSTES

SEQ ID NO: 9820 - protein, 569 aa, Erythrobacter sp. SD-21
MAGEALVPTIKWLAASTPRSLLRDVIAGLVLSILLVPQAMAYAQLAGLPPQMGLFAALTPPLLYLVFGTSPFVSLGPVALVSLVIGEVVGSTSLAPEIGAEIIAIEAGLLLLLLGGFGLGRLVNFISEPVLLGFTAAAAVLIAASQLPTLLGINAARAGDLPTALGGLWVRFGSIKPVTAAIGLAALVTLVLAGRYAAPLLWKMGVKPPFRLALAKSFPLVVIVVAGLVASSSAAPVPMVEAVEGGLPEPVFPFVPLEYWLQLLPGSFAVAIIIFVTATAVAKALAGEDRSNLDTSREAVALGAGNVVAAVTGGYAVGASLSRSALVRDSGGHSPLVTVCASAVVVAVLFFLAPLLAYLPQTALAALVISAVFGLVKTRDIRMVWQHDRVEGLIIGAAFVATLLFGVQLGLAIGAVLGLAHFLWFSSTPRVTQIGTADGGTTYRSVRRDDVTIKTLPVLVVRIDRTIYFGNSEYCEDRIVKLVAQYEGVEHLVLDMRAVNAVDASGAAMLLRLVQRMRDYGVIVHFAATHEPVAQKIRPYGGERSDFHRTVSDALEACGVPEEGPIPYT

SEQ ID NO: 9821 - protein, 70 aa, Erythrobacter sp. SD-21
MAKTGTVKFFNSDKGYGFIQPDDGSADSFVHISAVQAAGMQTLDKEQRLNYEVEQGRNGKESAVNISAAD

SEQ ID NO: 9822 - protein, 562 aa, Erythrobacter sp. SD-21
MYSYDEFDRTYVKDRVATFRDQVARRISGALTEDEFKPLRLQNGIYLQLHAYMLRVAIPYGTLNSAQMRQLAMIAERWDKGYGHFTTRQNIQYNWPKLVDLPDILDALADVEMHAIQTSGNCIRNVTADHFAGAARDEIEDPRPAAELLRQWSTDHPEFAFLPRKFKIAVTGAEEDRAVTRAHDIGIQIVRNEAGEVGYKVIVGGGLGRTPVVGVTIRDFLPKEHLLAYCEAILRVYNLHGRRDNKYKARIKILVMEEGLDSFRAQVEDEFASLLERHHGPSLIPDPAVVERIEQAFAPPAFETLPDSDEALDARLASDPAFAEWCEVNLTEHREPGHTIVSISLKPVGEAPGDASTAQMQVVANLAELYSHDEVRVSHEQNLILPHVAKRNLPAIYDALKDAGLATANINLIGDIIACPGLDYCALATARSIPIAKDIAQHFADSAYARTIGEMKIKISGCINSCGHHHVGHIGILGLDKGGKENYQITLGGDHTQDLQLGQRLGPGFDAKDVVPAIERLVEIYLGLRQDKDETFLKAVKRVGIQPFKDALYPPKESARAA

SEQ ID NO: 9823 - protein, 288 aa, Erythrobacter sp. SD-21
MKIAFIGLGNMGGGMAANLVKAGHAVNAFDLSEDALATAKDSGCATFTDAAKAVQGVDGVVTMLPNGGIVKSVYETSVIGKAPAGAVLLDCSTVDVATAKDVIAKAEAAGYDMVDAPVSGGIAAANGGTLTFMVGGTEKAFKRADEVLNAMGKAVIHAGDAGAGQTAKICNNMLLAITMIGTTEAMTMAKKLGLDPQKFYEISSQSSGYCWPLNAYTPMPGVGVESPADKDYQGGFATALMLKDLRLAMEAAGSVDATTALGRHATEIYEAFAEENGGLDFSAVIKTL

SEQ ID NO: 9824 - protein, 69 aa, Erythrobacter sp. SD-21
MTTGTVKFFNGDKGYGFIQPDDGSADSFVHISAVQAAGMTTLDKDQRLNYEVETGRNGKASAVNLSAAN

SEQ ID NO: 9825 - protein, 109 aa, Erythrobacter sp. SD-21
MSDVNSRISDIVKANDVVLFMKGTPLFPQCGFSSRAVAILDHCGVAYDSVDVLQDMEIRQGIKAYSDWPTIPQLYVKGEFLGGSDIMMEMFEAGELQTLMDEKQVAKAS

SEQ ID NO: 9826 - protein, 351 aa, Erythrobacter sp. SD-21
MHFLDQAKIYLKSGAGGPGAVSFRREKYIEYGGPDGGNGGRGGDIVFRAVQGLNTLIDFRYAQHFKAKRGMHGQGKDKTGAGAPDLVIDVPVGTQVLSEDKEEVLADFTEVGQEIVFLEGGMGGRGNASYKSSTNRAPRQHQPGIPGEEMWVWLRLKLLADVGLLGLPNAGKSTFINQVTNAKAKVGDYAFTTLVPKLGVVRHKGREFVLADIPGLIEGAADGAGIGDRFLGHIERCRVLIHLIDIAGQDPADAYQTVNAELEAYGAGLSDKPQLVALNKLDLADKELGEAFGEELLAAGADKVFAISGATGAGIEELIDAVLSYLPDRTSTETQAEEVEDEDEEPDWSPI

SEQ ID NO: 9827 - protein, 341 aa, Erythrobacter sp. SD-21
MEEGFSLWANPSSPHAEGRKARAALEDARERVKRALGWEGEVIFTSGASEAAALAFGESQTMYDAVSKVEHDALWSQVEHRGASAIEVAIDGSIDFTSIEKSVVSAEPYIDFPYTVAVGAQHINSETGNRQDIGSIASLVHGNDGLLVVDCSQSAGKFAIPKLADMAIVSAHKFGGPIGVGALLVRDFSILLPRGGQERGYRRGTENLPGVLGMAAALEAFGEPYLDPGILEPLDHLAQECRDLGGTWLSDRLSDPTPYIRAIAMPKISGSAQVMRFDMAGISVSQGSACSSGTMKTSHVLQAMQVEPDIADRTIRASFGWNTTREEVERFCEVWLELAKA

SEQ ID NO: 9828 - protein, 368 aa, Erythrobacter sp. SD-21
MIYLDYQATTPLAPEARDAMLRWLDGPGGTGFGNPHSPHKMGRQAKAAVEFARDQVAALFPAGGKVIFTSGATEAINLAIRGTAPNGKEAGTVSVSAIEHAAVLDTAKEAGTCHVLNVAKNGQCNTKQDLPQDTRLVCLMQVNNEIGTIQPTVEWHRKARENNALYFCDAVQAYGKIEVTGADMIAISAHKFHGPKGVGALWVRDGVDLHEVQTGGGQEHRLRSGTLSPALIAGMGAAAAEAKDRMEQDAEHVQKLWKRATEVFENWELNGSAEARYHGNLNIRPRGPNGGGLDVNRLMSDCRNVMFSAGSACASGSGRTSHVLEAIGLPKKLAKSSIRLGFGRYTMLEEIEEAGKAINEAAKAQGSL

SEQ ID NO: 9829 - protein, 199 aa, Erythrobacter sp. SD-21
MSALFDRLTQLFEQGHAREVDGLLSDARFADLDRTADAAVLIAVTEAENPTVLLTQRPRTMRDHPGQVAFPGGKIDAGEDAVEAALREAWEELGITREAVRVIGTTDRYQTGTGFDITPVLATVPADLPIRPDPREVESWFEAPLDHLLDRQRWSENEVFWKGAMRRYYEMDHEGYRIWGVTAAICINLSRRLAWFDER

SEQ ID NO: 9830 - protein, 372 aa, Erythrobacter sp. SD-21
MRIAVLKERAPGESRVAITPETVKKFTALGATIAVEEGAGHAASIPDEAYREAGAEVATGPKAVEGADIVLGVQAPDVAALAGAKPGAWVAATFDPFRNGELVEAYAKAGFEALSMEFMPRITRAQSMDVLSSQSNLAGYKAVLTAANEYGRAFPMMMTAAGTVQAAKVFVMGVGVAGLQAIATAKRLGAQVSATDVRSATKEQIQSLGAKPVFVEEVAGIEGEGSGGYAAEMSEEYQKAQAELVSSHIAKQDIVITTALIPGRPAPRLISDAQIASMKPGSVIFDLAVAQGGNVEGSSPDETVVKHGVKIIGFSNTATHLAADASALFARNLFNFLSAFWDNEAGKPILDDEIGNAVRLTQGGKVVSERLT

SEQ ID NO: 9831 - protein, 428 aa, Erythrobacter sp. SD-21
MDGKPIAPPRTVGFAGMSLLQINGMIGSGIFALPAVLVAGVGSFAPVLMLLGGVLFLPLALVFAWLAARFEMSGGPVLYGKTAFGSFAGFQAGWGRYVSGSVAMAANTHVMVAYFAAIFPVLQDPFWSTVTAVAVIAALTIINLFSMRGSVNALGGLTALKLVPLAILIGAALLGNFGAPEIVLPEFSQVETVVLLLFYAFIGFEGVTVPAGELKNPKRDLPRVLVTVLAGVTVLYAIIIWAYLAIGASPNADESALAASAQAALGDLGTLMIVLGAGFSILANSFSGVVVVPRMAYGMAQQGMLPEWFERIHPRFLTPANAILFYGAASCLFAMWGGFLVLAAASTLSRLLTYVITAAALPVIEKREGHLNPFRAFVALLALAASVWISSHASEEAWTIFGILLAVGTLLYFVARRGSVDEPIAESS

SEQ ID NO: 9832 - protein, 609 aa, Erythrobacter sp. SD-21
MSFETLPPVIGEALAARGYTDLTPVQSAVIEDEARGRDLVVSAQTGSGKTVAFGLALADALLAETANLALVDKPLALVIAPTRELALQVSRELGWLYAGAGLRIATCVGGMDASKERRALRAGPAIVVGTPGRLRDHLERGALDLSGLVGVVLDEADEMLDMGFREDLEEILDATPDGRRTLLFSATMPRPIERLAERYQTNSLRLSLVGQDRGHGDISYQAITVSPSEIENAVVNLLRYHEAETAILFCATRDNVRRFHATLQERGFGVVALSGEHSQSERNQALQALRDRRARVCVATDVAARGIDLPTLSLVIHVEIPRDAETLQHRSGRTGRAGKKGTAAIIVPYNRRRRVEGMLRGAKIEAQWMDAPTPEMIHKQDRARLLEMLTAETEFEEHDRELAKEVMDKLSPEDIAASLVRAHRAKMPTPEELIPNTPEARDKAKADRIRPGFEDVVWFKIGVGRRQNAEARWILPLLCRRGHITRNEIGAIRIGQFETWFQVPTAVAPKFAEAVARTASSEDEQDAILIEEAPEGPRVEARQNRQDFGGGSRSGDGPRVRPKPFGKGPRKGPHGGPGGKKPGAPFKKGPKLSGKKSANKRKPGGAPRT

SEQ ID NO: 9833 - protein, 164 aa, Erythrobacter sp. SD-21
MFAVVRTGGKQYRVAAGDKIAVEKLAGEAGDTITLGDVLLAGEGDKLAEAAKTVVSAEIIAQAKSEKVTVFKKRRRHNYRRKNGHRQMMTLLRITAVGDSKAEKKAAPKKEAAPKKDTSEEKAAPKAKKAAPKKDAAPAKSGTHATEKKAPAKKAAAKKTESKK

SEQ ID NO: 9834 - protein, 219 aa, Erythrobacter sp. SD-21
MKFFVDTADIADIKEMADTGLLDGVTTNPSLIAKSGRDFMEVTKEICDLVDGPVSAEVVALDHETMMKEAETLRKIADNVCIKVPLTIDGLKTCKKLTGDGTMVNVTLCFSANQALLAAKAGATFVSPFVGRHDDNGFDGMELIADIRRIYDNYDFGTEILVASIRNPVHVLQSARIGADVATMPPAVIKGLFKHVLTDKGIEGFIADWEKTGQTIPAS

SEQ ID NO: 9835 - protein, 390 aa, Erythrobacter sp. SD-21
MPEAYIVEAVRTAGGRRGGRLAGVHPVDLAAKSLDAVMERSGLDAKAVDDVVMGCVSQGGEQAMQVGRNAVLAAKHLGEGVPAVTIDRQCGSSQQAIQFAAQAVMSGTQDVVIASGVESMTRVPMGSTAMFHMKEGLGNYKSPGLEEKYPGIQWSQFMGAEMIVKKHGFTKDDLDRFALASHQKAIEATKSGAFTDEIVPVEIETPEGTEMHTVDEGIRFDATLESISGVKLLSPEGTITAASSSQICDGSSAVLVVSEKALKEYGLTPLARIHNLTVTAGDPVIMLEEPLFATDRALERAGMKISDIDLFEVNEAFAPVPLAWLKHTGADAEKLNVNGGAIALGHPLGASGTKLMATLVHALKARGKKYGLQTMCEGGGVANVTIVEAL

SEQ ID NO: 9836 - protein, 656 aa, Erythrobacter sp. SD-21
MRDNNQNQPPEPEGNGPNPWIKSLMVWGGVFLGLLLVVSMLGGGGQGAGTSLLYSDFKEKVAEGTIKSVEIADDRITGVTNDNETFNTIPVKNDPGLTPLLEENGVEYSGKEADNGSLLVYALINILPFLLILGIAFFALRQVQKGGGAGGAMGFGKSKAKMLTEKQGRVTFEDVAGIDEAREELEEIVEFLKDPSRFSKLGGQIPKGALLVGSPGTGKTLLARAIAGEAEVPFFTISGSDFVEMFVGVGASRVRDMFEQAKKNAPCIVFIDEIDAVGRSRGHGLGNSNDEREQTLNQLLVEMDGFEANEGIIIIAATNRPDVLDPALLRPGRFDRQVVVPVPDIDGREKILAVHMRKLPLAPDVNPRTIARGTPGFSGADLANLCNEAALLAARRNKRLVAMQEFEDAKDKVMMGAERRSMVMTEDEKKMTAYHEAGHALVSLNEPASDPIHKATIIPRGRALGMVMRLPERDNYSYHRDKMHANLAVAMGGRVAEEIIFGHEKVSSGASGDIQYATDLARNMVTKWGMSDKLGPLQYEQSQEGYLGMGQTARTMSGAETNKLIDEEIKRLVEDGLKRATDVLTEQEDKLHLLAQAMLEYETLTGDEIDQLMKDGKIDRPDEPKGPVSVSQPGSSTVPKAGKKFGGSGEGAPAGA

SEQ ID NO: 9837 - protein, 579 aa, Erythrobacter sp. SD-21
MENSRNFVLVLTLSLAVLIGWQWAMDHFYPQPDNVPVTAETVDTPAEAAAAASGEIGESAATSVDLESSLGAAERIRIDSPKVAGSIAVGGAMIDDIVLKDYAASPDGDSEPVRIFAPRGTDVQQYAQFGFLVNGAKISDDVLWESDGDTLSVGNPVTLRHDAGNGVLLEQTYSIDENYMITVEQAVSNRGENGIVAQPFGLVGRTSTTMSDDFFIAHSGPIGSFGQAVEYGYDYSDVEEERKVSPSGTTDWLGFTDIYWLAALVPQAGTDPDATFRSLGGDLYRADMIYDPVRVEAGRKVTTTSRLFAGAKDSEILDAYQDAGIPQFGLAIDWGWFRWFEKPFLWLLKNIFALVGNFGVAIIILTIIVRGLMFPIAQKQFASMAAMKAIQPKMKKLQERHKDDKVKQQQEMQKLFKEEQVNPLAGCLPLILQIPIFFALYKVLYLAIEMRHQNFLWIEDLSAPDPATILNLFGLLPFTPPSFLAIGILAVLLGVTMWLTFKLNPSAMDPVQQQVFSIMPWVLMFIMAPFAAGLLLYWVTSNVLTLAQQKYLYSKHPQLKAAAEKEKAEKAAEAAEAKP

SEQ ID NO: 9838 - protein, 560 aa, Erythrobacter sp. SD-21
MSSESDAPIAPPLVELPINTHDRGFYDGFSRAVTIPSKIIVSLLIMWAIFFPVSANETLTAANSTIISSFAGWYVYLVAALVTVCFLLALWPSAGRLRIGAAGEEPEFGRFSWFAMLFGAGIGIGMLTYSTGEPLAHFANNPDIIRGTIQPLSAEAVRPAYTYTFLHWGFAAWATYALVGLAIGYVAYRRGLPLTIRSGLAPLFGLRMSGIWGHIIDVVAVVATILGVAVTMGFGVEQFVAGLARLGMGDWLLDADGSSSAAAVIVSLFVLVGASTLSALSGVGRGIKWLSNLNMGLSFALLALFMIVGSGLLGVELLGSGLWDYLRTIVPNSLTLFDEAGPNGPELVQWQLDWSVFYWAWWIAFAPFVGMFIARISRGRTVREYVFGVILVPSLMCFVWMTIVGGTAIDLELSGIAGGKIVEAGISDQLFATLAVLLSPDVAAVVSGLVVILLMTYLVTSADSAILIVNTINGAGETSGQRRRHIVFWGAALAFVVGSMLILGGIDAIRITMIIGALPFSLVVALMAISIVKAVIYDLRRKKHGVPTTAAGCAEVASAK

SEQ ID NO: 9839 - protein, 528 aa, Erythrobacter sp. SD-21
MLLDRVKPLDAILATAKKKALKRTLGPIQLMLFGIGCIIGTGIFVLTAAGAQKAGPGLMLAFVIAGLVCIVAALCYAEIASMIPVAGSAYTYSYATMGEFLAWTVGWALILEYAIAAAAVSVGWSGYFAGTILNEFLGIELPQWLAAGPLALGGEPGGFINLPALVIALLITWLLMIGTNESARVNAVLVLIKVVALTVFIALTFTSAEFDVDKFNPFLPAGVFGGFGSGVGAVGAAATIFFAYVGFDAVSTAAEETKNPQRNVPIGLVGSLLFCTVFYIFVAAGAIGTIGGQPIMGPDGIPFPAGSEELALQCAMPQYAASLVCSDEALAHVLRQIGFSSVGNMLGIAAFFALPSVILVLLFAQTRIFFVMSRDGLLPEGLSKVHPKWNTPYVVTAITGVIVAFGAAFFPVGQLADIANAGTLYAFLMVAVAVMLLRRSDPGRKRDFRTPALWLVGPATIFGCAFLFLNLPTEAMFVLPIWTLIGLVIYFAYSRRHSHLGRGIVEVHEPEYAEIEPGIPGFDEPNGS

SEQ ID NO: 9840 - protein, 467 aa, Erythrobacter sp. SD-21
MTAMNHGADNTMDHELETAGRGTISLAGGVAMGTGVMIGAGIFALTGQIAELAGPLFPLSFIVGALVTSLAAYSYIKMSNAWPSSGGIAMILQKAYGPGVVAASASLLMALSMVINESLVARTFATYALRPFGLEENAFLLSALALALIVFAYIVNKAGNRSVSGFSLIMSAIKIGGIALFAVAAIAASGFFSGAFAEPANITSGGAFLASVAFSILAFKGFTTITNSGGEIVDPHRNVGRTIMISIAICVVTYLLVAFAVGSSLTIGQIVEARDYSLAAAARPALGQLGFWFTIVIAIAATTSGVIASVFAVSRMLTMLTEMKMIPHRHFGMKGPIRGHLLVYTVVIAGTLAVLFDLSRIASLGAFFYLVMDILVHWGVYRHLRNEIGAKGSVLLAAIAADGVILAAFAGVKLDSDPAIVVIAAVLIAAVFALEALFLRRKRVADGNDHRDANGDESQPPSNGAEN

SEQ ID NO: 9841 - protein, 537 aa, Erythrobacter sp. SD-21
MSGKRQEYSVMSKPKVLISDKMDPNAARIFEERGCDVDVITGETPEELKARIGEYDGLAIRSSTKVTPEILDAATNLKVIGRAGIGVDNVDVPYASGKGVVVMNTPFGNSITTAEHAIAMIMALARQIPQADRRTQAGEWPKNDFMGVEVTGKTLGLIGAGNIGSIVAARAQGLKMKVIAFDPFLTEDRALEIGVEKVDLDTLLTRADFITLHTPLTDETRNILSRENLAKTKKGVRIVNCARGGLIDEAALAEALDSGQAAGAALDVFQTEPAKDSPLFGKPNFICTPHLGASTTEAQVNVALQVAEQLADYLVNGGVTNALNMPSLSAEEAPKLRPYMKLAENLGSLVGQLAHGNLTKINIEREGAAAELSGKPIEGAVLSGLMRQYSDTVNMVNAPFLAKERGLDIRSIRHEKEGAYNTLLRVTVGTDSGDRSVAGTLFGADAPRLVEIFGVRIEAELDGHMLYIVNEDAPGFIGRIGSLLGENGINIGTFNLGRRAAGGEAVLLLSVDQPIPNEVVKKACALEGVKTVMPLAF

SEQ ID NO: 9842 - protein, 310 aa, Erythrobacter sp. SD-21
MTLRQAQDGSETRCGLVAVIGAPNAGKSTLVNQLVGQKVAITSAKAQTTRARMLGIALHKSEEADTQMVLIDTPGIFSPKRKLDRAMVSAAWDGTESADAVLLMVDPIKQRRHELEPLVEALAKRPERKILVLNKVDAAKKEPLLALAQELAEKVEFAEVYFVSALTSDGVPELKESLAAMMPEGPWMYPEDQVSDASERLLATEITREQLYKQLHEELPYDSAVRPEKYIQRPDGSVEIHQQIVVMRDNQRAIVLGKGGSRIKEIGTAAREELSELLGQKVHLFLHVKTDERWSEDKEMFEEMGLEWKG

SEQ ID NO: 9843 - protein, 466 aa, Erythrobacter sp. SD-21
MSTDARLVVISNRVAVPKARGAAGAQGGLAGALHSALTSRRGLWFGWSGEESESGRTGNIATQTSDGVTTATIDLSKRDVEEYYNGYANSTLWPLFHYRLDLAKYERETGKGYERVNERFAELVTPLIEPDDVVWVHDYHLIPLGERLRAQGCKNRIGFFLHIPWPATRLFVSLPYHERLVRTMLHYDLVGFQTKEWLDSFLHYCRSELGAEVNEETSEITLDGNTTMARAYPIGIDWEHFSKLGETGEARQAQQRLMSSTRRRTAMIGVDRLDYSKGLPERLDGISRFFDRHPERVRDLVFAQIAPPSREDVDSYQAIRATLEQKAGQINGARSEVDLVPVRYVNRGYSHAELFGFFRAAKIGLVTPLRDGMNLVAKEYIAAQDPEDPGVLILSRFAGAAAQLQDAVLVNPHSPDDLAHAIRVALDMPLEERKERYENLVATVRDDDVQDWTETFLTDLDNIPIA

SEQ ID NO: 9844 - protein, 202 aa, Erythrobacter sp. SD-21
MTKQFHDNHLSADALDQIFREARSYNGWHEKDVSEKQIEAIYELLKMGPTSANMQPGRFVWCKSQKSRDKLAEFASEGNKEKIKTAPVVVVIGYDIDFHEELPWLFPHTDAKSWFEGDEEGRKEGAARNSALQGAYLMIAARALGLDCGPMSGVDLDKVTEHFFADSPRHRADWVCAIGYGDKETIFGRSPRPDFDKFNRIN

SEQ ID NO: 9845 - protein, 556 aa, Erythrobacter sp. SD-21
MTTRPTPAAAKLLVNCLIEQGCERIFTVPGESFLQVLDALGQQDAIDLVTCRQEGGVAMMACADGAMTQRPGVAFVTRGPGATNASIGVHVAMQDSQPMILFVGDVDSEMRDREGFQEVDFAAFFGPIAKWAARIDSADRIPEYVARAYATAISGRPGPVVLALPEDMLSRDTGAKPRPRVERPAQAPCPDAMQAMMALLADAASPIAVIGGAGWNAKAREYFQLFAERLGIPVATAFRRQDALSPSSRVYAGNLGYGPNPKLVERVKNADLILAVGARLGEATTDGYTVPPLVDGDRKLVHIHPDPNELNSVYPADLAICAEMDEFAESAALWDEGEVLDFEAGAEAHAEWQAWATAHPAPDFALDMGQCVQFMRDTFPADTIICNGAGNFAGWWHRYWRYEGYPTQLAPTCGAMGYGVPAAVAAALRHMDRTVVAVAGDGDFLMNGQELATAVQHGANLIVIVVDNSAYGTIRMHQEREFPGEERISGTRLANPDFAALAAAFGGWSATATTTQEFKEALVSAEGRSGLRLIHCHIEIEQLAASGATVSGLRKK

SEQ ID NO: 9846 - protein, 311 aa, Erythrobacter sp. SD-21
MKIMAANSNLPLARAIAGYLEMPLVDAGVRRFADEEIFVEIHENVRGEDVFVVQSTSYPANDNLMELLICIDALKRASARRITAVVPYFGYARQDRKPGPRTPISAKLVANLITEAGADRVLAVDLHAGQIQGFFDIPTDNLFGAPVMAADIQARYGDKDLMVVSPDVGGVVRARALAKRLDNAPLAIVDKRRDRPGESEVMNIIGDVSNRHCIMIDDIIDSGGTLCNAAQALLDQGAASVTAYITHGVLSGGAVARVNGSALKELVITDSIKPTDAAKDSDKVRILTIAPLIGEAVRRIADESSVSSLFD

SEQ ID NO: 9847 - protein, 2482 aa, Lentisphaera araneosa HTCC2155
MIKNKLLYDADKYHDNCGVGFITRKDGLQSHDVLLKGHEALCVIPHRGGMSAEGIGDGAGVNIDLSLKFFQKVLEDDKIQLGEFGVGNFFFPEDHSQDNKAREIIETVFDKYKITILKWRDVPVNIKALNEASAKAQLPIYQIIFAKPESCKTQNDFENLINDALTEIESAGYSDSALNGFYPMSLSSKTIVYKGRLNSGEVVPYFKDLSDLDMEIRVFLFHTRFSTNTAPATFMAQPFRRMAHNGELNTDKKNRLSEDAIAKQKNKKVIFPKGQSDSARLDQTLQRRVIEDEMDIATAVLAMMPPAWENKQDIDPLIRDMYEYFSLYEEKNDGPAALLFSDGTKVGARLDRLGLRPLRSIETTEYVCVMSEAGQIDFPPEEVVTRGRIEAGGMLYFDHETGESYTTETIEKSLAKKADYKVLLEKKKLALEDLPKVELPEQNSELDTYERAVAYGMNQESFRFLLDPMIQGAAEKISAMGYGVSLNVLNADEGGMSRYFSQRFAQVTNPPLDSIREKDGMTLRVSLGAKPNFSESDSKQIVIQNPYLTLAELSSVRAQKDLTTCTVDILYTPSKDKEENESKLNSALEQICKEVEVAARAKNGIIILSDKNISKSKAAIPLLLAIAASNQHLIEQGLRFNSSLIAETGQIASSHDVATALGFGSSAICPLTIEDRAQSLMPNEVDKALSNYRKAIAKSLMKIMGKFGLCTAESYIGGEIFESNYLNTEDPQLKKHFPNITSPVGGVGYAEIAASASEWHFKAFGIKDENDIPHLGLFKERQGGAGHSFGLVAVREYINMTEEEVLYSIDEELEDIFERFELKEVFPNALADLKKIYKRIGKDIMHESDLIAALSDIFADAELSMHQAAMRSIASVLDRNLIRDTEIADSEDYTSDIDEFLTEAPHPEDDPLGHLTYKKYGERQRTPEEIDSHRITQAYRQFAGNVYTERKVRPAALRDIMYFPADINKAKDAVKFKAILNKQALKGNNCFKIKGLSVKPVKDNTFKLTMSLSSDERVQWLKEYFEERFGSLIQAKVQDSSVTIQTSDEDILFYLNNIRTAKDSIDKSLVQDAHKVTATFSSAAMSHGALVAEAHEAVSQGANIAGALSNSGEGGEKRVRYNTIKASSIKQVASGRFGVWAGYFADPYLEQVEIKIAQGAKPGEGGQLPSFKVTVMIASSRGGTPKIELVSPPPHHDTYSIEDLGQLIHDCKASRAKVIVKLVSSEGIGTIAVGVAKAGADVINVAGNTGGTGAAAVTSLKNTGRSAELGIAEVHQALALNGLRDKVILRSSNAHQTGIDVIKSAILGADSFEFGTSALMMLKCVMAKNCNIKCPAGITTNPELFTGDARALAQYFLNVAQEVRELLAYLGHKSIDEVRGKTELLHLVNHDKIIGQLNFKALLAEVDEVKIEDPIYLEADFSIDDKILGKVEKELLYGKETKLLLKGAEYKLNNRHKSVGGQLSVDIERIVNHRFKDSDFNSSIAVIQNDTGRRYLAPESLTIQTNGSAGQSYGALLNNGMLLQHFGTCNDGVGKLQSGGIITVKSPGGGSSLAGENVLIGNFALFGATGGRCYINGEAGDRFAVRNSGAMAVVEGVGDFFCEYMTSGTILNLGTFGKGWGNGMSGGNAYQYDPDNKLPVFYNQDSVIIKKFDGSKDSEVHAKIVHYLLQEQVKYNQSEIAEKILNKWEEEKANFYYAIPLALFETQTWECLLKNSSRKEMLEELASNYTHIQIEQIKDAYKNETRLFNGQTPALGDTNTALIFRLISRYSIFCKASTITLDKMNKFELALKDETLAKYIKNIIFTEDKGLMELLLKVSRDVLSKFDDELLAKSLADKRVYDYKKALYLRDVLENNSLGSYAWIMEQDLKNQEAIAARMTFLKGFAAQVSLALVKDALNKETGLPLIPENVPFSEGQLKWLNGYFNGLSFGVASSEDSSPKGKELNILFGTQTGNSESLANDCAALAANFGMLAQVHDMGNISADDLKVMERVLIITSTYGEGEQPDNAQALYTAMTSADAPSLEGMFFSICSLGDSSYDLFCEAGKQWDEVLEKQGALRAFKRVDCDVDFEDPFEEWACESLPALSALGDQSAGDVAGGPNVATKKDDNAFGKKKPFPAKLLKKVTLTSDESSKEVVHYEISLDGSDYDYKAGDALNVIPVNEESLVDDIIEVLAEDPEKILDLGKDGKVSFRDALLHKFEIKTPTKDLINKVAQNSQDKELLSLVEDKDALSNFLWGRDLIDFLAHYEHGLEAQSFIPLLKKLQARAYSISSSPKKHPGEVHLTVGSVRYSSHGRTRHGVASTFLADRVVENETDILCYMHANKAFAVPENDGLPMIMVGPGTGIAPFRAFLEEREMRQANGKNWLFFGDRNEANDFFYKEQLKDLQDNNYLEKLSLAFSRDQEEKIYVQDRMRENGAELFQWLEEGGYFFVCGDAYRMAKDVDQALHDVIAEHGKMSDDEAIAYVDKMKADKRYVRDVY

SEQ ID NO: 9848 - protein, 67 aa, Lentisphaera araneosa HTCC2155
METGTVKWFADDKGFGFITPNSGDKDLFVHHTEIQTGGFKSLAEGQKVEYEVGQGQKGPCATNVTPL

SEQ ID NO: 9849 - protein, 357 aa, Lentisphaera araneosa HTCC2155
MKIAIPKEIKKNEYRVGLGPEGAAALIDAGHEVMVETKAGSGAGYNDIFYDQAGCIICDDRKVLHDWAEMIIKVKEPQKEEVALYHENQIIFTYLHLAADDDLIHGLLDKRVEALAYETLQLDDGSLPCLKPMSQIAGRLAIQEGAKYLEKPSGGRGVLLSGVPGVQAGRVLIIGAGMVGRSALKIAVGMGANVTIMDINEGPLSLIDEKYEGRVQTLFASQENVIKELPLADMVVGAVLIPGGKAPTIVTRDMLKLMKKGSLIIDVAVDQGGCVETSRPTTHEEPTYVVDGVLHYCVSNMPGAVALTSSQALSAQTLPYIKMIADLGLEKALESNSALRRAVNLSKGQIIHPALKL

SEQ ID NO: 9850 - protein, 68 aa, Lentisphaera araneosa HTCC2155
MSTVQGRVKWFNETKGFGFIEQDGGKDVFVHFSAIQGQGFKTLEEGQKVEFDVEDGQKGPQAVNLTVL

SEQ ID NO: 9851 - protein, 405 aa, Lentisphaera araneosa HTCC2155
MKKIGKSSHLESVKYEIRGRVAKASERLRLDGVNVLELNIGNPGVFGFKVPDTMNMALIRNLEKSAAYCASKGIYSAREAIVVDTQNQGVKGLDIDRVYLGNGVSELILMAMEGLLNLDDEVLLPSPDYPLWSAAVKISGGQPVYYPCDSKNDWMPNLEAMEASVTSKTRGLVVINPNNPTGAVYSREILEGIVDIARRHNLIIFSDEIYSKVLYDENEFIPMATLAEDILIVSFNGLSKSYRACGFRCGWMYLTGAVDMAESYLEGLDLLASMRLCSNVPAQWAVQTALGGYQSIFDLCSGGGRLKRQRDLCHKRLNAIEGVSAVNAGGALYLFAEIDLDIYKFSNDEDFVLRFLEEEHVLLVHGSGFNYERSAAFRVVFLPYEEDLQRAFDRLEKFLARHRRK

SEQ ID NO: 9852 - protein, 250 aa, Lentisphaera araneosa HTCC2155
MLKIKNLHAKVADKTILKGLDFEVNEGEVHAIMGPNGAGKSTLSKIIAGHPDYEVTEGTVSYEVNFKEKDLTDMEPEDIAREGVFLSFQYPVEVPGVSNLGFLKASFNAICRHQGVPEMEDAAFVDFVREKMDDLKIKRGFLDRPVNVDFSGGEKKRNEILQMAVLNPRLKLLDETDSGLDVDSMKIVAEGINTLRSKNSSTILVTHYQRLLDYVKPDYVHVLAEGRIVKSGGPELALEVEEKGYDWLVK

SEQ ID NO: 9853 - protein, 323 aa, Lentisphaera araneosa HTCC2155
MDYLPQARQVLDIESKGIQSIADQLDERFNQFISICLKALKNKNKLVLSGIGKSGQIAQKMASTLSSTGSRAVFIHPVEAMHGDLGMMYDDDVFIGLSYSGETDELLKVIPAVKRLGLEVLSLTGNVDSSLGKSSSISLPCKIDSEACPFNLAPTTTTTAMLALGDAIAMVLMDIHEFKINDYGKLHPSGAIGRAITLTVDDLMRTGDRVAVIEPDTLVQEAVLAMCKSKGGMSIISNQDKDLLGIFTTGDLKRGIAKDLDFLKRKVSEIMVKSPIKLNKSQMAVDILDILREKNINAIPVVDQDDKVCGVIDIQDLPKFKVM

SEQ ID NO: 9854 - protein, 537 aa, Lentisphaera araneosa HTCC2155
MDKFTALGLEPWITQCLEAKGFKEPSPIQEQAIPVLLSQDHDIIGQAQTGTGKTAAFGLPIVQKIEPGLKKPQALILCPTRELAIQVNEEIKSFCKGRGITTVTLYGGAPIMDQKRALKKGVDLVVATPGRCIHFIEDGKLELDSLEYLVLDEADEMLNMGFVEDVEKVLKASPDDRTVLMFSATMPPRLKKIAESYMHNSITIKAKSETMTMETIDQVVYEAYPENKFAALCRIMDLEKDFYGIIFCRTKVEVEKVSAGLANEGYAADYIHGDVAQESRERLLKRFRNRNISLLIATDVAARGIDVTDLSHIVNFSLPEQFESYVHRIGRTGRAGKTGTAITLITPKERSKMSFIEKKTGAKTERRKLPFGEEMIKLRIQKLSKELAHFQENNAELEELAPIKEVAAQLLEDNSPVDIITALLSKIFGTKLDASNYPDINCSAAKKKSRDSRNFKGNTASGDSKSLFFAKGKRDGMMPKKVISFISGKSKVAPRGIDNLKVFDKFSLFTTNANDAERIIRSCNRKGMSPIVRYDRD

SEQ ID NO: 9855 - protein, 328 aa, Lentisphaera araneosa HTCC2155
MRLRVSEIIEHCPTIKTFCLEPLEEYKKYFAGQYLTVHTGEEGDVLRPYSLSSSPTNSGSYEISVKLIEGGLGSTWMHTQVKVGDELLCDEPEGKFTLQQAALTSVFVAGGIGVTPVLSMLKYALSIKDTRKLLFFYASRHLEDLVFHQELLDLAAAHPNLIYVPIISGDQDPEWQGQRGRVNKELLEDTGVIFKRAEFYTCGPDAMMKNLEELALANKVSKSNFHKELFLVAAPVNSGFSGKVNINYKGVDYEYTKEQSLLDFLHSQKVRVRHSCKSGICGSCEVQLKEGEVRHVNEDFFTDEELAEGRRLACCSFPVTDVVVDKHN

SEQ ID NO: 9856 - protein, 391 aa, Lentisphaera araneosa HTCC2155
MFVDRIKVYVKAGNGGNGCISFRREKYVPKGGPNGGNGGDGGSVIFVADPGTSSLVDLKFNQHIDAEHGGHGLGSDMHGNRGEDLYVKVPPGTVVMDINNDNYQICDLDEPESEIVIAQGGKGGRGNRSFATSINRVPRQAEEGYPGEELVLLLELKTIADVGLVGYPNAGKSTFLNSVSNSGAKTASYPFTTLNPIVGTIDFPDFTRITIADIPGLVEGAHENIGLGHHFLRHIERTNNLVYVLDMNGTDGRDPLDDLVKLKEELELYEEGLSDRACMILANKMDNPASEENLERLRKETDLTIFPVIAELRDGVDEVLEFLHKRVMELKKSKVKHVPKLKNIYRKEGAVVVDLEADGDDFALSSDDDFDFDVEDLDYDDFYDDIDEDEV

SEQ ID NO: 9857 - protein, 301 aa, Lentisphaera araneosa HTCC2155
MLEDYGYGNCGYVAIVGRPNAGKSTFVNQALGYKLAAVSRVPHTTRRRWVGIFTDDDAQIIFSDTPGIHESKNRMDEMMDRTIKRAIDKNDITLLLCDPMREFGMEDEMAAKAAAAGGKPTILVLNKCDKASAEEKREMESNYSAHFSEKPKIHHMSALNNEGVNELLELIKELLPKGPFLYPDDQIADAFLRDIGEDIIRESALELLHSELPHSLAVMIDKWDEREKKIKIEATVLVERESQKQIVIGSGGKMVQEIQRQSRSKLGKSFEKFVDLRLFVKVMPDWQNRIGLLKEMNLNDK

SEQ ID NO: 9858 - protein, 383 aa, Lentisphaera araneosa HTCC2155
MALSQETIDIVKATAPVVGENAEKITSRFYPIMFERYPMVKEFFNQSHQRDGLQQKALAGAVVAYALNIDNLGALGGAVEGITERHASLNVQPEHYPIVGECLLAAIAEVLGDAVTPEIANAWGEAYGFLAEILIGAEKAKYAKTAEKAGGWNGYKSFKVIKKVKESASITSFYFEAEDGTPIISYDSGQYISMKLDLGEEQKSVRNYSLSNWGGKYLRISVKKDGDFSTHLHDKINEGDCVELNAPYGVFKLAPGEGAVVLVSGGVGITPMLSMLNQLSKNESTREVSFLHGTQNKDELAFEDEVKALTEKDNFSYEVSFSDEGKKISIDDLKKASNNVKETDFYVCGPVGMMKALCSDLKSWGVADENIHYEYFGPSGTLS

SEQ ID NO: 9859 - protein, 462 aa, Lentisphaera araneosa HTCC2155
MSSKDFASLPLSEDLIKNVASLGYEEMTEIQELSLPAILDGKDLIAQAKTGTGKTAAFGLGVLSKLVLDDYRIQVLILCPTRELCEQVSKAIRDLARMMPNIKLLSLGGGMPFRPQMKSVAHGAHIVVGTPGRILKHLNKSSLSLDHVRTLVLDEADRMLDMGFQDEIDAIIDQTNKQRQTLLFSATYPKKIATIAKRVMKDPLRIELDSQVHEESTIEQHFYKVTSESQRLLGLQLLLDKFKSESAVVFCNTKQEAKDICKDLSKVGFSTLALHGDLEQKDRQENLVRFANKSVAVLVATDVAARGLDIDSIDLVINYHISRDFEVHVHRIGRTGRAGKNGIACSLHSQKEAHKISLLQEFLGQEIESETLPDRSVLKELKYRPQMSCLKILFGKKQKLRAGNLLGALTGEKGLKGDQVGKMHIFDYYSYVAIERQSVNHALKILRDDKWKGRAYKCMLIR

SEQ ID NO: 9860 - protein, 614 aa, Lentisphaera araneosa HTCC2155
MDKKGLAWLIILGLSLYLILNTENDKINQKFFGIEPQAAAPVEENTDTALSSDVVSPTSTTNEKTIAEPKQEIAKTEIKEELPKELNTELPLHTLSVGENFTLNIRPGQGLKDAQLNEYFTTSAKDQNVKIGDKNTPSFSLSGVAEKWELIDLRVKEKSNDKLITEAAYTFEGQSFAVQSTWELEEDYHFALNHKLINTSDKTLNVSGLYLNCGYIQPIQMGEHGFFTQQAIGNDQAIDTILKKERKIETHIKTSIDGDIQDKVEEAQDQGRVLKDPFMVYSPDPDDNDSYDWIAVKNQYFAFIADTTDSFATVRTKTKEIISPTKNEDGSQDKYDLLFAEGQISDFDLAPGASKEIVLDIYAGPQEIHVLENLGNDKKGIMQLNMFMNMKVSWLGFLSEMILKALFFFNGFVNSFGLAIILLTISVKLLFWRLTNKSNKSMKKMAVLGPRIKEIREENKDNPQVMNQKVMALYREEGVNPAGGCLPMLLQMPIFIALFNALRSAIELRHVEFLWITDLSQPDTLGFIPGVPIRPLVIIWALLMLVQQKMTPSSADETQKKVMMFMPIMMLFFCYGMPAGLTLYWCFQSLMTLIQYKLNNRTTDGTPAPAAAAK

SEQ ID NO: 9861 - protein, 374 aa, Lentisphaera araneosa HTCC2155
MMIYLDNNATTPLDPRVKARMQPFLEEEFGNAASNHAFGWKAKDAVTWARGKLSSLLNVKIDEITFTSGATESNHMVIQGVVLHCLLRGEIDQCHLITSNVEHKCVLGAFERARQLGAEITILAADKDGRISPEQISEALRPETRLVSLMYANNELGTLNPIAEIASLCRENSVLFHTDAAQAVGKIDMELENVDFLSLSAHKFYGPKGVGALYCCPRALSKLEVLCPGGGQENGLRSGTLNISGIVGMGAAAEIAKNKSHRKEIEELTTYLLSGIRKVYPKVQVNGSEEHRLPGNLNLTFPDVDTDDLEMALDMVAYSNSSACSAGQKKGSYVLEAIGLSEADRKRSLRFGLGLFSTKEEIDKVIRALEDLSE

SEQ ID NO: 9862 - protein, 119 aa, Lentisphaera araneosa HTCC2155
MKLEVLKSKIHKAVVTQADLNYEGSLGIDQDLMDKVGLLPYEKILVSNLNNGERLETYVIPAERGSRSFLLNGSAARLGAVGDRIIIMNFAYFDIEDIKKGHKPTVAVLNEVNEIELLK

SEQ ID NO: 9863 - protein, 163 aa, Lentisphaera araneosa HTCC2155
MKTIFIDRDGCVNVRLVGNWVMTWDDFEFMPGAISGIAALKKAGYRLILVTNQRCINLGKFSEEKLNALHDKMQNELKNEGGFFDSIYHCPHDRDENCGCRKPEPGMLLKAAEDFGDIDLSKSIMLGDQESDRLASEAAGVGNFYQISSEQTIADAAKTILAP

SEQ ID NO: 9864 - protein, 498 aa, Lentisphaera araneosa HTCC2155
MKKLMFAFVCLLATGIFSVSAGTELAPAAEGVTLKSFQEKVQVDFDNQTEKAEVSAAIEGSKTVVDDGISETYSGVITYTISAEGEGSLSFESDDKFWTSNVFMMMAAVLVFIMHLGFCCLEVGFSRAKNSVNIIFKNFTIVAIATLVYGLMGFNIMYPGEFSIGSFFGFAGFGLEAAEGGSAMTYAGGYTYWTDFLFQAMFAAATASIVSGAVCERIKINSFLIFCTVFAGIIYPIIGSWGWGGGFLSDWGFVDLAGSGLVHATGGAGALAGAIVLGPRIGKYVNGKTFAIMGHNMPVAAIGAFLLWFGWFGFNGGSQLDANPMAASGIMVMTLLASTAGVVGAMILSWILSGKPDLSMVLNGALAGLVGITAGAANVGPMSAVIIGAIAGVLVVLAVLLLDKLKIDDPVGAIPVHLVCGAWGVIATGIFSDDADTMVQIKSILCIVAFAFVCAFILFTIIKVTIGLRVSEEEELEGLDLGEHGMEAYSGFQIFTNQ

SEQ ID NO: 9865 - protein, 639 aa, Lentisphaera araneosa HTCC2155
MAKILGIDLGTTNSCMAVMENGEATVIPNAEGHRTTPSVVAFAKNDEELVGQTAKRQAVTNPTNTIFSAKRFMGRKFAEVKHEIDLVPYEVVEAKNGDAHIKVGDKVYSPPEISAKIIAKLKRDAEAYLGETLTEAVITVPAYFNDAQRQATKDAGRIAGVDVKRIINEPTAAALSYGLEKDNEQRICVYDLGGGTFDVTVLELGDGVFEVEATNGDTHLGGDDFDESIINLLVEEFKKENGIDLRQDAFALQRLKEEGEKAKCELSTAQSTDINLPFITADATGPKHLQFTLSRAKLEEVTDSLVTRSILPVDACLKDAGASVGDIDEIIMVGGQTRMPKVIEAVKARFGKDLHRGVNPDECVALGAAIQGGVLTGDVNDVLLLDVTPLSLGIETMGGVFTALIERNTTIPTKKSETFSTAADNQTAVDIVVYQGERPMAQQNKKIGDFRLDEIKSAPRGTPQIEVTFDIDANGILKVSAKDKETGKEQHITIQPDSGLSEDEIERMVNDAKDNEAADKELRENIETKNKAEGLVFQVEKQLGEIGDKVPADVKESFDADIAKIKEACEANNYAEIKELTEKFEARLQELGQYMGAPGADGAGAGAAGAAGAAGAGAAGAADSEKKKEDDDIIDADFV

SEQ ID NO: 9866 - protein, 1513 aa, Lentisphaera araneosa HTCC2155
MDKKQLGFNTQDLGLYSPSMEKDNCGAGFICDLNGRKSNKIIHNALEILVRLTHRGAVSADGKTGDGAGILMKIPHDFFVKDCRKNEIFLPEEGRYAVGMVFLPQDNEQRRKCMGAFKRSVTEEGLNLLGWREVPVNTDALGRIAKETEPKVMQVFVGRGEEELSEEEFGIRLYISRKAVENEIRESDMCEKNFFYIPSFSTTTIIYKGLIKPEDMSEYYPDLVNEEFVTNLALVHQRFSTNTFPTWDLAQPFRYMCHNGEINTLRGNVNRMRARQELFESELFGDRVEKIKPVVIEGRSDSASLDNAVELMVNTGRSLPEVMMTLVPEAWEKHQDMSDEKKAFYEYASCIMEPWDGPASIPFTDGHCIGAILDRNGLRPSRYTVTKDGLVIMSSEIGVVDVDPANVEYHGRLEPGRMFLVDMEEGRIVDDAEIKNRVVKSQPYGDWVKDNLIHFGQIPAVEFENKVEETSLTDRKKIFGYSLEDEKIILSAMGETGKEAIGSMGTDTPLAVLSDKPRLIFDYFKQLFAQVTNPPLDGIREEVVTSLKLTIGSAHNVFEQGGLHCKKLSVETPFLTNGELEKLRSLDQEDLRAVTIPILFKANTGVNGLDQALNEIILKAINAVDAGKTLIILSDRGVNKKNAAIPVLLAASFIHHALTKFGRRSRCGIIVETAEAREIHHFATLFGYGVSAINPYMAYEVLDEMIDKGMLTVDHDKAVANYIKAAGTGLVKVMTKIGISTLHSYRGAQIFEILGLKKDFVDRFFTHTATRIEGADLSEIHKDTVKRHKQAFPTEETAGKIEVNVGGDYQWRRNGERHMFNPHTVSRLQLAVRDNLPQSYEQFAKMINDQSERLMTIRGLMVFRDQNPIPLEEVEPWTEIVKRFKTGAMSYGSISSEAHENLAIAMNRIGGKSNSGEGGENPARFEKDENGDWRRSAIKQVASGRFGVTSHYLTNADEIQIKMAQGAKPGEGGQLPGEKVFPWIAECRNSTPYVGLISPPPHHDIYSIEDLAQLIYDLKNANRTARVNVKLVSEVGVGTIAAGVAKAKADVILVSGFDGGTGASPLTSLKHCGLPWELGIAEAQQTLVMNDLRNRIVLECDGQLKTGRDVAIAALLGAEEFGFATAPLVASGCIMMRVCHLNTCPVGIATQDPELRKRFKGKPEHVVNYMRFVAEELRQIMAELGFRTISEMVGQSEKLEMRKAIDHYKAQGLDYSKILYKPEVAEGTKLFNTEVQDHELDEVIDFTLLEKTKAAIEKQEKVSFEINTCNTDRSVGAILSNEISKIYGKEGLPEDTIDMTFHGSAGQSFGAFSTKGLTMRVEGETNDYLGKGLSGAKLIIKPAKTATYVAKDNIITGNVTLYGAVTGEAYINGIAGERFCVRNSGAKAVVEGVGDHGCEYMTGGVAVILGETGRNFAAGMSGGVAYVLDPTNKFKELNCNMEMIGFEKVEVEADVTELKQLITNHFNYTNSPVAEDILNNWDAKVGQFVKVMPHDYKRALERIAREQEEAAQV

SEQ ID NO: 9867 - protein, 571 aa, Lentisphaera araneosa HTCC2155
MTKKLFPFVNWFPMKSINLKDDLIAGITVALLLVPQSMAYAELAGLPVRYGLYAAIIPVALMALFGSMAQISGGPTAMTGIITASVLFPLVQDIPPEFRDARYIELAILLSLTVGICRLLMGVFKLSSLVNLISHPVIAGFTNAAAIVIALSQLPKLLGVTEVYIEQEFMGLIKSFAHFSDKIDQIHPLSAITGTLSLIGLVYLKKIYRKIPWPLVIVACSCFVFWKCDVVNESLIVGEIPSSFPALRFPQNSHGQWLDTLITLIPASIMITLIGFVETVSISKAISLKTRQPMNLDQELIGQGVGSIAGSFAQAYPVGSSFTRSALNLASGARTGMSNIFAVITVILVLLFLTPALYYLPKATLSAMIISSTFGLIDFEPIRVSWRVMRREGIVAIFTFVATLCFAPSIMDGFLWGAGISIAAYLYRTMKPRIDVFDWSEKCPLHLRTRSHHISALRFRCAIFFASVEAFEESIITCLAKNKNTRYMLIEAQSINRIDASGEWGLRNLVKDLKKNKVELVFAGLPPEACEMIQKTQLDELIGLNNFYPNSEAAINALHERINGNNLEYMI

SEQ ID NO: 9868 - protein, 315 aa, Lentisphaera araneosa HTCC2155
MKTIILDAFTANPGDLNWDAIDQITELVQYPRTAPNELLERIQGAEALLTNKVIISSETMDQVPSLKYIGVLATGTNVVDLEAATARGITVTNIPAYSTPFVAQHSFALILNIFNKVAQHSESAKAGAWADCQDFSYTHGVLNELQGKTLGIIGLGSIGKKVAEIAKAFGMKIVALKSARPAKDPIERLEFNDFFSQSDIISLHCPLSPESQEIINAKSLALMKKSAVIINTGRGPLINEADLAQALNEGQIAAAGLDVLSSEPPAADNPLLSAKNCFITPHIAWAAQECRERLIQIAADNIKAFLSGEVLNKVN

SEQ ID NO: 9869 - protein, 454 aa, Lentisphaera araneosa HTCC2155
MKNKIKKALLSFFLFCTVPTMAESVDENTIPLDVEKPNLHFGFIKLTDCASLVIAKEKGFFEAEGLNVKLTAQKNWVILLDNVIKGALDGAHMLAGQPIGATVGVSQKANVITAFSMDLNGNGITMATDVWEQMKEHVPKDAAGKPIHPIKADALKPVLEEWDGPFNMGMVFPVSTHNYELRYWLAAAGIHPGFYTASDSKGHTDAEVIISPNAPPLMPSYLNSRAILGYCVGEPWNQKAVFAEKDGKQLGVPVVTNYEIWKNNPEKVFGVTEDWAKKYPKTHTAVLKALIRAGKWLDASMENREEAVQILSRSHYVGAEAKVLRNSMTGSFVYERGDRREMPDFNVFFRYKATYPFYSDCVWFLTQMRRWGQLKEDKSDEWYTKTAKKIYKPALYMEAAKLLVEEGNIEASEIPGDDETGFKPVTSEDIFIDGKAYDGTKPNDYIDSFEIKAP

SEQ ID NO: 9870 - protein, 411 aa, Lentisphaera araneosa HTCC2155
MLLKDLKGKKIGICVSGGLDSKTVTKRLMEEGLDVVCFSADLGQPDEKDINDIVKKMEPCGAPTYIVDVKDDMAEICFETIKASATYDGGYWNTTGIARAVTVRGIIREMQKHGVDVLCHGATGRGNDQMRFERYTRALAPEMGVYAPWRDPELLEQFPGRTEMADYLAQFDIPAVIGMKKKYSTDANLAGLSHEAEDLEELETSCLIVEPTMGVWPADAPDKIEDVTLTFQHGYCTSINGEKLSPLQAMEKANEIAGRNGIWMKNALENRIIGTKSRGVYEAPGMELLHAGLENILQATLDRNSFKLYKQMGELISNLVYDGRYYDKTVQAARAAIDTLTESAEGEVKLGLYKGNVFFQSMTDIYASLYNEEDSSMEASDGLNPASSQGYADIISVETAALAKAGQFDDC

SEQ ID NO: 9871 - protein, 593 aa, Lentisphaera araneosa HTCC2155
MIEFTLVGWDWIVIALYLVFIMGIGQVFKNVNSDASDFFRGGGNMLWWIAGMSAIVASISAWSFTAAAAKVYQTGFLLPGIWWIAGGIAVPVLWFIAPRFRQMRVITSLEAVYKRFGLASEQMYVYLVMPMSLFWGGVGLNAVAVFFASALSIDTNTTIIGMTTIVTVMSLFGGQWAVAASDFVQGLLMFLTVLVVVYFSVNLPEIGGVSNLHNVLPDRHFDFTENARPVVLLLWVAVTLLTLTLISIDLNGEGFKYLVAKDGKQVRKMVIMMAVIIVIIPLKSIMQLPAICAAVVYPDMTAVFPDMKVPAEGAFLAMAFKTLPQGMMGLLICGIFAAAMSSMDTAVNRNAGYFVRNVYLKYVNKDSSGEQQLLVGRIFTVVFGLIIILIAIAFNKLREMNLFDIFQVLNGMILMPLMIPVVLGILYKKTPSWSAWSTVLVGLISGAFAKMLYSDELALKILSETAPLNAAEQADIQYIFITIIVFVVSVSWFFMTSIFYKKSSPEFIQQVDVFFEDMARPIDHDLEDIKHQDGMQYKMLGFMCLVFGGFILLGMLIPNELSGRLCFLFVGGVIFSIGLMLYRKYLKSTKDEV

SEQ ID NO: 9872 - protein, 490 aa, Lentisphaera araneosa HTCC2155
MSIKSLGDPYDKDASLTHTVNCNCKSCCAEKSARQPLTDKERTKILEKQAESMETVSSHDIKESPQDSELKTSDDYFDRAIESAFIRGIFGHNDASRRSFLKLVGTGTFASVLGTMFPLNDLKAQAKESIAKLEKKKLKIGFVPITCATPIIMAKPMGFYAKYGLDVDVIKTAGWAVARDKSLNGEYDASHMLTPMPLAMSMGAGSVAEPYIMPTVENINGQAIVLHTKHKNKRNPKDWKGFKFGVPFDYSMHNLLLRYYVAEHGLDPDKDIQIRVVPPPEMVANLRAGNLDGYLSPDPFNQRAVYEKVGFLHMLTKDIWEGHPCCAFACPAKFAKEMPNTFGALFRSIVDATEFSAKAENRAEIAKAISPKNYLNQPEIVVNQVLTGRYVDGLERKVFNEPDRIDFDPFPWHSMAVWILTQMKRWGYVKGDIDYKGIAEQVYIATDTAKIMEELGYPAPKKTYKNHTIMGKEFDYTKPDEYVKSFAIKR

SEQ ID NO: 9873 - protein, 105 aa, Lentisphaera araneosa HTCC2155
MSDINATIKAELEAHPIKLFMKGVPAMPQCGFSQTVIQILSFYDVEYSSMNILENPEFRQGLKDYFEWPTFPQLVVNGELVGGCDIIMELHENGELQEVLDSAKK

SEQ ID NO: 9874 - protein, 309 aa, Lentisphaera araneosa HTCC2155
MSILEIAKMVFEIEKDGLCHVSKQLDVNFEQSVTSILSSKGRTIVCGMGKSGIIGKKIAASFASTGTPSFFMHPGEAFHGDLGMVTKDDVFIAISNSGETDEVLKLLPFLKDNSNIIVAMTGNSNSTLAQNAHYHLNIGVEKEACPLQLAPTASTTATLAMGDALTIALMQSRKFKPENFARFHPGGSLGRKLLNKVQDEMQTINLPIVTDDLAVKDLIQVITECMYGLAIVVKRNQLIGLVTDGDLRRSFEKFGKNVFDKSTKDIMSHSPKTISPLVSMQKAIEFMESYQINNIIVIEDSEVVGILKK

SEQ ID NO: 9875 - protein, 429 aa, Lentisphaera araneosa HTCC2155
MNTLINAVDGGTVGAGIVVFLIIIIGLTIFLMICENFLVKKGNVKILINEDQDAALEVESGSTLLDTLSGAGIQLPSACGGGGSCGVCTCKVISGGGDVLPTEKAHLSLKEQQEGIRLACQLKVKEDLEIEVEPEIFSIKKWECEVVSNDNVATFIKEFVVELPPGESIDYRAGGYIQIEIPKYDNLKYSDFEIENEYREDWDKFKIFDNVANNPTEVVRAYSMASYPAEGNQLMLNVRIASPPPRLPNVPPGIASSYIFNCKKGDKVTISGPFGEFFMKDTNREIMFIGGGAGMAPMRSHIFDLFHTKKSGRKATFWYGARSRREMFYDDHFKKIEADFPNFKYYVGLSDALPEDNWKLKGDISDEEGDGFEGFIHQVILEQYLNNHEAPEEIEYYLCGPPMMNDAVQDMLFNLGVEKEMIAFDDFGS

SEQ ID NO: 9876 - protein, 378 aa, Lentisphaera araneosa HTCC2155
MIYLDNAASTPLLPIVKEFYFDAIDRYYANPHAGHALSHECLRLRDKARAQILKAANADSNDYTVIFTSGGTESNNLALLGTELEEGDEIITCEAEHPSILNVIKEIEKKNVRVHYLALNSTGAPDLTNLEQLITSKTQLIALTLLHNETGGLLDIDQLSNITYGSSIHVHIDAVQGFGKREIDMNDWGINSLSFAGHKFHGPNSSGALIVKNNQLPKALFFGGGQQDGLRSGTLDAAAVAALGFTAQHNAKEKLNETKKIQELNSLCREKLLTLKDKQQNCPIDIISCESASPYILLANFENMQGAILMRALSNKNVIVGTGSACSADSKKISPALKSLGLNDQNGFGVLRISFAWQNTESDVIQFIEELQEVILDY

SEQ ID NO: 9877 - protein, 437 aa, Lentisphaera araneosa HTCC2155
MSFENLGLRTEILTGIKFQGYTQPTPIQEQAIPIILKGGDILAGAQTGTGKTAAFTLPILHLLSTADNRGGHRPRALVLTPTRELAAQVGESVELYGKGLDIRSTVIFGGVGINPQKQKLRKGVDIVVGTPGRLLDLAGQKALDLSRIEYLILDEADRMLDMGFIHDIKKIIKLVPEKRQTLFFSATYSKDIKALSESILRNPSLVEVARQNTSAETVDQSVYHVGKNKKRNLLSSLIRDGEWNQVLVFTRTKHGANKLTNMLIADGITAAAIHGNKSQNARTRALADFKAIKVRVLVATDIAARGIDIDRLPHVVNYELPEIAEDYVHRIGRTGRAGCSGEAISLVAKEEASLLFAIEKLINKKVNVKEIPGITEKAPSQSQAREAEKELKKRRNDNRQNRSQQRKPGSGGPKKKDFSKDKKHKPRRRPRKQNPDK

SEQ ID NO: 9878 - protein, 409 aa, Lentisphaera araneosa HTCC2155
MTSASNQLELAGTQIIVLAIAVLYLGERINKKWKFLERNSIPSPVTGGLIFSLFTACLHYFGDYKVSFDLDLRDTLLLVFFSTIGLNAKIKSLITGGKGLVIMIFACSLFLIVQDILGLIMAYIAGAHPGFGLLGGSISFAGGHGTAIAWGEEATKAGLEGAAEFGLACATFGLVVGGLIGSPIANRLIKKHQLSPKDEKVASANDFSVSSEANSPLHKLTVNDAIGTIFSLGLCLGLGDSVNRYLFTHDIKLPGFLTAMLVGIILTNSADHFKIKMSQPAIDLISGLSLQLFLTMSLMSMDLLSLMESASFLLFIVLGQGLLITLFAVHIVFRLMGKDYDAAVIAGGFMGLGLGATPVAIANMDAIMRKFGHSQKALIIVPLTGAFFIDIMNVLIIKFFIALPIFQAG

SEQ ID NO: 9879 - protein, 487 aa, Lentisphaera araneosa HTCC2155
MVEKVTKEVRHWTVCCECKGRGRKTRKVTKKRKRRYQDELKEFEKNNRLGEAPIRPRGHQDACKVCGGSGLSVAEKNTLVDTENYPHLAIIGGGIGGVALAMACLHRGIPFTIYERDRGFSTRSQGYGLTLQQASKAIEGLGIFNLEKGLTSTRHVVHNIDGKELGEWGVRKWEALAEKNPSKRRNIHIARQSLREALLEQLGSQETVQWGHHLVDFQEADDGTIDLRFQIDGEVNDQHAKADLVVGADGIRSSVRRLLIGEELTPLRYLGCIVILGICPLANLGGLEHELLDSSTVFQTANGHERMYMMPYSSDAIMWQLSFPLSENDAKELSSRGPQALKDEACQRCQWHDPIPQILKATESTQVSGYPVYDRALLKSNDLKNAGQVTLIGDAAHPMSPFKGQGANQALLDALALARSITAQCRPLSNWKALGIREAVLNDFESEMISRSSTKVQESAAAAEFLHSEIALHESDQPRAKCRKKES

SEQ ID NO: 9880 - protein, 463 aa, Lentisphaera araneosa HTCC2155
MNKKKILIVDDEIHTCQGLARALKYEWETFTASNGKEAIKIFEDNPVDIILTDVKMPGMNGIELLRQLKNIRPETPAIVMSAYNETETVVDAVKAGAYDFITKPFRLDDLDGVLKTAVQASPSFQLPSTKKATSAQLPAIAQTAKGSKNSPQIIYQSVAMENVLRTVQQIAPARSSVLITGETGTGKEVIAKAIHAASTRSKKAFIAVHCAALNANLFESELFGHEKGSFTGANEKRIGRFEAADGGTLFLDEIGEIDAATQVKLLRILESRSFERVGGNETLYSDARLIAATNRDLRKMVQAGEFREDLYYRLDVINLELPPLRDRREDIPALLQHWLISSVTENQLNVKGFTADAMARLCTYDWPGNVRELRNVVERMAVLSQQEYLDLPNLPDHVLLGEQQLSETAKIEDKDKALDVAENEKVLILKALKESNNNRTLAAERLGMSRRTLHRRLKQFGIT

SEQ ID NO: 9881 - protein, 101 aa, Lentisphaera araneosa HTCC2155
MYAIIETGGKQYTVREGDVIRVERLKAEGAAYTFDKVLALGGDDAKFGTPLVDGASVNAEVVNEAKGKKLIVFKKKRRKRYKKTQGHRQWFTEVKITGINA

SEQ ID NO: 9882 - protein, 791 aa, Lentisphaera araneosa HTCC2155
MSRVLEFELSDEVQEELVEFKGKKENYEKGDMSMDAWQKRRLWQGIYGQRQPEVQMIRVKVPYGITNSKQVRQLASMAEKHSNSVLHITTRSAIQMHYVPFANTPEFVKDLTEVGLTSREGCGNTIRNVTADPFASTGAGQLFDVVPVAKRVVEHSLRNPYAQNFPRKFKMTFSGNEAEDNGHSFMHDVGFIASKIEDGSYKFNVYAGGGLGGRPIGADLVDEDLPVEDALICATAFMRIFNEHGNRENRNKARMKFIKHTWGLEKFIEAYKAEFNRIKESEYGQSLVLSFEEGELELPQDSADVSKVGSLVDDAEWVKNCVRPQNVEDLYTIQVRVDLGDFTSEQARTLSDIADKFGSGEIRTLPSQNIVLTDVKLENVAGIYAELKAAGYANSQFHHITNVVACPGRSTCNLSVTSSKGLAEALNESFKDEADIAEVGDKVRINISGCHNGCGRHSVASIGFNGSSRVLGDKAVPCAMMQIGGGVGFGRREMARRVGRVAAKKAPEAVRAVIDHYKAQNSDLSLEDWLVQVDVKELKPVIKPFDAVDAYDENPDVYADYHQAEGDEYSPAVGAGECAGGVLNLVGESLDDAHNYITMARKVFDQEFFADVIFNSQEAMRHAFDAALMQAGEKVADYKEAFDKYVEFFTTNTVTPDPKAILREDAPAEVTFAYAAEFLQAAELFVNDFLAAYNKDKAACEPFLNTEEVKEGRPFLDLRGIECPMNYVKAKLVLNGLEDGKELAMIIDTGDSFRQVPSSLKKDGHTVVELDPINDNQNYSLIVLKNGENNK

SEQ ID NO: 9883 - protein, 493 aa, Lentisphaera araneosa HTCC2155
MSPTLFLSVFAIYIVGMIVLSVWISRRQTSGEDFLLGNRSVPLFLILGTTVATMVGTGSSMGAVGKGYADGWAGSLYGIGGALGILLLAKLFSKVRKYNFMTFSEEISFYYGANKTIKGIIGVLILIASIGWLGAHILGGGMYLAWIANIDLMYAKIIIALAFGVYVIIGGYMAVVWTDTIQALILFFGFILMAYMSVDKLGGFVELSQKMGDTQFAFLNSDQILPSISLAFVILVGVMATPSYRQRIYSADNISTVKKSFYLSGTLYLFFSFIPALIGISAQVLNPELENSNFAFPYLAVEVLPVSVGLIVLIAGLSATMSSASSDAIAGVSILLRDIYILVFNKMPDKEKMVSHSRWGLIGITGMALIFTMYSEDIISYIKNMISVVMSGMFVCSLLGCFWKRATWQGGIAALLGGATCSVSFMFNDAWMSYWGNPSIPSVLSACVVGVLVSLMTPENTLSDEESLAILEAERQLMEQHEEVHASDESEVS

SEQ ID NO: 9884 - protein, 704 aa, Lentisphaera araneosa HTCC2155
MKELSKDERLKKNLGLFDVYAICTGAMFSSGFFLLPGLAAAKTGSSVALAYLVAGFLILPAMFSKAELSTALPRAGGTYYFLDRSLGPMFGTVGGLGTYLSLSLKTAFALIGIGAYASFFVDLPIKPVAIALTVGFVFINITGAKETASLQRFLVVTLVSILTYFVAQGAYDSLAVQPDELVDQRFEGFLTNGMEGFFATVGFVFVSYAGLTKVSSVAEEVKNPERNIPLGMILSLVSTTVFYVLGVLVMTALIDPAEFHQDLTPVATAVSKFDTFIPQNILVGFVVIAALSAFFSTGNAGVMAASRYPMAMARDKLLPDEFATLGKFKTPTRAVVLTGVIMIGFILVLDATGIAKLASAFQLLIFMLVNLSVIVMRESRIESYDPGYKSPWYPWMQIIGMMVSVVLIIYMGWMAILFTLGMIAVCLAWYFRYARKRVSRTGAICHWFQRLGKNQYDELDQEFRGILKEKGLRQDDPFNEVVARAQFLEIDKSETFEEVIKEASKMLAARLKVDASKLEENFLEGTRTGRTPVTRGVALPHMHLMGIDKPEMVIARSKSGMLVDIFDVMGDEMEQQTFAIFLLVSPEGNPGLHLRMLAELANRIDQDEFLSRWNEEPNSAHLKQLLLNDGHYMTLSLKSDNGSSKFIGKAIKELGLPEGSLVAMVQRGGQRIVPSGSTTLEEGDRLIIIGEPKVLSKLRLLIES

SEQ ID NO: 9885 - protein, 498 aa, Lentisphaera araneosa HTCC2155
MNKLIIALLCLMTLGVFTAQAGTELAVSGEGATLESFKEGVKASWDELETKEETSASVEGSKTVVDDGISETYTGVVTYTISAEGEGSLSFASDDKFWTSNVFMMMAAVLVFIMHLGFCCLEVGFSRAKNSCNIIFKNFTIVAIATLVYGLMGFNIMYPGEFSIGSFFGFAGFGLEAAEGGSAMTYAGGYTYWTDFLFQAMFAAATASIVSGAVCERIKINSFLIFCTVFAGIIYPIIGSWGWGGGFLSDWGFVDLAGSGLVHATGGAGALAGAIVLGPRIGKYVNGKTFAIMGHNMPIAAIGAFLLWFGWFGFNGGSQLDADPLAASGIMVMTLLASTAGVVSAMILSWILSGKPDLSMVLNGALAGLVGITAGAANVGPMSAVIIGAIAGILVVLAVLLLDKLKIDDPVGAIPVHLVCGAWGVIATGIFSDDADTMVQIKSIICIVAFAFVCAFILFTIIKVTIGLRVSEEEELEGLDLGEHGMEAYSGFQIFTNQ

SEQ ID NO: 9886 - protein, 547 aa, Magnaporthe grisea 70-15
MANPPHGGVLKDLLARDAPRNAELAAEAETLPALLLTERQLCDLELIITGGFSPLEGFMTEKDYNGVVKENRLTDGALFSMPITLDLSQQTIDENGVKPGARITLRDFRDDRNLTILTVEDVYRPDKQLEAKEVFGGDPEHPAVNYLFNTAGEFYVGGKLEAVNRLQHYDFTRNPMHRAHRELTVRAARSHHANVLIHPVVGLTKPGDIDHFTRVRVYKALLPRYPNGMAVLGLLPLAMRMGGPREAIWHAIIRKNHGATHFIVGRDHAGPGKNSAGVDFYGPYDAQYAVEKYKDELGIEVVPFQMMTYLPDSDEYAPVDTIEKGVRTLNISGTELRSRLRSGRDIPEWFSYPEVVKVLRESHPPRSQQGFTIFLTGYQNSGKDQIARALQVTLNQQGGRSVSMLLGETVRSELSSELGFSREDRDKNIGRIAFVASELTRSGAAVIAAPIAPFEASRQHARELVEKHGDFYLVWVNTPLEHCEKTDKRGIYKRARAGEIKGFTGVDDPYENPVKPDLTVDVSKQSVRSIVHQIVLTLESKGLLDRL

SEQ ID NO: 9887 - protein, 558 aa, Magnaporthe grisea 70-15
MAAKEPISFIGLGAMGFGMATHLIKEGYSVTGFDVWGPTLDRFKAAGGSAASTPAQAVADKPFCVCMVATAQQAQAVLIDGPDAAVPALPQGAVLMLCSTVPCQYAQALDQQLRDMGRGDILFVDCPVSGGAIRAADGTLSIMAGASDEAIAKGRDILQAMSDPAKLYIVAGGVGAGSNMKMCHQVLAANQILSASEAMGFAAHLGLDLAKARDAILASDGKSWMFENRVPRILHPEHKPVASALTIILKDTSIITSEARRRRFATPMTSAAEQAYFVGLGLGYGPDDDAGMLRVYTQGVGKVGPVQGAAETDEAKVALVLALLEGIHLCSAAETLAFADFVKLDLDQVFELCTNAAGGSRMLDRFGPGILAAFKSGVAAKGWETEAGVYDVTAAADRLQAAVDEAQRLKMPLFLGTQALNLLRTATRSLDGKASAGAVVKIPGFRAGTSSSSLATVPEYLPSHNTAAAMEGFFAIVHLCRIISYLKDWLSGDGCSSDPGDATQPSICGAQGSERDKKQNDPGRSRTCSLLMTEFNRSQTRYHYATGPLKKRLICQTM

SEQ ID NO: 9888 - protein, 437 aa, Magnaporthe grisea 70-15
MAKYVDAAKQDLREDVTWQKAGRLSRRGIKEFPEASVQYLLDKAPIIGWLPKYNPRWLINDAIAGLTLGLMLIPQGLAYAKIAEIPVEYGLMSSWLPASIYAIMGTTKDLSTGPTSLIGLLTSEGVHEFGEEYTPSQVASAMALWMGVFGMVLGFLKLGWLLEFISLPILSGFITAVAITIALNQMPSLLGISGVGSGTAQQIHDVFAFLPRASLMTCTFTRVTASGIPAPSDISDRDLPHPDSPQARDVHVFRFNDSFFFPNSYMCSTAILDSIQTYHAPAYHGAQGPEVRERNWSVVAEKRIQRLRRRAGVTDPDALPPIGLVVLDFGRVNHVDSTACSHLKNLAKEISRYGGKHVELRFVGMTEYVRERFDATLLFPTVAAAVLAPRRNDAPEVVQHDFDEKRSSSEDLEKGMAMHAETADRSSSQERKTEARP

SEQ ID NO: 9889 - protein, 1122 aa, Magnaporthe grisea 70-15
MTDTPQTVAGPDSKGATVLERHLDPGYEYTFDPATPTADGAGSSSNSFRDTPESSLRLQGGDIHRDLYKIAAKSKRQQLHKRAATFSNTHEHAPLIVPDLEHDDLPIQEQMAPGGLRRQFLQRQARNVSYIAEPVTRNFISFLELYGNFAGEDLEESDDEDDIAVVEEDEEEQGERRPLLGRRQSSKRLRQQGDASNMKSFFTLLKAFVGTGIMFLPKAFKNGGMLFSAITLIVVSAVTMICFEMLLACRKKYGGGGYGDLGQIIVGKRLRQLILISITLSQLGFVCAGLIFTAENLASFFDAVTPDSKPLGTNALIGVQLVVLIPLAFIRNISKLGPAALLADIFILIGLTYIYWFDISWISKNGGFHSSIELFNPRDWTMTIGSAIFTFEGIGLILPIQSSMKQPEHFSKLLLTVMVIITVVFTSVGVLCYGTFGENVSVEVITNFPQSSKLVNAVQFLYAMAVLVGTPVQLFPAMRTIELKIFGRASGRRDSLTKWKKNAFRTVLVVFSGVVAAFGANDLDKFVALIGSFACVPLVYIYPAYLHYIGVAERPWVKAGDIAMMVVGLVAMVYTTIITIASILPAHPWGIKILLFHGRSCNTYLVVMKSSRSIRAGLRQAGRTSLSSRATPPKLFPTRTTVAQHARPFHASPARHSGSSNPAMAFPCLDALESRSAQLSSSRTSASSGPEPSYTAGATLSYHCKSPLLLDWGGVLPTFHIAYETWGKLNADKSNVILLHTGLSASSHARSTEANPQPGWWERFIGPGCAIDTDRYFVICTNVIGGCYGSTGPSSLDPADGKHYATRFPILTISDMVRAQFRLLDGLGIDRLYASVGSSMGGMQSLAAATLFPDRVARIVSISGCARSHPYSIAMRHTQRQVLMMDPHWNRGFYYEPDQIPPHAGMKLAREIATVTYRSGPEWELRFGRRRADPNKPPALCPDFLIETYLDHAGEKACLTYDANSLLYVSKAMDLFDLGAESQRAAVQRRTAREEEMKAGKEASVNEQAACTLTLPDVPYEEQQSPEETAEAVSASPYPQPPADLVRGLAPLSQHPTLVMGVASDILFPAWQQREVADALRAVGNRSVTHVELSEEQSMFGHDTFLLDLENIGGNIKKFLES

SEQ ID NO: 9890 - protein, 258 aa, Theobroma cacao
KQVKGSEYPRSYYKCTHPNCQVKKKVERSLDGQITEIIYKGAHNHPKPLPCRRPSIGSTLSSDEMSEIAEGGGTCVKVEGGLIWRNAQAGSRDIKLGSDWRADGLERTSSTSVVTDLSDPLSTAQGKSFGAFELAETPEFSSTLASHDDDNDDRATQGSISLCDDAANDDESESKRRKTESCLTEMNATSGALREPRVVVQIESDVDILDDGYRWRKYGQKVVKGNPNPRSYYKCTTPGCPVRKHVERASHNLKCVLT

SEQ ID NO: 9891 - protein, 83 aa, Nicotiana tabacum
RPFSVAEVEALVEAVEHLGTGRWRDVKMRAFDNADHRTYVDLKDKWKTLVHTASIAPQQRRGEPVPQDLLDRVLAAHAYWSQQ

SEQ ID NO: 9892 - protein, 106 aa, Saccharomyces cerevisiae
MGSSHHHHHHSQDPLVPRGSEVKPEVKPETHINLKVSDGSSEIFFKIKKTTPLRRLMEAFAKRQGKEMDSLRFLYDGIRIQADQTPEDLDMEDNDIIEAHREQIGG

SEQ ID NO: 9893 - protein, 67 aa, Bacillus subtilis
RLKGKVKWFNSEKGFGFIEVEGQDDVFVHFSAIQGEGFKTLEEGQAVSFEIVEGNRGPQAANVTIEA

SEQ ID NO: 9894 - protein, 67 aa, Bacillus subtilis
MLEGKVKWFNSEKGFGFIEVEGQDDVFVHFSAIQGEGFKTLEEGQKVRFEIVEGNRGPQAANVTKEA

SEQ ID NO: 9895 - protein, 565 aa, Azospirillum brasilense
MGSSHHHHHHSSGLVPRGSHMKLAEALLRALKDRGAQAMFGIPGDFALPFFKVAEETQILPLHTLSHEPAVGFAADAAARYSSTLGVAAVTYGAGAFNMVNAVAGAYAEKSPVVVISGAPGTTEGNAGLLLHHQGRTLDTQFQVFKEITVAQARLDDPAKAPAEIARVLGAARAQSRPVYLEIPRNMVNAEVEPVGDDPAWPVDRDALAACADEVLAAMRSATSPVLMVCVEVRRYGLEAKVAELAQRLGVPVVTTFMGRGLLADAPTPPLGTYIGVAGDAEITRLVEESDGLFLLGAILSDTNFAVSQRKIDLRKTIHAFDRAVTLGYHTYADIPLAGLVDALLERLPPSDRTTRGKEPHAYPTGLQADGEPIAPMDIARAVNDRVRAGQEPLLIAADMGDCLFTAMDMIDAGLMAPGYYAGMGFGVPAGIGAQCVSGGKRILTVVGDGAFQMTGWELGNCRRLGIDPIVILFNNASWEMLRTFQPESAFNDLDDWRFADMAAGMGGDGVRVRTRAELKAALDKAFATRGRFQLIEAMIPRGVLSDTLARFVQGQKRLHAAPRE

SEQ ID NO: 9896 - protein, 173 aa, Picea abies
MARFREPLVLGRVIGDVVDMFMPSVNLTVAYGSRQVNNGCEIKPSAISSAPRVDVGGDDLRTCFTLVMTDPDAPSPSDPTLREYLHWIVTDIPATTAASFGRELMRYEAPRPTIGIHRYVFTLFKQMARETVYPPQSRVNFSTRDFAEMNGLGLPVAAVYYNAQKETAPRRRF

SEQ ID NO: 9897 - protein, 669 aa, Pseudomonas pseudoalcaligenes
MKDHHLISANRLDDGAVVWLNDALEWVDTLELACAFDDERLEGAKLAAEHAVGQNLIVGPTPRAAQIVEGLPLPIDYREQLRSRGPSVRPDLGKQAESAGVLSTVRERPVVPVEVAHAGVYRYDPSEREFLKTRAQQFEQQVARRLSGELDEEAFKVYRLMNGLYLQLHGYMLRVAIPYGTLSAIQMRQLAYVAKTYDKGYGHFTTRQNMQFNWPRLSDSPEILSVLADADLHCIQTSGNCIRNVTTDHFAGAALDEVVDPRVHAEILRQWSTDHPEFTYLPRKFKIAITGSPVDRAAVRFHDIGILARKNDAGEVGFQIYAGGGLGRTPIVGTKVRDWLPERELLRYVEAILRVYNTLGRRDNIYKARIKILVRELKPAKFIEMIEDEFTNLPADRQYLEPDIVQAVRERFVALDFAELSAVSPEHELMLEADPEFGHWVRNNTHPHRCPGYISAVISLKPAGGIPGDISAEEMVALADLAQTYSLNEIRVSHEQNLVLPHVELSQLYTVWKALRRAGLATPNIGLISDSIACPGMDYCSLATARSVPVAQRIALRFDEAKQREIGELKLNVSGCINACAHHHVAHIGILGLDKSGKESYQISLGGSADESAAVGTILGPSVGYDSVPDVIEAIVDTYLKNRSENETFIDTYRRVGIGLFKEALHDTH

SEQ ID NO: 9898 - protein, 320 aa, Ipomoea batatas
MAVSVKAMSGVLLCVLVLVGGCSAQLSPGFYSKSCPKLFQTVNSVVRSAIQKEARMGASLLRLFFHDCFVNGCDGSILLDDTSSFTGEKRAAPNFQSARGFEVIDQIKSAVEKVCPGVVSCADILAIASRDSTVTLGGPSWNVKLGRRDARAASQAAANNSIPAPTSNLNRLISSFSAVGLSTNDMVVLSGSHTIGQARCTNFRARIYNESNIDSSFAQSRKGNCPRASGSGDNNLAPLDLQTPIKFDNNYYVNLVNKKGLLHSDQQLFNGVSTDSTVRGYSTNPSKFRSDFAAAMIKMGDIKPLTGNNGEIRKNCRRRN

SEQ ID NO: 9899 - protein, 596 aa, Pichia stipitis
MAEVSLGRYLFERLYQLQVQTIFGVPGDFNLSLLDKIYEVEDAHGKNSFRWAGNANELNASYAADGYSRVKRLGCLVTTFGVGELSALNGIAGSYAEHVGLLHVVGVPSISSQAKQLLLHHTLGNGDFTVFHRMSNNISQTTAFISDINSAPAEIDRCIREAYVKQRPVYIGLPANLVDLNVPASLLESPINLSLEKNDPEAQDEVIDSVLDLIKKSSNPIILVDACASRHDCKAEVTQLIEQTQFPVFVTPMGKGTVDEGGVDGELLEDDPHLIAKVAARLSAGKNAASRFGGVYVGTLSKPEVKDAVESADLILSVGALLSDFNTGSFSYSYRTKNIVEFHSDYTKIRQATFPGVQMKEALQELNKKVSSAASHYEVKPVPKIKLANTPATREVKLTQEWLWTRVSSWFREGDIIITETGTSSFGIVQSRFPNNTIGISQVLWGSIGFSVGATLGAAMAAQELDPNKRTILFVGDGSLQLTVQEISTIIRWGTTPYLFVLNNDGYTIERLIHGVNASYNDIQPWQNLEILPTFSAKNYDAVRISNIGEAEDILKDKEFGKNSKIRLIEVMLPRLDAPSNLAKQAAITAATNAEA

SEQ ID NO: 9900 - protein, 569 aa, Pichia stipitis
MVSTYPESEVTLGRYLFERLHQLKVDTIFGLPGDFNLSLLDKVYEVPDMRWAGNANELNAAYAADGYSRIKGLSCLVTTFGVGELSALNGVGGAYAEHVGLLHVVGVPSISSQAKQLLLHHTLGNGDFTVFHRMSNSISQTTAFLSDISIAPGQIDRCIREAYVHQRPVYVGLPANMVDLKVPSSLLETPIDLKLKQNDPEAQEVVETVSKLVSQATNPIILVDACALRHNCKEEVKQLVDATNFQVFTTPMGKSGISESHPRLGGVYVGTMSSPQVKKAVENADLILSVGSLLSDFNTGSFSYSYKTKNVVEFHSDYMKIRQATFPGVQMKEALQQLIKRVSSYINPSYIPTRVPKRKQPLKAPSEAPLTQEYLWSKVSGWFREGDIIVTETGTSAFGIIQSHFPSNTIGISQVLWGSIGFTVGATVGAAMAAQEIDPSRRVILFVGDGSLQLTVQEISTLCKWDCNNTYLYVLNNDGYTIERLIHGKSASYNDIQPWNHLSLLRLFNAKKYQNVRVSTAGELDSLFSDKKFASPDRIRMIEVMLSRLDAPANLVAQAKLSERVNLEN

SEQ ID NO: 9901 - protein, 397 aa, Klebsiella pneumoniae
MKQVYLDNNATTRLDPMVLEAMMPFLTDFYGNPSSIHDFGIPAQAALERAHQQAAALLGAEYPSEIIFTSWPRATPRHAAIALLPERREIITSVVEHPATLAACEHLERQGYRIHRIAVDSEGALDMAQFRAALSPRVALVSVMWANNETGVLFPIGEMAELAHEQGALFHCDAVQVVGKIPIAVGQTRIHMLSCSAHKFHPPKGVGCLYLRRGTRFRPLLRGGHQEYGRRAGTENICGIVGMGAACELANIHLPGMTHIGQLRNRLEHRLLASVPSVMVMGGGQPRVPGTVNLAFEFIEGEAILLLLNQAGIAASSGSACTSGSLEPSHVMRAMNIPYTAAHGTIRFSLSRYTREKEIDYVVATLPPIIDRLRALSPYWQNGKPRPADAVFTPVYG

SEQ ID NO: 9902 - protein, 349 aa, unidentified eubacterium SCB49
MSNFHTLTVSEVKKETPNSVVVSFVVPNDLKQVFKFEAGQYITFKHVLNGEEVRRAYSLCSMPGDDVIKVGIKKVEGGTFSVFANEILKEGDSLEVMAPDGKFVCKTDKDASKNYAAFVAGSGITPVLSIIKTVLKEEPNSRFLLAFGNQSQQETMFYNELMGLVRDNNERLQIEWVYSRERLDGARQGRIDGDIVNYLLKNKFEYTTFSDFYLCGPEPMIDAVASTLKEQGINEKQIHFELFTTAEEGLLLEAHDGDTEITVVLDDEEKTFTMPQDKTILEAALAEDLDAPFSCQGGICSTCIARVKEGKAEMKKNQILTDGEIADGFILTCQAHPTTAKLVVDFDDV

SEQ ID NO: 9903 - protein, 559 aa, unidentified eubacterium SCB49
MSEEKEPLNFIEQIIEEDLKETHKKEDLCFRFPPEPNGYLHIGHASSICLNFGLGLTYDAPVNLRFDDTNPAKEEQRFVDAIKRDVAWLGYTWENELYASDYFQELYDWAVQLIKDGKAYVDSQTSEAMREQKGTPTEVGSNSPFRDRSVEENLALFEQMKSGEAPEGAHVLRAKIDMASTNMLMRDPVMYRTLHKHHHRTGTDWKIFPMYDWTHGESDYLEQVSHSFCTLEFKPHRELYDWFLDQIHDPKKIRPKQREFARRNLSHTVVSKRKLARLVEDGVVQSWDDPRMPTISGLRRRGYTAASIRNFANGIGVGKRDNLIDVSRLEFSIREDLNKTADRVMAVLNPVKVVITNYPEGETEWLDAENNQGDETAGFRKVPFSREIYIEKEDFREEANKKFFRLKLGKEVRLKNAYIIKAESCIKDENGEVTEIHCTYDPDSRSGSGSEASMRKVKGTLHWVSIKDALEIEVRLYDRLFTVASPDTDKEKDFMEFVNPNSLEVITGYAEPSLKERKVEEKMQFQRLGYFVVDKDTTADKMVFNKTVGLRDSWAKIDQ

SEQ ID NO: 9904 - protein, 250 aa, unidentified eubacterium SCB49
MLQIKNVHASVEDKVILNGINLEVKAGEVHAIMGPNGAGKSTLASVISGKEEYEMTDGEIILDNEDITELDPEERAHKGVFMSFQYPISIPGVSTTNFIKTAINETRKSKGLEDMPASEMLKMIKEKAELLDIDRKFLSRSLNEGFSGGEKKRNEIFQMAMLEPKLAILDETDSGLDIDALKIVANGVNKLKSNDNAVVVITHYQRLLDYIVPDFVHVLMDGKIVKSGTKELAYELEEKGYDWIKEELVK

SEQ ID NO: 9905 - protein, 312 aa, unidentified eubacterium SCB49
MATGPTPKIFACKQSQDLAKDIAKEYGIPLGNIITSTYSDGEFQPSFEESVRGCRVFLIGSTHPSSDHLMELLLMCDAAKRASARHITAVMPYFGWARQDRKDKPRVPIAAKMIAKMLETAGATRIITMDLHADQIQGFFEKPVDHLFASTIFLPYLKTLNLPNLTIASPDMGGSKRAYAYSKAMESDVVICYKQREKANIISHMELIGDVKGKNVVLVDDMVDTAGTLTKAADLMMERGALSVRAICTHPILSGAAYDRLEASKLEELIVTDSIPLRQESPKLRVLSCAKLFADVMKSVQVNQSISSKFIM

SEQ ID NO: 9906 - protein, 63 aa, unidentified eubacterium SCB49
MEGTVKFFNESKGFGFITNDDTGKDIFVHITGLNGQALNEGDKVEYVEEEGRKGMVAGQVRVI

SEQ ID NO: 9907 - protein, 208 aa, unidentified eubacterium SCB49
MYAIVEIAGQQFKVAKDQKVFVHRLSTEEGKTVEFDNVLLVGEGDNITVGAPAIDGALVGAKVLRHLKGDKVIVFKKKRRKGYRVKNGHRQALTEIVIESIATSGAKKKAAPKKEAAKKAAPKKSTKGDDLKKVEGIGPKIASTLNEAGIVTFADLAKTDAEKIAEIIADVRGNHVTDTWPAQAQLAADGKWDELQKWQDELDGGKPA

SEQ ID NO: 9908 - protein, 382 aa, unidentified eubacterium SCB49
MTIMSTNIETTRPKINLDSLRQSDVNLVILGHGLVGSTLIKQILEKQESLLERKDINLKIIAIANSTKVLLKPEGVSKNWLEEKETKGIKQSIKVVLDFLKLYDFDNVIVVDNTADQSIVFQYENFIKAGAHLVSSNKKGNTESFEFYQNLRGALQSNNKKYLYETNVGAGLPLIDTIALLHASGENITRIKGVFSGTLSYLFNEFSDGNKTFSEVLQQAIHKGYTEPDPREDLCGNDVARKLLILARELDLHNELGDVEVENLIPKDLRKGTKETFLNALQDLNIPYSIKKKNCKPGNVLRYVAELSGDLSKNDGAILKVRLVQVPKNSVIGQLKGSDTIFEIYTENYGDNPIVIQGAGAGAEVTARGVFGDILRLSEQIK

SEQ ID NO: 9909 - protein, 815 aa, unidentified eubacterium SCB49
MNKMKVLKFGGSSVATADSIKKVWQIALNESVNNKIIVVVSALGGVTDLLQQVGEQANNKEEDYIDTWQKIGQRHLATAKELNLNESAIAQIGELLDRLKNILQGVYLINEFSDKTKDKVLGFGELLSAFMISEIANEQNISVVFKDSSALIKTNDHFTQAEVLQPTSDNLIREYFSKENSQLIIMPGFIAKTITGEATTLGRGGSDYTAAILAAALEVNELEIWTDVSGMYTANPRLVAQAFAIPEISYHEAMELSHFGAKVLYPPTIRPVLQKNIPILIKNTFKPTEAGTRISNGSFPNQNPVKGITHLDDIALLTLEGNGMVGIPGISKRLFEALSAKNINIILITQASSEHSICVAVDAVDKTRAATAIDSMFKYEMSSGELQTTIVEENLSVIAVIGDGMKSHQGVSGDMFSALGKNNVNIRAIAQGASERNISAVIAQKDVNKALSVLHYRFFEEQIKTIHLFIVGVGNVGARLLAQIAKQQAYLLDQLMLQIKAVGLSNSRKMIFNPSGIPLDKWEEQLENGEANEGDAWFTRLCQFNLPNSAFVDITANAGVANMYSRYLKESIAVVACNKIACSNDYGNYKELKDLSKKYHAPFLFETNVGAGLPVINTLNNLINSGDKVNEIQAVLSGSLNFVFNNFNDERSFYDVVLQAQKEGYTEPDPRIDLSGVDVARKIVILARESGHEIEMDAIVNKTFLSTAGTKANTVSEFLETLKVDALHYETLYKKAKQHHSRLKYVASFKDGKASVGLQEIPVDHPFYNLEGKDNIVLFYTNRYVDQPLIIKGAGAGADVTASGLFGDIISLKNQ

SEQ ID NO: 9910 - protein, 529 aa, unidentified eubacterium SCB49
MKVREFFILISVAITFCIVTISFFWPPILWLFILVVPLILMGIFDVLQKPHTIRRNFPVIGRFRYVLESIRPEIMQYFVETDTEGRPINRILRSLVYRRAKGQNDTEPFGTQLNLYHSGYEWLEHSMYAKHNPKNIGKFPRLLIGGKDCKQPYSSSLLNISAMSFGSLSTNAVMALNKGAKMGGFAHNTGEGGISDYHLKYGGDLIWQVGTGYFGCRKEDGTFNPKTFRENALRPEVKMIEIKLSQGAKPGHGGILPAVKNTEEIAKIRHVKPGIAVHSPPSHSAFSDPMQFMQFIKQLRELSDGKPIGFKLCLGRKQEFMDFCEAMVVSGITPDFITVDGGEGGTGAAPVEFSNSMGMPLREGLVFVHDTLVGYGLRKEIKVIAAGKIITGFHVARAIALGADGCNSARAMMLSIGCIQALQCNNNTCPVGVATQNKSLVKGLVVDDKAPRAERYHNATIQSFLELIAAAGLNGPEELSRNHISKRLGSFNIKTYDDIYPYIEENSLLNIETIPEDYKKFFQLTRIMK

SEQ ID NO: 9911 - protein, 654 aa, unidentified eubacterium SCB49
MADKNKDSKKDNKKPEIKKPKFSPYWITAAVLVALIAFNLLGGDALTQPQKIDQSQFETYLSEGDIAKVVLINGRIARVFLTTEAKSQPEHNTNKGKGILAPGPNDPDYQFEIGDRQNFENDFKEIEEANNITTPLSHDSETNLLAEFLPSIIFFAVIIGIWIFIMRRMSGGAGGGAGGQIFNIGKSKAKLFDEKVDVKTSFKDVAGLEGAKEEVQEIVDFLKNPEKYTSLGGKIPKGALLVGPPGTGKTLLARAVAGEAKVPFFSLSGSDFVEMFVGVGASRVRDLFKQAKEKSPSIIFIDEIDAIGRARGKSNMSGSNDERENTLNQLLTEMDGFGTGTNVIVIAATNRADVLDKALMRAGRFDRQIYVDLPDVRERKEIFEVHLRPIKKEEGLDTDFLSKQTPGFSGADIANVCNEAALIAARKEKKAVSKQDFLDAVDRIVGGLEKKNKIVTPSEKKAIAYHEAGHATVSWMLEHAAPLVKVTIVPRGQSLGAAWYLPEERLIVRPEQMLDEMCATMGGRAAEKVIFNKISTGALSDLEKVTKQARAMVTIYGLNEKVGNVTYYDSSGQSEYGFSKPYSEATAELIDKEISNIIEEQYQRAIKLLEDNKDKLALLAEELLEKEVIFKESLENIFGERPFTKEVIPEKTIS

SEQ ID NO: 9912 - protein, 399 aa, unidentified eubacterium SCB49
MSSHNSPFTKEQLIPQEEKLEISRQKGALYIGLPKEIYFQEKRICLTPDAVAAIVSNGHKVLVENGAGEEAGFTDKSYSEAGATLTKDTRKVFGCPMLLKVEPPTLEELEMINPKTVLISALQLKTRQSKYFEILAKKKITAVGFEFIKDQDGSYPAVKALSEIAGTASVLIASELMVNAKKGNGLLFGNISGVPPVEVVVIGAGTVGQFAVRSALGLGANVKVFDSSITKLRKIQTNVGCTLYTSTIQPKNLIKALRRCDVAIGAVRGTNRSPVIVTKTMVEHMKKGAVIIDVSVDMGGCFETTETTTHDTPTQIKNGVIHYGVPNIPARYPKTASISISNIFTPYLLEIAEAGGLEEAIRFDPGLKNGLYYYRGILTNKAVANWFDLPYSDLNLLMF

SEQ ID NO: 9913 - protein, 1123 aa, unidentified eubacterium SCB49
MEHTENTSLTNWTICPECQGRGKKHRKLRKSVKRYYERALAQFEKSNGVGEAPVKPIGHLDKCPECSGSGLVAATNPPAADTENLPKVAIIGGGIGGVALAVACLHRGIPFTLYERDRSFDARSQGYGLTLQQASTAMEGFGITKLNEGVNSTRHLMHTTDGKVIGEWGMRKWRDANLKKNPKRINVHIARQSLRLALLEQLEGHEVVQWGHQLVDFKDQKKEGVSLTFKVDGKLEHSQADLVVGADGIRSTVRNILFGKANLPLQYLDCIVILGICPLASLKGLESTLLDSETVFQTANGFERMYMMPYSADTIMWQFSFPMPEEEAKALSAKGPKALKEEACKRAAWHDPIPQILAATQEAQISGYPVYDRALLTSEMLEENENVTLLGDAAHPMSPFKGQGANQALLDALLLARGIYSGCKKQEGWRETGIRKSVLTAFETEMLTRSAKKVKDSAAAAKFLHSKMVLDESDAPRGRLLREKKMTCKIRPKTVRLVGDKKFKQDRFMKHQKMLNYISEVLQNMPTDWLSLTTHRLDIYDEKLAKVQFLEQFEALYKANNYQNTALHDLPTAYDYIRLGHPLSCILEWGIAGISEIDALNVISFSSQTIPVLAILRKNHLEQKATQILYTESLPDFFTSETIKKVYGYTFEVKQIENIKEIPAFNGSTVFISEEEKISATDLHDQVDFYVHLYQNLGSVLLVNGKENQHYVADIQHVRRRETIAMTPINALVALRSLLSHTVIAPETENFDADKKTVLAAITTITGTTTAPLVASSGLSIQYAIMMGAIDQALEKHPGKAIKFVVPPNCYGGTNDQARRVAACVDNVSIVDLPVDGDNDMVKSIDTVLENIAKEDALAYIIAEIPTNPRVEVPDLVQLKAVLSQERTTANGTKAIAPVFILDQTFCPNVRFLGEDDILASVHTISFASGSKFPSGGQCTAGYCVGNMKTKNLMQKIARHLALCDNEATAFQYNILAKQLPSMNQRIRDAYINTLDFVKFIKEVLPAAKINFVSEALASQGFTPSVFSLDLPTKGETAEEKENYKRSLNLKLINLMITKIPSESKFCVSYGQLKGCYWTIPATSTQGTTKEGDKDYIVRASLSPNLDLALHKQVFMEFVKVYH

SEQ ID NO: 9914 - protein, 396 aa, unidentified eubacterium SCB49
MKTAYIVKAYRTAVGKAGKGVFRFKRADELAAETIQHLMKELPNLDPKRIDDVIVGNAMPEGSQGLNVARIISLMGLDVVDVPGVTVNRFCSSGLETIGMAVAKIQTGMADCILAGGAESMSSVPMTGFKPELNYDLVKAGHEDYYWGMGNTAEAVADQFNVSRAEQDEFAFNSHMKALKALDANRFQDQIVPIEVEETFLNGAGKKEVRKYTVNKDEGPRRGTSVEALARLRPVFAANGSVTAGNSSQTSDGAAFVMVMSEEMVKELNLEPIARMVSYAAMGVEPRIMGIGPVAAVPKALKQGGLTLNDIKLIELNEAFASQSVAVIKELGLNQDIVNPNGGAIALGHPLGCTGAKLSVQLFDEMRKQNMQGQHGLVTMCVGTGQGAAGVFEFLK

SEQ ID NO: 9915 - protein, 435 aa, unidentified eubacterium SCB49
MFIAASTLGVIVATVVAFLVLTLLLVALLLFTKQKLSPSGPVTITINDEKTIEVASGGTLLSTLGENKIFLPSACGGGGTCIQCECHVLEGGGEALPTETPHFSRKELKEGARLSCQVKVKQNMNIHIPEEVFGIKKWDAVVVRNYNVASFIKEFVVEIPEDMNYKAGGYIQIEIPECEVKFSEMDITAHPEEHETPDKFQAEWDKFGLWPLVMKNEEVVERAYSMASYPAEGREIMLNVRIATPPWDRAKNQWMDVNPGVASSYIFNLKKGDKCVISGPYGEFFINPSESEMLYVGGGAGMAPMRSHLYHLFKTLRTGRKVTYWYGGRSKRELFYLDHFQQLQDEFPNFKFYLALSEPAEEDNWKVKDGIDGEGDGFVGFIHQVVIDNYLSLHDAPEDIELYFCGPPLMNKAVQKMGEDFGIPDEHIRFDDFGG

SEQ ID NO: 9916 - protein, 338 aa, unidentified eubacterium SCB49
MTEGNFTDYVKIHVQSGKGGQGSAHLRREKYIPKGGPDGGDGGRGGHVILVANSNMWTLHHLKFKRHLRAGHGGAGSKSTSTGADGADVYVDVPLGTTVINTETGERLKELLEHGEELIIAQGGKGGRGNNHFKSSTNQTPRYAQPGMDGEEGHFTLEMKVLADVGLVGFPNAGKSTLLSVITAAKPKIANYEFTTLKPNLGIVEYRDHRTFVMADIPGIIEGAAEGKGLGHYFLRHIERNSTLLFLIPADADDIKEQYNILLDELKRYNPELIDKDKLVAISKSDMLDEELKAELKEQLDKDFKGIPYLFFSSVAQQGLMELKDTLWGMLNGESVTD

SEQ ID NO: 9917 - protein, 767 aa, unidentified eubacterium SCB49
MSTPSKRREALLYHAKPKPGKIEVVPTKKYATQRDLSLAYSPGVAVPCLEIAKDVENVYKYTAKGNLVAVISNGTAVLGLGNIGPEASKPVMEGKGLLFKIFADIDVFDIEVDTEDIDAFIETVKNIAPTFGGINLEDIKAPEAFEIERRLKEELDIPVMHDDQHGTAIISAAALLNALEISEKNISEVKIVISGAGAAAVSCTRLYKAFGASADNIVMIDSKGVIRKDRDNLTPEKAEFATSRKIDTLTEAMKDADVFVGLSIADIVTPEMLKSMAQKPIVFAMANPDPEIEYNLAIKTRKDIIMATGRSDHPNQVNNVLGFPFIFRGALDVRATKINEAMKMAAVKALADLAKEAVPEQVNIAYGETKLNFGRDYIIPKPFDPRLIAKVPPAVAKAAMESGVATAPITNWQKYEDELNERMGSDNKIIRLLMNRAKTNPKRIVFAEADHLDVLKAAQIVHDEGIGIPILLGRRDVIEELMEQIEYDREVTIIDPKSDEEAAHRDRYAEKHFKNRQRSGITYYDAQSMMRERNYFASMMVNEGDADAMISGYSRAYPSVVRPVLETIGSYDGVDKVATTNMMLTKRGPLFISDTSINIDPSAKELAKIAQMTNYTMKMFGLNPVIAMISYANFGSSKDPHATKVKDAVKYLHRTNPDMHVDGELQTDFALNSELLQKKFPFSKLAGKKVNALIFPNLDSANSNYKLLKELNNVESIGPIMLGMRKPVHILQLGASVEEMVNMAAVAVVDSQQKEKREKEASKFRAM

SEQ ID NO: 9918 - protein, 115 aa, unidentified eubacterium SCB49
MLIHVVKSKIHRVKVTGADLNYIGSITIDEDLLDAANIVEGEKVQIVNNNNGERLETYAIPGPRGSGEITLNGAAARKVAPGDILILITYGMMTIEEAQKFKPSLVFPNEDNLLT

SEQ ID NO: 9919 - protein, 363 aa, unidentified eubacterium SCB49
MSAMAVKHDAINLSQGFPDFKSDPKLSALVAKSMTDGYNQYAPMAGDIKLREVICDKVQRLYDANYNAATDIVITAGATQAIFTAIAATISKGDEVIIFTPAYDCYAPTIHLFGGNVIELQLASPHYTPDWDEVKKVITSKTKMIIVNSPHNPSGMVFSEDDMLQLQHISEANDLIVISDEVYEHIIFDGEIHQSAARFLTLAKRTFIVASFGKTFHNTGWKMGYCIGPESLMKEFKKVHQYNVFSVNHPFQKGLAEYLQDENHYLHLGAFYQQKRDLFLDLIKDSRFKIIPSKGTYFQLLDFSEISNESDMVFAERLTKQNKLATIPISVFNKNKMDEKQIRVCFAKREETLKAAAAILKSL

SEQ ID NO: 9920 - protein, 392 aa, unidentified eubacterium SCB49
MSKEVVIVSAARTPIGSFMGSLSSVSAAKLGSTAIKGALDKISLDPSFVQEVLMGNVVQAGVGQAPARQAALGAGIPNTVPCTTINKVCSSGMKTVMQAAQSIALGDADIIVAGGMENMSLIPHYMYLRNGQKFGPATMIDGMQKDGLVDAYDNNAMGVCADACATKYEFSREDQDAFAIESYTRSAKAWEAGKFNDEVVPVAVPQRRGDAIIVSEDEEFKNVKLEKIPALRAAFSKEGTVTAANASTINDGAGAVVLMSAEKAKELNLTPLATIKGYADAAHEPEWFTTAPSKALPKALAKAGVAQSDVDYFEFNEAFAVVGLANMKILDIDPSIVNVNGGAVSLGHPLGCSGVRILITLINVLKQNGGKLGAAAICNGGGGASAMVIELA

SEQ ID NO: 9921 - protein, 293 aa, unidentified eubacterium SCB49
MAHKAGFVNIIGNPNVGKSTLMNAFVGERLSIITSKAQTTRHRILGIVNGEDFQMLLSDTPGIIKPAYELQASMMDFVKSAFEDADVLLYLVELGEKDLKDEKFFDKITNAKIPVLLLLNKIDQGNEEQLGEALTFWQAKVPNATVFAISALENFGVQEVFNHIIELLPESPPFYPKDQLTDKPERFFVNEIIREKILMHYKKEIPYSVEIDTEEFFEDENIIRIRSIIMVERNTQKGIIIGHKGAALKRVGVEARKDLEKFFGKQIHLETYVKVNKNWRSNDRQLRRFGYNN

SEQ ID NO: 9922 - protein, 395 aa, unidentified eubacterium SCB49
MDNRLSNRVNSMATSATLAMAAKARELRAEGKNIIGLSLGEPDFNVPDFVKDAAIKAVNDNFHAYTPVDGYADLKEAIITKFKRDNNLTYTPSQIVVSTGAKQSLYNLAQVLLNEGDEVLLPAPYWVSYSDIAKVAGGVPVEIKTSIDNDFKVTAEELEAAITPKTKMIIYSSPCNPSGSVYSEAELRALADVLVKYPKIIVISDEIYEHINFTGAHASMAQFEDMYDQTVTVNGVSKAFAMTGWRIGFIGAPEWIARACNKIQGQITSGTNCIGQKATVIALNNPPSKIKYMVDAFKARRSMILDLLNDIPGFKTNVPEGAFYVFPDISYYFGKELKGTTINNASDFSLYLLEQANVATVTGEAFGNPDCIRISYAAAEEDIQQAMKQIKDALI

SEQ ID NO: 9923 - protein, 357 aa, unidentified eubacterium SCB49
MAIFHKLKIKDIYKETDDTSVITFDIPSEILSEFKFRQGQHLTLKADIDGKDTRRSYSLCSGPEEGEWKVAVKKIIGGAFSTFVNETLQTGDTLEVMAPSGNFGVACQPSEAKNYLFFAAGSGITPVLSMVKAHLAAEPQSTCKLFYVNKTAKSIIFKEALEQLRNKYFGRFEIYYFLTKERRDIALFNGRFDDEKMAVLTKNFIDIPDTNDVFLCGPEAMVNYVSEYLVTAGLPKENVHFELFVTGLTEEDIARAERLAKQNVEGTEVTIVDGGKEFSFVMTKEYDNILDAALGAGADLPFACKGGVCSTCKCEVKDGDVEMKINYALSDKEVSQNLVLSCQAVPTTDKVIVDFDV

SEQ ID NO: 9924 - protein, 401 aa, unidentified eubacterium SCB49
MEAYIIDGVRTPIGNYKGTLSAVRTDDLGAHVIKAVTDKNPNIPKEAFDDVIMGCANQAGEDNRNVARMSLLLAGLPFSVPGETVNRLCSSGLSAIIHANRAIKAGDGDLFIAGGVENMTRGPYVMAKPSTAFGGDSKMYDSTFGWRFVNPKMQALYGTDGMGTTAENLVEKYNISREDQDAFAYNSQMKAAAAQKSGRLAKEIVPVEIPQRKKDPIIFKDDEFIKPNSSKEILAKLRPAFKKEGGSVTAGNASGLNDGAAATIIASEDAVKKYNLKPMARIVSSAVVGVEPRIMGIGPVNASNKALAKAGLKMEDMDVIELNEAFASQALACIRAWGLADDDARINPNGGSIAIGHPLGVTGARIAYSAALQLQETNKRYALITMCIGVGQGYAAIIERV

SEQ ID NO: 9925 - protein, 309 aa, unidentified eubacterium SCB49
MNTKTYAGIPKENAALETSKIVLIPVPYDGTSTFQKGADKGPDAFLHASENMELYDIETETEVYKQGICLLDPITENSSPEAMVAAVYAKTKQMILRNKFVTVFGGEHSISIGTIRAFNECFDDLTVLHIDAHADLRKSYEGTSCNHACAVYEASQTTNLLQVGIRSMDVAETRVMDKEKTWFAHDMVNNEYWIDNVIAACSENVFITFDLDAFDPSIMPSTGTPEPGGLFWYETLEFLKQVFEEKNVVGFDIVELMPREEDKSSDFLAAKLYYKMLSYKFVGQEEDEDFESHISEKNKVTKFKNNQDD

SEQ ID NO: 9926 - protein, 430 aa, unidentified eubacterium SCB49
MSKKISLKDAISIGIGGMVGGGIFAVLGLAVSLAKGGTPLAFLFAGIIALLTAYSYAKLSKKYPENGGTVKFIEQQFGSGIFAGGINNLLWVSYIVMLALYASAFGSYGAELISITGEKQIDVRIFQTSIISLALLINYLSVKLVSTIESTAVVIKLIILIGFIAVGFYGLTVHPENINQLAPKNWEKSILLLSGGMVIFVAYEGFELIANSISDLKDREKNTEKAYFGAVGFVVVLYILIAIVTVGALPFDEILNAKDYVLAKAAEPTLGQIGFTIITVTALISTFSAINATVLGSGRVNYNIAEDGELPMFFCHKFWGKPIGLLITAILSIILVNLFNLQSISTAGSAGFLLIFTIVNFIGFKKHQELHSNKHIHLLATILCFIAFLTLIFQQLTENKTGVFTALGIIFLSFLFELIYKKTTQKTPRK

SEQ ID NO: 9927 - protein, 628 aa, unidentified eubacterium SCB49
MEDKKFDLNSLIGFLLIGGILIWMLYLNKPSEEEILAEEARIEAEAKAAKIEAENKANQTTTLTQATEDMAVKPNDSAAMMQLKNKLGSFAYSGSLPSATSNTTVIENDVLYLEVSNKGGYVTEARLKEFKTYDSIPVYLIKDGNSSFNLKFTSENRTLNTKDLYFEPTLTQNGANQVLTMRLKTAEDKFIEYRYEILPGEYMTNFSIRSQGLDGMLDTSQPLEIDWQLKGYRHAKSISYENRYTRLTYEYEGSKHSKLDPTGEDVETEKEVSWMNFRQHFFSSMLLTGDPFKEVKLSSIDLVEDEEVDTVYTKHYGAKMLLTPKGGALSYNMNMYYGPTDYKIFKKYDRNLDEAMPLGWGIFGVINKYFIIPLYGFLSTYLSAGIAIIVMTILIKLLLSFVQYKQYLAQAKMKVLKPEIDAIKEKFGDNKMKIQQETMKLQNIAGASPLKGCLPAILQIPVFYALFTFFPTAIDLRQKSFLWADDLSSFDSVINLPFTIPFYGDHVSLFPILASIAIFIYMTMTMGQSMQAQQQPGMPNMKFLMYLSPLFMLVFFNNYASGLSLYYFISNLITIGIMLVIKNWIIDEDKIHAQIQVNKAKPKKQNKFQKKMADMMEQAEQQKNAGKK

SEQ ID NO: 9928 - protein, 217 aa, unidentified eubacterium SCB49
MKFFIDTANLEQIKEAQDLGVLDGVTTNPSLMAKEGITGHDNILKHYVKICEIVEGDVSAEVISTDFEGMVREGELLAELHPQIVVKVPMIKEGIKAIKYFSDNGIRTNCTLVFSSGQALLAAKAGATYVSPFIGRLDDISTDGLNLIAEIRLIYDNYGFETEILAASVRHTMHVLECAKIGADVMTGPLSSIEGLLKHPLTDSGLAKFLEDYKKGN

SEQ ID NO: 9929 - protein, 869 aa, unidentified eubacterium SCB49
MNFNNYTIKSQEAIQRAQQLAQEYSHQQIENEHILKAIFEVDENVTPFLLKKLNVNLSLLQQILNKQIESFPKVSGGDLMLSKEAGKTVNEASIIAKKMNDEYVSLEHLLLAIFNSKSNIAQSLKDQGVSEKGLKAAIEELRKGDNVTSQNAEESYNALNKYAKNLNQLARDGKLDPVIGRDEEIRRILQILTRRTKNNPMLVGEPGTGKTAIAEGLAHRIVDGDVPENLKSKEVFSLDMGALIAGAKYKGEFEERLKAVIKEVTSSDGDIVLFIDEIHTLVGAGGGQGAMDAANILKPALARGELRAIGATTLDEYQKYFEKDKALERRFQKVIVDEPDTESAISILRGIKEKYETHHKVRIKDDAIIAAVELSQRYITNRFLPDKAIDLMDEAASKMRMEINSKPEELDVLDRKVMQLEIEIAAIKREKDETKLKSLRSDLANLKEERNELNAKWKSEKEVVENVQNLKTEIEAYKLEAERAERDGDFGKVAEIRYGKIKEAQESLHKIEAKLAENQNEDSLIKEEVTHEDIAEVVAKWTGIPVTKMLQSDREKLLKLEDELHKRVVGQEEAIIAVSDAVRRSRAGLQDQKKPIGSFLFLGTTGVGKTELAKALASYMFDDENSMTRIDMSEYQERHSVSRLVGAPPGYVGYDEGGQLTEAVRRKPYSVILLDEIEKAHPDTFNILLQVLDEGRLTDNKGRVADFKNAIIIMTSNMGSEIIQQKYDTVKDPDTAMETAKVEVLGLLKQTVRPEFLNRIDDIILFTPLSKDDISEIVGLQLKGLTKMLAAQGITMDATQEAIKYLAQKGYDPQYGARPVKRVIQREVLNSLSKEILAGNITTDSIILLDSFDSKLVFRNQNAEIETVS

SEQ ID NO: 9930 - protein, 321 aa, unidentified eubacterium SCB49
MNDFNSIIKNAKQTILAEAKAIENLASLVDDSFAQAVTAILQSSGRVIVTGIGKSANIATKIVATLNSTGTPAIFMHAADAIHGDLGTIQEDDTVICISKSGNTPEIKVLVPLIKARKNKIIAITSNKESFLGEQADFILNAYIEKEACPNNLAPTTSTTAQLVMGDALAVCLLELRGFTSKDFAKYHPGGSLGKQLYLRVSDLTSLNELPQVAPETPLKEVIIEISKKMLGVTAVIDADKIVGIITDGDLRRMLTKVDSMAGLTAKDIMTKNPKLIDNNAMAVEASAIMESNGITQILAHSEGIYKGVVHIHNLTKEGIL

SEQ ID NO: 9931 - protein, 366 aa, unidentified eubacterium SCB49
MIVGIPKEIKNNESRVGMTPAGVFELIKNNHTVYVQASAGEGSGFSNNDYQKAGATVLDTIAEVYAISEMIVKVKEPIEEEYGLIKEGQILFTYFHFASSEPLTKAMIKAKAICIAYETVEDEEGTLPLLTPMSEVAGRLAVQQGAKYLEKPVKGRGVLLGGVPGVAPGKVLVLGAGVVGIQAAKMAAGLGAHVTIMDINMKRLRYVNDVMPPHVVTEFSNEFNIRKHIKNHDLIIGGVLLKGAKAPNLITRDMLKEMRPGTVIVDVAVDQGGCVETTRPTTHEDPIYIIDDVVHYTVANMPGAVPYTSTIALTNVTLPYCLKLANLGWEDACNKDACLKKGLNIIAGKVVYKEIIEAFGWEKAFA

SEQ ID NO: 9932 - protein, 561 aa, unidentified eubacterium SCB49
MCGIVCAFDLKQASKDLRPQLLTMAKSLRHRGPDWSGIYDNKRAILAHERLAIVDPTSGKQPLFSEDKKLVLAANGEIYNHNELRKQFDGKYNFQTKSDCEVILALYKEKGASFLDELNGIFGFALYDVEKNEYLIARDHMGIIPLYMGWDKDGTFYVSSELKALEGYCTKIELFPPGHYLHSSDGQLKRWWTRDWMEYDNVKDNETSIDDLREALDAAVHRQLMSDVPYGVLLSGGLDSSITSALAKKYADKRIESGDKEGAWYPRLHSFAVGLEGSPDLIAAKKVADHLDTVHHEIHFTIQEGLDAIRDVIYHVETYDITTIRASTPMFLLARAIKAMGIKMVLSGEGADEIFGGYLYFHKAPNDKEFHEENVRKLDKLHMYDCLRANKSLASWGIEGRVPFLDKDFMDVAMRLNPKDKMIIAGKNPTDKQAMEKWVLREAFGDMLPHEVAWRQKEQFSDGVGYSWIDTLKEIVEEAVSDEQMENAKYRFPIQTPTSKEEFHYRTIFEEHFPSDAAALTVPSVPSVACSSQVALDWDESFKNMNDPSGRAVANVHDDSY

SEQ ID NO: 9933 - protein, 382 aa, unidentified eubacterium SCB49
MKKVYFDSAATTKLRPEVIDCMTQALKTEYGNPSSTHAFGRSAKSLIETARKEIAEILNVTAAEIIFTSGGTEADNLALNSSVRDLGVKRIITSKIEHHAVLHTVHALEKHHNITVEYVDLDGCGHVTLDSLETLLAESDQKTLVSLMHVNNEVGNVLDITAVGHLCKKYDALFHSDTVQSVGHYKLDLQETLVDFLAVAAHKFHGPKGIGFAFVRKNSGLRPLIYGGEQERGLRAGTEPVHNIAGMNEALRVSYQNLDKEKAYVTDLKKYFKETIKKAIPTISFNGGCDDLERSTYTLLNVCLPMSSEKGMMLLFQLDLKGIACSKGSACQSGATGGSHVLNEFLSAEDLAKPSLRFSFSSFNTKEEIDYVVASLKELCEA

SEQ ID NO: 9934 - protein, 536 aa, unidentified eubacterium SCB49
MKKAVAIAKVSELVNKEPVHALVNGLDLVVVKFDEDISVLYGRCLHRGALMSDGHVDGHNLICGVHGWDYRVDSGVSEYNNKEVLHKFSTKIEGDNLLVDEFEIDAYLVNNPQPFNRDEYLGAYADTHPEETEPYTGYIKELAQNGLKNIGHHGFSASMGVDRNTLPKWNDIQFLPAQLATRPLLDEEAVASKVVIGPKAKKPLELDMPLFVSDMSFGALSREAKIALAKGAELAGTGICSGEGGILPSEQANNSKYFYELASAQFGFSWDKLDNVQAFHFKGGQGAKTGTGGHLPGSKVSKEIAEVRGLKEGETAISPAANPNFHSVEDFKIFADKVRERTGGIPIGFKIAASHIEKDIQFALDVGVDYIILDGRGGGTGSAPTILRDHINVPTIPALARARKYMDQVGATDVTLVITGGLRVAEDFAKAMMLGADAIAVSNSALQAIGCLGMRACGSNNCPVGIATQKESLRSRLIIDSSAKQLHNFFDATNNLIKVVARACGYDDVTKFNHQDLSTYNKEMSELTGINYAGIK

SEQ ID NO: 9935 - protein, 397 aa, unidentified eubacterium SCB49
MKNSKKLVIAYSGGLDTSYCAVSLAKEGYDVHAVSVNTGGFTQKEIKTIEENAYKMGVSTYKNIDAIATFYQKVVKYLIFGNVLKNNTYPLSVSAERIIQAIEIIEYAKSIGAEYIAHGSTGAGNDQVRFDMIFQTLAPQIKIITPIRDQKLSRQEEIDYLKSNGVDMNWDKAKYSVNKGLWGTSVGGEETLTSEKALPEAAYPSQLKQSLTAEEKVKLTFVKGELVAVNDVENSPEINIETLNTLASAYAIGRDIHVGDTIVGIKGRVGFEAAAALITIKAHHLLEKHTLTKWQLQHKDYLSSFYGMHLHEGQYLDPVMRDMEAFLQSSQEKVSGEVTVTLKPYHFNLDGIVSAHDLMNPAFGSYGEMNKGWTADEAKGFIKILGNQNKIYQQVNN

SEQ ID NO: 9936 - protein, 168 aa, Oryza sativa Indica Group
ARTRLANDAKAAKGGGERQFNGLVDVYRKTLKSDGIAGLYRGFNISCVGIIVYRGLYFGMYDSLKPVVLTGSLQDNFFASFALGWLITNGAGLASYPIDTVRRRMMMTSGEAVKYKSSMDAFSQILKNEGAKSLFKGAGANILRAIAGAGVLSGYDQLQILFFGKKYG

SEQ ID NO: 9937 - protein, 135 aa, Oryza sativa Indica Group
RVTEVAGVVLSLDPKPIPGDWNGAGAHTNFSTKSMREPGGYEVIKKAIDKLALRHKEHIAAYGEGNERRLTGRHETADINTFKWGVANRGASIRVGRDTEKEGKGYFEDRRPASNMDPYVVTGMIAETTLLWKQN

SEQ ID NO: 9938 - protein, 421 aa, Corynebacterium glutamicum
MALVVQKYGGSSLESAERIRNVAERIVATKKTGNDVVVVCSAMGDTTDELLELAAAVNPVPPAREMDMLLTAGERISNALVAMAIESLGAEAQSFTGSQAGVLTTERHGNARIVDVTPGRVREALDEGKICIVAGFQGVNKETRDVTTLGRGGSDTTAVALAAALNADVCEIYSDVDGVYTADPRIVPNAQKLEKLSFEEMLELAAVGSKILVLRSVEYARAFNVPLRVRSSYSNDPGTLIAGSMEDIPVEEAVLTGVATDKSEAKVTVLGISDKPGEAAKVFRALADAEINIDMVLQNVSSVEDGTTDITFTCPRSDGRRAMEILKKLQVQGNWTNVLYDDQVGKVSLVGAGMKSHPGVTAEFMEALRDVNVNIVLISTSEIRISVLIREDDLDAAARALHEQFQLGGEDEAVVYAGTGR

SEQ ID NO: 9939 - protein, 165 aa, Oryza sativa Indica Group
KDQFRDYMHLEAARRDLRLIIENKQRIVFAHAPSGYKHSLKEVLDSPSVMTLIKDTKAAQEVQALKDFFNMLTNDSARACYGPKHVEIANERLAIQTLLITDNLFRNSDIATRQNYVRLVESVKKFGGTVHIFFSMHVSGEQLAQLTGIAAILRFPLPDLEDIEM

SEQ ID NO: 9940 - protein, 225 aa, Oryza sativa Indica Group
LIVPTTSCHGFEPLLTPSSPKIQNSPDGKVNEEVIRQLTELANSDGGGAQIWAHREAAQAGDHQLPSWGTTTQHNTGHGNFGTANSNEVATMPTPGYENGGWDNSDYPALNDPCKVEFTYEQPPASSAEACISSFVQMSELCPSMSNGSSMEETHQTNPGNGTPMQVLPKMPEFVPCPDRNLVISRYKEKRKTRRFDRQVRYESRKARADSRLRIKGRFAKVNQI

SEQ ID NO: 9941 - protein, 89 aa, Oryza sativa Indica Group
VLFMKGTKDFPQCGFSHTVVQILRSLDVPFETLDVLANEALRQGLKEYSSWPTFPQLYIDGEFFGGCDITVDAYKSGELQETLEKAMLS

SEQ ID NO: 9942 - protein, 256 aa, Arabidopsis halleri subsp. gemmifera
MEDYERNSNSPTHEEDSDVRKGPWTEDEDAILVNFVSIHGDARWNHIARSSGLKRTGKSCRLRWLNYLRPDVRRGNITLEEQFMILKLHSLWGNRWSKIAQYLPGRTDNEIKNYWRTRVQKQAKHLRCDVNSNLFKETMRNVWMPRLVERINAQSSPATCEPVESMITDPGQPIEEPIPVEPGFLQFNQQFVPASELSATSSNSPAETLSDVQGGVVNGSGSDPAGQTGFGEFNDWGCVGGDNIWTDEESFWFLQD

SEQ ID NO: 9943 - protein, 223 aa, Crucihimalaya himalaica
GDARWNHIARSSGLRRTGKSCRLRWLNYLRPDVRRGNITLQEQFMILKLHSLWGNRWSKIAQYLPGRTDNEIKNYWRTRVQKQAKHLRCDVNSNLFKETMRNVWMPRLVERINAQSSSATCEPLESMVTDPGQPIDEPSPVEPGFAQFNTNHYHQQQLVPATEISATSSNSPAETLSDVQNGVVNGSGYDLVGQTGFGEFNDWGCVGGDNMWTNDESLWFLQD

SEQ ID NO: 9944 - protein, 273 aa, Arabidopsis thaliana
MEDYERINSNSPTHEEDSDVRKGPWTEEEDAILVNFVSIHGDARWNHIARSSGVKRTGKSCRLRWLNYLRPDVRRGNITLEEQFMILKLHSLWGNRWSKIAQYLPGRTDNEIKNYWRTRVQKQAKHLRCDVNSNLFKETMRNVWMPRLVERINAQSLPTTCEQVESMITDPSQPVNEPSPVEPGFVQFSQNHHQQFVPATELSATSSNSPAETFSDVRGGVVNGSGYDPSGQTGFGEFNDWGCVGGDNMWTDEESFWFLQDQFCPDTTSYSYN

SEQ ID NO: 9945 - protein, 273 aa, Arabidopsis thaliana
MEDYERINSNSPTHEEDSDVRKGPWTEEEDAILVNFVSIHGDARWNHIARSSGVKRTGKSCRLRWLNYLRPDVRRGNITLEEQFMILKLHSLWGNRWSKIAQYLPGRTDNEIKNYWRTRVQKQAKHLRCDVNSNLFKETMRNVWMPRLVERINAQSLPTTCEQVESMITDPSQPVNEPSPVEPGFVQFSQNHHQQFVPATELSATSSNSPAETFSDVRGGVVNGSGYDPSGQTGFGEFNDWGCVGGDNLWTDEESFWFLQDQFCPDTTSYSYN

SEQ ID NO: 9946 - protein, 273 aa, Arabidopsis thaliana
MEDYERINSNSPTHEEDSDVRKGPWTEEEDAILVNFVSIHGDARWNHIARSSGVKRTGKSCRLRWLNYLRPDVRRGNITLEEQFMILKLHSLWGNRWSKIAQYLPGRPDNEIKNYWRTRVQKQAKHLRCDVNSNLFKETMRNVWMPRLVERINAQSLPTTCEQVESMITDPSQPVNEPSPVEPGFVQFSQNHHQQFVPATELSATSSNSPAETFSDVRGGVVNGSGYDPSGQTGFGEFNNWGCVGGDNMWTDEESFWFLQDQFCPDTTSYSYN

SEQ ID NO: 9947 - protein, 273 aa, Arabidopsis thaliana
MEDYERINSNSPTHEEDSDVRKSPWTEEEDAILVNFVSIHGDARWNHIARSSGVKRTGKSCRLRWLNYLRPDVRRGNITLEEQFMILKLHSLWGNRWSKIAQYLPGRTDNEIKNYWRTRVQKQAKHLRCDVNSNLFKETMRNVWMPRLVERINAQSLPTTCEQVESMITDPSQPVNEPSPVEPGFVQFSQNHHQQFVPATELSATSSNSPAETFSDVRGGVVNGSGYDPSGQTGFGEFNDWGCVGGDNMWTDEESFWFLQDQFCPDTTSYSYN

SEQ ID NO: 9948 - protein, 273 aa, Arabidopsis thaliana
MEDYERINSNSPTHEEDSDVRKGPWTEEEDAILVNFVSIHGDARWNHIARSSGVKRTGKSCRLRWLNYLRPDVRRGNITLEEQFMILKLHSLWGNRWSKIAQYLPGRTDNEIKNYWRTRVQKQAKHLRCDVNSNLFKETMRNVWMPRLVERINAQSLPTTCEQVESMITDPSQPVNEPSPVEPGFVQFSQNHHQQFVPATELSATSSNSPAETFSDVRGGVVNGSGYDPSGQTGFGEFNNWGCVGGDNMWTDEESFWFLQDQFCPDTTSYSYN

SEQ ID NO: 9949 - protein, 273 aa, Arabidopsis thaliana
MEDYERINSNSPTHEEDSDVRKGPWTEEEDAILVNFVSIHGDARWNHIARSSGVKRTGKSCRLRWLNYLRPDVRRGNITLEEQFMILKLHSLWGNRWSKIAQYLPGRTDNEIKNYWRTRVQKQAKHLRCDVNSNLFKETMRNVWMPRLVERINAQSLPTTCEQVESMITDPNQPVNEPSPVEPGFVQFSQNHHQQFVPATELSATSSNSPAETFSDVRGGVVNGSGYDPSGQTGFGEFNDWGCVGGDNMWTDEESFWFLQDQFCPDTTSYSYN

SEQ ID NO: 9950 - protein, 620 aa, Medicago truncatula
MNLKNGLLLFILFLDCVFFKVESKCVKGCDVALASYYIIPSIQLRNISNFMQSKIVLTNSFDVIMSYNRDVVFDKSGLISYTRINVPFPCECIGGEFLGHVFEYTTKEGDDYDLIANTYYASLTTVELLKKFNSYDPNHIPVKAKINVTVICSCGNSQISKDYGLFVTYPLRSDDTLAKIATKAGLDEGLIQNFNQDANFSIGSGIVFIPGRDQNGHFFPLYSRTGIAKGSAVGIAMAGIFGLLLFVIYIYAKYFQKKEEEKTKLPQTSRAFSTQDASGSAEYETSGSSGHATGSAAGLTGIMVAKSTEFTYQELAKATNNFSLDNKIGQGGFEAVYYAELRGEKTAIKKMDVQASSEFLCELKVLTHVHHLNLVRLIGYCVEGSLFLVYEHIDNGNLGQYLHGIGTEPLPWSSRVQIALDSARGLEYIHEHTVPVYIHRDVKSANILIDKNLRGKVADFGLTKLIEVGNSTLHTRLVGTFGYMPPEYAQYGDVSPKIDVYAFGVVLYELITAKNAVLKTGESVAESKGLVQLFEEALHRMDPLEGLRKLVDPRLKENYPIDSVLKMAQLGRACTRDNPLLRPSMRSIVVALMTLSSPTEDCDDDSSYENQSLINLLSTR

SEQ ID NO: 9951 - protein, 620 aa, Medicago truncatula
MNLKNGLLLFILFLDCVFFKVESKCVKGCDVALASYYIIPSIQLRNISNFMQSKIVLTNSFDVIMSYNRDVVFDKSGLISYTRINVSFPCECIGGEFLGHVFEYTTKEGDDYDLIANTYYASLTTVELLKKFNSYDPNHIPVKAKINVTVICSCGNSQISKDYGLFVTYPLRSDDTLAKIATKAGLDEGLIQNFNQDANFSIGSGIVFIPGRDQNGHFFPLYSRTGIAKGSAVGIAMAGIFGLLLFVIYIYAKYFQKKEEEKTKLPQTSRAFSTQDASGSAEYETSGSSGHATGSAAGLTGIMVAKSTEFTYQELAKATNNFSLDNKIGQGGFGAVYYAELRGEKTAIKKMDVQASSEFLCELKVLTHVHHLNLVRLIGYCVEGSLFLVYEHIDNGNLGQYLHGIGTEPLPWSSRVQIALDSARGLEYIHEHTVPVYIHRDVKSANILIDKNLRGKVADFGLTKLIEVGNSTLHTRLVGTFGYMPPEYAQYGDVSPKIDVYAFGVVLYELITAKNAVLKTGESVAESKGLVQLFEEALHRMDPLEGLRKLVDPRLKENYPIDSVLKMAQLGRACTRDNPLLRPSMRSIVVALMTLSSPTEDCDDDSSYENQSLINLLSTR

SEQ ID NO: 9952 - protein, 658 aa, Arabidopsis thaliana
MGIELQNHQSHHEEASPAEEPMSRWLINTPEPPSMWQELIGYIRTNVLAKKKHKRNKTKNSSSNLVYSCLKSAFPILSWGRQYKLNLFRKDLMAGLTLASLCIPQSIGYANLAGLDPEYGLYTSVVPPLIYSTMGTSRELAIGPVAVVSLLLSSMVRDLQDPVTDPIAYRKIVFTVTFFAGAFQAIFGLFRLGFLVDFLSHAALVGFMAGAAIVIGLQQLKGLFGLTHFTNKTDVVSVLSSVFHSLHHPWQPLNFVIGSSFLIFILLARFIGKRNNKLFWIPAMAPLISVVLATLIVYLSNAESRGVKIVKHIKPGFNQLSVNQLQFKSPHLGQIAKIGLISAIIALTEAIAVGRSFATIKGYRLDGNKEMMAMGFMNIAGSLSSCYVATGSFSRTAVNFSAGCETVVSNIVMAITVMISLEVLTRFLYFTPTAILASIILSALPGLIDVSGALHIWKLDKLDFLVLIAAFFGVLFASVEIGLLLAVGISFARIMLSSIRPSIEALGRLSKTDIFGDINQYPMANKTAGLLTLRISSPLLCFANANFIRDRILNSVQEIEGEENEQEVLKENGLQVVILDMSCVMGVDTSGVFALEELHQELASNDIRLVIASPRWRVLHKLKRAKLDEKIKTENIYMTVGEAVDIYVRARSTSHELC

SEQ ID NO: 9953 - protein, 590 aa, Moritella sp. PE36
MCGIFGYFDQQGRSLTSAQLQTMGDVINYRGPDGQGVFSEPGLALGNQRLAILDVEHGQQPFVSDDKQIVVVQNGEIFNHVELADELKGSRFECQTHCDTEVLLRLYQQHGIDFVSKLNGMFAIAIWDNNQKALYLIRDRVGEKPLHYHYVDERLTFGSEIKSILAAGIDKKLDHNALDSFLSFNYVVPPSTLFSGVKHVMPGTYIKATAQGIEEVRWWDLASIELQQKTETQWINEFNDILDDAVRIRLRADVPFGAFLSGGVDSSSVVGLMSKHMSQPVKTFTIGFHDEKFDESPFAALAATRFGTEHVVEKVEANLLDLWPKATYHCDQPHGDVSFLPMYRVAELASRKVKMVLTGDGADELFAGYDKYKSFFADDYAQSMSESEFRTRYLDNISLFKPDAKSALYSENLKQHVAKDNAASYVAPLFVKSQHMDRLNQALYIDTMLLLPGNNLVKPDRMGMAVSIENRAPFLDYRMVELAFSMPGELKLQQGETKYIYKKAVADLIGTDLTYRKKQMFTVPISEWLKHDMKEMVLDLLLSEKTMARELFNKEYVSTLYADHCNGSANNTREIRALMALEIWFREFKV

SEQ ID NO: 9954 - protein, 615 aa, Moritella sp. PE36
MSDTSPVVQFTDLNLPEPILQVLNDLGYEAPTPIQAECIPLLQNGGDVLGMAQTGTGKTAAFALPLLSNIDTALTKPQILVLAPTRELAIQVAEAFQTYSRHMRGFHVLPIYGGQSYPIQLKALKRNPQVIVGTPGRVIDHINRGTLDLSGIKALVLDEADEMLRMGFIDDVESILSKTPAERQMALFSATMPEEIRRITKRFMTNPTSVKIANKTSTVENIEQKCLIIGGLQAKLDGLTRILETEDYDGVIIFARTKTMTVELAEKLEARGYSAAALNGDLNQAMRERTVSRLKSGQLDIVIATDVAARGLDVPRIDLVINYDIPTDTESYVHRIGRTGRAGRKGTAILFAAPRERRLLKAIERATRQPLTMMDLPSRDDVTKKRISSFRDQLSALSSGKENLDFYKNLVGQLSEELELSELDLASALLFMAQKEKPLVLPPEAPRRERSFRDDDRGDRGRDRNDRGERRDRGDRPERGERGERRPAAEMEVFRIEVGRADGVQVKNIVGAIANEANINSRNIGGIRLHDDYSTIELPKGMPSEQLQQLQQVYVCNKALRMSKLEGVAAEGRQERSRPARDNDRPARDNDRGHRGQRRESTGGEERRPRRPRRD

SEQ ID NO: 9955 - protein, 496 aa, Moritella sp. PE36
MIENNFIITATFLVYLAIMLGIGVYAYRQTKSSTDYFLGGRNLGPWPAALSAGASDMSGWLLLGLPGYAYAAGMEAIWLAGGLLIGTWLNWLIVAKRLRTYSIVTKSITLPEFLSRRFKDNSKAIQICSAFFILMFFLFYTSSGLVAGGKLFETVFGLDYQVAVVLGTVCVVSYTLFGGFLAVSWTDLVQGLLMSAALLIVPLSAMDGSFSDLAAAMRDINPELLTIWQNSKGEDLSAIAIISLAAWGLGYFGQPHILARFKATRSNKDLVKARRIAVVWTSLSMFGAMLVGLVGLVYTNTNNITIADAETIFMLLVNSIFHPVIAGILLAAILAAIMSTADSQLLVSSSALAEDFYKQLIRPQATSEELVTVGRFGVVGLSIIALLLALNPDSSVLGLVSYAWAGFGAAFGPALIISLYWRGMTRNGALAGIIIGAVTVVVWKQLSGGIFDLYEIVPGIIFASLAIVIISLIGKQEDQSIHAQFDEFESGLDTME

SEQ ID NO: 9956 - protein, 311 aa, Moritella sp. PE36
MKLFAGNATPELAQKVAERLFIQLGKAKVGRFSDGEISVEIEENVRGGDIFILQSTCAPTNDNLMELIVMVDAMRRASAGRITAVIPYFGYARQDRRVRSSRVPITAKVVADFLSSVGVDRVLTVDLHAEQIQGFFDVPVDNVFGTPVLLADMQKMNLENPVIVSPDIGGVVRARANAKLLDEADLAIIDKRRPKANVAQVMHIIGDVKDRDCILVDDMIDTGGTLCAAAIALKKNGAKRVFAYATHPVFSGNAAQNLRDSCIDEIVVTDSIPLSPEVAALANVRVLSLSPMLAEAIRRVNNEESISAMFN

SEQ ID NO: 9957 - protein, 857 aa, Moritella sp. PE36
MRLDQLTTKFQMAISDAQSLALGKDNQFIEPIHLMTALLNQDHSSIRPLLTAAAIDANALRWQLADELDRLPQVQGTQGDLQLSSALNMLLNLCDKFAQKRKDKFIASEMFVLAAVEDKGRLGQLLRKAGGSRKLVEEAIDVIRGGDKVNDQGAEEQREALAKYTLDLTERAEVGKLDPVIGRDDEIRRVIQVLQRRTKNNPVLIGEPGVGKTAIAEGLAQRIVNGEVPEGLKNKRVLSLDMGALIAGAKYRGEFEERLKSVIKELAQTEGQTILFIDELHTMVGAGKGEGAMDAGNMLKPALARGELHCMGATTLDEYRKYIEKDAALERRFQKVLIEEPNVEDTIAILRGLKSRYELHHNVDITDPAIVAAATLSHRYISDRQLPDKAIDLIDEAASSIRLQMDSKPEALDKLERRIIQLKIERQALEKEDDSASIKRLSTIAEELAEKQDKFNELDEIWRTEKAALSGTKHIKSALDKARVELDMARRASDLNKMSELQYGTIPMLEKQLDLAAQAEMQDMTLLKHKVGEAEIADILSRWTGIPVHRMLEGEKEKLLAMEDNLHQRVIGQAEAISVVSNAIRRSRAGLADPNRPMGSFLFMGPTGVGKTEVCKALADFIFDSDQAMIRLDMSEFMEKHSVARLIGAPPGYVGYEEGGYLTEAVRRKPYSVILLDEIEKAHPDIFNILLQVLDDGRLTDGQGRTVNFRNTVIIMTSNLGSDIIQEEYGKHDYNTVKLRLLELLGQSFRPEFINRIDDTVVFHPLGRSHIEKIAVIQLKSLEARLKQLGYSLSITAGALAKLADAGFDPLFGARPLKRVLQKQVENRLANAILAGDVVPGKQIKISVVDDELSVTQ

SEQ ID NO: 9958 - protein, 374 aa, Moritella sp. PE36
MFNDLTNKLSLTLFNNDTFKAYFSPFSTKPVAVLMGDMFAAKVVAIKPENNDMYSLTLAVSGKVNAQSFSFQPGQYVELQVKKNGSYVKRPFTISSPLAQLQQDKTITLTIKKQSKGRITPWLADAVEKGDLFGISPAKGDFLLSAALLHSANKQENKDVIFIAGGSGITPFHSLLMSHVANNPTINFTLLYFVRANQHVLSDTLVALELEHANFTLKLLHSERDGYCSKAHINAITSELNDCAVYICGPNSMMDSTQTLLLDMGLAQDAIHLEQFGLASFSNVDVTAVRNVSFTTTNRNVVVSEDNQQTLLTLAEDNYVPAKYGCRIGICQECKCKKVSGVVYNSQTKTYSDTGEEDIQICISVPVTDVVINL

SEQ ID NO: 9959 - protein, 869 aa, Moritella sp. PE36
MINVELQKLVTRLTPTLKSALEQAAADCMARTHFSVDVEHWFYQLLNESKSGWQGVLSQSSIEREQIIDLLNRNLNCLARGNDSSPSLSPSLIELLKDCWLLASLNHSNASINGYHVLLVLKQRIEQGGYNGELTTWLNTVSIESLKSVATKQGAQTTAGEVQHNDMAPNESVGTVALDKYTHNLTEAARKGELDPISGRNPEIRKSIDILCRRRQNSPILVGDPGVGKTAIVEGLAQQIVDGNVPPSMMNVELRTLDLSLLQAGASIKGEFENRLKDVLTEVKQSERPIIVFIDEAHTLIGAGGAAGQNDAANLLKPALARGEFRTIAATTWAEYKQYFETDAALTRRFQLVAVGEPSEEDAIQMLRGVAGSLQKHHNVAVLEEAIEAAVQLSIRFLPERKLPDKAISLLDTACSRIGLSQSALPQQLDGLAEQIRYAHNERTSFTYEDAMYANGTEKLVAIEQKCNQLESEYEALNSRWNIEKECVTEILRLQDVIGERFLAGEQVADTPMQALLSEKMTELRSIQGESPLVMAQVDKQTIAEVIALWTGIPVGNMVKDDVKRLLNLEAELGKRVIGQHAPIHEIAKAIRMSRAGLTDPRKPVGVFLMCGPSGVGKTETALALTDLLYGGEKNITTINMTEFKEEHKVSMLLGSPAGYVGYGKGGVLTEAVRKNPYSVLLLDEMEKAHPGVHDIFYQIFDKGTISDSEGREIDFRNTLIIMTSNAADSAVVDACQIERPDVSALTQTISPALQQYFKPAFIGRTTVVPYFPLNDTEMAEIARLSLRRIEKRVSGYYNAEFSYDSDLVDYLVSQNNSPETGARAIEQIINRRLVPELATQCITRISEGQSITSVNISVVDGAVAIAIN

SEQ ID NO: 9960 - protein, 69 aa, Moritella sp. PE36
MSNTVIGKVKFFNEAKGFGFIEQENGPDVFVHFSSILVDGFKVLTDGQKVEFTVGQGQKGPQAENVKPL

SEQ ID NO: 9961 - protein, 538 aa, Moritella sp. PE36
MDSSLKNNSSLQKNSSLNKYSIETTDYQVGQDNVQKWGFDIHNPVFGISAGLIILFLSALLLVDPATAKETLNSVRNSIMADFDVFFMWSTNFFVFFTMVLIVSPLGKIRIGGKEAKAEHSTMSWMAMLFAAGMGIGLLFWGVAEPTAYFTNWWGTPFNVEPLTAEAKSLALAATIYNWGIHGWAIYGIVALSLAFFAYNKGLPLSIRSVFYPIIGDRAWGWAGHIVDILAVLATLFGLATSLGLGAQQAASGINHVFGYDGGIGLQLLVIAFVTLIAIFSVMRGINGGVKVLSNINMLFAFALLIIVIILGFDVVMVSIPETFVAYAQNFVGLSNPHGRDDTAWMHGWTVFYWAWWISWSPFVGMFIARISKGRTVREFLCAVIFIPTLVTLVWMATFGGIAIDQVANKVGELGANGLTDISLSLFHVYDAMPYGKVLSVLSIILVLIFFITSSDSGSLVIDSITSGGKIDAPVPQRIFWATVEGTIAGVMLWVGGTEVLQALQAGVVTTALPFTFVLLIMCVSLIKGLNSERHLYK

SEQ ID NO: 9962 - protein, 544 aa, Moritella sp. PE36
MDSAFKIDNQLNKNSQLNKNGQINRYSIETTDYQVGQDNVQKWGFDIHNTVFGISAGLIFLLISALLYTDPSTAKEALTSVRNNIMAEFDVVFMWSTNFFVIFTMALIVSPFGKIRIGGKEAKADHSTLSWLTMLFAAGMGIGLLFWGVAEPTAYFTNWWGTPLNVEPFTAEAKSLALAATVYNWGIHGWAVYGVIGLALAFFSYNKGLPLSIRSVFYPIIGDRTWGWAGHIVDIMAVLATLFSLATSLGLGAQQAASGINHVFGTEGGLGLQLVVIVLVTLVAIVSVIRGINGGVKILSNINMVLAFGLLIFVLIISFDVIIVTIPETFMAYAENFVTLSNPHDRDDLAWMQGWTVFYFAWWISLGPFVGMFIARISKGRTVREFLCAVIFVPTLVTLIWMATFGGIAIDQVMNKVGELGANGLTDISLSLFHVYDAMPYGDALSVLSIVLVLIFFITSSDSASLVVDSITSGGKVDAPIPQRIFWAIVQGSIAATMLWIGGTDALQALQAGVVTTGLPFALLMLVMCVSLMKGLNSEYHLYK

SEQ ID NO: 9963 - protein, 68 aa, Moritella sp. PE36
MSKITGTVKWFNETKGFGFIQQENGPDVFAHFSAIESDGFRTLLENQKVEFNVTDGQKGPQAENIVVL

SEQ ID NO: 9964 - protein, 463 aa, Moritella sp. PE36
MSHSQILVVEDDLGLREALVDTLLMAGYECDEVDSGESALIALGKKTYDMVVSDVQMGGMTGLTLLHNIKQKYPDLPVLLMTAYARVDDAVTAMRNGAVDYIGKPFSPEVLINQVGRYVPPQKVVKRTPCYGDIKTEQLLSLARKVAKSDATVMVTGPSGTGKEVLSRYIHDNSLRYDGPFVAINCAAIPENMLEATLFGYEKGAFTGAIQACPGKFEQAQNGTILLDEISEMALSLQVKLLRVLQEREVERLGSRKTIKLNIRVIATSNRNMKQAVANGDFREDLYYRLNVFPLAWLPLTERKGDILPIAEHLLKLHCKQSNIPILELLNCAKTKLQIYHWPGNVRELDNVIQRAMILAVDGKIKDADLILEDFTTADLQVIAPIGQAPQLHIKAEVPVRSINLPNEPLGNELRQQEYQIILETLIGCHGVRKDVSEKLGISPRTLRYKLAKMREQGIEIPA

SEQ ID NO: 9965 - protein, 472 aa, Moritella sp. PE36
MTTATIWIVDDDSSIRWVLDKALKSQQFETSAFSDAHALLNKLEFEQPDIIISDIRMPKMSGLELMAKVHAIHPDLPIIIMTAHSDLDSAVSAYQAGAFEYLPKPFDIDEAVSLATRAVTHAKEQSKNRRKNNKVEPVPEIIGEAPAMQEVFRAIGRLSRSSISVLINGESGTGKELVAQALHKHSPRVNNEFIALNMAAIPKDLIESELFGHEKGAFTGAAGMRNGRFEQANGGTLFLDEIGDMPIDIQTRLLRVLSDGQFYRVGGHSPVSVDVRIIAATHQNLEQKVADGSFREDLFHRLNVIRIHIPSLNERREDIPKLANHFLISAGKELGVETKILSKEAETYLANHHWSGNVRQLENICRWLTVMASGQEVFIADLPHEITDEQPTKLNSPGSTKDGDWRSQLKTWTAQQLASGHSDILAEAMPDFERIMLQTALEYTQGHKQDAAKLLGWGRNTLTRKLKELDIN

SEQ ID NO: 9966 - protein, 819 aa, Moritella sp. PE36
MRVLKFGGTSLANAERFACAADISVSKIEQSQVALVLSAPAKVTNNLVAAVQQTVRGLDAESSLEEIDGIFKALVAGLKAQYVNFNAELALTQLEKSLATLREYLYGVKLLSQCPENIEAKILCIGEKLSIVCMEQLLLARGFKVEVIVPQDKLVGKGGVLEATVDIDASRARFEQDPIKADHIYLMPGFTAGDEQGNTVVLGRNGSDYSAAVLAACLYAECCEIWTDVDGVYACDPRLVKDAKLLKTLSYPEAMELSYFGAKVLHPKTIAPIAQHHIPCLIKNTQNPEGEGTLIGGLVSKTQAEVKSLSELSGMTMINVSGPGMKGMVGMAGRIFETVSRAGVSIALITQSSSEYSVSFCIHSYDAGKAKLALNNEFTLEISNQLLEPIEMRDGLAIVSLVGDGMRKANGIAARFFTALAQASVNLVAIAQGSSERSISAVIDESKANDAIKASHNIFFGKQQYIDLFLLGCGGVGAALVEQIKRQKEFLAERHIEIRVCGIANSRQMLLDSEGLSLTHWADDLAASDIEFSLATLEDLVKHSHIINPVIVDCTSNDNLASQYVDFLGRGFHVVAANKKANTMSMDYYHELRSTALKTRRRFLYDTNVGAGLPVIENLQNLLSAGDELVRFNGILSGSMSYIFGKLDEGMSFSQATAQARDNGFTEPDPREDLSGMDIARKLLIIAREAGMDLTLDQVEVEAAIPAGFDATGTNDEFMANLPKADAYFADLQATAAAEGNVLRYIGQIEDGKCTVSIAAVPESDPLNKVKDGENALAFYSRYYQPIPMVLRGYGAGSEVTAAGVFADVLRTLNWKQEV

SEQ ID NO: 9967 - protein, 641 aa, Moritella sp. PE36
MGRIIGIDLGTTNSCVSILDGDTARIIENAEGDRTTPSIIAYSADGETLVGQPAKRQAVTNPENTLFAIKRMIGRRFEDEEIQRDIKIMPFKIVKADNGDAWVEVKGEKMAPPQISAEVLKKMKKTAEDYLGEAVTEAVITVPAYFNDSQRQATKDAGRIAGLDVKRIINEPTAAAFAYGVNTAKGDSIVAVYDLGGGTFDISIIEIDEVDGEKTFEVLATNGDTHLGGEDFDTRLINYLVAEFKKEQNFDLTNDPLAMQRLKEAAEKAKIELSTTQQTDVNLPYITADATGPKHLNIKVTRAKLESLVEDLVKATMEPLRIALQDSDLAVGDINDIILVGGQTRMPMVQAAVTEFFGKEARKDVNPDEAVAMGAAIQGAVLSGEKTDVLLLDVTPLSLGIETMGGVMTKLIEKNTTIPTKASQTFSTAEDNQSAVTVHAIQGERKRAADNNSLGQFNLEGIRPAQRGIPQIEVSFDIDADGILHVSATDKDTGKEQKITIQASSGLSEEEVDAMVRDAEANSAEDAKFEELVQARNQADAMVHGTRKQIEEAGEALPADEKEKIETAIVELEAAIKGDDKEAIEAKTQTLMEAAQKLMEIAQQQAQAQQAGPEAGEQPKEKDVTGDVVDAEFEEVKEDKK

SEQ ID NO: 9968 - protein, 404 aa, Moritella sp. PE36
MKKPIYLDYSATTPVDPRVAEKMMQCLTMDGIFGNPASRSHRFGWQAEEAVDIARNQIADLVNADPREVVITSGATESNNLAIKGAAHFYKKKGKHIITSKIEHKAVLDTCRQLEREGYEVTYLDPTPEGLITVEILEAAIREDTIIVSIMHVNNEIGAINDIAALGELCRSKKVLFHVDAAQSAGKLPIDFSELKVDMLSVSAHKIYGPKGIGALYVQRKPRIRLEAQMHGGGHERGMRSGTLATHQIVGMGEAFRIAKEEMQQDTDHAEALRKRFWAGIADIEEVYLNGHAEQRIVSNLNVSFNFVEGESLMMALKDLAVSSGSACTSASLEPSYVLRALGLNDEMAHSSIRFSFGRFTTIEEVDYATSIIKDNISKLRDMSPLWEMFKDGIDLSTIEWDHH

SEQ ID NO: 9969 - protein, 415 aa, Moritella sp. PE36
MELDIRQTVIVAILVLFLGKYLTRKVAFLQEYNIPEPVSGGLIASILFAILYGAFDIELQFSLAVRDSLLIVFFTIIGLSSRFSTLLKGGKPLIILLVIAVIYLFVQNFTGLTVAQFTQQLPEIGIIGGSVSLSGGHGTAIAWAPLFVEKYNISNAMEIGIACATFGLILGGVIGGPIAKYLISHHQLEPSREPELTVGTLHQSKPQAKGKSTVPLDPQPITAPIDYHHMLNSILIISISIGLGLGLNVVIANLGLHLPEFVTCLFAGIIVINLGPVIMPKLTWPERSRSLALISDLSLGLFLAMSLMSLQLWTLGGLGGPILIMLTAQVVIVTGFVILVVFPLMGKDYDAAVMSAGYAGLALGATPTAIANMTAVTEKFGASAKAFVVVPLVGAFFIDIANALIIQLLLDIFAS

SEQ ID NO: 9970 - protein, 407 aa, Moritella sp. PE36
MNTIYSIGELESFLIAFLVLFLGHIVNKKVPALQRFNIPEPIVGGLIVAITITILHFQNITLEFSLPLQSTLMLMFFSTVGLAASYTQLLKGGSKVFLFLAIASLYIIIQNGIGVSLATMLGLEPILGLIAGSITLSGGHGTGAAWSQTFYDIYGINTLELAMAAATFGLVIGGIIGGPIAQRLITKHNLVSDYGIGTNHHEQFPELVTYNELEEDRITGKSIIETLFILLTCVVGAGYVEQAVSLLNISWLRIPDFVYALFLGVIITNTTEVTKSYKVNTEAVDILGTVALSLFLAMALMNLKLWNIFDLALPLLIILAVQAVVLALFSYFVTFKVMGSNYDAAIIAGGHCGFGLGATPTAVMNMGSLVSRYGPSPQAFMVVPIVGAFFIDIVNLIILQGYISFIG

SEQ ID NO: 9971 - protein, 359 aa, Moritella sp. PE36
MNETFKSFTILKKHKESTLVTSFHLTPTDGSSLWDAEPGQYLTLRIPTGTGFVLRSYSISGDVENLQSYRISVKRETANVDWEGALDGIGSCWLHDLAKIGDEIDISAPRGQFVLDNNSVRPIVLLSAGVGLTPLVSMLHSLKKRENDVWFIHVCDNSDVHAFKSEVNNIAVESLGRIRTHLIYRHPTHQDEELGLFDSQDVIDRQLIQSLLPLDDYDLYLCGTESFMSAMFQLFRSIGLPTERIFYEFFGKAKTFKTIASESKPDLPVLTNEQEGFEVVFANSGSNVRWVNDSNSLLDLAEQSGLTPEYSCRDGICGSCTCDLIEGFVEYNEEPLNPVPEGQILLCCSSPKSRVVLGI

SEQ ID NO: 9972 - protein, 469 aa, Moritella sp. PE36
MSDSSSRYSSLALVKEIESPENPGGLEKRVALIPSDVGQLVQSGIKVYVEHGAGDGVGFSDDEYVKNNAIMQTAEQIYVNKSLIIKFKGPALASVEQMSEGCTLFCMAHFSSYPDRAKLLQDRRINVIAMEDICESPKHEPDHKILARVAMNAALTPFINAQTIGDLQVRVIGWSERLRGGIKRAGNRSPASLQVIQPTLAFDELDAVGPNALYFYDSQSFNDKQDILLQLHNAGTHLFDLSEFEREHGQQAMSAYRDSHPPQKFGLRRIQCLHETGQAGARYGLSLLKEHKPSVDVANIKAVILGYGNVGQGALDELHQQGVKNIHVLGRAQTAKESIGYWLKDADIVVNGAEQPAELRGKNFLISNQDVKTLIPENSVVIDLVGGSATNRSPVEPVISCSFLTQPYFIQDGVLISSLWGWPMMGMMRETAIRYSGQITDVLIGREKLIDGLDKLTPGVKIALVCGPF

SEQ ID NO: 9973 - protein, 270 aa, Moritella sp. PE36
MQKTRAFLKWAGGKYSLVDHLREKLPAGKRLVEPFVGAGSVFLNTDYDEYLLNDINPDLINMYKILQHKPEQFIADAQRFFTPEFNDKERYYKIREKFNKTSNPYQRSLMFLYMNRHGFNGLCRYNKSGGFNVPFGSYKKPYFPLKELRFFAEKSKKATFICESYSDVYKRLGSDDVVYCDPPYAPLSRTASFTSYSASGFSLDDQALLAKVSRETSQERNIPILISNHDIPLTRELYHGSTFEVVQVKRTISRNAGKRNKVDELLALYR

SEQ ID NO: 9974 - protein, 539 aa, Moritella sp. PE36
MSDLTKRAKATDLDSAGSHTASASKLSSDSAVSGNNSTADKLGFSNPAFWYSGSFIAAFVFLALYDEALLSSLVNTGFAWSVKVFGPYWQLLLLLTFFIGIGLAAGRTGRVVLGGIAKPEMDGFRWMAIIFCTLLAGGGVFWAAAEPIAHFVSPPPLYGAQENVQQQAVNALSQSFMHWGFLAWAIVGSLTSIVVMHLHYDKGLPLKPRILLYPVFGKRVLTGHTGALIDACCIVAVAAGTIGPIGFLGLQVSYALNFLFEIPDGFTTQLIIILFAIALYTLSALSGLNRGMQMLSRYNVILACVLMVYILIFGPTNFIFNGYIQGVGSLVDNFIPMATYRGDEGWLSWWTVFFWGWFLGYGPMMAIFIARISRGRTIRQLVTTISIIAPLTTCFWFTIVGGSGLAFEIANPGSVSSAFEGFNLPGALLAVTTQLPFPMITSILFLILTTIFIVTTGDSMTYTISVVISGEEEPNAFIRAFWGIIMGVTALILISLGSGGISALQSFIVITAVPVSLILLPSLWNAPQIAMKMAKEQGL

SEQ ID NO: 9975 - protein, 395 aa, Moritella sp. PE36
MSNSFVLVINSGSSSLKFAVIDSNTGDAVLSGLGECFGLPEATVSWKYEGQKSEEAITGEGNHHELAIKRIVALIETLGLTSLLVAVGHRIVHGGEKFTSTIRIDESVLNEIRDLSDLAPLHNPAGAKGIEAAMHAFPSLPQFAVFDTAFHQTMPAKAFTGAISNKLYTDYGIRRYGFHGTSHYYVSREAAKMINKPIEESSFISVHLGNGASVCAIRDGKSVDTSMGFTPLAGLMMGTRCGDLDPGIIEFLLKKGWTQDEVYKELNTNSGFMGVSGLTSDCRGIIEAMEQGHKGATLAFQVFTYRVAKYIASYMVSLESLDGIIFTGGIGENALPIRSEVLAYLKIFGYKEDLQANEKARFGNAGVITEAGTPVVMVIPTNEEFVIAQQSVELL

SEQ ID NO: 9976 - protein, 553 aa, Moritella sp. PE36
MCSIFGILDIKSDIKPLREQALELSKLLRHRGPDWSGIYTNDNAILVHERLAIVDVNNGAQPLYNEEKTHVLAVNGEIYNHKDLKKTLNVDFEFQTESDCEIILALYKEKGTQFLDDLNGIFAFALYDEEEDAYLIGRDHIGIIPLYTGYDEHGNFYVASEMKALVPVCTQIEEFPAGHYLWSKDGKVTPYYQRDWTEFDAVAQNGGDKEVVKQGLEEAIKRQLMCDVPYGVLLSGGLDSSVISAVTQLYAKRRIEDGGKTEAWWPQLHSFSVGLNGSPDLAAAQKVADHLGTIHHSIEFTVQEGIDALRDVIYHIETYDVTTIRASTPMYLMARKIKAMGIKMVLSGEGADELFGGYLYFHKAPNAKEFHEETVRKVSKLHMFDCLRANKSMAAWGIEARVPFLDKEFIDTAMRLNPELKMITGDRIEKNIIREAFEDLLPEEIVWRQKEQFSDGVGYSWIDQLKVHVAEAVTDQMLASAAYKFPINTPDTKEGYYYRAIFEGHFPGDSAAKCVPFGKSVACSTVEALAWDESFQNNADPSGRAAGVHNEAY

SEQ ID NO: 9977 - protein, 73 aa, Moritella sp. PE36
MATGTVKWFNNAKGFGFICPESGGDDVFAHFSIIQMDGYRTLKAGQLVDYEIDEGPKGSHAVSISAHETSEIK

SEQ ID NO: 9978 - protein, 575 aa, Moritella sp. PE36
MEMLSGAEMVIRSLEDEGIEHIFGYPGGSVLDIYDALFESSQIEHFLVRHEQAAVHAADGYARSTGKVGTVLVTSGPGATNCITGIATAYMDSIPLVVLSGQVPTSMIGNDAFQETDMMGVSRPVVKHSFLCKTASEIPEAIKKAYYIASTGRPGPVVIDLPKDTQNPLAKFPYKYPESVSMRSYNPVTSGHKGQVRKAVKAIATAKKPVLYVGGGAVIANAETQVLKFAEQLNLPVTNTLMGLGIFPGTHPQNVGMLGMHGTFEANKTMHNSDLIICLGARFDDRVTNAIDKFCPEAKIIHVDIDPTSISKTVHADIPIVGSIEVVVEQMLEIIEELDVTANEEERAAWWKQIDSWRTKKCLSYETGLSIKPQAVIEGLYKHTEGKAIITSDVGQHQMFGALYYPYDKPRQWINSGGLGTMGFGFPAAMGAKIANPEKVVCCISGDGSIQMNIQELSTCLQYGIAVKIITLNNGALGMVKQWQKMFYDGRHSHSYMESMPDFVKLAEAYHHVGIQVSKPEDLDKAFAECFSEENKNRVVFMDIIIDPEEHVYPMQIKYGAMDDMYLSKTEKTTS

SEQ ID NO: 9979 - protein, 743 aa, Moritella sp. PE36
MDIKPNPNPNPNLKLRASPFHRGEQTIQEKLGVREQMERFGSRVIRDHMPQQHRDFYQQLPFIFVGHGDKDGWPWASILFNKPGFIHSPDEQSLHLNTQPVLGDPLLKALDANTKLGLLGIELETRRRNRLAAHITASTDKQIQLSIDQSFGNCPQYIQKREYEFIDPNTMPKSSVEALTELDLSAQQLIANSDTFFVASFVNNDINSDNSNADSSDASIGADVSHRGGKPGFIRVDNNKSLTIPDYLGNNHFNTLGNFVENPKAGLLFIDFDKGHILTLTGRVEILWQSEDSQYFTGAERLWTFHLEQGYRLNYSLPLRWKLNEFSPNTLMTGTWAEVAKQKAQQEQQKKQQRQLESHQAQWHDYQVVNIVDESSLIKSFYLQPTDTVKALPKFNFTAGQFLTVKVPTTLRNTVNGKDVIRTYTISSAPADPLLRISVKRETSADSKHKGLVSHYLHDNIKLGHIVQLKAPKGDFVLDAAELIPTKLITAKLRPTVLLAGGVGITPMIAMARHAMFEAIRTRSLRPITVIAAAKNAQQRAFFDEFNQLSEQSQGGIRTFWALSQPESDLKPGQDYHHQGRINKDLLQAILPIDDYDFYLCGPSAFMQSMYDLLRELGVSNERIKAEEFGPASLTRQHDASSVEFIAIPSASVAVIEFNQSEVEQTWTAEEGTLLEFAENHGLTPEFGCRSGQCGACKTKLLAGKVSYQTEISADLRDDEVLLCCAVPAAIDGEDVVRIKLEM

SEQ ID NO: 9980 - protein, 246 aa, Moritella sp. PE36
MITDSHIIDIVSTHHLFSALTDAEFKQLFATAKTFKVEPLENVFHQGDEANRFYLVLRGHLKLYRTSPSGQEKVVEVMRQGNTFAEALMFNNKPFYPVAAQAVSESELISIDNETYLKILKINPEAGIAIMANMSIRLHHDLNEIEMLSVENAKNRLLLFLLKNLQDNNGNEGIIELDIPKRTLASLLSIQPETFSRLLKKMTKEGLIEERKGLIRIMDIDALYAASDIPVQSVTGNIPTQFVPGE

SEQ ID NO: 9981 - protein, 295 aa, Moritella sp. PE36
MTTIAFIGTGIMGKPMAANLQKAGHQLVFSEAHSPAPIELMANGGIAYPTVKAATEAAEVIILMVPNTPQVAAVLFADDGVVSALTADKMVIDMSSICPIETQKFAEKVKLTGAEYLDAPVSGGEVGAINAALTIMVGGSESAFSRAQPLLTSMGKNITLVGDNGAGQICKVSNQIIVALNIEAVSEALVFASKAGADPARVREALMGGFANSKILEVHGDRMIKGTFEPGFKIALHKKDLNLALSGAAALGVSLPNTAKALELFEQCSEMGGENWDHSAMIRAIESQSNHEIRQ

SEQ ID NO: 9982 - protein, 283 aa, Moritella sp. PE36
MKTVSPFDAILPPELLKKAESIGVAKATKAPKQAFMLAITAGVFISIAFAFYTTVTTGTADVAYGLKKFMGGFAFSLGLLLVVVCGGELFTSSILTIIARANNKITTLQLAKNWAVVYAGNFIGCLFFVMLMVLAKQHLVADGAWGINAMKIAQHKLHHTFIQAVTLGILANLLVCLGIWMSFAARSITDKFVAIALPVTMFVASGYEHSIANMFMIPLGYVIANFSGPEFWLLTGANPADFTDLTLSNFVFNNLIPVTIGNIIGGGVLVGLTYWAIYCNKES

SEQ ID NO: 9983 - protein, 397 aa, Moritella sp. PE36
MNKLVLVLNCGSSSLKFAVLDSVSGDEKLSGLAECFNLENARIKWKLDGNKGTADLGAFASHKEAVAYIVNNILKEQQAMSDAIVAIGHRVVHGGEKFTSSVIITDEVIKGIEDCAALAPLHNPAHLIGIRAAQAAFPALPQVAVFDTAFHQTMPEKAYLYALPYKLYRENGIRRYGMHGTSHLFIGREAAALLGQKVEETNIINCHLGNGASVCAIKDGKSVDTSMGMTPLEGLVMGTRSGDLDPSIINHLVTQCNYTLAEVNSMLNNESGLLGISEISSDCRAIEDGHAEGQVGAVRAMELSCYRLAKYIASYAAALGRIDAIVFTGGIGENSDVIRSIVLNQLSIFGIEVDEAANTAARFGSEGTITTANSKIKAMVISTNEELVIAQDAVSLI

SEQ ID NO: 9984 - protein, 678 aa, Moritella sp. PE36
MLIPVGAGVGVTSVSLGMVRAFERNGLNVNFFKPIAQPRQGEKGPELSTEIIRQGTNASPATPFTLSHAEKLIGAGKTDVLLEDIVERFESHMVDAEIVVVEGLVPTAKQPFANHVNYNIAKALDAEMIFVTNPGTDSSEQLKDRLEIACSNFGGSKNKRIIGCVINKVGAPLDEAGRNRPDLAEMFEANAGNASHNLEVLQVFGKSPMPILGCIPWNAELIAPRAKDLAKHLNAEILNEGDIEERRLVGITFCARSIPNMLEHFRPGGLLVTSGDRADVIVAACLSAMNGVKIGALLLTGDVRPDASVLKLCSQAMATGLPIMLTPTNTWQTALTLQNFNLDIPADDKPRIEAVQEYIASHIDKQWIETLTVGTKRTRRLSPPAFRYQLTELARKAKKRVVLPEGEEPRTIEAANICAERGIATPVLLGNPAEIKRVAESQGITLSAGVEIVDPITCREKYVAPMVELRKAKGLTEVVAREQLEDNVVLATMMLEQSEVDGLVSGAVHTTANTIRPALQLIKTAPGSNLVSSIFFMLLPDQVLVYGDCAINPDPNASQLADIAIQSADSAKAFGIDPRVAMISYSTGSSGQGSDVEKVREATKIAQERRPDLIIDGPLQYDAAIMENVAKSKAPNSPVAGKATVFVFPDLNTGNTTYKSGTALCKPNLYWSNAARHA

SEQ ID NO: 9985 - protein, 478 aa, Moritella sp. PE36
MSNLIPIFIYLIASLLITRWWSARQSKQAGELYQDKAKRFFIGGRFLNGPLLALTLVATYTSASSFIGGPGAAYKIGLGWVWLALIQVPVAMLTLGVLGPKLLAQRKTEHATLIEWLDERYQNSWLTKLALVSLVVGFIAMISVQFIGGARLFSGVSGISYELGLGLFVITVLAYTLTGGFRAVVITDAFQGILMIIGVLVIFITLLSQGGLTALMTEVSTQSPTLLSPQGNSGQLGWPMMLSFWMLICFGTLGLPHTVVRLLAVKDSNALKRGMIWGTIISFVMTLIPHLSGVLGRALYPDLTVPDEIMPTLITGLFDPFWAGVLLAAPIAAVMSSVDSMLLQSAVSLVRDGVVRSYPALTANAQVTLTRVAMLLVTLIATYFAIEPPEMIVWLNLAAFGALQAVFLWPILAGLYWPQIAGNAALAAMVSGLVSYLVLLWFKPAMFGIHPIVPALLLSGLGLLAVHRIGQASINQKV

SEQ ID NO: 9986 - protein, 290 aa, Moritella sp. PE36
MKIAFIGLGVMGYPMAGHLQNAGHDVVVFNRTETKAVTWVEKYSGKRASTPHLAALNADLVLMCVGNDDDVRSVVYGEDGVLSAMKANAILIDHTTTSALLAEELSAACAKSDIHFLDAPVSGGQAGAENALLTIMTGGAANAYERVLPVLDIMAKKVTLVGDVGAGQKCKMVNQLCIAGLVQGLAEGVNFAKNAGLDEHIVLDVLRNGAAQSWQLENRTLTMAEGKFDFGFAIDWMRKDLAICFEEAERNGSLVPIAKLVDGFYAELQHAGEQRSDTSVLIKRLHKSQN

SEQ ID NO: 9987 - protein, 410 aa, Moritella sp. PE36
MQELTTTVTELRFALDTFYFLMSGVLVMWMAAGFAMLEAGLVRSKNTTEILTKNIVLYSIACIMFLLVGYNIMYVGNVEGGIIPSFGSLIGTQSEGADHSLESDFFFQVVFVATAMSIVSGAVAERMKLWAFLAFTVFLTGVIYPIEGYWTWGGGFLAEAGFSDFAGSGIVHMAGAAAAFAAVLLLGARKGKYGKNGEVHPIPGSNMPLATLGAFILWMGWFGFNGGSQLMLSDVENATAVGKIFLNTNAAAAAGAVAALLVTKALWGKADLTMILNGALAGLVTITADPLSPAPAFATLLGALGGVLVVFSIVALDKVKIDDPVGAISVHGVCGLFGLMVVPFSNTDATFGAQLYGAAIIFAWVFGASILVWAVLKATMGIRVTEEEEITGMDMADCGIDAYPEFVTVK

SEQ ID NO: 9988 - protein, 510 aa, Moritella sp. PE36
MSVTNRGLNKGQVEKLKIEENHWNICAECKGRGKVSKRLRKKVRLRYQRELEHFEKSNCEGIAPVRPKPHLDACSNCKGSGLIRSAIPSFVDGPDTENYPHLAIIGGGIGGVALAVACLHRGIPFTLYERDSGFDARSQGYGLTLQQASRAIEGLGIFSLEDGIISTRHVVHTTEGKVLGEWGIRKWVPSDERKLPTRTNVHIARQSLRLALLEQLGGHDAVQWGHQLVDFKQSEGEGVDLSFQVDGEMKYAHADLVVGADGIRSSVRQLLVGEDASPLNYLGCIVILGICPLADLEDEGLDRTLLDSATVFQTANGHERIYIMPYDADSVMWQLSFPMPEDEAKALSAQGTKALKEEALRRCQWHDPIPQILTATQEVMVSGYPVYDRALLEPELLQQGANVTLIGDAAHPMSPFKGQGANQALLDALALARVITKECRPLSKWREAGLRDRVLTEFETEMLERSAKKVKGSAEAAEFLHTDIVLHEGDEPRGRCLEKKVANEDEKNKE

SEQ ID NO: 9989 - protein, 303 aa, Moritella sp. PE36
MSDMTYSGFIAIVGRPNVGKSTLLNRILGQKVSITSRKPQTTRHRILGIDTEDNRQTVYIDTPGLHIDEKRAINRLMNRAASSSLKDMNVDAVIFVVDGTRWTDDDEMVLNKLRDINCPIYLAINKTDAIKDKDRELMPHLQVLAAKFKFTEIIPISATKGTNVEMLRGICSKQLQEGDFYFPEDYVTDRSSRFMASEIIREKLMRFTGQELPYSTTVEIEQFKVSENGTYHINALILVERDTQKRMVIGNKGSKLKTIGTEARRDMETLFDNKVFLECWVKVKSGWADDERALRSLGYGDEV

SEQ ID NO: 9990 - protein, 302 aa, Moritella sp. PE36
MSLVNWSIDMNSLSIAFVGLGVMGYPMAGYLKRAGYKTTVFNRTTEKAMKWVNDYQGELATSPKEAAENADVVFICVGNDDDVRSVVYGESGVLASLKPGAILVDHTTTSAQLAIELAAACANHDVEFMDAPVSGGQAGAENGTLTVMCGGNTETFTTLQPVLNAYAKQATLLGNHGQGQRCKMVNQICIAGVLQGLSEALTLAEKASLDVALVVETLKHGAAGSWQMENRAETMANDQFDFGFAINLMRKDLGICLEEAERYQLQLPLTSQVDSDYEILQQHGLGNMDTSILIKANAIKSV

SEQ ID NO: 9991 - protein, 403 aa, Moritella sp. PE36
MSKVFIVAAKRTALGSFGGSLAGVDAATLGATAIKGALAAAKVNPEHVDEVIVGNVISAGQGMGPGRQAAMQAGIPASVPAYTLNMICGSGMKTIMDGAAHIKAGDADIVVAAGMESMSNIPYLMPAKTRFGSKMGNMTMVDAMVNDGLTDVFNNYHMGMTAENIVEQFGLTREQQDTFAVGSQHKAVAAIAAGRFVDEIVPVEVKVRRQTQSFATDEYPKDNASVAGLAKLRPAFKADGSVTAANASGINDGAAAIILASEAAVEKYGLEPMAELIAYGQGGVDPQVMGLGPVPAIEQALKRADMSLEQMELLELNEAFAAQALGVMTNLTQAHNVDMDWFADKTNVNGGAIALGHPLGASGGRITVTLLHEMQKRGVDYGLASLCIGGGMGTALIVKNLQK

SEQ ID NO: 9992 - protein, 371 aa, Moritella sp. PE36
MIIGVPKEIKNHEYRVGMTPASARELITHGHTVYVETFAGAGIGFSDSDYETVGAKILTTAAEIFATADMIVKVKEPQPVERAMLRDGQVLFTYLHLAPDLAQTEDLIKSNAICIAYETVTDANGGLPLLAPMSAVAGRMAIQAGAQALEKSQGGCGLLMGGVPGVAPANVVVIGGGVVGMNAAKMAVGMGASVTMLDRNLSVLANLDNQFDGRLKVVYSTHDAIEKYVLEADLVIGAVLVPGAAAPKLVTKDLISRMKPGAAVVDVAIDQGGCFETSHATTHQDPTYIIDDVVHYCVANMPGAVAKTSTFALNNATLPYIIKLANLGWKEALVQDEHLLNGLNVIAGQVTVQDVAEAHNLPFVAPKSMIL

SEQ ID NO: 9993 - protein, 638 aa, Moritella sp. PE36
MAKINLSALAIYPLKSAKAINLTHSQVSEMGLEHDRRFIISDMQGQFITGRTEPKISTIKIEVSAQGIMLSAPHMPPIAFIFKELQQDYTDVTVWGTAIQGQRCSDDMNRWLTKFLGVDCQLLYFGEKSSRQVANVDKQVGFADGYPLLLISQASLDELNRSTSRPIDMRQFRTNLVVTGCEPFAEDTWKRIKIGDAEFELVKACERCIFTTLSPGQTRFADDKEPLKTLNLFRKDNDGRIDFGQNLISHNTAEIKLGDSIEVLEYHQPKFYADNRPKQKSVVSAPKAIVKHPAVEQAKTLWGKGETRQLCCVAVIDETPDTKTFRFRVEPAALLNYKPGQFITLNLKIGQDLVMRNYTLSSSPSRPDLLAITVKRVPEGKASNWLNDNLTVGSRLGASSPRGAFHAFTATTQKLLLLSAGSGITPMLSMARYYADTECDKDIVFFYSAKTSADLIALDELQLLTRQHTNMRLILTLTAESTHSDWSGLRGRIDQQMLADVVRDISERSAYVCGPEAFMTTMATALTALNVPADQQFQESFGDHKHSDTPGKPVNILLDSWDTSFVGDNKTTLLEQAEKNGVNIPYNCRAGYCGVCRVTLESGEVRVLADHALTDDGKKAKKILACSCIPQTDVVISA

SEQ ID NO: 9994 - protein, 1487 aa, Moritella sp. PE36
MSVYDPSLEKDNCGFGLIAHQEGEASHKLVRVAISSLDRMQHRGGIAADGKTGDGCGLLMQKPDSFFRAIAIENDWNLGNNYAVGMIFLNQDTDKSAAAKQIMKEELERETLKVVGWREVPLDTSVLGEIAMSSLPQIQQVFINAPAGWAPKDIERRLYITKRRIEKRITDDSDFYIASLSNLVTIYKGLCMAGDLPKFFLDLADLRMQSSICLFHQRFSTNTSPKWPLAQPFRFMAHNGEINTIEGNREWARARSYKFSSPLLPDMHDAAPFVNTKGSDSSSMDNMLELFLAGGMDIFRAFRLLVPPAWQNHPNMDDDLRAFYDFNSMHMEPWDGPAGIVLTDGRYAACGLDRNGLRPARYVRTTDGFITVASEVGIWDYTADEVIEKGRVGPGELLVIDTETGKLWTSWDIDQELKGRNPYREWLSNNSTKLTPFEALPKEAIGTRTFNDEQLATYQKQFDYSREELDQIIRVLGENAQEATGSMGDDTPMAVLSTKTRSLYDYFRQKFAQVTNPPIDPLRENHVMSLATCIGREHNVFNETDGHAHRVLFDSPVLLFSDFKQVTELSNEYYKTAKINLCFNGQDETLARAVARITAEAIELAASGVVLLVLTDRTLAKNNLPIPAAMAVGAVQKALVDANLRCDTNIVIETASARDPHHFAVLIGFGATAVYPYLAYESLRKLVEIETIQQDIAKTLLNYRNGINKGLYKIMSKMGISTIASYRCSQLFEAVGLADEIIELCFRGTSSRIKGADFSDFHIDQQKLSKLAWTKRKPTSQGGLLKYVHGGEYHAYNPDVVSTLQTAVQSGKYEDYLQYSTEVNERPIATLRDMLQLKKSDNPIELDAVEHEDNLFKRFDTAAMSIGALSPEAHEALAIAMNTLGGNSNSGEGGEDPRRFGTLKVSKIKQIASGRFGVTPHYLMNAEIIQIKVAQGAKPGEGGQLPGHKVTTEIAKLRNAVPGVTLISPPPHHDIYSIEDLAQLIFDIKQINPTVLVSVKLVSEPGVGTIATGVAKAYADLITISGYDGGTAASPITSVKYAGSPWELGLAETQQALVENGLRHRIRLQVDGGLKTGLDVIKGAILGAESFGFGTGPMVALGCKFLRICHLNNCATGVATQDEKLRQDHFHGLPEMVMNYFKFIAQETREIMASLGVTQLTDLIGRTDLLVQLDGLTDKQRKIDLSGIIYKPQPKAGLGVYCQATNEPYDKAELNEALIAHYLESITEKSGLSSHYPIRNTDRSVGARLSGEIAKQHGNQGMASDPITVNFTGTAGQSFGVWNAGGLHLILTGDANDYVGKGMAGGKIVIRPEPGSAFKSNEAVIAGNTCLYGASGGELYAAGLAGERFAVRNSGANAVIEGIGDNGCEYMTGGIVTVLGETGVNFGAGMTGGFAYIYDVNGQLASRLNNELVEQHAVTDYPMHVEHLRGIIIEHLAQTCSQHAQDLLNEFDTVINKFFIIKPKTADINALLGHKSRSAAELRVQAQ

SEQ ID NO: 9995 - protein, 126 aa, Moritella sp. PE36
MQTTMLKGKLHQARVTHAELNYEGSCAIDQDMLDASGILEYEAIDIYNIDNGERFSTYAIAGERGSKIISVNGAAARKAAVGDRIIICAYVRMDNEEAKQHKPSLVYLNQVNDIVRTSNDIPVQVA

SEQ ID NO: 9996 - protein, 548 aa, Moritella sp. PE36
MSQAEVRPTNFIRQIIDEDLNSGKHTNVHTRFPPEPNGFLHIGHAKSICLNFGIADDYQGQCNLRFDDTNPEKEDIDYVHAIQEDVKWLGFNWDGEVRYSSNYFDKLFEYAVELIQAGKAYVCFLNAEETREYRGTLNKPGKNSPYRDTSIEENLALFNKMRDAGFADGECCLRAKIDMTSSFMCMRDPIIYRIKRAHHHQTGDKWCIYPMYDFTHCISDAIEGISHSICTLEFQDNRRVYDWVLDNISIDCRPRQYEFSRLNIEYTMMSKRKLNALVTENHVTGWDDPRMPTIAGLRRRGYTAASIREFCKRIGVTKQINTIEMGMLEACIREDLEDSAPRAMAVLDPVKLVITNYPEDQTEQLIAPAHPKLDMGTRTLPFSRELFIDRADFREEANKKYKRLVLGKEVRLRNAYIVRADDVVKDDAGNIIEIHCTYDDETLGKNPSDGRKAKGVIHWVSAADAVDAEIRVYDRLFKIVDPTSVETLEEALNEQSLVVIKTAKVEPGLVAAKAESAYQFEREGYFCADSKDSTADKLVFNRTVSLRG

SEQ ID NO: 9997 - protein, 323 aa, Moritella sp. PE36
MSSQFNYCQSALNVINTEAAAISQLSQYIDATFTATCELLIARKGKVIVTGMGKSGHIANKIAATLASTGTPAFFVHPAEASHGDLGMIERGDVVMALSNSGESDEILALYPVLKRLSIPIIAMTGNADSTMAREAKISLCIKVDKEACPLGLAPTSSTTASLVMGDAIAVALLEAKGFTANDFALSHPGGRLGRKLLLRISDIMHKGDGVPSVQQSETISEALFEVSKKGLGMTAVNNGKRLVGIFTDGDLRRILDARIDIHQTPISEVMTRRCVTINEHILAAEALAVMENKKVNGLIVVNEQQEPVGAFNMHDLLRAGVL

SEQ ID NO: 9998 - protein, 525 aa, Moritella sp. PE36
MSINKDKYSIDNTDYTVGQDNVQKWGFDVHNPVFGISASLIGLFLVAILLVEPETSKSFLDGIKWWIIGAFDGLFMWSANIFVIFCLGLIVSPYGKIRLGGDDAKPDYSSMSWIAMLFAAGMGIGLMFWGVAEPVAYYTGWYETPLNVTANTPEAAKLALGATMFHWGLHPWAIYGVVALSLAFFAYNKGLPLSMRSVFYPILGDRTWGWAGHIVDILAVLATLFGLATSLGLGAQQAASGFHHIFGIENGLFLQITIIIVVTLLAVVSVVRGIDGGVKVISNINMLLALVLLIFVILVTFAVSMGTVPTTIMGYVENIIPLSNPIGREDEAWMHGWTVFYWAWWISWSPFVGMFIARISRGRTIREFITAVLLVPTGVTVLWMSVFGGVAIDQVANNVGTLGSEGLTDVPLAMFQMFDSLPMGEVLSMLAIILVLVFFITSSDSGSLVIDSITAGGKVDAPIPQRVFWALIEGAIAAALLWVGGTQAIEALQAGAISTALPFTIILLVMCVSLIMGLRTEQYNR

SEQ ID NO: 9999 - protein, 514 aa, Moritella sp. PE36
MMQIGIPRESLKGETRVAATPATVEQLQKLGFSVLVESNAGQLANFNDATFEAAGATISEDTKQVWASDIVLKVNAPANDKEIKLLQKGTSLISFIWPAQNEELLEKLAKRDINVLAMDSVPRISRSQSLDALSSMANIAGYRAVIEAANEFGRFFTGQITAAGKVPPAKVLIIGAGVAGLSAVGAAGSLGAIVRAYDTRPEVKEQITSLGAEFLEVDFEESAGSGDGYAKVMSEDYKAQEQKMLAEQVADADIIITTALIPGRPAPRLISQEMVDAMKAGSVIVDLAAVNGGNVEPSVVDKVITTDGGVKVIGYNEMARRLPAQASQLYGTNLVNLLKLLTPEKDGEMIINFDDVVQRGVTVIKDGEITWPAPPIQVSAAPQAAKKEEVKEAPAKPEKKKTGIYKALLAGGGIWAYSALASYVPAEFLNHLMVFALACVIGYYLIWDVAASLHTPLMSVTNAISGIVILGAFFQMGAESGLVTLLAFLGTFIATINIAGGFAVTERMLKMFRK

SEQ ID NO: 10000 - protein, 396 aa, Moritella sp. PE36
MLTQHTIDIIKATVPAVSLHANDITAHFYPLMFREYPEVKRFFNQSNQAGNAQPKALANALVAYAGNIENLAVLEAAVNRIVNKHVSLNIQPEQYAIVGECLLKSIKAVLGDAATDAVIEAWGLAYWQLADLLIAAEEAAYTANAEKEGGWRGEREFAITTKVAESDIITSFYLTPTDGKPVTSFTPGQFIGLVLTIDGEETRRQYSLSDSPNSEYLRISVKREEGGTVSNYLHSRVQAGDTLRVLAPAGDFVLKDNNKPVVLVTGGVGITPAISMLNSLKDTDRPIHFIHAAMNTKVHAFRDHVTNLAAENDNIKPYFVYSDATAECKPDATGFINLAMLEEKIGDDRDVEFYFLGPKPFMQAINGFAPKLGIPAENVHFEFFGPAEDLNIDPTA

SEQ ID NO: 10001 - protein, 397 aa, Moritella sp. PE36
MSEFKEFSLLESIIDRVSLKGYKQPTPIQKECIPALINGNDLLGIAQTGTGKTAAFSLPIINNFGRNKIDINAKSTRSLILTPTRELASQIMQNIDDYADGLGLKTKVVYGGVGRQNQVDSIALGLDILVATPGRLLDLIKTDDINFKALEVFVLDEADTMLDMGFFKDVQRIISKLPKNRQTLLFSATMPAEIEILADAILTDPTKIQITAETVTIERINQSVYHLEKSNKVPLLLNILEKSHYKKVLIFCKTKPGADIIVEALEEASITAASLHSGKTQAVREEALQNFKDSNLSVLVATDVAARGIDVDNITLVINYNLPEDPRNYIHRIGRTARAGKSGIAISFAVENDITLLNSIEKSIGKAIPVATEQPFHKEFSKVPKKVKKKVKKRNRR

SEQ ID NO: 10002 - protein, 275 aa, Moritella sp. PE36
MYADTIKKCSANAARIVKLDKTDPISFLISGAMAGAYVGLGIILIFTLGNMVDPSIRPLVMGATFGIALTLVIIAGSELFTGHTMFLALGAKTGAITWGDNLRILPKTWLYNLIGSIAVAALFYYAGGGKLLGNSESLVHKVALAKTTAPAMILLFKGILCNWLVCLAIWMCQRVEGTGKFIAIWWCLLAFIASGYEHSIANMTIFAMSYFGDSQEAFNLVGVGHNLLWVSLGNIISGTAFMGLGYWYSTPKAERPVVNQEAVKTTAVTGKTVKA

SEQ ID NO: 10003 - protein, 431 aa, Moritella sp. PE36
MGFSALNLNQNLINTVTKLGYETPTPIQAQAIPAILEGRDIMGGAQTGTGKTAAFALPIIHQLMAEQLTANATEPTAKKQIRALILTPTRELSQQVHKSFVTYSEDSELTSELVYGGVSINPQVKALVQGADILVATPGRLLDLLDRETLTLEFVEKIVFDEADRMLDMGFMEEIRRILKHLPKKRQTMLFSATFDDAIFKLSKSLLNDPLLVEVDTRNAAAEQVEQIVYAVDNDRKRELTSYLIGSRNWHQVLIFTRTKQGADSLAKEMCKDGIKTIAVHGDKSQGARERGLEDFKNGKVRALVATDVAARGLDIEQLKHVINFELPFKAEDYIHRIGRTGRAGLSGTATSLVSIGENWLLEEIETLLDTRLVAQWLPGYEPDLSKPVDDGRGKGGGKGNGRTDDKRRAKNRSYGKKTNNRAKKDTKPSR

SEQ ID NO: 10004 - protein, 865 aa, Moritella sp. PE36
MSTMSLKHLVDKLNQNGKKALEGAAGLCHSRSQFTVEIEHWLLQLVENKQDDIAIICQLQGIDVQVLINELNLSLERQKTGNSAAPSLSPHIITLLRQSWLNTTIEFDEQQIRSGIILYTLLSDDSINAMLSRHIRQFERLSANLIRDNWSIITEKSAEQNGIVAVSNAGVATNSKTPSLDQFTVDLTEKARNGKMDPILGRDPEIRQMVDILTRRRQNNPILTGEAGVGKTAVVEGLAQRIVAKDVPESLQHVQLRELDLALLQAGAGMKGEFENRLKAVLNEVKQSATPIILFIDEAHTMIGAGGAAGQNDAANILKPALARGELRTIAATTWAEYKKYFEKDPALTRRFQVVKIEEPSVPTAVIMLRGILPVMEQHHDVVITADALQAAVALSKRYINGRQLPDKAVALLDSACARVAISQAATPGLVEDLQRKKAQLEAEIKLLEREQLSGEDHGDVIIALQSDLVGVEDNLVVELQAWKTQSELVQAIQQQIADIHEHGAEQEKYIRLTALKAELHEAKNTMVYWQVDEQVICEVISDWTGIPLGKMAQDELETVLNLSAEMKTRVIGQDHAIDLIARTVQISRAQLSDESKPNGIFMLTGPSGVGKTETALTLAEQVYGSEENIITINMSEYKEEHKVSLLLGSPPGYVGFGEGGVLTEAVRRNPYSVVLLDEIDKAAPGVQDIFYQIFDKGCVKDGEGRDIDFKNTIIIMTSNVGTDTITALFADPDTAPELDSLADCIKGDLMAAFKPAFLGRANIIPFVPLTDDMLSTIAQLQINRLAARIRRNHNAEFIVDNEVITQIVSRCHDVASGARTIHNYLQNTLLPEISVQVLQAMTQQTEFSQINVTTNEDNFIITLN

SEQ ID NO: 10005 - protein, 407 aa, Moritella sp. PE36
MALYVQKYGGTSVGSIERIEAVAQRVKKSCEQGNQIVVVVSAMSGETNRLLGMAKALDEHAARREMDVLVSTGEQVTIALLTIALQKAGVDAISMTGDQVQLKTDNSHGKARIKTVETENLQRHLDAGKVVVVAGFQGRDEDNNITTLGRGGSDTTAVAIAAVLKADECQIYTDVNGVYTTDPRVEPRARKLDRITFEEMLEMASLGAKVLQIRSVEFAGKYNVPLRVLSSFEEGEGTLITYEDVKKMESAIISGIAFNRDEASLTISGIPDEPLVAANILTPIGDAGIDVDVIVQNAHGKDGLVDFTFTVHRDDYQAARVLLEKTCEELSGKNVQGNDRIAKISIVGVGMWNHPGVAKTMFEVLGSEGINMQLISTSEIKISVIVDEKYLELGVRALHAAFNLDVA

SEQ ID NO: 10006 - protein, 184 aa, Moritella sp. PE36
MATAAVFLDRDGVINKDKGYVSQIDDFEFIDGSIEAMQLLKAHGYLLVVITNQSGIARGYYTEDEFMALTEWMDWSLADRGVDLDGIYYCPHHPEKGIGDYKQDCLCRKPNTGMLDSAGKELDIDFANSYLVGDKLSDIQAGLKSKLKANYLVSTGKVLCERGAEAADGVFTDLLSVAKAIVNG

SEQ ID NO: 10007 - protein, 406 aa, Moritella sp. PE36
MEIILGVVMFTVIVLALVTVILFAKSKLVSEGDITISINGDPEKSVVTGAGGKLLGSLSASGIFVSSACGGGGTCGQCRVTVKSGGGDILPTELDHISKGEAREGERLACQVSVKVDMDIELPEEIFGVKKWECEVISNDNKATFIKELKMAIPNGEVVPFRAGGYIQIEAPAHHVKYSDYDIPEEYRGDWKHFGFFDIESKVDEETIRAYSMANCPEEAGIIMLNVRIATPPPRNLSLPAGKMSSYIFSLKAGDKVTISGPFGEFFARETDNEMVFVGGGAGMAPMRSHIFDQLNRLNTDRKVSFWYGARSKREMFYVEDFDMLAKENENFEWHVALSDPQPEDNWEGYTGFIHNVILENYLADHEAPEDCEYYMCGPPMMNAAVIGMLKDLGVEDENILLDDFG

SEQ ID NO: 10008 - protein, 478 aa, Moritella sp. PE36
MSNNNESGVVTYNEVSADYLDNRQLKKGVAGWVLLASLGVSYVISGDFAGWNFGLAQGGFGGMLIATVLMGIMYTFMVFGLAELSSSLPTAGGGYSFARRAMGPWGGFLTGTAILLEYSIAPAAIAVFIGAYVNSIFGIDGPLVYAGCYIAFIGIHLLGAGEALKIMMCITGVAVIALLVFALGLIPHFDVNNLLDIAVNTEAAGATPFLPEGYIGIWSAIPFAIWLFLAVEGVPLAAEETTNPGRDMPRGIITAMVILLIFAFGVLFLAPGVAGSEMMKDHGAPLVGALQVVYGENSSIATFVNIVGLFGLIASFFSIIYAYSRQVFALSRAGYLPRFLSITGERKVPTMALIIPGIIGFLLSLTGEGDLMITMAVFGATISYALMMLSHIILRFKEPNLERPYRTPGGIFTTGIAFILSIVAFASTFLVSLEAAMWAGIFYAILVAYFAFYSRHHLVGKVPDEEFAAIAQAESELS

SEQ ID NO: 10009 - protein, 68 aa, Moritella sp. PE36
MSKVQGTVKWFNEAKGFGFIEQENGPDVFAHFSAIASEGFKTLVEGQKVEFTVGEGQKGPNAENIVAI

SEQ ID NO: 10010 - protein, 67 aa, Moritella sp. PE36
MSRGTVKWFNADKGFGFITPDEGGNDLFVHHSEIQTSGYATLEDGQKVEFEVGSGQKGPCATNVTAI

SEQ ID NO: 10011 - protein, 389 aa, Moritella sp. PE36
MKIGILGGGISGLSTAIALKQDGFDVDIYERHSRPSEIGAGIVCWPNASFVLDQLGVLSRVAKVSGSLNYMHRFSSNGEPLGSLDISQLNQLMAYPSYSIIRKDLMSILTQRAVELSINIHYQHDVTSLSNNDDDKVRVQFSNGKNIEPDIIVGTDGRMNSFARKYVNGNNEPVYQGFINWIGVFECKNEIFTELSVLDYLGVGERFGIVPVSKTKAYWAGGVVSPNIGEPTPELYKSELRSLFTSWPDPICKIINETPLSRINKIYVHDHNPIKIWHKNNLVLLGDAAHSALPTSGQGACQALEDAWHFVNCLKENINDISKVFKHFTELRMAKTSKITMGGRQVASSIFNQDQEFCKHRNLASKNMDHKSTVIGIAKLWTNGLPISV

SEQ ID NO: 10012 - protein, 357 aa, Moritella sp. PE36
MSKEKFLFIDRDGTLIDEPISDKQVDSLEKLKFEPFVIPALLKLQNAGYTLVIVSNQDGLGTDSYPQSDFDIPQNAMMALFASQGVKFESVLLCPHFTEDNCNCRKPHLGMVKEYLQSGRIDFANSYVIGDRITDIQLAENMGIEGIFYNRDNLNWPMIEQQILNKGNRVASVTRTTKETNIQVDVDLDSQGGNVIDTGMGFFDHMLDQIATHGGFQLKLSVTGDLHIDDHHTVEDTALALGNAIKQALGDKRGIGRFGFVLPMDECEASCSLDLSGRAYLKFNADFPRDHIGEFATEMVPHFFHSLSDGMAATLHLKVEGKNTHHLVESLFKVFGRTLRQCIKVEGDVLPSSKGVL

SEQ ID NO: 10013 - protein, 530 aa, Moritella sp. PE36
MQVNACQTGEDVPVTTTTSERRKSDQLVPALTIGFISLFLLAAIIDLPRFTTLIQDLFSAAAGQFGYFWQWLMVANFAVALCIAATRYGKTRMGLKTKPEIGTFRWLAMIMCTLLAGGGVFWSAAEPIYHFITPSASYPDITGSTVEAVVPALSQSFLHWGFLAWSVLGTLATIVLMYAHHHHGIKLRPRALLFPIVGNRLENHWFGAVIDACSIIAVAAGTIGPIGFLASQMGYSLEVLTGLKNDMNSQLMILAVVVLICALSAASGMDKGLQWLSRLNVIGAFALLLAILILGPTQFIFEQFGRAFGTYLQDMPTMSVTTDNPGWNIWWTWFFWGWFIGFAPMMAIFIARISEGRTIRELVLAVAVGAPIATNFWFAVLGGTGIFFELQTPGIISGPLAEAGLPAVLLATLQQLPLSEILLPAFLILTTTFVVTTGDSMAYSIAMVVSGDNEPDRKQRLFWAIIMGCVAAALLLAGDGGLNALQSFIVITAVPVSFLIAITLVTGPMAAIKMTHAQEALAAEKELAQA

SEQ ID NO: 10014 - protein, 595 aa, Moritella sp. PE36
MSSLLTDKTSATQSFTSLLPIFAFIKPYKLMVFYALLALLVTAAVNLSLGQGVKFVIDNGFIAGSESQLQSAIIVLVMLITLLAIGTFSRFYLMSWLGERVSADIRKAVFNQVIKLHPSYFEENRSGEIMSRLTTDTTLLQSIIGSSLSMALRSVLMLIGGLIMLLVTNINLTLWVVASVPFILVPILIYGKKVRLLAASSQDAIADIGTYAGEIIQNIKVVQSYTHEDTEQASFANEVENAFSVAKNRIKQRSLLIAIVIFLTFGAISIMLWIGGMDVLNGKMTGGELGAFVFYAVMVAMSVATISEVYGELQRAAGSATRLLELLEVTSKIQSPEVPKQIINDHVNIIEFKNLDFYYPSRPNTAALKAINLKIPKGKVIALVGPSGAGKTTLFELLQRFYDPQRGEVLFNNININELELNEVRKRMGMVPQHPVLFSSDVWHNIRYGDPSASDEAVIKAAKLAHAHEFIEQLPEGYSSFLGEQGVRLSGGQKQRVALARAILKDPEVLLLDEATSALDAESEHHVQAALEELMLNRTTLIIAHRLSTVINADLILLMDKGEVIAQGTHNELIESSALYRRLCELQFDNVANRA

SEQ ID NO: 10015 - protein, 317 aa, Moritella sp. PE36
METIVFLDRSTIPEHITIPQPNVDCQWQEYATTTPEQVIERLQGASIVITNKVILDAQVLSQCPQLKMIAVAATGTNNIDLEYCRQHKITVSNIQDYATNSVPEHVVAMMFALKRNLVGYHKDIQAGVWQQQKQFCFFSHPISDIAGSTLGIIGKGSLGNAVATLAKALGMTVMFAERKGANQCREGYSPFELVLKQADVLTLHCPLAEQTNHLIGREEFKLMKNTSVLINAGRGGLVDEVALIDALHNQQIAGAGVDVFTQEPADDSNPLIANAHLPNLILTPHVAWGSDSAIQTLANQLINNIEQFIAGKPQNQV

SEQ ID NO: 10016 - protein, 404 aa, Moritella sp. PE36
MKMTQTVKKIVVAYSGGLDTSVILPWLQENYDNCEIIAFVADVGQGAEELEGIEAKALASGASECYVVDLKDELVANYIYPTLKTGAVYEGTYLLGTSMARPIIAKAQVEIARKVGADALCHGCTGKGNDQIRFESCFAALAPELTVIAPWRIWDLTSRESLLEYLAERDIPTAASATKIYSRDANAWHISHEGGELEDPWNQPTKQVWTMTVDPIDAPNEPEFLTLSVVKGEITAVNGEEMSPYNTLMYLNEKAAAHGIGRVDIVENRLVGMKSRGCYETPGGTVMVEALRGIEELVLDKTTRKWKQTVAAEFSHLVYDGRWFTPLCASLLAAAGTLAEDMNGEVIVKMYKGSVQAVQKQSPNSLYSEEFATFGDDNVYDQSHAEGFIRLYSLSSRIKALASK

SEQ ID NO: 10017 - protein, 807 aa, Moritella sp. PE36
MDAVKRSIHKFGGSSLADATCYRRVSAIISEHTQARDLIVVSAAGKTTNQLIELLQLAEDGDQAASERLIATCEYQAKLIAELLADDLCIQLTAALQDDIHTIGHLLEAHLDVYAKNQILAHGEVWSARLLAALLSQSELPANDLDSRLFLTTELAAQPVVDEMVSRQKLTACLANLHNRVVVTGFIAADGQLRTVTLGRNGSDYSATLLGALVDAEQTTIWSDVAGIFSADPRRVKDAELQTKLSLDEAAELARLGSPVLHARTLQPVVESKQHVQLRCSYTPSEGSTQIHRRLPKGKGAKIVTSVDDLHLIDIEFDQHADYQQQYNQLITLLAQQQLSPICIKRRPTEHVVRLGYTAEIVEFALTALQTYQLQQPQVRAINLLSGFCMVALVGSGVTENALQSHQFYQLISEHNLTFVQTGDNRLSICAVLQKVVLEPLLKELHTALFKQPKRIGVVLFGKGNIGAGWLSLFAKQTHKLPEQQNVDLCLCGVYGSQGGVLDFNGLDAATVLDAFQPESFVWEQLLSNLALHPFDELVIIDITASEAISYYYPEFAQHGFHLISANKFAGAASSEFYHRVKQSFSDNESHWLYNATVGAGLPIQSSMEMLQHSGDQVTAVSGIFSGTLSWLFQQYDGQIAFSQLVEQAWQQGLTEPDPREDLSGKDVQRKLLILSREAGYDMELSDIKLESLVSAELMAFKVDEFLEHCEALDDKILHMFNKAKKQGLVLRYVARFSRKEGAQVGLEFLEPTHPFANLLPCDNIFSINSHWYRHNPLVIQGPGAGRDVTAGAIQADLFQLCKLLAR

SEQ ID NO: 10018 - protein, 350 aa, Moritella sp. PE36
MLVKRELETHDSMSFTFAAADQAQFDFKPGQFVTLAVNIDGKTHYRAYSISSVPQQKQLRLTIKRVPDGLVSNWLADNLTIGDSLSALNIAGQFNSSDCKHKPKLLLISAGCGITPVMSIAKTLLAHNSDADIEFLHCARDKDNVIFHDEMQTLLAQHKNFNVQLLLENSDGFASFSANTDNPSLSHQTGMVSSEVIQQLYPDLKQRTIFLCGPVGFMKAVENIAQESDFDMANFFQESFTPAADNKQQDQLSLKVSGVSDVATVMLYVPDFSVEKKVVQGSSLLELLENNGVPIIGACRAGVCGSCKCKITKGEVKSTSSETLTAAEIEQGFVLACSSTVDGDLTVALS

SEQ ID NO: 10019 - protein, 109 aa, Moritella sp. PE36
METLDKIKQQLAENSIILYMKGSPKLPSCGFSSQASQAVINCGEQFAYVDILQNPDIRAELPKYANWPTFPQLWVDGELVGGCDIIMEMFQQGELQPLIAAAAEKAKAE

SEQ ID NO: 10020 - protein, 389 aa, Moritella sp. PE36
MRDVVVIDCLRTPMGRSKAGAFRHVRAEDLSAKLMKGLLDRNPKVDPNDIEDVYWGCVQQTLEQGFNIARNASLLAGIPITAGATTVNRLCGSSMQAIHDATRAIAMGDGDVMIIGGVEHMGHVPMNHGVDFHVGLAKSTAKAAGMMGLTAEMLGKMHGITREQQDAFAVRSHKLAQAATVSGRFKREILPIEGHDADGVLKLYDFDEVIRPETTMESLAGLRPVFDPVNGTVTAGTSSALSDGASAMLLMSADKAKELGLKPRARIVSMAVAGCDPSIMGYGPVPATKKALKRAGLTIDDIDVFELNEAFAAQSLPCVKDLGLEDVVDTKVNLNGGAISLGHPLGCSGSRISTTLVNELEVQGGRYGLATMCIGLGQGIATIFERIED

SEQ ID NO: 10021 - protein, 189 aa, Moritella sp. PE36
MDINSLTSRFVLSPLSAPESKFSKFFTPAAVLFPIVERDQQLNLILTRRASHLRHHSGQIALPGGKTEKTDSSSIATALRETHEEIGIPADKITVLGTLPSRPTISRYYVTPVVALIDSDYQSKIDPNEVEEVFEVPLSFLLDDDNHIIEKSLFKGKYREVTFMPWGKYPIWGTTAAIIKDFSKHIRSN

SEQ ID NO: 10022 - protein, 389 aa, Moritella sp. PE36
MKFVDETRIKVEAGDGGSGCVSFRREKYVARGGPDGGDGGDGGHVYMIADENLNTLVDFRFVRFHKAERGENGRAKDQTGARGEDITLRVPVGTRVADDDTGEVIADLVMHGQRQMVAKAGFHGLGNTRFKSSVNRAPRQKTLGTPGEVRSLRLELMLLADVGLLGLPNAGKSTFIRAISAAKPKVANYPFTTLVPNLGVVSAGPERSFVVADIPGLIEGASDGAGLGIRFLRHLERCRLMVHIVDLLPEDISDPAENAKVIVSELKKYSEKLAAKTCWLVFNKTDLVLEDEANETIKRVVEAINWEGEVYTMSASSGVGTKDLVRAMMEQIESLPRPKIEMPVEDDGDVGFLWDEYHKDQIANHAVIEEDDDDWDDWDEHPNTVYVQD

SEQ ID NO: 10023 - protein, 198 aa, Guazuma ulmifolia
CPVKKKVERSFDGQIAEIVYKGEHNHSKPQPPKRNSSGTQGLGFSSDGTAQDTTNNSLWSNNPNERNEGSEGRVEHQNEVGLSAPPPYQRKAAVLPYEHVTTGAVNAGVTPENSIGISGECEERSKEGEEDEPRSKRRKSENQSSEVGTSGEGIQEPRVVVQSSTDSEIMGDGFRWRKYGQKVVKGNPYPRSYYRCTS

SEQ ID NO: 10024 - protein, 196 aa, Herrania albiflora
CPVKKKVERSFDGQIAEIVYKGEHNHSKPQPPKRNSSGTQGLGSASDGTGQDTNNSLWSNNPNERNEGSDGRVENQNEVGLSAPPSYQGKAVLSYEHVSTGAVNAGVTSENSIGLSGECEEQSKEGEDDEPRSKRRKGENQSSEVGTSGEGIQEPRVVVQSCTDSEIMGDGFRWRKYGQKVVKGNPYPRSYYRCTS

SEQ ID NO: 10025 - protein, 196 aa, Herrania cuatrecasana
CPVKKKVERSFDGQIAEIVYKGEHNHSKPQPPKRNSSGTQGLGFASDGTGQDTNNSLWSNNPNERNEGSEGRVENQNEVGLSAPPSYQGKAVLSYEHVSTGAVNAGVTSENSIGLSGECEERSKEGEDDEPRSKRRKGENQSSEVGTSGEGIQEPRVVVQSCTDSEIMGDGFRWRKYGQKVVKGNPYPRSYYRCTS

SEQ ID NO: 10026 - protein, 196 aa, Herrania kanukuensis
CPVKKKVERSFDGQIAEIVYKGEHNHSKPQPPKRNSSGTQGLGFASDGTGQDTNNSLWSNNPNERNEGSEGRVENQNEVGLSAPSSYQGKAVLSYEHVSTGAVNAGVTSENSIGLSGECEERSKEGEDDEPRSKRRKGENQSSEVGTSGEGIQEPRVVVQSCTDSEIMGDGFRWRKYGQKVVKGNPYPRSYYRCTS

SEQ ID NO: 10027 - protein, 196 aa, Herrania nitida
  misc_feature (6)..(6): Xaa can be any naturally occurring amino acid
  misc_feature (10)..(10): Xaa can be any naturally occurring amino acid
  misc_feature (25)..(25): Xaa can be any naturally occurring amino acid
  misc_feature (70)..(70): Xaa can be any naturally occurring amino acid
  misc_feature (90)..(90): Xaa can be any naturally occurring amino acid
  misc_feature (115)..(115): Xaa can be any naturally occurring amino acid
  misc_feature (133)..(133): Xaa can be any naturally occurring amino acid
  misc_feature (152)..(152): Xaa can be any naturally occurring amino acid
  misc_feature (191)..(191): Xaa can be any naturally occurring amino acid
  unsure (1)..(196): unsure at all Xaa locations
CPVKKXVERXFDGQIAEIVYKGEHXHSKPQPPKRNSSGTQGLGFASDGTGQDTNNSLWSNNPNERNEGSXGRVENQNEVGLSAPPSYQGXAVLSYEHVSTGAVNAGVTSENSIGXSGECEERSKEGEDDEPRXKRRKGENQSSEVGTSGEGXQEPRVVVQSCTDSEIMGDGFRWRKYGQKVVKGNPYPRSXYRCTS

SEQ ID NO: 10028 - protein, 195 aa, Theobroma angustifolium
CPVKKKVERSFDGQIAEIVYKGEHNHSKPQPPKRNSSGTQGLGFTSDGTGQDTNNSLWSNNPNERNEGSEGRVENQNEVRLSAPPSYQGKAVLSYEHATTGAVNAGVTSENSIGLSGECEERSKEGEDEPRSKRRKSENQSSEVGTSGDGVQEPRVVVQSCTESEIMGDGFRWRKYGQKVVKGNSYPRSYYRCTS

SEQ ID NO: 10029 - protein, 196 aa, Theobroma bicolor
CPVKKKVERSFDGQIAEIVYKGEHNHSKPQPPKRNSSGIQGLGFTSDGTGQDTNNSLWSNNPKERNEGSEGRVENQNEVGLSAPPSYQGKAVLSYEHVTTGAVNAGVTSENSIGLSGECEERSKEGEDDEPRSKRRKSENQSSEVGTSGEGIQEPRVVVQSCTDSEVMGDGFRWRKYGQKVVKGNPYPRSYYRCTS

SEQ ID NO: 10030 - protein, 196 aa, Theobroma chocoense
CPVKKKVERSFDGQIAEIVYKGEHNHSKPQPPKRNSSGTQGLGFTSDGTGQDTNNSLWSNNPNERNEGSEGRVENQNEVRLSAPPSYQGKAVLSYEHATTGAVNAGVTSENSIGLSGECEERSKEGEDDEPRSKRRKSENQSSEVGTSGEGVQEPRVVVQSCTESEIMGDGFRWRKYGQKVVKGNPYPRSYYRCTS

SEQ ID NO: 10031 - protein, 196 aa, Theobroma gileri
CPVKKKVERSFDGQIAEIVYKGEHNHSKPQPPKRNSLGTQGLGFTSDGTGQDTNNSLSSNNPNERNEGSEGRVENQNEVGLSAPPSYQGKAVLSYEHVSTGAVNAGVTSENSIGLSGECEERSKEGEDDEPRSKRRKSENQSSEVGTSGEGIQEPRVVVQSCTDSEIMGDGFRWRKYGQKVVKGNPYPRSYYRCTS

SEQ ID NO: 10032 - protein, 196 aa, Theobroma grandiflorum
CPVKKKVERSFDGQIAEIVYKGEHNHSKPQPPKRNSSGTQGLGFTSDGTGQDTNNSLWSNNPNERNEGSEGRVENQNEVGLSAPPSYQGKAVLSYEHATTGAVNAGVTSENSIGLSGECEERSKEGEDDEPRSKRRKSENQSSEVGTSGEGVQEPRVVVQSCTESEIMGDGFRWRKYGQKVVKGNPYPRSYYRCTS

SEQ ID NO: 10033 - protein, 195 aa, Theobroma mammosum
CPVKKKVERSFDGQIAEIVYKGEHNHSKPQPPKRNSSGTQGLGFTSDGTGQDTNNSLWSNNPNERNEGSEGRVENQNEVRLSAPPSYQGKAVLSYEHATTGAVNAGVTSENSIGLSGECEERSKEGEDEPRSKRRKSENQSSEVGTSGDGVQEPRVVVQSCTESEIMGDGFRWRKYGQKVVKGNPYPRSYYRCTS

SEQ ID NO: 10034 - protein, 196 aa, Theobroma microcarpum
CPVKKKVERSFDGQIAEIVYKGEHNHSKPQPPKRNSSGTQGLGFTSDGTGQDTNNSLWSNNPNERNEGSEGRVENQNEVGLSAPPSYQGKAVLSYEHVTTGAVNAGVTSENSIGLSGECEERSKEGEDDEPRSKRRKSENQSSEVGTSGEGIQEPRVVVQSCTDSEIMGDGFRWRKYGQKVVKGNPYPRSYYRCTS

SEQ ID NO: 10035 - protein, 192 aa, Theobroma speciosum
  misc_feature (5)..(5): Xaa can be any naturally occurring amino acid
  unsure (1)..(192): unsure at all Xaa locations
CPVKXKVERSFDGQIAEIVYKGEHNHSKPQPPKRNPSGTQGLGFTSDGTGQDTNNSLWSNNPNERNEGSEGRVENQNEVGLSAPPSYQGKAVLSYEHVTTGAVNAGVTSENSIGLSGECEERSKEGEDDEPRSKRRKSENQSSEVGTSGEGIQEPRVVVQSCTDSEIMGDGFRWRKYGQKVVKGNPYPRSYY

SEQ ID NO: 10036 - protein, 196 aa, Theobroma velutinum
CPVKKKVERSFDGQIAEIVYKGEHNHSKPQPPKRNPSGTQGLGFTSDGTGQDTNNSLWSNNPNERNEGSEGRVENQNEVGLSAPPSYQGKAVLSYEHVTTGAVNAGVTSENSIGLSGECEERSKEGEDDEPRSKRRKSENQSSEVGTSGEGIQEPRVVVQSCTDSEIMGDGFRWRKYGQKVVKGNPYPRSYYRCTS

SEQ ID NO: 10037 - protein, 933 aa, Arabidopsis thaliana
MKHIFKKLHRGGNQEQQNRTNDAAPPSDQNRIHVSANPPQATPSSVTETLPVAGATSSMASPAPTAASNRADYMSSEEEYQVQLALAISASNSQSSEDPEKHQIRAATLLSLGSHQRMDSRRDSSEVVAQRLSRQYWEYGVLDYEEKVVDSFYDVYSLSTDSAKQGEMPSLEDLESNHGTPGFEAVVVNRPIDSSLHELLEIAECIALGCSTTSVSVLVQRLAELVTEHMGGSAEDSSIVLARWTEKSSEFKAALNTCVFPIGFVKIGISRHRALLFKVLADSVRLPCRLVKGSHYTGNEDDAVNTIRLEDEREYLVDLMTDPGTLIPADFASASNNTVEPCNSNGNKFPTAQFSNDVPKLSEGEGSSHSSMANYSSSLDRRTEAERTDSSYPKVGPLRNIDYSFPSSVTSSTQLENNSSTAIGKGSRGAIIECSRTNMNIVPYNQNSEEDPKNLFADLNPFQNKGADKLYMPTKSGLNNVDDFHQQKNNPLVGRSPAPMMWKNYSCNEAPKRKENSYIENLLPKLHRDPRYGNTQSSYATSSSNGAISSNVHGRDNVTFVSPVAVPSSFTSTENQFRPSIVEDMNRNTNNELDLQPHTAAVVHGQQNDESHIHDHRKYTSDDISTGCDPRLKDHESTSSSLDSTSYRNDPQVLDDADVGECEIPWNDLVIAERIGLGSYGEVYHADWHGTEVAVKKFLDQDFSGAALAEFRSEVRIMRRLRHPNVVFFLGAVTRPPNLSIVTEFLPRGSLYRILHRPKSHIDERRRIKMALDVAMGMNCLHTSTPTIVHRDLKTPNLLVDNNWNVKVGDFGLSRLKHNTFLSSKSTAGTPEWMAPEVLRNEPSNEKCDVYSFGVILWELATLRLPWRGMNPMQVVGAVGFQNRRLEIPKELDPVVGRIILECWQTDPNLRPSFAQLTEVLKPLNRLVLPTPQ

SEQ ID NO: 10038 - protein, 933 aa, Arabidopsis thaliana
MKHIFKKLHRGGNQEQQNRTNDAAPPSDQNRIHVSANPPQATPSSVTETLPVAGATSSMASPAPTAASNRADYMSSEEEYQVQLALAISASNSQSSEDPEKHQIRAATLLSLGSHQRMDSRRDSSEVVAQRLSRQYWEYGVLDYEEKVVDSFYDVYSLSTDSAKQGEMPSLEDLESNHGTPGFEAVVVNRPIDSSLHELLEIAECIALGCSTTSVSVLVQRLAELVTEHMGGSAEDSSIVLARWTEKSSEFKAALNTCVFPIGFVKIGISRHRALLFKVLADSVRLPCRLVKGSHYTGNEDDAVNTIRLEDEREYLVDLMTDPGTLIPADFASASNNTVEPCNSNGNKFPTAQFSNDVPKLSEGEGSSHSSMANYSSSLDRRTEAERTDSSYPKEGPLRNIDYSSPSSVTSSTQLENNSSTAIGKGSRGAIIECSRTNMNIVPYNQNSEEDPKNLFADLNPFQNKGADKLYMPTKSGLNNVDDFHQQKNNPLVGRSPAPMMWKNYSCNEAPKRKENSYIENLLPKLHRDPRYGNTQSSYATSSSNGAISSNVHGRDNVTFVSPVAVPSSFTSTENQFRPSIVEDMNRNTNNELDLQPHTAAVVHGQQNDESHIHDHRKYTSDDISTGCDPRLKDHESTSSSLDSTSYRNDPQVLDDADVGECEIPWNDLVIAERIGLGSYGEVYHADWHGTEVAVKKFLDQDFSGAALAEFRSEVRIMRRLRHPNVVFFLGAVTRPPNLSIVTEFLPRGSLYRILHRPKSHIDERRRIKMALDVAMGMNCLHTSTPTIVHRDLKTPNLLVDNNWNVKVGDFGLSRLKHNTFLSSKSTAGTPEWMAPEVLRNEPSNEKCDVYSFGVILWELATLRLPWRGMNPMQVVGAVGFQNRRLEIPKELDPVVGRIILECWQTDPNLRPSFAQLTEVLKPLNRLVLPTPQ

SEQ ID NO: 10039 - protein, 933 aa, Arabidopsis thaliana
MKHIFKKLHRGGNQEQQNRTNDAAPPSDQNRIHVSANPPQATPSSVTETLPVAGATSSMASPAPTAASNRADYMSSEEEYQVQLALAISASNSQSSEDPEKHQIRAATLLSLGSHQRMDSRRDSSEVVAQRLSRQYWEYGVLDYEEKVVDSFYDVYSLSTDSAKQGEMPSLEDLESNHGTPGFEAVVVNRPIDSSLHELLEIAECIALGCSTTSVSVLVQRLAELVTEHMGGSAEDSSIVLARWTEKSSEFKAALNTCVFPIGFVKIGISRHRALLFKVLADSVRLPCRLVKGSHYTGNEDDAVNTIRLEDEREYLVDLMTDPGTLIPADFASASNNTVEPCNSNGNKFPTVQFSNDVPKLSEGEGSSHSSMANYSSSLDRRTEAERTDSSYPKVGPLRNIDYSSPSSVTSSTQLENNSSTAIGKGSRGAIIECSRTNMNIVPYNQNSEEDPKNLFADLNPFQNKGADKLYMPTKSGLNNVDDFHQQKNNALVGRSPAPMMWKNYSCNEAPKRKENSYIENLLPKLHRDPRYGNTQSSYATSSSNGAISSNVHGRDNVTFVSPVAVPSSFTSTENQFRPSIVEDMNRNTNNELDLQPHTAAVVHGQQNDESHIHDHRKYTSDDISTGCDPRLKDHESTSSSLDSTSYRNDPQVLDDADVGECEIPWNDLVIAERIGLGSYGEVYHADWHGTEVAVKKFLDQDFSGAALAEFRSEVRIMRRLRHPNVVFFLGAVTRPPNLSIVTEFLPRGSLYRILHRPKSHIDERRRIKMALDVAMGMNCLHTSTPTIVHRDLKTPNLLVDNNWNVKVGDFGLSRLKHNTFLSSKSTAGTPEWMAPEVLRNEPSNEKCDVYSFGVILWELATLRLPWRGMNPMQVVGAVGFQNRRLEIPKELDPVVGRIILECWQTDPNLRPSFAQLTEVLKPLNRLVLPTPQ

SEQ ID NO: 10040 - protein, 933 aa, Arabidopsis thaliana
MKHIFKKLHRGGNQEQQNRTNDAAPPSDQNRIHVSANPPQATPSSVAETLPVTGATSSMACPAPTAASNRADYMSSEEEYQVQLALAISASNSQSSEDPEKHQIRAATLLSLGSHQRMDSRRDSSEVVAQRLSRQYWEYGVLDYEEKVVDSFYDVYSLSTDSAKQGEMPSLEDLESNHGTPGFEAVVVNRPIDSSLHELLEIAECIALGCSTTSVSVLVQRLAELVTEHMGGSAEDSSIVLARWTEKSSEFKAALNTCVFPIGFVKIGISRHRALLFKVLADSVRLPCRLVKGSHYTGNEDDAVNTIRLEDEREYLVDLMTDPGTLIPADFASASNNTVEPCNSNGNKFPTAQFSNDVPKLSEGEGSSHSSMANYSSSLDRRTEGERTDSSYPKVGPLRNIDYSSPASVTSSTQLENNSSTAIGKGSRGAIIECSRTNMNIVPYNQNSEEDPKNLFADLNPFQNKGADKLYMPTKSGLNNVDDFHQQKNNPLVGRSPAPMMWKNYSCNEAPKRKENSYIENLLPKLHRDPRYGNTQSSYATSSSNGAISSNVPGRDNVTFVSPVAVPSSFTSTENQFRPSIVEDMNRNTNNELDLQPHTAAVVHGQQNDESHIHDHRKYTSDDISAGCDPRLKDHESTSSSLDSTSYRNDPQVLDDADVGECEIPWNDLVIAERIGLGSYGEVYHADWHGTEVAVKKFLDQDFSGAALAEFRSEVRIMRRLRHPNVVFFLGAVTRPPNLSIVTEFLPRGSLYRILHRPKSHIDERRRIKMALDVAMGMNCLHTSTPTIVHRDLKTPNLLVDNNWNVKVGDFGLSRLKHNTFLSSKSTAGTPEWMAPEVLRNEPSNEKCDVYSFGVILWELATLRLPWRGMNPMQVVGAVGFQNRRLEIPKELDPVVGRIILECWQTDPNLRPSFAQLTEVLKPLNRLVLPTPQ

SEQ ID NO: 10041 - protein, 933 aa, Arabidopsis thaliana
MKHIFKKLHRGGNQEQQNRTNDAAPPSDQNRIHVSANPPQATPSSVAETLLVTGATSSMASPAPTAASNRADYMSSEEEYQVQLALAISASNSQSSEDPEKHQIRAATLLSLGSHQRMDSRRDSSEVVAQRLSRQYWEYGVLDYEEKVVDSFYDVYSLSTDSAKQGEMPSLEDLESNHGTPGFEAVVVNRPIDSSLHELLEIAECIALGCSTTSVSVLVQRLAELVTEHMGGSAEDSSIVLARWTEKSSEFKAALNTCVFPIGFVKIGISRHRALLFKVLADSVRLPCRLVKGSHYTGNEDDAVNTIRLEDEREYLVDLMTDPGTLIPADFASASNNTVEPCNSNGNKFPTAQFSNDVPKLSEGEGSSHSSMANYSSSLDRRTEAERTDSSYPKVGPLRNIDYSSPASVTSSTQLENNSSTAIGKGSRGAIIECSRTNMNIVPYNQNSEEDPKNLFADLNPFQNKGADKLYMPTKSGLNNVDDFHQQKNNPLVGRSPAPMMWKNYSCNEAPKRKENSYIENLLPKLHRDPRYGNTQSSYATSSSNGAISSNVPGRDNVTFVSPVAVPSSFTSTENQFRPSIVEDMNRNTNNELDLQPHTAAVVHGQQNDESHIHDHRKYTSDDISAGCDPRLKDHESTSSSLDSTSYRNDPQVLDDADVGECEIPWNDLVIAERIGLGSYGEVYHADWHGTEVAVKKFLDQDFSGAALAEFRSEVRIMRRLRHPNVVFFLGAVTRPPNLSIVTEFLPRGSLYRILHRPKSHIDERRRIKMALDVAMGMNCLHTSTPTIVHRDLKTPNLLVDNNWNVKVGDFGLSRLKHNTFLSSKSTAGTPEWMAPEVLRNEPSNEKCDVYSFGVILWELATLRLPWRGMNPMQVVGAVGFQNRRLEIPKELDPVVGRIILECWQTDPNLRPSFAQLTEVLKPLNRLVLPTPQ

SEQ ID NO: 10042 - protein, 933 aa, Arabidopsis thaliana
MKHIFKKLHRGGNQEQQNRTNDAAPPSDQNRIHVSANPPQATPSSVTETLPVAGATSSMASPAPTAASNRADYMSSEEEYQVQLALAISASNSQSSEDPEKHQIRAATLLSLGSHQRMDSRRDSSEVVAQRLSRQYWEYGVLDYEEKVVDSFYDVYSLSTDSAKQGEMPSLEDLESNHGTPGFEAVVVNRPIDSSLHELLEIAECIALGCSTTSVSVLVQRLAELVTEHMGGSAEDSSIVLARWTEKSSEFKAALNTCVFPIGFVKIGISRHRALLFKVLADSVRLPCRLVKGSHYTGNEDDAVNTIRLEDEREYLVDLMTDPGTLIPADFASASNNTVEPCNSNGNKFPTAQFSNDVPKLSEGEGSSHSSMANYSSSLDRRTEAERTDSSYPKVGPLRNIDYSSPSSVTSSTQLENNSSTAIGKGSRGAIIECSRTNMNIVPYNQNSEEDPKNLFADLNPFQNKGADKLYMPTKSGLNNVDDFHQQKNNPLVGRSPAPMMWKNYSCNEAPKRKENSYIENLLPKLHRDPRYGNTQSSYATSSSNGAISSNVHGRDNVTFVSPVAVPSSFTSTENQFRPSIVEDMNRNTNNELDLQPHTAAVVHGQQNDESHIHDHRKYTSDDISTGCDPRLKDHESTSSSLDSTSYRNDPQVLDDADVGECEIPWNDLVIAERIGLGSYGEVYHADWHGTEVAVKKFLDQDFSGAALAEFRSEVRIMRRLRHPNVVFFLGAVTRPPNLSIVTEFLPRGSLYRILHRPKSHIDERRRIKMALDVAMGMNCLHTSTPTIVHRDLKTPNLLVDNNWNVKVGDFGLSRLKHNTFLSSKSTAGTPEWMAPEVLRNEPSNEKCDVYSFGVILWELATLRLPWRGMNPMQVVGAVGFQNRRLEIPKELDPVVGRIILECWQTDPNLRPSFAQLMEVLKPLNRLVLPTPQ

SEQ ID NO: 10043 - protein, 933 aa, Arabidopsis thaliana
MKHIFKKLHRGGNQEQQNRTNDAAPPSDQNRIHVSANPPQATPSSVTETLPVAGATSSMASPAPTAASNRADYMSSEEEYQVQLALAISASNSQSSEDPEKHQIRAATLLSLGSHQRMDSRRDSSEVVAQRLSRQYWEYGVLDYEEKVVDSFYDVYSLSTDSAKQGEMPSLEDLESNHGTPGFEAVVVNRPIDSSLHELLEIAECIALGCSTTSVSVLVQRLAELVTEHMGGSAEDSSIVLARWTEKSSEFKAALNTCVFPIGFVKIGISRHRALLFKVLADSVRLPCRLVKGSHYTGNEDDAVNTIRLEDEREYLVDLMTDPGTLIPADFASASNNTVEPCNSNGNKFPTVQFSNDVPKLSEGEGSSHSSMANYSSSLDRRTEAERTDSSYPKVGPLRNIDYSSPSSVTSSTQLENNSSTAIGKGSRGAIIECSRTNMNIVPYNQNSEEDPKNLFADLNPFQNKGADKLYMPTKSGLNNVDDFHQQKNNPLVGRSPAPMMWKNYSCNEAPKRKENSYIENLLPKLHRDPRYGNTQSSYATSSSNGAISSNVHGRDNVTFVSPVAVPSSFTSTENQFRPSIVEDMNRNTNNELDLQPHTAAVVHGQQNDESHIHDHRKYTSDDISTGCDPRLKDHESTSSSLDSTSYRNDPQVLDDADVGECEIPWNDLVIAERIGLGSYGEVYHADWHGTEVAVKKFLDQDFSGAALAEFRSEVRIMRRLRHPNVVFFLGAVTRPPNLSIVTEFLPRGSLYRILHRPKSHIDERRRIKMALDVAMGMNCLHTSTPTIVHRDLKTPNLLVDNNWNVKVGDFGLSRLKHNTFLSSKSTAGTPEWMAPEVLRNEPSNEKCDVYSFGVILWELATLRLPWRGMNPMQVVGAVGFQNRRLEIPKELDPVVGRIILECWQTDPNLRPSFAQLTEVLKPLNRLVLPTPQ

SEQ ID NO: 10044 - protein, 935 aa, Arabidopsis lyrata
MKHIFKKLHRGGNQEQQNRTNDALPPSDQNRNHVAPQATPSSVAETLPVTGATSSMASHSPTAASNRADYMSSEEEYQVQLALAISASNSQSSEDPEKHQIRAATLLSLGSHQRMDSKRDSSEVLAQRLSRQYWEYGVLDYEEKVVDSFYDVYSLSTDSAKQGEMPSLEDLESNHGTPGFEAVVVNRPIDPSLRELLEIAECIAVDCPTTSVSVLVQRLAELVTEHMGRSAEDSNIVLAKWTDKSSEFKAALNTCVFPIGFVDIGISRHRALLFKVLADSVGLPCRLVKGSHYTGNEDDAVNTIRLEDEREYLVDLMTDPGTLIPADFASARDNTVEPYNSNGNKFPTAQLSNDFRHSAPKLSEGEGSSLSSMADNNSPLGRRTEAEKTDSSYPKLGPLRNVDLSTSPSSVTSSTQLENISSTAIAKGSRGAINDCSRTNMNIVPYNQNSEEDPKNLFADLNPFQNKGADKLFMPTKSGLNNVDDFHQQKNNPLVGRSPAPMMWKNYSCNEAPKRKENSYMENLLPKVHREPRYGNTHSSYATSSSNGAVSSNVPCRDNVTFVSPVAAPSSFTSTENQFTPSIAGDMNRNTNNELDLQPNTAAVVHGHQKDESHIHDHRKYTSDDMSTGCDSRLKDHESTSSSLDSTSYRNDPQVLDDADVGECEIPWNDLVIGERIGLGSYGEVYHADWHGTEVAVKKFLDQDFSGAALAEFRSEVRIMRRLRHPNVVFFLGAVTRPPNLSIVTEFLPRGSLYRILHRPKSHIDERRRIKMALDVAMGMNCLHTSTPTIVHRDLKTPNLLVDNNWNVKVGDFGLSRLKHNTFLSSKSTAGTPEWMAPEVLRNEPSNEKCDVYSFGVILWELATLRLPWRGMNPMQVVGAVGFQNRRLEIPKELDPVVGRIILECWQTDPNLRPSFAQLTEVLKPLNRLVLPSPQ

SEQ ID NO: 10045 - protein, 935 aa, Arabidopsis lyrata
MKHIFKKLHRGGNQEQQNRTNDALPSSDQNRNHVAPQATPSSVAETLPVTGATSSMASHSPTAASNRADYMSSEEEYQVQLALAISASNSQSSEDPEKHQIRAATLLSLGSHQRMDSKRDSSEVLAQRLSRQYWEYGVLDYEEKVVDSFYDVYSLSTDSAKQGEMPSLEDLESNHGTPGFEAVVVNRPIDPSLRELLEIAECIAVDCPTTSVSVLVQRLAELVTEHMGRSAEDSNIVLAKWTDKSSEFKAALNTCVFPIGFVDIGISRHRALLFKVLADSVGLPCRLVKGSHYTGNEDDAVNTIRLEDEREYLVDLMTDPGTLIPADFASARDNTVEPYNSNGNKFPTAQLSNDFRHSAPKLSEGEGSSQSSVADNNSPLGRRTEAEKTDSSYPKLGPLRNVDLSTSPSSVTSSTQLENISSTAIAKGSRGAINDCSRTNMNIVPYNQNSEEDPKNLFADLNPFQNKGADKLFMPTKSGLNNVDDFHQQKNNPLVGRSPAPMMWKNYSCNEAPKRKENSYMENLLPKVHREPRYGNTHSSYATSSSNGAVSSNVPCRDNVTFVSPVAAPSSFTSTENQFTPSIAGDMNRNTNNELDLQPNTAAVVHGHQKDESHIHDHRKYTSDDMSTGCDSRLKDHESTSSSLDSTSYRNDPQVLDDADVGECEIPWNDLVIGERIGLGSYGEVYHADWHGTEVAVKKFLDQDFSGAALAEFRSEVRIMRRLRHPNVVFFLGAVTRPPNLSIVTEFLPRGSLYRILHRPKSHIDEWRRIKMALDVAMGMNCLHTSTPTIVHRDLKTPNLLVDNNWNVKVGDFGLSRLKHNTFLSSKSTAGTPEWMAPEVLRNEPSNEKCDVYSFGVILWELATLRLPWRGMNPMQVVGAVGFQNRRLEIPKELDPVVGRIILECWQTDPNLRPSFAQLTEVLKPLNRLVLPSPQ

SEQ ID NO: 10046 - protein, 935 aa, Arabidopsis lyrata
MKHIFKKLHRGGNQEQQNRTNDALPSSDQNRNHVAPQATPSSVAETLPVTGATSSMASHSPTAASNRADYMSSEEEYQVQLALAISASNSQSSEDPEKHQIRAATLLSLGSHQRMDSKRDSSEVLAQRLSRQYWEYGVLDYEEKVVDSFYDVYSLSTDSAKQGEMPSLEDLESNHGTPGFEAVVVNRPIDPSLRELLEIAECIAVDCPTTSVSVLVQRLAELVTEHMGRSAEDSNIVLAKWTDKSSEFKAALNTCVFPIGFVDIGISRHRALLFKVLADSVGLPCRLVKGSHYTGNEDDAVNTIRLEDEREYLVDLMTDPGTLIPADFASARDNTVEPYNSNGNKFPTAQLSNDFRHSAPKLSEGEGSSQSSVADNNSPLGRRTEAEKTDSSYPKLGPLRNVDLSTSPSSVTSSTQLENISSTAIAKGSRGAINDCSRTNMNIVPYNQNSEEDPKNLFADLNPFQNKGADKLFMPTKSGLNNVDDFHQQKNNPLVGRSPAPMMWKNYSCNEAPKRKENSYMENLLPKVHREPRYGNTHSSYATSSSNGAVSSNVPCRDNVTFVSPVAAPSSFTSTENQFTPSIAGDMNRNTNNELDLQPNTAAVVHGHQKDESHIHDHRKYTSDDMSTGCDSRLKDHESTSSSLDSTSYRNDPQVLDDADVGECEIPWNDLVIGERIGLGSYGEVYHADWHGTEVAVKKFLDQDFSGAALAEFRSEVRIMRRLRHPNVVFFLGAVTRPPNLSIVTEFLPRGSLYRILHRPKSHIDERRRIKMALDVAMGMNCLHTSTPTIVHRDLKTPNLLVDNNWNVKVGDFGLSRLKHNTFLSSKSTAGTPEWMAPEVLRNEPSNEKCDVYSFGVILWELATLRLPWRGMNPMQVVGAVGFQNRRLEIPKELDPVVGRIILECWQTDPNLRPSFAQLTEVLKPLNRLVLPSPQ

SEQ ID NO: 10047 - protein, 621 aa, Mycobacterium leprae
MARAVGIDLGTTNSVVSVLEGGDPVVVANSEGSRTTPSTVAFARNGEVLVGQPAKNQAVTNVDRTIRSVKRHMGSDWSIEIDGKKYTAQEISARVLMKLKRDAEAYLGEDITDAVITTPAYFNDAQRQATKEAGQIAGLNVLRIVNEPTAAALAYGLDKGEREQTILVFDLGGGTFDVSLLEIGEGVVEVRATSGDNHLGGDDWDDRIVNWLVDKFKGTSGIDLTKDKMAMQRLREAAEKAKIELSSSQSTSVNLPYITVDSDKNPLFLDEQLIRAEFQRITQDLLDRTRQPFQSVVKDAGISVSEIDHVVLVGGSTRMPAVTDLVKELTGGKEPNKGVNPDEVVAVGAALQAGVLKGEVKDVLLLDVTPPLSLGIETKGGVMTKLIERNTTIPTKRSETFTTADDNQPSVQIQVYQGEREIASHNKLLGSFELTGIPPAPRGVPQIEVTFDIDANGIVHVTAKDKGTGKENTIKIQEGSGLSKEEIDRMVKDAEAHAEEDRKRREEADVRNQAETLVYQTEKFVKEQRETENGSRVPEDTLNKVEAAVAEAKTALGGTDISAIKSAMEKLGQDSQALGQAIYEATQAASKVGGEASAPGGSNSTDDVLTRRWSTTNGSPK

SEQ ID NO: 10048 - protein, 84 aa, Phaseolus vulgaris
YLREHLHWMVTDIPGTTDVSFGKEVMGYESPKPVIGIHRYVFILLKQRGRQTVRPPSSRDLFNTRRFSEENGLGLPVAAVYFNA

SEQ ID NO: 10049 - protein, 84 aa, Phaseolus vulgaris
YLREHLHWMVTDIPGTTDVAFGKEVMGYESPKPVIGIHRYVFILLKQRGRQTVRPPSSRDLFNTRRFSEENGLGLPVAAVYFNA

SEQ ID NO: 10050 - protein, 84 aa, Phaseolus vulgaris
YLREHLHWIVTDIPGTTDATFGKELVSYEIPKPNIGIHRFVFVLFKQKRRQCVTPPTSRDHFNTRNFAAQNDLGLPVAAVYFNA

SEQ ID NO: 10051 - protein, 299 aa, Staphylococcus xylosus
MTEHKSGFISIIGRPNVGKSTFVNRVIGHKIAIMSDKAQTTRNKIQGVMTQEDAQIIFLDTPGIHKPKHKLGDYMMRVATNTLSEIDAIMFMVNVNEDIGRGDEYIMEMLKTIKTPIFLVLNKIDLVHPDELMPRIEKYKRYLDFTEIVPISALEGHNVDHFINVLKSYLPEGPKYYPDDQISDHPEQFVVGELIREKILHLTSEEIPHAIGVNVDRMVKEDEDRVRIEATIFVERDSQKGIVIGKGGKKLKEVGKRARLDIERLLGSKVYLELWVKVQKDWRNKVNFIRQMGYLEDRD

SEQ ID NO: 10052 - protein, 371 aa, Staphylococcus xylosus
MIIGIPKEIKNNENRVSLSPSGVHALVEQGHTVIVEKSAGLGSYFEDVDYTAAGAKIVNEQVEVWNVDMVMKVKEPLAEEFQYFKEGLILFTYLHLANEPALTQALLDNKVVGIAYETVQLPDRSLPLLTPMSEVAGRMSAQIGAEFLQKYKGGMGILLGGVPGVSKGRVSIIGGGQAGTNAAKIALGLGADVTILDVNPKRLQELEDLFDGRVHTIMSNPLNIEQCVKDSDLVIGAVLIPGAKAPNLVTEDMVKQMRDGAVIVDIAIDQGGIFETTDRISTHDDPTYKKHGVVHYAVANMPGAVPRTSTIALNNATLPYAQQLAGKGYLKALQDNQALSLGLNTINGELTNKGVAEALKLSYTDIESALK

SEQ ID NO: 10053 - protein, 328 aa, Staphylococcus xylosus
MSLLDVLQEKLSGKNVKIVLPEGEDERVLTAATQLQGTDYVTPVVLGNEANVKALANDKGLDIANLEIIDPETSELKQELVTAFVERRKGKATEEQAQEMLKNVNYFGTMLVYTGKAEGLVSGAAHSTGDTVRPALQIIKTKPGVSKTSGIFFMIKDDQQYIFGDCAINPTLEAQDLAEIAVESAKSAKSFGMSPRVAMLSFSTKGSAKSDDVEKVSNAVDMAQEKIKADNIEDVVVDGEFQFDAAIVPEVAKKKAPDAKIQGDANVFVFPSLEAGNIGYKIAQRLGGFDAVGPVLQGLNSPVNDLSRGCSIEDVYNLSIITAAQSLQ

SEQ ID NO: 10054 - protein, 292 aa, Rhizobium lusitanum
QLPLWGFDGSSTMQAEGRSSDCVLKPVALYPDPARTNGALVMCEVMMPDGVTPHASNSRATILDDEDAWFGFEQEYFFYKDGRPLGFPEAGYPAPQGPYYTGVGYSNVGDVAREIVEEHLDLCLEAGINHEGINAEVAKGQWEFQIFGKGSKKAADQIWMARYLLQRLTEKYGIDIEFHCKPLGDTDWNGSGMHCNFSTKFMREVGGKAYFEALMAQFDKNLDAHIAVYGPDNDKRLTGKHETAPWNKFSYGVADRGASIRVPHSFIKNDYKGYLEDRRPNSQGDSYRIPYG

SEQ ID NO: 10055 - protein, 554 aa, Clostridium acetobutylicum ATCC 824
MKSEYTIGRYLLDRLSELGIRHIFGVPGDYNLSFLDYIMEYKGIDWVGNCNELNAGYAADGYARINGIGAILTTFGVGELSAINAIAGAYAEQVPVVKITGIPTAKVRDNGLYVHHTLGDGRFDHFFEMFREVTVAEALLSEENAAQEIDRVLISCWRQKRPVLINLPIDVYDKPINKPLKPLLDYTISSNKEAACEFVTEIVPIINRAKKPVILADYGVYRYQVQHVLKNLAEKTGFPVATLSMGKGVFNEAHPQFIGVYNGDVSSPYLRQRVDEADCIISVGVKLTDSTTGGFSHGFSKRNVIHIDPFSIKAKGKKYAPITMKDALTELTSKIEHRNFEDLDIKPYKSDNQKYFAKEKPITQKRFFERIAHFIKEKDVLLAEQGTCFFGASTIQLPKDATFIGQPLWGSIGYTLPALLGSQLADQKRRNILLIGDGAFQMTAQEISTMLRLQIKPIIFLINNDGYTIERAIHGREQVYNNIQMWRYHNVPKVLGPKECSLTFKVQSETELEKALLVADKDCEHLIFIEVVMDRYDKPEPLERLSKRFANQNN

SEQ ID NO: 10056 - protein, 392 aa, Clostridium acetobutylicum ATCC 824
MRDVVIVSAVRTAIGAYGKTLKDVPATELGAIVIKEAVRRANINPNEINEVIFGNVLQAGLGQNPARQAAVKAGLPLETPAFTINKVCGSGLRSISLAAQIIKAGDADTIVVGGMENMSRSPYLINNQRWGQRMGDSELVDEMIKDGLWDAFNGYHMGVTAENIAEQWNITREEQDEFSLMSQQKAEKAIKNGEFKDEIVPVLIKTKKGEIVFDQDEFPRFGNTIEALRKLKPIFKENGTVTAGNASGLNDGAAALVIMSADKANALGIKPLAKITSYGSYGVDPSIMGYGAFYATKAALDKINLKPEDLDLIEANEAYASQSIAVTRDLNLDMSKVNVNGGAIALGHPIGASGARILVTLLYAMQKRDSKKGLATLCIGGGQGTALVVERD

SEQ ID NO: 10057 - protein, 313 aa, Salvia miltiorrhiza
MEAIGVLMMCPMNSYLEQELDKRFKLFRYWTQPKQREFLAQQAESIRAIVGNSTSGADADIIDSLPKLEIVSSFSVGLDRIDLLKCKEKGIRVTNTPDVLTEDVADLAIGLMLAVLRRICECDKYVRSGAWKLGDFKLTTKFSGKRVGIIGLGRIGLAVAERAEAFDCPINYYSRSKKANTNYTYYGSVVELASNSDILVVACALTPETTHIVNREVMDALGPKGVLINIGRGPHVDEAELVSALVKGRLGGAGLDVFEKEPEVPEQLFGLENVVLLPHVGSGTVETRKVIADLVLGNLEAHFSSKPLLTPVV

SEQ ID NO: 10058 - protein, 662 aa, Rosa hybrid cultivar
MEECSTGALVPAVKVEPILSSIGGSVDPCSSDLGRLTEEKGMSEVDKDLLCPICMQIVKDAFLTACGHSFCYMCIITHLSNKSDCPCCAQSLSKNQLFPNFLLDKLLKKTSAQQISKSAPPVEHFRQALQQGCEVSIKELDTLLALLAEKKRKMEQEEAERNMQILLDFLNCLRKQKVQELNEVQSHLQFLKEDISVVERRRMELYRARDRYSVRQRMLGGDDSVNGARNSWPSSIDNNTSALRVRGGTSSWNIQGRGLQRNDALSASDSQYVNQSGLAVARKKRVHALFDELQECYLQKRRQMNQPYSQLERDRTVIPREGYSTGLADFQSVLTTLTRYSRMRVIAELRHEDLFHSANIVSSIEFDRDYELFATAGVSKCIKVFDFSSVVNDPADMHTAVVEMPTRSKLSCLSWNKFTKNHIASTDYEGIVTVWDVDTRQSVMEYEEHEKRAWSVDFSCTEPSMLVSGSDDCKVKVWCTRQEASVLNIDMKANICCVKYNPGSSNCIAVGSADHHIHYYDLRNVSQPLHVFTGHRKAVSYVKFLSNYELASASTDSTLRLWNVKDNIPVRTFKGHTNEKNFVGLTVNSEYIACGSETNEVFVYHKEISKPVTWHRFGSPDMEDTEDDAGSYFISAVCWKSDSPTMLTANSQGTIKVLVLAA

SEQ ID NO: 10059 - protein, 476 aa, Alkaliphilus metalliredigens QYMF
MSEVPILDRLLQLQKQDIVSFHVPGHKNGKIYHQFPYKNFTDFLMHIDTTEIPGTDNLHNPKEIIKEAQERASRAFHSKETFFLVNGSTSGIYSMVMACTEPGDKIIVDRNCHQSVINSTILGDLNPVYLYPEIEIEQGISLGVSPQAVEQMIQEHLDAKAMIITYPTYHGITSDLKKIAEIVHKYDKILLIDEAHGAHFGLSQQLPATALACGADAVVQSTHKTLPSFTQSSMLHIQGDRIDRNKLKTMLRIHQSSSPSYLLLASLDLATMIYDTQGKYLMEQLLQHITYFKAELADIEGIEILGGENHDATRLWISLKHLGVTGYQLEKRLRDQYQIQMELANIYGVLGVATIGNQRRDFDRLIKALKNIAQEKGNQRIKEMPPFTYRIPKQVLRPGEALHKRKETIPLLEARGQISGEYVIPYPPGIPIVIPGEVIDKEMIQYIDLMVQEGMEIVGMKDASYKTIQIIKADEI

SEQ ID NO: 10060 - protein, 491 aa, Alkaliphilus metalliredigens QYMF
MSYYLNQNQTPLFTALKEHSQKKVIPFDVPGHKQGRGLKEFTDFVGTTVMELDVNSMKSVDNICNPIGVIKEAKELAAYAFGSDHAYFLVNGTTSGVQAMIMSACEPGDKIILPRNAHKSAIAGLILAGALPIYIQPEIDENLGIAMGVSVESVVNIIGRHPDAKAIFLINPTYYGATSDIKEIIHIARRNGIAVLVDEAHGAHLNFHEGFPMSAMELGADMSAVSTHKTGGSLTQSSILLLKEGAIDPYTVKKNLNLMQTTSGSYLLMASIDVARKQLATEGEEIFTRVLKLVRNARAQINKVDGLYAFGTELVGNPGVYDFDESKLGVNVRKLGLTGFEVYDILIDEYNIQVELADYYNILAIVSVGDEEEQVTALVEALKDIAEKHRRPEEIKVISNVLKNPDAIVSPRDAYYSSKKVVNIEDAEGEISGESIMAYPPGIPIVSPGERITKDMIDHIKLLKEEETLIQGTEDPYAEQVRVLGQGNGKG

SEQ ID NO: 10061 - protein, 315 aa, Alkaliphilus metalliredigens QYMF
MNTSGSGIKIFCGNSNTELASKIAEILGGEIGEAEVSTFSDGEISVNILETVRGADVFVVQSTNPPVNDNLMELLIMIDAFKRASAGRITAVLPYYGYARQDRKAKARDPITAKLVADILTTAGADRVLTMDLHAAQIQGYFNIPVDHLLGVPILAKYFKEKNLKDVVVVSPDLGSVTRARNLANHLDAPIAIIDKRRPKANVAEIMNIIGEIEGKNVILIDDMIDTAGTITQGANALKEFGAKDVYACCTHPVLSGPAMERIENSVIKELIITDTIPLPPEKHSDKIKIMTVAPVFAEAIRRIYNNVSVSKLFD

SEQ ID NO: 10062 - protein, 214 aa, Alkaliphilus metalliredigens QYMF
MKLFIDTANIEEIKEVAQWGILSGVTTNPSLIAKEGRDFKQVIAEITAIVEGPISAEVVSLQAEEMLKEAQDLVAIHPNVVIKVPMTAEGLKAVKGFSEQGIKTNVTLVFSANQALLAARAGASFVSPFVGRLDDIGQEGSELVRQIIEIYDIHGIETEIIAASIRHTQHLTDAALAGAHIATVPYKVLKQSLLHPLTDQGIEKFLKDWEGLVK

SEQ ID NO: 10063 - protein, 386 aa, Alkaliphilus metalliredigens QYMF
MPSLSKTILNLEESGIREIMNLALGMEDVIRLEIGEPQFDTPEHIIEATSQAARDGFTKYTANLGLLSLRETISNHVNNRFNLETSWENVAVSVGGVGAVSSLIRVLADAGDELLIPSIAWPNYKMAIDCIDATPVFYKLDPNNDFLPSIENLESLVTPKTKVLVINSPSNPLGVVIPQKLIKELVEFAKKHDLFLISDEVYEEIIFEGDHISTLPYDTDGRVIGVFSFSKTYAMTGYRLGYAIGNKEIIKEVGKFQEVNVMNACGIAQKAAEAALKGSQDCIREMVAVYKDNMEAATRLMDEYEIPYQQPTGAFYLWVNIGCKDATVFAKDFLVQHKVAIAPGNTFGPEGSPYIRISLASKKEDILEGIHRLAVMLGKSKLAVNA

SEQ ID NO: 10064 - protein, 414 aa, Alkaliphilus metalliredigens QYMF
METKNKKKVVLAYSGGLDTSVILKWLEETYGYEVIAACVNVGQTEDFAAIKKKALATGASKAYIVDVTEEFITDYIFPTLKAGAVYEDDYLLGTSFARPLISKKLVEIAEKEGAVAIAHGATGKGNDQVRFEATIKALNPNLKIIAPWRTWDLKSREDCIDYAVQHGIPIPVTKKDIYSRDENIWHISHEGGNLENPWNEHDDTIYKLSVSPEKSPDTPTYVELEFYKGIPVAVDGVKYEPIDMLTTLNKLGGAHGVGIIDIVENRLVGMKSRGVYETPGGTLLFAAHKALEKLTLDRDTTSFKKGISVKYAQLVYDGLWHTPLKDALDQFVNSTQEFVTGQVKLKLYKGNCTAVASASPFSLYNEDFVTFGEDHVYNQQDAEGFINLFALPLTIRALMLEEKLQGEAKEKKII

SEQ ID NO: 10065 - protein, 743 aa, Alkaliphilus metalliredigens QYMF
MTKPKVYVTRPLPTEALRLLKERCDVEMKRDSENLSKKELLEKLKKYDAILVSGTKIDEEICEAIQFKCKILANYGVGYDNIDVDAATKYGIYVSNNPNAVTEATADLAWGLILATARRIVECDQYIRSGQKNWGPINLLGSQVSGKTIGIIGGGRIGTAVGQRAKGFNMNIIYTGPKPKATFEEATGGKYVDKETLLREADFVSIHVPLLSSTKHLIGTDELKLMKDTAILINTSRGSLIDEKALVKALHNNEIGGAGLDVFEQEPVVERDLLDIKKVVLTPHVGTSTLDTRIEMGETCARNIFSVLDGKAPPNCVVSIKTDEHSNSIREDALIIVEESIKAVLPEAAVIKALQKKDFTGNTVVVAIGKAAWNMANATKNTLGDRVSKGVVMTKYEHSKGPIEGFEIIEAGHPVPDENSIRGTNKALELVGNLTKEDDVIFLISGGGSSIFEKPMEGVDLEDIMDITNQLLGCGADIVEINTVRKRLSAVKGGKFASLCGDASIYAIVLSDVIGDRLDSIASGPAYPDSSTSKEALDIINRYKLEISDHLRGVLNIETPKTVDNCETVITGSVSALCQGAVIGAQKLGYKPMILSSTLDCEAKDAGKFMAAIAREIKLNNGNQTLFTPPCAIIVGGETVVRLLGNGKGGRNQELALSAALGIEGLEDVVIFSVGSDGTDGPTDAAGGIVEGTTAERMRKINISPEIYLDNNDSYHALKASGDLIITGSTGTNVNDIAVLLCR

SEQ ID NO: 10066 - protein, 475 aa, Alkaliphilus metalliredigens QYMF
MGQQDFSKSLSKKDVIALAFGAMIGWGWVVLAGQWIQAAGSLGAMLAFMLGGVMVVFVGLVYSELTCAMPQVGGEHVFAFRGIGTGASFIATWAIILGYVSVVAFEAVALPTVIEYLVPNYKMGYLWTISGYDVYLTWVLVGMMGTIFVGYINYLGVQPVAFMQSVFTALIAIVGILFMGGALFNGSTELMDPLFIDGSKGIFAVLVMTPLMFVGFNVIPQAVEEINLPYNEIGKVLILSVVMAVAWYVLIIWGVGRSLTPAQMANSTLSTADAMTAVFRTDWGGKILVLGGIGGILTSWNAFYVGGSRAIYAMAKSKMLPGFLGQLHPKYKTPTNAIILIGIVSCFAPLLGRPMLVWLVDAGGLAIVVAYLLVSIAFVSLRKNEPDMPRPFKVNSGMFVGYTSIVLSIGFLILFLPGMPAALVWPYEWIMVGGWAALGAIFYYKAKKDYGQDAAHKYMTNSLDTLIGKKGESKI

SEQ ID NO: 10067 - protein, 410 aa, Alkaliphilus metalliredigens QYMF
MLTIKFDMTQTLFIAVLLLLSGNFIRSKVTFLLKYCIPGPVIGGLIFSVLALVLRQFGIITFSFDTTLQQFFMNLFFTASGFGASMILLKKGGRMVVIFLGLAAALAIFQNITALGLSKILGVEPMIGLMTGSIPMTGGHGNAAAFAPIAEQMGYQGALTVAVAAATFGLVAGSMLGGPVANNLIEKKGLFDKTTQQEKTEEVHTESGSTAVAAILENKAHLFDAKRLSKGFYLIFIGLGLGSILHIIFKTALPTVTLPIHVMGMLGGVIMRITLDIKKIQVPEEEIDTIGNVCLGVFVSMAVYTMRLWELAELALPLIILLFAQVLLIFLFVRFITFNVMGRNYDAAVICAGHIGFGMGAVPVSMANMKTVSDKFAYSKIAFFVVPIIGGLFSNFTNAAIITFFMNATG

SEQ ID NO: 10068 - protein, 406 aa, Alkaliphilus metalliredigens QYMF
MNIVVQKFGGTSVSTKERRTQVINKILQTKQKQKNIVVVVSALGRKGDAYATDTLRNLLLEENPLCSLKTLDLLMSCGEIISATLLGSALEALGEKVIVLTGAQAGILTDDHFSNAEIIAIDEKRSLSYLEKDYIVVVPGFQGATASGEVTTLGRGGSDTTATALAVALNAEYVEIYTDVDGIMTADPNVVPRARILDQVNYNEVFQMAEKGAKVIHPRAVEIAQKKNIPVNIRNTMSEHPGTRIHSFTGDKESLYCSQPKKNLLTAITHKDGISQVSVHMENNLAHDSLLLSTLAESKVSIDMINFFLDKKIFTISTEQINIVQIQLKKLNFSHEIRTHCSKVTVVGNRITGIPGVMATIVGALSSEDIQILQSSDSHSTISCLVDESDAKKAVNALHSAFHLDC

SEQ ID NO: 10069 - protein, 228 aa, Alkaliphilus metalliredigens QYMF
MKDTTIDILRKVPAFSKLKEEALKKIANMTIERNVRKGSIIFMDGDPGEAFYFVKSGKIKVYKTTADGRELIFTILSQGDVFAEVTLFNDIPYPASTEVLEDASIGMIRNQDLEELIRGDADIALQIIKVFSKKLFASQQKVKELALGDTYMRTALTILKLGEEHGVESAAGIEIELNISRQELANMIGTARETVSRALSQFKKEGALEVQGKKIIIQDIKKLRSWVQ

SEQ ID NO: 10070 - protein, 178 aa, Alkaliphilus metalliredigens QYMF
MRKAIFFDRDGVLNDNETHVNQPKDLILYDGVKEGLRKAYEAGYDLFVVTNQGGIELGHLTDEDLKKIHTHLEEEVKDYCHFKEIMYCPYFKTDSEDRKPRPGMILKLADKYDIDLKKSWMVGDRDTDITAGLEAGCRTAKIGRVDPRAQINEANLSDRNKKRKVDLEAVVKEILKEC

SEQ ID NO: 10071 - protein, 66 aa, Alkaliphilus metalliredigens QYMF
MKTGTVKWFNSEKGFGFIEVEGGDDVFVHFSAITGDGFKTLEEGQKVEFNVVEGNRGPQAENVAKL

SEQ ID NO: 10072 - protein, 66 aa, Alkaliphilus metalliredigens QYMF
MEKGTVKWFNSEKGYGFITRENGDDVFVHFSAITMDGFKTLEEGQAVQFEIIQGDKGPQATNVERA

SEQ ID NO: 10073 - protein, 379 aa, Alkaliphilus metalliredigens QYMF
MGVYLDNAATSYPKPKEVVDAVYDFMLNNGATSGRGAYERAMMADGLVYDTRKMIANLFNFHDPKKVIFTANITESLNLAIRGIVKEGDHVITSSIEHNAVWRCLKTLERDRGISLSVVPASKEGYTNPLDVKDLIQKNTVLIVINHASNVFGTIQSIGEIGAIAREHSIPFLVDAAQTAGVLPIDIKKDNVDLLAFTGHKSLLGPMGTGGLVVNWDGEMDPLKVGGTGGDSAYEYQPDYFPNKLETGTLNVSGIVGLRSALKFIQKEGIERIYEKEKDLVGYALNRLEEIRGISIYGPKDPNKIVGVISFNLQGITGEEVAYTLDQEYGIMVRVGLHCAPGPHRIIDKVKEGTVRIGIGYFNEKEDIDLLVNALKKIN

SEQ ID NO: 10074 - protein, 225 aa, Alkaliphilus metalliredigens QYMF
MRILIIEDEIPLAEALSQMLKKNNYTVDLLHDGESGLDYALSDIYDLILLDIMLPKMDGLSILKEIRQEGIATPVILLTAKGEITDKVMGLDSGADDYLAKPFATEELLARIRAISRRKGEVILDGTLKYGDVQLNPSTLKLSKESKEVKLTLKESDLLAFLILRNNLASSKELIIEKIWGFDSDVEHNHVEVYISFLRKKLLFLTSKVVINTLRGVGYILEVKS

SEQ ID NO: 10075 - protein, 382 aa, Alkaliphilus metalliredigens QYMF
MGVYLDNAATSYPKPREVLDAVYDFMLNNGATSGRGAYERAMMADGLVYDTRKMIANLFNFHDPKKVIFTANITESLNLAIKGIVKKGDHVITSSLEHNAVWRCLKTLERDRGISLSVVPAAKEGYINPLDVKDLIRKNTTLIVLNHASNVFGTIQPIGEIGAIARENSIPLLVDAAQTAGVLPIDIKEDNIDLLAFTGHKSLLGPMGTGGLIVNWDGEIDPLKSGGTGGDSAYEYQPDYFPNRLETGTLNVSGIVGLRAALKFIQNEGIEKIFEKEKHLVGYALDRLEEVRGISIYGPKDPNKIVGVISFNLQEVSGEEVAYILDQEYGVMVRVGLHCAPGPHKMIGKEKEGTVRIGIGYFNTEEDIDLLVNALKKINQQV

SEQ ID NO: 10076 - protein, 626 aa, Alkaliphilus metalliredigens QYMF
MKDPKQQKTMMRPGGGPGKGPMLGMPGEKPKDFKRTLKRLLSYLKPFRFRIIVVIITALLSTGFNVLSPRIMGMATTKLFEGTTQRMQGFLGAPIDFDYILRILFILAGLYIASAVFAYAQQRIMAIVAQKTVYHMRNDVNHKLAKLPLTFFDSHTHGEILSRVTNDIDNISNTLQQSITQMITSVITLIGIIIMMLIISPIMTLILVVTLPLYAFITKAIATRSQEYFSAQQSTLGELNGHIEEMYTGHKIVKAFSREEQSIAHFSEINDQLYNVGWKAQFISSIIMPLMSFINNIGFVFISVVGGILAIRNAIQIGDVQAFIQYSRQFTQPIIQTANIANILQSTVASAERVFELLDETEEIPDIKVSKHVKMPKGEVAFRNVKFGYKEDEPLMENMNIDVKPGQTIAIVGPTGAGKTTLVNLLMRFYEISEGKITVDGVDIRDFKRGHLRSIFGMVLQDTWLFNGTIKENIAYGRADSTEEEIMNAAKAAHADHFIRTLPDGYHTILGEEASNISQGQKQLLTIARALLADPAILILDEATSNVDTRTEVYIQKAMNTLMMGRTSFVIAHRLSTIKDADLILVMDEGSIIEKGNHRELLAQKGFYADLYHSQFTAGKNNLVKT

SEQ ID NO: 10077 - protein, 217 aa, Alkaliphilus metalliredigens QYMF
MNFLTQPLGALLKIIFDVIGNYGIAIIVFTVLVKLAMVPLTMKQTKSMKKMQEIQPMIKELQEQHKDDKEQMNIKVMELYKEYNVSPFGGCLPLLIQFPIIIGLFTVLREPMDYGFTLEVIQAGFLWIPNLAEADPWILPLLAGLTTYLSSISMAATGNKKDPTQVIMKYFFPIMIFWWGRSFPAGLTLYWVISNLFQAGQQIVINKPYLKQREGSS

SEQ ID NO: 10078 - protein, 385 aa, Alkaliphilus metalliredigens QYMF
MEVYLDNAATTKPNSEVVESMMTALTEYYGNPSSLHKKGVQVEKEIKRIRKSIGKAMKCSDQEVYFTASGTEANNLAIRGLVKANRRRGNHLITTTIEHKSVLNTFKDLAKDGYVVTYLNVDKQGFISLDELEKALTPDTILVSLIHINNEVGSMHPVKEIGKLIKAKNKNTLFHIDAVQSFGKEKINLNVDLIDSLSMSGHKIHGPKGIGALYVRKGVKIAPLFTGGSQEMGLRSGTENVPGIFGLGKAIELILDNQEDKIKRLIELKNYFIHSLSQQIDDVYITSKNGDDFAPHIINVSFKGIRSEIMLHSLEQDGIYVSSGSACSSKKRGASHVLVAMGMKEALIDSAIRISLSHINTIEEIDYAILHMAKHTKDLRKIIKR

SEQ ID NO: 10079 - protein, 103 aa, Alkaliphilus metalliredigens QYMF
MYAIIETGGKQYRVQEGDTLFVEKLEASKDDVVTIDNVLAVSKDGSLTIGSPIVEGAKVEAKVVEQGKGKKIIVFKYKPKKDYRRKQGHRQPYTKLIIEKINA

SEQ ID NO: 10080 - protein, 427 aa, Alkaliphilus metalliredigens QYMF
MFIDKAKIHLKSGKGGDGAVAFRKEKYVPAGGPAGGDGGKGGNIIFVVDEGMRTLMDFRYKMHYSAENGENGKGRMQYGKDGEDLILRVPPGTIIREEKTGHLVADLTQPKERRIIAKGGKGGKGNVHFKSATRQAPQFAIAGVKGEELTVTLELKLIADVGLVGFPNVGKSTLLSVVTSAKPKIADYHFTTLTPNLGVVRTKRGDSFVLADIPGLIEGAHEGTGLGHEFLRHVERTKLLIHVLDVAGIEGRDPLEDFEKINEELKLYNEKLSTRPQVVAANKTDVMGENENLKKLTEALAEKGIEVFPVSAATKQGLDELLDYVSIKLKELEDTEVELEEVEEEKLYELKEKDTNQFTVKKEDDTYIVEGDFLERLIMSTNFEDMDSLTYFQKVLRRKGIIDELKKLGIEDGEFVKIYDVEFEYFH

SEQ ID NO: 10081 - protein, 253 aa, Alkaliphilus metalliredigens QYMF
MLKSPLSWMGGKYRLRKQIIELIPEHTCYVEIFGGAAWVLFGKESSKVEVYNDINSELVNFFRILKYHAEEFKSWIEKDVVSREIFEEYHESPSKYMTDIQRAVRFFYLIKYSFASKGDHFGYGTNKDPNKAIFNTDFIQEVRGRLKHCYVENLSFDQLINKYDRKETFFFCDPPYYELTQYKDKFYKEDHLHLVELLKNIEGKFLVTINDHPEVREWYKGFNMKSTEVNYSVSRNIEGRKNYKELIITNYGL

SEQ ID NO: 10082 - protein, 395 aa, Alkaliphilus metalliredigens QYMF
MKENVYLDYSGTSPMKKEILDEMLPYFTLDYGNPSSIHAFGRTSKKAVDTARDRLAKTLNAGANEIFFTGGGTEADNWAIKGVAYALQNKGKHIITSKIEHHAVLHACEYLEKQGFQVTYLDVDQYGLINLEQLKQSITSDTILITIMYANNEIGTVQSIKEIGQIAKERGVLFHTDGVQAYGNIPIDVQDLGIDLMSISAHKLYGPKGVGALYIRKGTKIDPLIHGGAQEKKRRAGTENVPGIVGFGKAALLAYEGLEEHQLTMIRLRDKMINGIMETIPYVRLNGHPSQRLPGNVNVSIEFIEGESLLLSLDLVGIAASSGSACTSGSLDPSHVLMNIGLTHELAHGSLRLSLGDFNTEEEIDYVLEKLPPIVTRLRAMSPLYEKIKGGIENV

SEQ ID NO: 10083 - protein, 282 aa, Alkaliphilus metalliredigens QYMF
MEMFNQYQFIGCTETLEEAKIVFFGAPYDGTSSFRPGSRFAASRIRIDSYGLETYSPYLEKDLEQYLIHDAGDIELGFGNRDVALKEINEFVKEVVASNKKPLMIGGEHLVTLPAIQAVHEKYQDLIVLHFDAHADLRAHYLGEKLSHATVMGRVWDFLGDERIYQFGIRSGTQEEFKWSAEGHTFMNKFGYESLDEIIDQVKNKPVYVTIDLDVLDPSIFPGTGTPEPGGISFTDMMRIIKKLSILNIVGADIVELAPDYDPTGVSTAVASKVIREMLLIL

SEQ ID NO: 10084 - protein, 397 aa, Alkaliphilus metalliredigens QYMF
MKVELSKKGLSVSSSITLAIDSKAKQMKAEGMNVISFGVGEPDFQTPDYIKQAAIKAIEEKSIGYTPAPGMLQLRQSICNKLASDNELEYLPQHIIVSNGAKHSVYNIFQAVCNPGDEVIIPVPYWVSYPEHVKMADAIPVYIDCPEENDFKMKPEDFLAAISSKTKAIILNSPSNPTGAVYSKKELEQIAKIAVDHNILVVSDEIYEKLIYGNEKHVSIASLNSEIKDLTIVINGMSKGYAMTGWRIGYTASNSEIAKIMSNIQSHATSNPNTVAQYASIEALERDQSSIETMRLAFDERRKYMINRVNEIQNLSCIAPNGAFYIMMNISQLIGKVVDGKIINGSMDFAEVLLDRTHVAVVPGIAFGVDHLVRLSYANSMENITEGLNRIDKFLNE

SEQ ID NO: 10085 - protein, 396 aa, Alkaliphilus metalliredigens QYMF
MKILVMNCGSSSLKYQLINMENEEVLAIGLAERIGIAGARVKHEASGKEKVTIEQPMENHKTAIKIVLEALIDENYGAIKSMDEIAAVGHRVVHGGERFSSSVVVTDDVKNALEECSDLAPLHNPPNLMGIEACQEILPNVPMVGVFDTAFHQTMPESSYMYALPYELYEKHKIRRYGFHGTSHKYVAMKAAEILERPIEDLKIIACHLGNGASITAVDGGISVDTSMGFTPLEGLVMGTRCGDMDPAIVTFLMEKEKIDHNQVNAIMNKQSGVYGLSGVSSDFRDIEVAVKEGNKRAQLALDVYYKRVKKYIGAYAAEMGGVDAVVFTAGLGENSPETRKSICEGLEFLGIKIDNTKNNVRGKETVVSTDDTPTKVLLIPTNEELAIARETKSLI

SEQ ID NO: 10086 - protein, 203 aa, Alkaliphilus metalliredigens QYMF
MKKYAGIIEAFQKRNLAYEQHSSVLVPLIERDGELHVLFEVRSLQMNHQPGEICFPGGKIEKNEAPKEGALRETTEELNIKKDHIHIIGEIQPIITPFHMTIYSYCGILKDIAFEDIAFNPSEVHSLFTVPLRFLLEVTPLIHHVENKMYPKDDFPYHLIQSGRNYHWKTGDYEVYFYEYGDYMIWGITAKILNHFLKILKDY

SEQ ID NO: 10087 - protein, 570 aa, Alkaliphilus metalliredigens QYMF
MLLTQPDNPTPNERYQLLLSALTELGRPEDFQNIIELFSPPQDITKINPAGSCKHIKVGILGGGLAGLSAAFELRKLGFDITIFEAEEERIGGRVYTHFFDEFKSLYGELGPMRIPVSHETVWHYMDLLRLKTRPFVQFQPNAFIFVRDVRLRQDDGGESVQQKIYPFFDMTPEERATLWPEFFELIFDETLQEMPPEIRRELLEVLPIYSPEILALDTLNFRELMQAKGLSEGAIEMLSNIQPFVEAFLYLNFLDELGPEYAASYFYMYEILDGMVQLPLALHQAILSPLPPYGYDDIPAHLLGNVHWKSGHYITGLSQSIPGGSVQVDYLNKKKKCKGEDTFDFVICTLPFSSLQRVELNPIFKSRKMQAISEVNYASAQKTIMLCRHRFWETGDMSERILGGGSVTDLPIATIWYPSDHAYPINLEENLWGFRPGTSPYEPGVLLASYNWTQEAIRVGNTPGPTRFEDIKRQVEKVHGLPEGYLDSIVLDYKTVHWNREPLFLGAFAFYEPQQKSLFNFVSAEPDYHGRVHFAGEHVSAIRQWMQGSLKTGMEAANAVAKICSHYVS

SEQ ID NO: 10088 - protein, 324 aa, Alkaliphilus metalliredigens QYMF
MKIVVLDGYTLNPGDLSWEGLEKMGDLTVYDRTSYDLSGQDKIIERVGDAEVVFTNKTPITKEALNEMPNLKFIGLLATGYNVVDVEAAKEKGVIVTNVPTYGTTAVSQMTFALLLELCHHAGDHSDEVKKGSWTNNPDWSFWNYPLVELADKTMGIIGYGRIGQAVGKIAQAFGMNVVAYSRSQNKALESDTFKYVGLDELLAESDVISLHCPLFESTQGIINKDTIAKMKKKVRIINTSRGPLVVEEDLAEALNSGRIAGAAVDVVSSEPIKANNPLLQAKNIIITPHISWAPRESRIRLMDVAISNLEKFMEDNPVNVVNP

SEQ ID NO: 10089 - protein, 295 aa, Alkaliphilus metalliredigens QYMF
MSYKSGFVTIIGRPNVGKSTLMNQIIGEKIAIMSDKPQTTRNKIQSVYSQEDFQIVFLDTPGIHKPKHKLGEYMVKVARDTLKEVDVVLFLVDEGQKIGPGDRFIMEQLKDIKTPMFLIINKIDKMNQEILNEVCGLFEETGLFQRIIPISALEGANIDTLIKQIVSFLPEGPQYFPSDMITDQPERLLVAEIVREKLLHYLDQEIPHGIAVETSMMKQRPNQDIVDIQATIYCEKKSHKGIIIGKGGRKLKGVGKSARQDIEKLLGSKVFLELWVKVNEDWRNQSRILKSLGYE

SEQ ID NO: 10090 - protein, 614 aa, Alkaliphilus metalliredigens QYMF
MGKVIGIDLGTTNSCVAVLEGGEPVVIPNSEGNRTTPSVVAFGKDGERIVGEPAKRQAVVNPEKTIISIKTHMGSDHKVAIDDKNYTPEDISAMILQKIKADAEAYLGEAVTDAVITVPAYFTDSQRQATKDAGKIAGLNVRRIINEPTAASLAYGLDKTDEHQKILVYDLGGGTFDVSILELGDGVFEVLATNGNNNLGGDDFDQALMDYIAEAFKKQEGIDLRKDKMSLQRLKEASEKAKQELSSTMTSSINLPFITATNEGPKHLNMDITRSKFDEITSHLVEKTMGPMRSALKDAGLSASDINKIILVGGSTRIPAVQQAVKKITNQDPHKGVNPDECVAVGAAIQAGVLTGEVKDVLLLDVTPLSLGIETLGGVFTRLIERNTTIPSKKSQTFSTAADNQPAVDIHVLQGEREMAAGNVSLGRFELSGIPPAHRGIPQIEVTFDIDANGIVNVSAKDLGTGKEQKITITASTKLSDEEIEKKIKEAEEHAEEDKMQKEKIEVRNQADSLVYQIEKTLKESEGKIDKEEEGKVTAELEKLKKAVESDIVEDMKKAIEDVNTVFHAISQKLYEQAAQAQEAEGQEQAGDDNIVDAEYEEVKDEETQGEDEK

SEQ ID NO: 10091 - protein, 691 aa, Alkaliphilus metalliredigens QYMF
MSQNHQEDNLGKAYDSRLMARLLKYAKPYWALLMISVLLLVFIAGVDLARPYLIKIVIDDHINVYNTPVLVFNESPDDNQAVLHEGKYYLRIDDSAHLEQGQETAHLVRYEQNTYLVENYVSLQGKSHRIDSVDDEYILHVEENQTYPAQRLSREEISLFRNSDFIAIRQLSIIFLAIITLGFLLNFIQVYILNYASNKIIYEIRQQLFSHLQSMSLGFFDKNPVGRLVTRVTNDTETLHEMYTNVLVNLFKDIFLLTGIVIIMLRMNVRLALISFTVVPIILLSANLFRSKVREVYREVRVKIAGINSSLNENITGMKTVHIFKREQQQFDEFDKINEEHLIANKKQIFIFAIFRPSMEIIRSLGMALIIWYGGAQVVGGIMEFGVLFAFINYLKQFFQPINDLTEKYNILQSAMASSERIFALLDTEPEVTNAEHPVEIKGLQGEIEFKNVWFAYHDEDWVLKDISFIIRPGESVAFVGATGAGKSSIMNLINRFYDIQKGQILVDGIDIQDIPLDQLRKNIGIVLQDAFMFSGTIRDNIALNNRSISQEEIEAVAQYVNAHHFIERLPGKYDEPVTERGSTLSSGQRQLLAFARALAFDPSILILDEATSNIDTETEELIQDAVTKLIKNRTTIAIAHRLSTIQNCNKIIVLHKGHIREMGDHQSLLQKQGIYYKLYQLQYKESLLPS

SEQ ID NO: 10092 - protein, 366 aa, Alkaliphilus metalliredigens QYMF
MNTILTTILIITGITTTLALLLTLANTYIADYGERKIRINKDKEFIVEGGNTLLSSLIENEIYLPSACGGKGSCGYCKCAINEGGGPVLPTELSYLTEDDMKNNVRLSCQVKVKADMEIQIAEDLLNVKQFEAIVEKTEDLTSTIKLLRLKITDGQEIEFKAGQYVQLLAPPYPGSPDEVFRAYSIASSPNNKGYIDLIIGYVPDGLLTTYVHKHLSEGDEILFNGPFGDFYLQDCEEDAILVAVGTGMAPIRSILFEMLNKKIDRNTIFFFGAKTPEDLFLLDEMTMFEKELPRFKFVPTLSRAPEESQWKGEEGRVTDAMMKFLEKKEGREAYLCGSAPMIDSTVKTLVERAFADNKIYYDKFD

SEQ ID NO: 10093 - protein, 406 aa, Alkaliphilus metalliredigens QYMF
MNIVVQKYGGSSIGSTEKIKKVADKIIRTKKAGKDVVVIVSAMGKNTDELVNLAKSISGKPDPREMDVLLTTGEQVSISLLSMALIEKGYKAISFTGSQLNIQTTSSHQKARIMDIDVTKVTEALKEGKIVVVAGFQGVTEDNDFTTLGRGGSDTSAVALAAKLEGTCEIYTDVDGIYAMDPRRLKNAKKIPRISYDEMMEMASNGAGVMHYRAVELAHKYDIPLYVASTFSDEPGTIIDNGGGKTMEEAVVTGMASSLEDIQITVLNLPSPTKSLYRLFGQLGEKGINVDMISQMLTEDNLMHVSFTAPKDDLWLVEKVLREWQQQDPTIQWEINEDIAKISAVGLGMRSHAGVAAKVFELMSDNNIEVKMVTTSEIRITWVVVREKEQQVIDLIGHHFGLEMSL

SEQ ID NO: 10094 - protein, 449 aa, Alkaliphilus metalliredigens QYMF
MNKILIVDDEKNMRWAMKKALKTEDYQVFEAANGQEGVEKFQELQPDLVLLDLKMPVMDGLEALQKMKGIDEHIPVIMITAHGTTESAVEAMKLGAIDYISKPFDIEELKIVIHKALQVKGLQDKVDYLKEELQSQTGKTIIGKSEKMEAILNIVDRVAQTNATILILGESGTGKEVIANAIHYNSGRREGPYIKVNCGAIPENLIESELFGYEKGAFTGATNRKIGKFERAKNGTIFLDEIGDLNLNMQVKLLRVLQEKEFERVGGNENIQADVRVIAATNRDLYKMVEEERFREDLFYRLNVIPIELPALRERQEDIPLLIEYFIDKYSSEIGRKNMTIDDEAKEKLISYQWRGNIRELENVIERMLILSAGNVISKENLPPEILREKIPTKDFALPDEGLSIDDLEKDLIKQALERTNHNQTKAAQLLGMSRHTLLYRIEKYNLKK

SEQ ID NO: 10095 - protein, 549 aa, Alkaliphilus metalliredigens QYMF
MKNKFAKLGISEEIENVLNKSDITEPTPVQLQAIPPLLAQRDVMAQAQTGTGKTLAFILPILERVNVEKPTIQALIITPTRELAIQITAETKKLAEVKGINILAAYGGQDVEQQLRKLKGSIHIIIGTPGRLLDHLRRKTINLGKLSMLVLDEADQMLHMGFLRDVEDIMTHIPKRRQNMFFSATMPNQVRTLAEQYMKDPVQIQVQSKRVTLDEIRQVVIETTDRGKQDLLCQLFDEYNPFMAIIFCRTKRRAIALNEALINLGYNSDELHGDLTQAKREKVMKAFKKSKIQYLVATDVAARGLDIEGVTHIFNYDIPQDGESYIHRIGRTGRAGETGMAITFMTSRDRDELKIIEKVIKMDLDVQKSKSGKIDLDEEEQDTKKSPKGRGNDKSKDFKKGKYGDKKGKPGDKKGRPGDKRDRPTDKKGRPGDKRDRPSDNKGRPGDKRDRPSDNKGRPGDNKGRPGDNKGRPGDNKGRPGDNKGRPGDNKGRPGDNKGRPGDNKGRPGDNKGRPGDNKGRPGDNKESGYKGNKNTRGNQSSSNNKRSR

SEQ ID NO: 10096 - protein, 418 aa, Alkaliphilus metalliredigens QYMF
MDYSIAINTVWVLVATALVFFMQAGFAMVETGFTRSKNAGNIIMKNLMDFSIGSFVFWLIGFGIMFGRGTGGFMGEINLLSSGSFEHLGLDIPKEAFLIFQTVFCATAATIVSGAMAERTKFISYFIYSIVIGAVIYPIAGHWIWGGGWLEELGFHDFAGSTVVHSLGGWAALMGAMIIGPRIGKYTKDGKSKAIKGHSLTLGALGVFILWFGWFGFNGGSTLSGVDYNDIAHIFITTNLSAAVGAIAAMIVSWRRYKKPDVSITLNGALAGLVAITAGTDIVSPVGAVVIGAIGGVVVVFAIEFIDNVLKIDDPVGAVSVHGVCGAVGTIAVGIFATDGGLLYGGGVELLGVQILGVIAVALWTMGTTFILFKAIELTVGLRVTKEEEIEGLDKCEHGTESYADFQPRPVYLATEKN

SEQ ID NO: 10097 - protein, 554 aa, Alkaliphilus metalliredigens QYMF
MQRTGGEIIAECLIEQGVDTVFGYPGGAILNIYDALYKYQDQINHYLTAHEQGAAHAADGYARATGKVGVCLATSGPGATNLVTGIATAYMDSVPMVAITANVPLALLGRDSFQEVDIVGITMPITKHNYIVKDINELASTLRKAFYIAQEGRPGPVLVDVPKDITAQVAEYIYEAPRPIETVSAPIPEEDLLSAIQMIKTAKRPLIYMGGGVVRSGAAEAFKDFVDKVQAPVASTMMGLGGFPSTHELFTGLLGMHGTKASNMAATECDLIIAVGARFSDRAIGKVEGFAPGAKILQIDIDPAEVNKNIRTHYSIIGTITEVLKDLNPRLEKQERKEWTEKIKAWQRDYPLTYEKNTTLKPQFVIEKVKELAAEDAVITTEVGQNQIWTALFYKFTQPRSFITSGGLGTMGFGLGACIGAQIGLPERQLFNIAGDGCFYMNCNELATAVHYNLPIRVIVLNNHVLGMVRQWQGMFYGKRFSNTTLDRKTDIVKLAEAYGATGFNITKNEEVEDVLKKAMAIKGPVVINCEIDRDELVLPMVPPGADIKDLIME

SEQ ID NO: 10098 - protein, 442 aa, Alkaliphilus metalliredigens QYMF
MSKVIVSKFGGSSLADSKQFNKVKEIVLSNKNRRYIVPSAPGKRHEKDYKMTDLLYLCQQHVEQGVPFDEVYKIIEKRYIDICLELGLTLDMKTILNEIKDNITAGASADYAASRGEYLNGLILASLLKYEFIDASELIIFSENGQFDSEATQKRVNQTLKSIEKAVIPGFYGAMESGQIKTFSRGGSDVTGAIIARGVGAHLYENWTDVSGFCMADPRIVENPQYIKKITYRELRELSYMGASVLHEEAIFPVKRESIPIRIKNTNAPEDVGTLIVDDLSPVNYTRTITGIAGKKDFTVIAIEKMLMNAEKGFIHKLLTILEANGISAEHMPSSIDSISLVISDKGLKNNIQKVINEIRVQTNPDSIVAYPNMALIAVVGRGMIKTKGISAKVFGALAKEGINVRMITQGSSELNIIVGIENSDFERGISVLYKVFQKKEA

SEQ ID NO: 10099 - protein, 571 aa, Alkaliphilus metalliredigens QYMF
MMKYSGAEIIIRLLEEQGINIITGIPGGGNLPMYNALAKSTQIQHILARHEQGAGFISQGMARTTGKTAVCFATSGPGVTNLLTAIADAKLDSVPIVAITGQVPSSFVGTDAFQEVDTCGLAIPITKHNFFVRSAQELFHIIPEAFKIASSGRPGPVIVDIPKDVQMAEIELENWPILTDESPLHDNGKKTSIPNETKISLDEIEKIANMINSSKRPLFYIGGGILQSNSHELLHQLAKKNHIPVASTLMGLGCFPSKDSLYLGMLGMHGAPYTNLILNETDLLIAFGVRFDDRATGNIAKFCPDASIIHVDIDPAELDKNKATHFSMAADIGLVLQALIPLIHLDPRSKWIEEVAAIKKANPLYTPEDNDFYHPVNFIKEISNIVDSDTIITTDVGQHQMWVAQTYPFEKPRTLLTSGGLGTMGFGLPTAIGAALANPTKKVICISGDGSILMNIQELATLADHNLNIKVIILNNGCLGLVRQLQEFFFDENYIASSFTTHPNFAAIATAFGIEGFDFKDTKQPIAQLQKLLSASGPCVINVPIDPRENVLPIVPPGAGNHQMIGVRKGA

SEQ ID NO: 10100 - protein, 601 aa, Alkaliphilus metalliredigens QYMF
MDQDKDKKIDPRKALAKKLKNAEIEARKKAIKARKPFKGLQIRPTVSLFDEAGKQEPGENNWEGFGFDIHPQVTMFSVVFLAAFISLTLIFTEASEVFFDNTMTIISKNAGWFFILVANLFIIAALTFAFGKFGNIRIGGSKAQPEFSKFAWYSMLLSAGMGIGLLFWSVAEPITHLNTPSPMFGNLLAGSPRAAQAAMATTFFHWGIHPWAIYALVGLGLAFFSFNRGLPLTIRSIFYPIIGNKIYGFWGNLIDTLSVLATLTGLATSLGFGVAQVNAGLNYLFGINISITVQVLLIAGITALATGSVVMGLDGGVKRLSEINMVMAGVFLLFVLIVGPTVYILGGFTQNIGYYLSNFTEMSMWTETFRDTGWQGGWTIFYWAWWISWSPFVGMFIARISKGRTVKEFVLGVMIIPTLLSFFWMSVFGGTAIFLETSGIADIATVVDEDVSIALFAMLENLPLSSVTSFIGIMLVTVFFVTSSDSGSLVVDHLTSGGKLDSPVPQRVFWAIMEGVVAATLLLGGGLGALQTASIITGLPFAIILLLIIYSLYAGLKQEFEVEEIVRKKLISVREDHVINEVISAVVLDDALVDEDENKQN

SEQ ID NO: 10101 - protein, 390 aa, Alkaliphilus metalliredigens QYMF
MDLSLLSKRMFNLGSESAFEVLEKAKKLEAEGKNIIHFEIGEPDFDTPRNIIEAGKTALDEGYTHYTAAQGYLPLREAVTQYALEYKNIKTNPEEVVIVPGGKPIMFYTMTALINPGDEVIYPSPGFPIYESLIRFYGGIPVPLAIREENDFRLDVEELKSKLTTKTKLLLINSPANPTGGVLSEEDIDEIANVLIGKNIFVLSDEIYDRMIYDGSTKSIASIPEMKEWTIVLDGFSKTYAMTGWRLGYGIMNKTLAQKVTDLMINTNSCTAAFAQVAGIEALTGPQHAVDEMKSEFFNRREIIVDGLNGIKGFKCIKSPGAFYAFPNIKDTGMRSSELSDYLMNHAGVAVLSGSSFGAFGEGYLRFSYATSTENIKIALKRIDEAMKKL

SEQ ID NO: 10102 - protein, 766 aa, Alkaliphilus metalliredigens QYMF
MIKIPQEVIEEEKNYRNKVEELKKGVIEPERFKPYRVSMGIYEQRDNDTYMIRTRIPSGVISLEQLKKISELAKQYSHGYIHFTTRQDIQFHKVTLDDTVNIMEGLLEAGIVTRGTGGNTARNIGCSPLSGVSQDDVFDVASYALVTTEYALKDPSMLNLPRKYKIAYSNSPEDTGNATISDLGFVAKIENGEKGFEVYGAGGLGGSPNVSIKLADFIPASEVLYHVQAMKELFENEGDRTNKHKARIRYILQRLGEETFKAKYQEILQEIKKEKSLEVFFKESIPTKQIGEYAEISNPLIFEQKNKGYFSLYIHPENGNLDVENLDKVIKYIDDLNYEVSIRLTNTQGFFVRDLLGSDAENLLDLTGSFTSTFDIDNSVACAGAATCKLGLGLSQNLLSAIKSRFANVDEAIKLQLPRIFISGCQNSCGQHQKGEIGLYGRARRVADGLVPMYVVSFEGAVGVGKANLGSDYGTIPAKKIPGFLYELANLKSESGIIDFSEFVKKEKASLDQLIEGFSTIESETENPNLYYDFGSEEKFSLKGRGPGECSAGVLDVIKLDISNSQAYINEFEKVKESIKLYDASVSAARALLILKGVDTTKDRLIFKEFISHFVDTGHVKEQIKSLIEDLLDYKLGDLDSLENHYEEVKYLVNKVVQMYESLNTKLEITLPKEAEVQNTQNASEVEVNNHTSLNIVDLKGVKCPMNFVKAKIEMAKILSNETIGFYLDNGEPIVNVPKSLGGEGHEIIKIDDKYEGYNLLIVKKK

SEQ ID NO: 10103 - protein, 304 aa, Alkaliphilus metalliredigens QYMF
MPRILVNDKIDQKSLDAISAMGIELTVENYPADELKKQIKEYDGIIVRSATKVTQEIIDEALETGKLRLIIRAGVGLDNIDGAYAMKNGITVRNTPDASKVSVAELTIAHMLMIARKLQQSNVTMRQGKWLKKEYRGVEIEGKTLGLIGFGRIAKIIAQRAAALGMKVVYNTRSGKVQGFDEFKYLSKEDLIQSADFISLHVPHSQEAGAVIAKKEFDMMKDGVYVLNCARGGVICEASLLEALDSGKVAAAALDVFEEEPVKNEAIYLHEKISLSPHIGASTAEAQEGVGKEIVQIIKEFFKI

SEQ ID NO: 10104 - protein, 233 aa, Alkaliphilus metalliredigens QYMF
MKACCQRCEDKLCASKVPIFSNLDHEELVDIIKMTGHRNYTKGETIFLEGIEAKTLYLVNEGKIKIYKFTKDGKEQILHILSEGDFFGELNLFQTGSYGFNAEAIMPTKLCTLTKEKMKGIILSKPEIGMKILEVVGERLARVESLAQNLASNDVEARIAYLLLDLKEKYGKVVPEGTEILLTLTREEMSNYTGIARETMSRKLKKFQDEGVIKLIGIKKMIIIDEEKLEDYI

SEQ ID NO: 10105 - protein, 298 aa, Alkaliphilus metalliredigens QYMF
MNRIVQCVPNFSEGRDLDKIEKIIDPFRGKEGVKLLDYSRDADHNRLVVTVVGEPEPLKKAVLQAIGIAIKEIDMTKHQGQHPRMGAVDVIPFIPIRNVTEEEAKELAAQVAEAAAEQYGLPIFLYEKSASDPGRENLAKIRKGQFEGMFEKLKEEEWKPDFGPQTPHPTAGVTAVGARMPLVAYNVNLDTNSLEIANRIAKNVRHLSGGLRYCKGIGIELEDRGIVQVSMNMTDFTKTALYRVFELIKIEAKRYGVNVVGSEVIGLLPMEALIDTAVYYLGIEDFSMEQILESRIME

SEQ ID NO: 10106 - protein, 360 aa, Alkaliphilus metalliredigens QYMF
MEKKNYGTHKLNHIVGKIQGAMIKNKNIVIALLITLVLALPYIISSQYVLRIIIMIGVYSILSLSLGLVTGYAGQVSLGHAAFYAIGAYTSAILSVNYGISFFITVPVAAMIAALCGLLLGLPTLRLSGPYLAITTLGFGEIVRMVLSNWDRVTNGPLGISRIPRPSILGIELTLANNGLYYLILIFVAITTVVMLAIVKSKMGRAMMALREDELAATMMGIRITYYKVVAFVVSAFFSGLAGAFYAHMIRFIDPNSFTFDTSILILSIVILGGMGTIKGMFLGSALLISFPEFARFLQAYRFVVYGVVLIMMMRYRPQGILGGQKKTEYKLPKGVDVGQSKETAPGKTGESINTVEEGV

SEQ ID NO: 10107 - protein, 554 aa, Alkaliphilus metalliredigens QYMF
MENKPSSSNFIKNIVIQDLESGKHKEIITRFPPEPNGYLHIGHAKSIVLNFDLADEFKGTTNLRFDDTNPLKEDTEYVESIKEDVKWLGFDWDALYFASDYFEEMYQRAVLLIKKGKAYVCDLTADEIRETRGTLKHPGKESPYRNRSVEENVDLFEKMKNGQFVDGQKVLRAKIDMTSPNMNMRDPVLYRIAHTTHHNTGDQWCIYPMYDYAHPLEDAIEDVTHSICTLEFEDHRPLYNWVVEECEMPSQPQQIEFARLNITNTVMSKRFLKQLVDEGVVNSWDDPRMPTIAGLRRRGYTANAIRNFCREIGVAKAHSVVDSQMLEHFIREDLNENAPRTMAVLRPLKIVITNYPEGQVEMLEAENHPGDESMGTRQIPFSREIYIEQEDFMENPPKKYFRLFPGNEVRLKHAYFIKCHDVVKDADGNVVEIHCTYDPETKSGTGFTGRKVKGTLHWVNAQEAIAAEFRLYEPLILDSEKQVEEGQEEKSFLDKINPQSIEVIQGFVEPNMQKAKGQDKFQLFRHGYFNVDPKDTTAEKLVFNQIVSLKSSFK

SEQ ID NO: 10108 - protein, 526 aa, Alkaliphilus metalliredigens QYMF
MRVLITEKIAEKGIEVLKKEGLDVDVEVGIDRGELLKVINNYDAIIVRSVTKINEEFYQHATNLKVVGRAGNGVDNIDMDGATNRGIIVVNTPEANTVSAAEHTIGLLIASTRNVAQANAKIKNREWDRSNFKGVELQGKTVGVVGLGRIGGLVTTRLQAFGMKVIAYDPYITDERFRKYGVEKKERLQDLIKESDFITVHTPKTEETFGMIGEEEFKVAKKGVRVVNCARGGIIEEEALAKAVKEGIVASAGLDVLVNEPNTTSLLLDLDNVIITPHLGADTVEAQNNVGVTIAQEVFSALKGKMVPNAVNLPTLQYQELEAMKYYLKLGENLGKLYHQLEKEAIEKIEIIYSGAVADMETAVVTLAVLKGIFEPILKERVNYVNARLIAKNRGIAVTESKKMVNGNFMNLIRVKISTKNKEFTVAGTVFAKKDMRIVDVNGFVFDVTPTPYMLVANNTDKPGMIGKMGSLLGENNVNIATMQVSRKHKDKEAMMFLAVDSEVNKETLNIINKAEGILQIKFVKL

SEQ ID NO: 10109 - protein, 358 aa, Alkaliphilus metalliredigens QYMF
MTEVYRILTINPGSTSTKIAIFDDEKPVFEEVLRHSTEEIGEHESIFGQYEFRKNVILETLNEKGINLTKLAAVVGRGGLLKPIEGGTYKVDDNMLADLKVGVLGEHASNLGGVLAYEIATQLNIPSFIVDPVVVDEMNEISRISGMPELERKSIFHALNQKAVARRASKDMGKGYNSVNLIVAHLGGGVSVGAHEQGRVVDVNNALDGEGPFSPERSGGLPVGDLAKLCFSGKYTQAEIKKKITGNGGLVAYLGTNDGREVVSMMEAGDKNAEVVYQAMAYQVAKEIGSCAAVLKGKVDAIILTGGIAYDKVFTQWIKERVEFITEVLIYPGEDEMIALAEGGLRVLRGEEEAKIYE

SEQ ID NO: 10110 - protein, 362 aa, Alkaliphilus metalliredigens QYMF
MKKYILAINPGSTSTKVAIFKGNENVIQKNLSHSPEELEKFEKITEQYELRKEIILAWLSENEIKTEELIAVVGRGGLLRPMPGGTYEVTEAMLKDLNIGIQGEHASNLGGILAKAIADLENISSYIVDPVAVDEFEEIARISGLPEIERRSLGHALNIKAVGHRVASQLDKKFHEMNLVVAHLGGGISVAPVKQGRLVDYNNANEMGPFSPERTGGLPIGDLAKLCFSGKYTFKEIKTKLRGKGGLTGYLESNDARDVEKMIENGDEKAKLIYDAMGYQIAKEIGAMATVLEGKIDAIVLTGGLAYSDRLTGQIKEAIGFMAPVYVHPGEDEMTALNEGVLRVIEGKEAYKIYENEVKVND

SEQ ID NO: 10111 - protein, 613 aa, Alkaliphilus metalliredigens QYMF
MCGIAGWIDYQRDLRDENPIIERMTASLGHRGPDTKSSYISKHGLLGHRRLIVVDPSGGAQPMTKRLGEKTYTMVYNGELYNTEDLRKELKDKGHTFNSYSDTEVLLVAYMEWGENCVQHLNGIYAFGIWNEVEKTVFLARDRLGVKPLFYNLKNGGLFFASEIKALLAHPEIDPVVTTEGLCEVFGLGPARSPGNGVFKDINEIKPGYCLTYTPQGVKIKSYWQLESKPHEDSLGDTIENVRGLLIDAIERQLVSDVPICTFLSGGLDSSAIASVTANAFKRDGRGQLHTYSIDYVDNDQYFKPSEFQPNADSEWIGRMVSHIDSKHHDIIIDTPQLTEALEAAVLSTDLPGMADVDSSLYLFCKNVKQNDTVALSGECADEIFGGYPWFRRREDIEANTFPWSKATTERRNILSGDLRKLPLEEYVATKYEETLREVPRMKGESLETHRMREIFYLNMKWFMITLLNRKDRMSMANGLEVRVPFADHRIVEYAWNIPWEMKYLGQREKGLLRSALKDILPEDVRTRKKSPYPKTHNPAYLKAVQQWMGEIMQDPSSPILQVINQEKVKEIVETGGKSFGKPWFGQLMTGPQLIAYLIQVNLWMKHYNVSIE

SEQ ID NO: 10112 - protein, 358 aa, Alkaliphilus metalliredigens QYMF
MALSKNRILVINPGATSTKMGVFEDEALLFKRTVDHSVQDLQEFAKVVDQYQYRLDLALQVLKEENIEIKTLASIVGRGGLLKSLPGGTYKVNEKMIEDLKKAERGEHASNLGAVMASDLAGQLNVPAFIVDPVSVDEMEPVARISGLADIERISLSHALNMKAVARKVAQEMDKAYEDVNFVVVHLGTGVSVTPHKRGKMIDVNNAKAEGPFSPDRCGGLPADQLVKLCFSGKYTYDELKEKVSSKGGFYSYFGTTDAREVEAMAAAGNEKANIVLEALAYQVAKEIGAMAAVLEGDVDKIILTGGIAYSKRIVADIAKRVKFIAPIEVVPGEEELESLALGALRVIRGEEEAAIYS

SEQ ID NO: 10113 - protein, 391 aa, Alkaliphilus metalliredigens QYMF
MKHRFLAKRYWNTMTTPMGAVVDLAKQYSDVINLSLGDPDYVTNQEVIQRAFEDAENGHTHYTDSLGDEELRHEIIKYYEEAYEYKVGSKEVMAVVGACHGMYLALEAILDDGDEVIIPAPYFTPYIQQVELVRGKPVILDTYEEDGFQIDINRLKGLINHRTKAIIINTPNNPTGACFSKETLEAVGKVAKEFDLLIIADDIYDAFTFSDPFLPATTMKGMQERTITIGSFSKDYAMTGWRVGYVLAPDFIIQCMRDINEGICFTVPSISQRAAIYALRMRETIQPPMIAEYKKRMYYAYERINAIPNMSVLSPQGSFYLFVNIKKTGLNSVDFCKELLEEAHVLAIPGIAFGGCGEGYIRLACTVGVAALKEAFDRIEKMKVCCAHNLQ

SEQ ID NO: 10114 - protein, 302 aa, Alkaliphilus metalliredigens QYMF
MSTEKQYVLAVPNFSDGRRKEVIEAVVEPLRNVEGVKLVSYEPEHDFNRTVVTVIGEPGPLKEALLNMAAKSYELISMEEQQGSHPRIGAQDTIPLFPFRNISIEECAKLAEEIGSEVYKRFEVPVYFSGENARCEERKSLAFIRKGQYEGLKEVAHTDERKPDIGPAALHATAGATIVSADHEGLTAYNVFLATEDVSIAKKIAKGVRGPSGGFSTIRAVGIKFPERTGVVVSMNMFDCTATPLYRAFSFVKQEAQRYGVTVTGSELVGPVKLEHLLNSLEYHLGLEGFRKEQILETHLME

SEQ ID NO: 10115 - protein, 392 aa, Alkaliphilus metalliredigens QYMF
MREVVIVSAARTPIGSFGGALKDVNVADLGAGAIKGALERAGIKGDMVEEVFMGCIIQAGNKQNVARQAAAKAGIPFEVTSMTINMLCGSGLRAVSLGAQTILAGDNDIVVVGGAESMSQAPYVLPNMRWGSKLGDVKALDTLLTDALSCAFNDYHMGITAENLAEKYNITREEQDAFAVSSQNKAEKAQNEGGFDAEIVPVVIKTRKGEVIVDKDEYIKHGATAEGLAKLRAAFKKEGTVTAGNASGINDGAAALVLMSAEKAKELGIKPLAKLVAYASGGVDPSVMGYGPVPATEKVFEKSGWKVEDLDLIEANEAFAAQALAVAKGLNFNTDIVNVKGGAIALGHPVGASGARILTTLLYAMEERDAKKGLATLCIGGGMGTSVLVERA

SEQ ID NO: 10116 - protein, 577 aa, Alkaliphilus metalliredigens QYMF
MIKRFIKYYKAHLPLFYLDFGCAFLMAGMDLVFPFVVRKMIDDVFPARDLRLILWIALGMVILYIVRSILQYIVDYWGHVLGVRIEHDMRKDLFHHINKQSFTYFDNTKTGHIMSRLVNDLHDLSELAHHGPEDLFIATITLVGSFIILLTINGPLALITFALVPIMMWFAINKNRRMQRAFKDMRLKVADINAQVEDSISGVRVVKSFNNEHYEEEKFQEGNVKFRVSREKAFQVMAEFFAGVNFFSNFTNLAVLIGGGIFIYQGQMTTGDLFAFLLYVSMFMQPIRRLTTLVENYQKGMAGFSRFVEVLELDPEIVDSENAKEMGRAEGRINFQHVTFSYNNQQNVLQDITMEVKTGETVAFVGPSGGGKTTLCSLIPRFYEVEQGSIQIDGVDIKEITQSSLRENIGIVQQDVFLFSGTVKENIAYGKQNPTDEEVMEAAKKANAHEFIMKLENGYDTYIGERGVKLSGGQKQRLSIARIFLKNPPILILDEATSALDNETEKIIQQSLFSLSENRTTLVIAHRLATIRNADRIMVLTDEGIAEEGSHEELLQQEGIYARLYKAQFDGFIPDVA

SEQ ID NO: 10117 - protein, 341 aa, Alkaliphilus metalliredigens QYMF
MMEQAKELLIIPVDYDPKLDIRETEIAIKRIKDFFEGRLAEMLNLTRVSAPLFVRPETGINDNLNGVERPVSFEVKGIDNKEVEVVHSLAKWKRMALHRYGFKLGEGIYTDMDAIRRDEDLDNLHSIYVDQWDWERVISKEERRIETLKSTVESIYGVFKDTENYLFQFYPHLGKMLPEEITFITAQELEDRYPTLSPKERENAITKEKKAVFIIAIGGDMKSGEKHDGRAPDYDDWNLNGDILFWYPMLDQAVELSSMGVRVDEEAMARQLSLAKCEDRQSLVFHQGILTKVLPYTIGGGIGQSRICMFFLKKAHIGEVQAAIWPDKMIETCEKAKIALL

SEQ ID NO: 10118 - protein, 381 aa, Alkaliphilus metalliredigens QYMF
MIYLDNAATTYPKPEAVYEAVLNHMKNAGANPGRSGHKLALEAGRGIFTVREQLSELFNIDNPMQIIFTANATEALNLAIKGALNKGDHVITSSMEHNSVLRPIKALEEIGIENTIIQCDRTGYLNIEDVKRALRKNTRMIAITHASNVTGTIQSIEAIGKIARESKALFLVDAAQTAGVYEIDVKKMNIDLLAAPGHKGLMGPQGTGFLYIREEVEVRHFKEGGTGSKSEELIQPTILPDRYESGTLNTPGIVGLGAGIQFILQEGLDKIRRHEEELTQYFIKRLKEVEMVKIYGPQDATKQAAVVSINIGEEDSSEMAYIFDQMFEIAVRSGLHCAAMAHKTIGTFEQGTIRFGMGYFNKEEEIDVVIEAIKTICEQLE

SEQ ID NO: 10119 - protein, 220 aa, Alkaliphilus metalliredigens QYMF
MRFFAQPLGALLKLIFDLIGNYGVSIIVFTILVKLLLLPLTLKQTRSMRQMQEVQPEIKKLQEKYKNDKEQLNAKTMEIYAKYNVSPFGGCLPLLVQFPILIGLFTALRDPATYVFGSAEIYASINTSFLWLSNLSDADPWVLPLLAGITTFLSSKTMSTGKQADQTQKMMTYGMPLMIFWWGRSFPAGLTLYWVVSNLFQFVQQLLMNRSQDKLKEGSN

SEQ ID NO: 10120 - protein, 150 aa, Chamaecrista fasciculata
MGFSEQQEALVVKSWSVLKSNSEELGAKFFLKIFQLAPAAQNLFSFIKDSNVPVEQNPKLKPHAAAVFVLIGESATQLGKAGKVTVDEAILKKIGATHAKSGVQNEHFPVAKSAFFETIKEAAPELWSAELESAWGEAFDQLAAAIKAHT

SEQ ID NO: 10121 - protein, 565 aa, Solanum ptychanthum
PRKGCDVLVEALEREGVTDVFAYPGGASMEIHQALTRSNIIRNVLPRHEQGGVFAAEGYARATGFPGVCIATSGPGATNLVSGLADALLDSIPIVAITGQVPRRMIGTDAFQETPIVEVTRSITKHNYLVMDVEDIPRIVREAFFLAKSGRPGPVLIDVPKDIQQQLVIPNWDQPMRLPGYMSRLPKLPNEMLLEQIVRLISESKKPVLYVGGGCSQSSEELRRFVELTGIPVASTLMGLGAFPTGDELSLQMLGMHGTVYANYAVDSSDLLLAFGVRFDDRVTGKLEAFASRAKIVHIDIDSAEIGKNKLPHASICADIKLALQGLNSILEGKEGKLKLDFSAWRQELNEQKVKYPLNFKTFGEAIPPQYAIQVLDELTNGNAIISTGVGQHQMWAAQFYKYKKPRQWLTSGGLGAMGFGLPAAMGAAVGRPGEIVVDIDGDGSFMMNVQELATIKVENLPVKIMLLNNQHLGMVVQWEDRFYKANRAHTYLGDPANEEEIFPNMLKFAEACGVPAARVTHRDELRAAIQKMLDTPGPYLLDVIVPHQEHVLPMIPSGGAFKDV

SEQ ID NO: 10122 - protein, 565 aa, Solanum ptychanthum
PRKGCDVLVEALEREGVTDVFAYPGGASMEIHQALTRSNIIRNVLPRHEQGGVFAAEGYARATGFPGVCIATSGPGATNLVSGLADALLDSIPIVAITGQVPRRMIGTDVFQETPIVEVTRSITKHNYLVMDVEDIPRIVREAFFLAKSGRPGPVLIDVPKDIQQQLVIPNWDQPMRLPGYMSRLPKLPNEMLLEQIVRLISESKKPVLYVGGGCSQSSEELRRFVELTGIPVASTLMGLGAFPTGDELSLQMLGMHGTVYANYAVDSSDLLLAFGVRFDDRVTGKLEAFASRAKIVHIDIDSAEIGKNKLPHASICADIKLALQGLNSILEGKEGKLKLDFSAWRQELNEQKVKYPLNFKTFGEAIPPQYAIQVLDELTNGNAIISTGVGQHQMWAAQFYKYKKPRQWLTSGGLGAMGFGLPAAMGAAVGRPGEIVVDIDGDGSFMMNVQELATIKVENLPVKIMLLNNQHLGMVVQWEDRFYKANRAHTYLGDPANEEEIFPNMLKFAEACGVPAARVTHRDELRAAIQKMLDTPGPYLLDVIVPHQEHVLPMIPSGGAFKDV

SEQ ID NO: 10123 - protein, 554 aa, Solanum ptychanthum
LEREGVTDVFAYPGGTSMEIHQALTRSNIIRNVLPRHEQGGVFAAEGYARATGFPGVCIATSGPGATNLVSGLADALLDSIPIVAITGQVPRRMIGTDAFQETPIVEVTRSITKHNYLVMDVEDIPRIVREAFFLAKSGRPGPVLIDVPKDIQQQLVIPNWDQPMRLPGYMSRLPKLPNEMLLEQIVRLISESKKPVLYVGGGCSQSSEELRRFVELTGIPVASTLMGLGAFPTGDELSLQMLGMHGTVYANYAVDSSDLLLAFGVRFDDRVTGKLEAFASRAKIVHIDIDSAEIGKNKLPHASICADIKLALQGLNSILEGKEGKLKLDFSAWRQELNEQKVKYPLNFKTFGEAIPPQYAIQVLDELTNGNAIISTGVGQHQMWAAQFYKYKKPRQWLTSGGLGAMGFGLPAAMGAAVGRPGEIVVDIDGDGSFMMNVQELATIKVENLPVKIMLLNNQHLGMVVQWEDRFYKANRAHTYLGDPANEEEIFPNMLKFAEACGVPAARVTHRDELRAAIQKMLDTPGPYLLDVIVPHQEHVLPMIPSGGAFKDV

SEQ ID NO: 10124 - protein, 113 aa, Zea mays subsp. parviglumis
MGRTACCAKEGVKRGAWTSKEDDALAAYVKAHGEGKWREVPQKAGLRRCGKSCRLRWLNYLRPNIRRGNISYDEEDLIIRLHRLLGNRWSLIAGRLPGRTDNEIKNYWNSTLV

SEQ ID NO: 10125 - protein, 113 aa, Zea luxurians
  misc_feature (42)..(42): Xaa can be any naturally occurring amino acid
  unsure (1)..(113): unsure at all Xaa locations
MGRRACCAKEGVKRGAWTTKEDDALAAYVKAHGEGKWREVPXKAGLRRCGKSCRLRWLNYLRPNIRRGNISYDEEDLIIRLHKLLGNRWSLIAGRLPGRTDNEIKNYWNSTLV

SEQ ID NO: 10126 - protein, 113 aa, Zea luxurians
  misc_feature (109)..(109): Xaa can be any naturally occurring amino acid
  unsure (1)..(113): unsure at all Xaa locations
MGRRACCAKEGVKRGAWTTKEDDALAAYVKAHGEGKWREVPQKAGLRRCGKSCRLRWLNYLRPNIRRGNISYDEEDLIIRLHKLLGNRWSLIAGRLPGRTDNEIKNYWXSTLV

SEQ ID NO: 10127 - protein, 113 aa, Zea luxurians
MGRRACCAKEGVKRGAWTSKEDDALAAYVKAHGEGKWREVPQKAGLRRCGKSCRLRWLNYLRPNIRRGNISYDEEDLIIRLHRILGNRWSLIAGRLPGRTDNEIKNYWNSTLV

SEQ ID NO: 10128 - protein, 471 aa, Hebeloma cylindrosporum
MVNVTYDASQPLVWTDAAGNTGVYSPGDIAWVLASTALVWIMVPGVGFFYSGLLRRKNALSMIYLSMMTVAVVSFQWFFWGFSLAFSDGASLFIGDLKYFGMKGVLEEPSIGSTRIPAIVFSVYQLMFAAITPMIAVGGFAERAHLGPLLFFVFVWSTLVYDPIACWTWNSKGWSFVHGSYDFAGGTPVHISSGTAALAISIYLGKRRGYGTEVLTYKPHNTTYVILGTIFLWFGWFGFNGGSALAANLRAAQACIVTNLAASVGGLTWMLWDYRIEKKWSAVGFCSGAIAGLVAITPGSGFVGSPAAVLFGFMAGTVCNFATQLKFFAGYDDSLDIFASHAVGGVVGNLLTALFAQASVAGFDGFTVIPGGWLDRHYIQLAWHVADSAAGLSYSFVVTTIILWVMHFIPGLRLRVPEETEIIGIDEADMGEFAYDYVGLETELKPHVYVRSTGTAYDSGRNSELKERSSA

SEQ ID NO: 10129 - protein, 492 aa, Hebeloma cylindrosporum
MSNLATGQFDRGDISFIVVAGAMVFFMVPGLAFLYSGLSRRKSALSLIWAVAASNAVVIFQWYFVGYSLAFSSTATNGYIGNLRNFGLMKVEADPSPGSPLIPEILYSFFQMEFACVTAGILMGGLAERGRVFPAMIFIFFWMTFVYCPLACWAWSTHGWAFKWGVLDFAGGGPVEIGSGVGGLAYAWVLGRRNERELLNFRPHNVGLVGLGTFMLWFGWIGFNGGSAFGANLRAIFAIWNTMIAASFGGMVWCLLDFRIERRWSMVGFCSGTIAGLVAATPSSGYLRPWSSVVVGVLAGTLCNFATKVKFLLRIDDALDLFAEHAVGGVVGLMLNAFFAETAVIAMDDVTIGVRGGWVDHNWKQLYIQFTYVVATCAYSFVMTALVAKTVDLIPGLKLRSSPEGEMLGMDEVEIGEFATDYIELRRDVADCSTFGFTRGSNGYIPHAATNETHAQDTSSNDDPHHRIDEPTAPERLEPLTEKNECGTVTPS

SEQ ID NO: 10130 - protein, 622 aa, Microcystis aeruginosa
MCGICGYFDLKKEKSPDQKILEAMANKIIHRGPDSSGYFLDNYGGMGFRRLSLIDLQGGEQPLYNEDKSIVLVCNGEIFNYLELRDDLQKKGHKFRTHTDVEVLIHLYEEYGCDFLNKLNGQFAFALYDIKEQTLVLARDQMGICPLFYTIVEQNLIFGSEIKAILEHPLVVPEVDLTGLDQILTFPGLISPRTMFKNIQSLKSGHYLILKDCQIKIREYWDLDYPKIGEIPVYRSEIYYTERLQELLKQSISYRLQADVPVGLYLSGGLDSSLIAAMVQEMRPDYQIDSFSIGFEDKNICESYYRDILLRQLNFRHHEIRFNEQSIGESLGKAIYHAECPLKETYNTASLALSSCANRHNIKAILAGEGADELFAGYVGYRFEQAQQNQAFSTNSNYNLETILEEELSLKVWGDNQLFYERNLYAYQETKLALYSAKLREQFYQFDCLNFEVVDHEKIKNRHHLHKRSYLDFKLRLSDHLVADHGDRMALANSVEARYPFLDIHLVEFSTKIPPDLKLNKLEEKYILKQIAKNLIPLEIIHREKFAFHTQGSPNILKQNIEYIDYLLSSEVIKKQGYFDPVIIQKLKQKYQQNNFRLNLPFDLDLLIIPLSLGIFLEQFNL

SEQ ID NO: 10131 - protein, 387 aa, Zygosaccharomyces rouxii
DPRVLDTMLKFYTGLYGNPHSNTHAYGWETNKEVENARKNVANVINADPKEIIFTSGATESNNMVLKGVPRFYKRSKKHIITTRTEHKCVLEAARAMVNEGFDVKFLNVDNEGLVNLKELEEAIRPDTCLVSVMAVNNEIGVMQPLKEIGSICKKHKVYFHTDAAQAYGKVPIDVNEMNIDLLSVSSHKIYGPKGAGAVFVRRRPRVRLDPILSGGGQERGLRSGTLPPPLVAGFGEAARLVVQENDADIAHIKRLSEKLTKGLLSIPDTSLNGSAEHRYPGCVNVSFAYVEGESLLMAMRDIALSSGSACTSASLEPSYVLHAIGKDDALAHSSIRFGIGRFTTEEEVEYVVDAISKRVKFLRELSPLWEMVQEGIDLNSIEWSGH

SEQ ID NO: 10132 - protein, 640 aa, Cryphonectria parasitica
MHRTVLLTLLSPSPELKKTHLSSPLSSFGRSPSQSTITDKDAKAQPQSGPSGTAPSPTPPDNNIASSEALTQTPVEFAPKPGILVVTLHEGRGFALPEPHKNIFSSHSTSASQGGGASIAGSVRTAPNGHRPNTSGGFGNVPTNHGRVSGKYMPYALLDFDKVQVFVNSVEGNPENPLWAGSNTQYKFDVSRVTDVTVHLYIRNPTAPPSVGRANDIFLGVVQIKPRFEEKHQFVEDPKANKKDREKAATEFAEKEKALGHSGVQWVPVGYGQGELKIGIEYVENRAGKLTIDDFDLLTVVGKGSFGKVIQVRKKDTSRIYALKTIRKAHIISRSEVTHTLAERSVLAQINNPFIVPLKFTFQSPEKLYFVLAFVNGGELFHHLQKEQRFDVNRSRFYTAELLCALECLHGFNVIYRDLKPENILLDYQGHIALCDFGLCKLDMKDEDRTNTFCGTPEYLAPELLMGQGYNKTVDWWTLGVLLYEMLTGLPPFYDENTNEMYRKILGEPLHFPSHDIVPPAAKDLLTKLLNRDPAQRLGANGSAEIKAHPFFHAIDWRKLLQRKYEPTFKPNVAGAMDTDNFDPEFTREAPQDSYVGGVPLSETMQNQFQGFSYNRPIAGLADGGGSVKDPSFIGSVTGR

SEQ ID NO: 10133 - protein, 491 aa, Synechococcus elongatus PCC 7942
MPRGVAPAFAGRKPKGWAWASTAVPDFQGGFKRLINRFQGSKLWLACVPLAATIAVFWGVAANAQGSADPVPSAQFLVNNLWLMVATVLVIFMNAGFAMVETGLCRQKNAVNVLAKNLIVFTLAATAYWFIGYSLMYGSPVVDGFLYFGKGGPLGFFFDPTVSAETIKNDGLISSLDFLFQAAFAGTAATIVSGSVAERIKFVDFIIFSLILTAVIYPIAGSWQWNVGSGWLNKAGFIDFAGSTVVHSVGGWAALIGAITLGPRMGKFQDGPPGALTGHNLAIATLGALILWIGWYGFNGGSVLAFNTAVPYVAVTTTLGGAAGGISATITSWSTSGKPDLSMVINGILAGLVGVTAGCDGFGMGGSFIVGLIAGVLVVFSVYTFENLKIDDPVGACSVHLVCGIWGTLAVGLFNLEKGLFYGGGFGQLGSQILGIISYGVWTVVASVIIWNILKALLGLRVSLKKSYKAWILANTGWKPTLALPRMHLTP

SEQ ID NO: 10134 - protein, 550 aa, Pantoea agglomerans
MSTFTVGDYLLTRLQEIGIKHLFGVPGDYNLQFLDRVIAHPEISWVGCANELNAAYAADGYARCNGAGALLTTFGVGELSAINGTAGSYAEYLPVIHIVGAPATQAQLQGDCVHHSLGDGDFQHFIRMAAEVSVATALLTADNATAEIDRVIISALQARRPGYLSLAVDVAAMAVQPPAQPLNTHQPASADARRAFRAAAERLLAPAQRVSLLADFLALRWQQQSALAALREQSAIPCASLLMGKGVLDEQQPGYVGTYAGAASAGQVCEQIEQVDAAICVGVRFTDTITAGFTQQFATERLIDLQPFSASVGNERFAPLSMADALSELQPLFEHYGQQWQPAAAIPAAQPAEPTAVISQHAFWQAMQGFLQPGDLILAEQGTAAFGAAALRLPSRAQLVVQPLWGSIGYTLPAAFGAQTANPDRRVILIIGDGSAQLTIQELGSMLRDGQRLIIFLLNNDGYTVERAIHGATQRYNDIAPWNWTALPHALSLQGQAQSWRISETVQLDEVMTRLAAPQWLSLVEVVMLKDDLPPLLRKVTACLNQRNGG

SEQ ID NO: 10135 - protein, 375 aa, Filobasidiella neoformans
MSSVVVPRPIPVALLGLGGVGKAILSQLLSPPLSAQFQLVLIANSRQSLSLPLPAAPITPANFQSILEKHGAPLKVTSVISVLSTHPDAPGIFIDSTGSDVIPAMYPQILSMGVHIVTPNKKGFSASEALYKAIAEKSFPNTPSLAYGESTVGAGLPIIQTLKDLVATGDEIEKIEGVFSGTLSYIFNEFSKPEGGNVKFSEVVKVAKEKGYTEPDPRDDLSGTDVARKLSILSRLVPTAPALPQGYASIPTQSLVPDVLSDASTKEEYLERLEEGDEFFANLREEAKKEGQVVRYVGVIDVKSGKVEAKLGKYPADHAFATALKGSDNIISFTTKRYSPRPLIIQGAGAGADVTAMGVTSDMVKIYERLAVPRI

SEQ ID NO: 10136 - protein, 718 aa, Filobasidiella neoformans
MLTRQARLLRRIPPPNAVLQSGLQRRHRSTDRYSNNIHTSSTQNAPAPVYDTPIREKGMTLEAKERVRAHVRKIQSSASTAAASPAVRPQPAQHFQAAPQPMPTNMPRFESDSQVKNGLDYSFIGLSGGQIFQEMMLRHDVKQVFGYPGGAILPVFDAIYNSPHFEFVLPRHEQGAGHMAEGYARVSGKPGVVLVTSGPGATNVITPMQDALSDGVPMVVFCGQVATNLIGSDAFQEADVVGISRSCTKWNVMVKDIAELPRRINEAFKIATTGRPGPVLVDLPKDVTAAILRTPIPAKSVQPGHSPYLPSNPLNPSSQPSDPLPGDADLITEAAQMINKAKRPIIFAGNGVLSSPEGPKLLKELSDKGRIPVTTTLQGLGAFDERDEKSLHMIGMHGSAYANFAMQEADVLIALGVRFDDRVTGKVDTFAPAAKAAAAEGRGGIIHFEIQPKNINKIVEGQIPVLGDVVASLGELVPQIEAVDRSAWIGRCKATKERYPFTYTPSQEGQKLKPQEVVQELDRQAEALGKEKFVISTGVGQHQMWACQYYRWTEPRSWVSSGGLGTMGFGLPSAIGAKVAAPEKYVIDIDGDASFSMTAMELATASQYDIGVKVLLFNNEFQGMVEQWQDLFYENRYSRTRMTNPDFVKLSESMGAKGLRCTKLEDLPRMMKEFLEYDGKRPIVLECLVSSEHVYPMIPAGKALHEQLLHPLLRNGSE

SEQ ID NO: 10137 - protein, 187 aa, Fragaria x ananassa
MRKPCCEKTETTKGAWSIQEDQKLIDYIQKHGEGCWNSLPKAAGLRRCGKSCRLRWINYLRPDLKRGSFGEDEEDLIIRLHKLLGNRWSLIAGRLPGRTDNEVKNYWNSHLKKKILKTGTTLRPNKPHENNHAPNNKLVKLFNKMDDEVVDEVSSADSAAGCLVPELNLDLTLSIKTSTGMADPQVA

SEQ ID NO: 10138 - protein, 237 aa, Phalaenopsis hybrid cultivar
KINRQVTFSKRRSGLLKKAHEISVLCDAEVALVIFSAKGKLYEYSTDSCMDRILDRYERYCYAEKALQITEPESQGDICNEYGKLKNKIEALQKSRSHLMGEQLDSLSIKELQHLEQQLETALNHIRTQRIQLLLNCITEFQRKEKSLLEHNSLLEAKLCSFQLDPQITETATQNPNRKQQKQDQVNSSPSPFLPPNHLPTLNLGTYPASDGEEAEDPTLLQMNSISLPPWMLRSST

SEQ ID NO: 10139 - protein, 907 aa, Triticum monococcum
MYTKGPPLDVLRASISSAPSTSSHGSAQDDCDSLGDVYVWGEVVCDNSARTSSDTVIRSTGKTDFLLPKPLESNLVLDVYHVDCGVRHASLVTRNGEVFTWGEDSGGRLGHGTREDSVHPRLVESLAACNIDFVACGEFHTCAVTTTGELYTWGDGTHNVGLLGHGTDVGHWIPRRISGPLEGLQIAYVSCGTWHTALITSMGQLFTFGDGSFGVLGHGDLKSISCPREVESLSGLKTIAVACGVWHTAAIVEVIVTQSSATVSAGKLFTWGDGDKHRLGHGDKEARLKPTCVASLIDYDFYRVACGHSLTVGLTTSGKVWTMGNSVYGQLGNLNSDGRPCLVEDKIASEHVLQIACGSYHVAVLTSRSEVFTWGKGANGRLGHGDIEDRKVPTTVEALRDRAVRHIACGANFTAAICLHKWVSGADQSQCSSCRQPFGFTRKRHNCYNCGLVHCNACTSRKALRAALAPSPGKLHRVCDSCYSKLKNASSSANKKDLAPGESNGEARVGKSILSSNMDMIRSLDSKAAKQGKKTDALSFLRNPQVSSLLQLRDIAFSGGADPNRPAVPRAARTPAARSVTSSRAVSPFSRRSSPPRSTTPVPTTHGLSLSKSATDNLVKANELLSQEVERLRAQVDSLRNRCDHHELELHKSAKKVQEAMTLVAEESAKSKAAKEVIKSLTAQLKDMAERLPPEHGAYDFNEAKQVHVPNGVEPHVATYSSMNGKVHQARNELLNAPSPNSGRSPHSNGGISNQHKLLGNISENSEGSTHSLRITSPHGSDRPHRRAHSNSDEMLSASSRGDDNVSIDARSLQNGDDSYKPRGTISISSNQVQAEWIEQYEPGVYITLTTLRDGTRDLKRVRFSRRRFGEHQAENWWNENREKVYEKYNVRSSERVSSAASTRSAY

SEQ ID NO: 10140 - protein, 480 aa, Hordeum vulgare subsp. vulgare
RHEEKVVTETLVKEVSKSGPKEIEKEVKVKVEKEKENVEIEATLQPTGAGTEAPILAVPMLAVPCFIAPPGFAGQFAMSHQAALSSVTAQAQIQLQSPASSAYSEGLPSPFPHPITPKAIRPLQQAPSVTQGSVGRPIAERPSSSESKLQHHAAINIVGDGFNWRKYGQKQVKSSDNSRSYYRCTNSSCLAKKKVEHCPDGRIIEIIYRGTHSHEPPQMTRFVKERLPHIYVPPIGDETLQLANSEIVESRTMTCKLNKSEAIENSEQQLFCSSDCEGDVGNKSEDEHRSAESQPKRRSLCCCTICAIRFSELSGAKDYRAAAKMSDGYRWRKYGQKIVKGNPNPRSYYRCTHDGCPVRKHVERAPDDINNMVVTYEGKHNHGQPFRSSNESRNESVSVITPAMTITEQSRIVSSTSDQKLPTSTEKAADSESTMDTTLELGGKKPPESAQTLHSMKINPDGLKNSLLKDTSAAVPVQNN

SEQ ID NO: 10141 - protein, 338 aa, Malus x domestica
YLARCGLGGLGVVAEVTIQCVDRQELVEHTTVSTMAEIKKNHKKLLSENRHVKYLYIPYTDTVVVVKCNPVSKWKGPPKFTPKYSSDEAIQHVRDLYRECLQKYRVVPDKSEVDMNELSFTELRDKLLALDPLDKDHVAKVNQAEAEFWKKSEGYRVGWSDEILGFDCGGQQWVSETCFPAGTLAKPSMKDLEYIEGVKQLIEKNEIPAPAPIEQRWTACTKSPMSPASSTREDDIFSWVGIIMYLPTTDPRQGKEITEEFFHYRRLTQTQLWDKYSAYEHWAKIEVPKDKDELAALQDRLRKRFPVDAYNKARRELDPNRILSNSKLEKLFPLSDTI

SEQ ID NO: 10142 - protein, 255 aa, Gossypium barbadense
MEMYPSTIDSDLMMLDSIRRLLLGESSDLRFTSSNDCTNVGAAPPMFCRSSSFSRLYPCLTDIWGDLPLKENDSEDMLVFGYLRDALTVGWAPSDHSSPTFPPIKPEPQEIPTETAVKEVPTVANAAVPTVVPAKGKHYRGVRQRPWGKFAAEIRDPAKNGARVWLGTFETAEDAALAYDKAAYRMRGSRALLNFPLRVNSGEPDPVRITSKRATPEPSTSSSSGSENGSPKRRRKVGSAAPVVAQAGLNMGFGA

SEQ ID NO: 10143 - protein, 232 aa, Salvia miltiorrhiza
MCGGSIISDEPIIKKRGKLSPQELWAQLDTISEFWGFDSSNDVPNQPKHSSIKKEKYKKSEKGNEKPRKSKYRGIRQRPWGKWAAEIRDPNKGVRVWLGTFNTPEEAARAYDGAARRIRGDKAKLNFPNHHQPRTPPEQPPPKRLCVIPEPPVEPSPDMAYSFESLEECYPTHSQAIKDGLSSLESFLGLEPTREPQTPELARFGLDEPVGSVDLWLMDEFVSLGQNNSVFF

SEQ ID NO: 10144 - protein, 183 aa, Nodularia spumigena AV1
DPAERVYFLLKGAVKLSRVYEAGEEITVALLRENSVFGVLSLLTGNKSDRFYHAVAFTPVELLSAPIEQVEQAFKENPELSMLMLRGLSSRILQTEMMIETLAHRDMGSRLVSFLLILCRDFGVPCADGITIDLMLSHQAIAEAIGSTRVTVTRLLGDLREKEMISIHKKKITVHKPVTLSRQ

SEQ ID NO: 10145 - protein, 159 aa, Carica papaya
MSDEEHHFESKADAGASKTYPQQAGTIRKNGYIVIKSRPCKVVEVSTSKTGKHGHAKCHFVGIDIFTGKKLEDIVPSSHNCDVPHVTRTDYQLIDISEDGFVSLLTENGNTKDDLRLPTDENLLTQIKDGFAEGKDLVVSVMSSMGEEQICALKDIGPK

SEQ ID NO: 10146 - protein, 193 aa, Carica papaya
MARAVSLLLLLSIFYIAGTSSAYSRPSSSYIQKSCKATTFPAVCLQTLSAYSSKIQQSPQNLALTALSVSLSRAQYAKGFVSKMTKFKGLKRREYQAIKDCVEEMDDTVDRLSKAAQELQRLSGFRGDEFLFHMSNVQTYVSAALTDENTCFDGFAGRALNGKLKSSIRAQVVKVSQVTSNALALVNQLAATH

SEQ ID NO: 10147 - protein, 198 aa, Ostreococcus tauri
MSAFVRGAIGLPAGLTMVVLTGAELFTGNVFVMTSGALDGAVNATQVARSWVLSYVGNFVGSVFMAYMAVAAMTAASPAASAAAIGIATAKASLPFGAAFAKGLLCNWLVTLAVWGTMATTSTAGKILAIFWPIMTFVALGFEHSVANMFLIPHGMFLGADVTWSQMIFGNIIPVTLGNIAGAVLFTAGAHWIAYGKK

SEQ ID NO: 10148 - protein, 460 aa, Agaricus bisporus
MSQQERTRVAIVGAGIVGLTLAIALNAFDKERKLAIDIYENASELAEIGAGINVWPRTLAIFKQIGVEDALIPLLDHIPDLEPRIIFGIRKGDEKNGYQVYDTMNNGGALRVHRAHLQNTLIQHLPLPGSKVTEINSICGFHLGHNLIDYSHHSSSGQGPLTLHFSDGKPSRTCDILVGADGIKSTLRHLFLPRLPNPEKYLNCYEPKWKGLLAYRGLVPKEKLEAVSPGHRALTHPGLMYSGKSAYAVVYPVSNGKFINVVAIVHDNPTNSTVWPGPWRMDVTQSEFFEVYKGWDEEVLDLIRCVDKPTKWALHALDHLDVYAKGRVFLMGDAAHAMLPHLGAGAHVGMEDAYILASLITHSSTPIWPSTQHVSEIANIYNTMRIPRAVSMSNSTDEAGYLCNLENPGLEEFKVGDHIPKELLIQTARTMEKKWAWTTTYADEDRIKAISLLEGPRAVL

SEQ ID NO: 10149 - protein, 1331 aa, Trichophyton rubrum
MVEVSEKPNTQDDGVSKQENRNPASSSSSTSDKEKVAKKGNSDATKSSTPEDLDAQLAHLPEHEREILKQQLFIPDAKATYGTLFRYATRNDMIFLAIVSLASIAAGAALPLFTVLFGSLAGTFRDIALHRITYDEFNSILTRNSLYFVYLGIAQFILLYVSTVGFIYVGEHITQKIRAKYLHAILRQNIGFFDKLGAGEVTTRITADTNLIQDGISEKVGLTLTALSTFFSAFIIGYVRYWKLALICSSTIVAMILVMGGISRFVVKSGRMTLVSYGEGGTVAEEVISSIRNATAFGTQEKLARQYEVHLKEARKWGRRLQMMLGIMFGSMMAIMYSNYGLGFWMGSRFLVGGETDLSAIVNILLAIVIGSFSIGNVAPNTQAFASAISAGAKIFSTIDRVSAIDPGSDEGDTIENVEGTIEFRGIKHIYPSRPEVVVMEDINLVVPKGKTTALVGPSGSGKSTVVGLLERFYNPVSGSVLLDGRDIKTLNLRWLRQQISLVSQEPTLFGTTIFENIRLGLIGSPMENESEEQIKERIVSAAKEANAHDFIMGLPDGYATDVGQRGFLLSGGQKQRIAIARAIVSDPKILLLDEATSALDTKSEGVVQAALDAASRGRTTIVIAHRLSTIKSADNIVVIVGGRIAEQGTHDELVDKKGTYLQLVEAQKINEERGEESEDEAVLEKEKEISRQISVPAKSVNSGKYPDEDVEANLGRIDTKKSLSSVILSQKRSQEKETEYSLGTLIRFIAGFNKPERLIMLCGFFFAVLSGAGQPVQSVFFAKGITTLSLPPSLYGKLREDANFWSLMFLMLGLVQLVTQSAQGVIFAICSESLIYRARSKSFRAMLRQDIAFFDLPENSTGALTSFLSTETKHLSGVSGATLGTILMVSTTLIVALTVALAFGWKLALVCISTVPVLLLCGFYRFWILAQFQTRAKKAYESSASYACEATSSIRTVASLTREQGVMEIYEGQLNDQAKKSLRSVAKSSLLYAASQSFSFFCLALGFWYGGGLLGKGEYNAFQFFLCISCVIFGSQSAGIVFSFSPDMGKAKSAAADFKRLFDRVPTIDIESTDGEKLETVEGTIEFRDVHFRYPTRPEQPVLRGLNLTVKPGQYIALVGPSGCGKSTTIALVERFYDTLSGGVYIDGKDISRLNVNSYRSHLALVSQEPTLYQGTIRDNVLLGVDRDDVPDEQVFAACKAANIYDFIMSLPDGFGTVVGSKGSMLSGGQKQRIAIARALIRDPKVLLLDEATSALDSESEKVVQAALDAAAKGRTTIAVAHRLSTIQKADIIYVFDQGRIVESGTHHELLQNKGRYYELVHMQSLEKTQ

SEQ ID NO: 10150 - protein, 144 aa, Solanum peruvianum
MSTVVDVVSQLLFPESIERLVSPSRSNESKGTIPVDILDTPKEYIFYMDVPGLSKSDLQVSVEDEKTLVIRSNGKRKREESEEEGCKYVRLERNPPLKLMRKFKLPDYCNVSAITAKCENGVLTVVVEKMPPPSKAKTVKVAVS

SEQ ID NO: 10151 - protein, 259 aa, Phaseolus vulgaris
EGCVEEPGHHAEKKRRLSVDQVKALEKNFEVENKLEPDRKVKLAQELGLQPRQVAVWFQNRRARWKTKQLERDYGVLKANYDSLKLNYDTLQQDNEALLKEIKELKSRLLLQEESNTESDVSVKEEMITLQDSNPLCETAIPGSESKELSYECFNKSDEVLGFKDGSSDSDSSAILNEENANNNDNSPNNATISSSGAMQSQSFLSSSSPMNCFQFQKQFPTQYVKMEEHNFLSADEACNFFSDEQAPTLQWYCSEEWS

SEQ ID NO: 10152 - protein, 327 aa, Phaseolus vulgaris
MAGGKLHPGSNMSLLLQNDRLPCSSEVLESLWAHTSNAASFQGSKSMVDFENVSGGRVTDRPFFQALEKEDNCDDDYEGCFHQPGKKRRLTSEQVQFLERNFEVENKLEPERKVQLAKELGLQPRQVAIWFQNRRARFKTKQLEKDYGTLKASYDRLKGDYESLLQENDKLKAEVNSLESKLILRDKEKENSDDKSSPDAVNSPHKEPMDLISNSTSENGTKVSLPIMVTCKQEDANSAKSDVLDSDSPHCTDGNHPSSFVEPADSSHAFEPDHSDFSQDEEDNLSESLLTLPCLPKVEEACYDDPPENPCNFGFHVEDQTFCFWPY

SEQ ID NO: 10153 - protein, 224 aa, Phaseolus vulgaris
EQMPEKKHRLSSEQVHLLEKSFEEENKLEPERKTQLAKKLGLQPRQVAVWFQNRRARWKTKQLERDFDVLKSSYDTLLSSYDSLMKDNEKLKSEVVSLNEKLQDQAKEVPEEPFYDKKVDPLPVEDIATIFSTRVEDHQSSGSVGSAVVDEGSPQLVVDSVDSYLPADNPGGCVGPVERIQSEEEDGSDDGRSYMDVFVVSETENQNHEEGEALVWWTNMYYVE

SEQ ID NO: 10154 - protein, 391 aa, Brachyspira pilosicoli
MREIVIASAVRTPVGKFLGSFANTSAVELGTIAVKEALKRANIKPEQVDETYFGCVIQSALLPNVARQVSVNAGIPVEKPALTINILCGSGLRAVSMAAQMIKAGDADIVVAGGTENMSMAPYTSSAMRMGARMGETKMQDTLLNDALVCAFEHYHMGVTAENIAEQWKITREEQDEFACRSQNRAEAAIKSGRFKDEIVPVTIKTKKGEIVVDTDEHPTFGTTMESLARLKPAFKKDGTVTAGNASGINDAASAVVLMSKEKADELGIKPMAKVLGYATHGVEPRIMGIGPIEASRKALKMANLTVEDMDLIESNEAFAAQSIAVARELKFNMDIVNVNGGAIAIGHPIGASGARILTTLLYEMKKRGSKKGLATLCIGGGMGTALVVEM

SEQ ID NO: 10155 - protein, 239 aa, Platanus x acerifolia
MGRGRVELKRIENKINRQVTFSKRRNGILKKAYELSVLCDAEVALIIFSNRGKQSEFCSNSSMYKTLERYQKCSYGAPEKNASTRETQEHNSYQEYLRLKARFEALQRSQRNLLGEDLGPLSGKELDSLERQLGMSLKHIRSTRTQYMLDQLTDLQKREQTLTEANMTLKRRLEEESQATWNPSAHGVGCGQQPSQPHSNGFFHPLQCEPTLQIGYQPNQIAVTAPGPCVNNYMPVWLA

SEQ ID NO: 10156 - protein, 256 aa, Humulus lupulus
VLGLPYAFKKTGWVFGALVFFSVALLTYHYMMLLIATPPPARFRFWATPKIASFGDLGFTVCGPVGRLSVDVMLVLAQAGFCVSYLIFISNTLAFLFNYQFLGLGVSPKSLFLWACFPFQLGLNSIPTLTHLAPLSIFADVVDLGAVGVVMVEDVVIFLNQRPALQAFGGLSVFFYGLGVAVYAFEGIGMILPLESEAKDKGKFGKVLALCMAFIALLYGSFGVLGYFAFGDETRDIITTNFGQGLVSTMVQLGCA

SEQ ID NO: 10157 - protein, 298 aa, Escherichia coli
MGSSHHHHHHSSGLVPRGSHMKKNRAFLKWAGGKYPLLDDIKRHLPKGECLVEPFVGAGSVFLNTDFSRYILADINSDLISLYNIVKMRTDEYVQAARELFVPETNCAEVYYQFREEFNKSQDPFRRAVLFLYLNRYGYNGLCRYNLRGEFNVPFGRYKKPYFPEAELYHFAEKAQNAFFYCESYADSMARADDASVVYCDPPYAPLSATANFTAYHTNSFTLEQQAHLAEIAEGLVERHIPVLISNHDTMLTREWYQRAKLHVVKVRRSISSNGGTRKKVDELLALYKPGVVSPAKK

SEQ ID NO: 10158 - protein, 360 aa, Bambusa oldhamii
MGSTAADMAAAADEEACMYAMQLASSSILPMTLKNAIELGLLEILVGAGGNALSPAEVAALLPSTANPDAPAMVDRMLRLLASYNVVSCVVEEGKDGRLSRRYGPAPVCKWLTPNEDGVSMAALALMNQDKVLMESWYYLKDAVLDGGIPFNKAYGMTAFEYRGTDPRFNRVFNEGMKNHSIIITKKLLEFYTGFDGVGTLIDVGGGIGATLYAITSKYPQIKGINFDLPHVISEAPPFPGVQHVGGNMFEKVPSGDAILMKWILHDWSDEHCATLLKNCYDALPAHGKVIIVECILPVNPEATPKAQGVFHVDMIMLAHNPGGKERYEREFEELARGAGFASVKATYIYATAWAIEFIK

SEQ ID NO: 10159 - protein, 315 aa, Raphanus sativus
MASNIAILVIVITLLLQGGEAQLTTNFYSTSCPNLLSTVKSGVKSAVSSQPRMGASILRLFFHDCFVNGCDGSILLDDTSFTGEQNAGPNRNSARGFNVIDNIKSAVEKACPGVVSCADILAIAARDSVVQLGGPNWNVKVGRRDAKTASQAAANSNIPAPSMSLSQLISSFRAVGLSTRDMVALSGAHTIGQSRCTNFRTRIYNETNINAAFATLRQKSCPRAAFRRRKPQPLDINSPTSFDNSYFKNLMAQRGLLHSDQVLFNGGSTDSIVRGYSNSPSSFNSDFAAAMIKMGDISPLTGSSGEIRKVCGRTN

SEQ ID NO: 10160 - protein, 147 aa, Vicia faba
MGFTDKQEALVNSSWESFKQNLSGNSIFFYTIILEKAPAAKGLFSFLKDTAGVEDSPKLQAHAEQVFGLVRDSAAQLRAKGEVVLGNATLGAIHVQKGVTDPHFVVVKEALLQTIKKASGSNWSVELSTAWEVAYDGLASAIKKAMN

SEQ ID NO: 10161 - protein, 146 aa, Vicia faba
MGFTEKQEALVNSSWELFKQNPGNSVLFYTIILKKAPTAKGMFSFLKDSAGVVDSPKLQAHAEKVFGMVRDSAVQLRASGEIVLGDATLGAIHIQKGVLDPHFVVVKEALLETIKEISGDKWSEELSAAWEVAYEGLAVAIKKAMS

SEQ ID NO: 10162 - protein, 493 aa, Glycine max
DKGWVSSQSLLPPTPDNTMFPLLGFPVKLSRPTMELHHDNRKLVAEVDFFSHTPPPNIVKKELDQTPLHINTGLQLLTANTRSDQSTVDDGLSSDAEDKRAKTTELAQLQVELQRMNAENKKLKEMLSHVTGNYTALQMHLVTLMQQNQQRTESTENGVAQGKVEDKNHGVGGGKVPRQFLDIGPSGTAEVDDQVSDSSSDERTRSSTPQDNNTEAGTRDGARNNNGNKSELGREESPDSESQGWGPNKLQKVNPSNPMDQSTAEATMRKARVSVRARSEAPMISDGCQWRKYGQKMAKGNPCPRAYYRCTMAVGCPVRKQVQRCADDRTILVTTYEGTHNHPLPPAAMAMASTTAAAATMLLSGSMSSADGVMNPNLLARAILPCSTSMATLSASAPFPTVTLDLTHNPNPLQFQRPGAPFQVPFLQAQPQNFGSGATPIAQALYNQSKFSGLQLSQDVGSCQLAPQARRPPLQPSQHILLADTVSGDDSAI

SEQ ID NO: 10163 - protein, 263 aa, Glycine max
RVSVRARSEAPMISDGCQWRKYGQKMAKGNPCPRAYYRCTMAVGCPVRKQVQRCAEDRTILTTTYEGTHNHPLPPAAMAMASTTAAAASMLLSGSMTSADGIMNPNLLTRAILPCSSMATLSASAPFPTVTLDLTHNQNAFQNYQRPQTPLFPSQPQDFIAGSTPPQLPQLIAQALYNQSKFSGLQLSQDVGPNNSQAPRPFLQPSQQVSLTDTISAITADPNFTAALVSAISSIIGGANPNNNSANNSSSNPNVINSATINQ

SEQ ID NO: 10164 - protein, 332 aa, Glycine max
DLGLATNADTNETSHSHSSSVIRSQDSPPTNNTEVASKKNGGASDEGLVFDQDKKEFGRGIEREDSPSDQGVAANNNVPKFSPPRNVDQAEATMRKARVSVRARSEAPMITDGCQWRKYGQKMAKGNPCPRAYYRCTMAAGCPVRKQVQRCAEDRTILITTYEGNHNHPLPPAAMAMAQTTSSAARMLLSGSMSSADGLMNASFLTRTLLPCSSSMATISASAPFPTVTLDLTQSPNPLQFPKQPSQFQIPFPGVPQNFANSQASLLPQIFGQALYNQSKFSGLQMSQDSDPSQLSNQSQRPPPHLADTVSAAIAADPNFTAALAAAITSII

SEQ ID NO: 10165 - protein, 329 aa, Glycine max
GSENPRSYYKCTYPNCPTKKKVERSLDGQITEIVYKGTHNHPKPQNTRRNSSNSSSLAIPHSNPISAEIPDQSYATHGSGQMDSAATPENSSISIGDDDFEQSSQKCKSGGDEYDEDEPDAKRWKIEGENEGMSAPGSRTVREPRVVVQTTSDIDILDDGYRWRKYGQKVVKGNPNPRSYYKCTHPGCPVRKHVERASHDLRAVITTYEGKHNHDVPAARGSGSHSVNRPMPNNASNPTNTAATAISPLQVIQHSDNSHQNQRSQAPPEGQSPFTLEMLQSPGSFGFSGFGNPMQSYMNQQQQQLSDNVFSSRAKEEPRDDMFLESLLC

SEQ ID NO: 10166 - protein, 300 aa, Glycine max
CTYPNCPTKKKVERSLDGQITEIVYKGTHNHPKPQAAKRNSLSASSLAIPHSNHGGINELPHQMDSVATPENSSISMEDDDFDHTKSGGDEFDNDEPDAKRWRIEGENEGMPAIESRTVREPRVVFQTTSDIDILDDGYRWRKYGQKVVKGNPNPRSYYKCTFPGCPVRKHVERASQDLRAVITTYEGKHNHDVPAARGSGNNSMNRSLPITNTTNNTSAATSLYTNNNSLQSLRPPAAPERTSSHFNPNMQQSSSGSFGFSGFGNPLMGSYTNQQSDNVFITRAKEEPGDDSFLDSFLC

SEQ ID NO: 10167 - protein, 316 aa, Xanthoria elegans
MAEQLVMRGTLEGHSRWVTSLATSLENPNMLLSGSRDKTLIVWNLTRDDQNYGYPKRSLHGHSHIVSDCVISSDGAYALSASWDKTLRLWELATGATTRRFVGHNNDVLSVSFSADNRQIVSGSRDRTIKLWNTLGDCKFTITDKGHTEWVSCVRFSPNPQNPVIVSAGWDKLVKVWELASCRIQTDHIGHTGYINTVTISPDGSLCASGGKDGTTMLWDLNESKHLYSLTAGDEIHALVFSPNRYWLCAATSSSIIIFDLEKKSKVDELKPEYNTVGKKSREPECVSLAWSGDGQTLFAGYTDNLIRAWGVMSRG

SEQ ID NO: 10168 - protein, 446 aa, Saccharomyces cerevisiae YJM789
MDDKVSEKESSPKQTEEDSEGKMAHVQPASYVNKKKYAFGKTLGAGTFGVVRQAKNTETGEDVAVKILIKKALKGNKVQLEALYDELDILQRLHHPNIVAFKDWFESKDKFYIITQLAKGGELFDRILKKGKFTEEDAVRILVEILSAVKYMHSQNIVHRDLKPENLLYIDKSDESPLVVADFGIAKRLKSDEELLYKPAGSLGYVAPEVLTQDGHGKPCDIWSIGVITYTLLCGYSAFRAERVQDFLDECTTGEYPVKFHRPYWDSVSNKAKQFILKALNLDPSKRPTAAELLEDPWIICTELKTHNLLPGLKEGLDARQKFRDSVERVRLNMKIQKLRDLYLEQTESDSDFDEGSQANGSVPPLKATDTSQLSKKLSEEEQSKLKSELTSKAFAQLVNTVLAEKEKFLNINRVCSSDSDLPGSDIKSLDEAKEKPEGKDTKTEE

SEQ ID NO: 10169 - protein, 695 aa, Saccharomyces cerevisiae YJM789
MIVRMIRLCKGPKLLRSQFASASALYSTKSLFKPPMYQKAEINLIIPHRKHFLLRSIRLQSDIAQGKKSIKPTLKLSNANSKSSGFKDIKRLFVLSKPESKYIGLALLLILISSSVSMAVPSVIGKLLDLASESDGEDEEGSKSNKLYGLTKKQFFTALGAVFIIGAVANASRIIILKVTGERLVARLRTRTMKAALDQDATFLDTNRVGDLISRLSSDASIVAKSVTQNVSDGTRAIIQGFVGFGMMSFLSWKLTCVMMILAPPLGAMALIYGRKIRNLSRQLQTSVGGLTKVAEEQLNATRTIQAYGGEKNEVRRYAKEVRNVFHIGLKEAVTSGLFFGSTGLVGNTAMLSLLLVGTSMIQSGSMTVGELSSFMMYAVYTGSSLFGLSSFYSELMKGAGAAARVFELNDRKPLIRPTIGKDPVSLAQKPIVFKNVSFTYPTRPKHQIFKDLNITIKPGEHVCAVGPSGSGKSTIASLLLRYYDVNSGSIEFGDEDIRNFNLRKYRRLIGYVQQEPLLFNGTILDNILYCIPPEIAEQDDRIRRAIGKANCTKFLANFPDGLQTMVGARGAQLSGGQKQRIALARAFLLDPAVLILDEATSALDSQSEEIVAKNLQRRVERGFTTISIAHRLSTIKHSTRVIVLGKHGSVVETGSFRDLIAIPNSELNALLAEQQDEEGKGGVIDLDNSVAQEV

SEQ ID NO: 10170 - protein, 461 aa, Saccharomyces cerevisiae YJM789
MAPVVISESEEDEDRVAITRRTKRQVHFDGEGDDRVDQQQQQHSSSHRDRDKHVQRKKKKRLSNRNLQGSNGGYAWEDEIKRSWDLVKVDDEGDMASLVASIVEARKKRTAKKNITPYQRGIIRSLILTLDCSEAMLEKDLRPNRHAMIIQYAIDFVHEFFDQNPISQMGIIIMRNGLAQLVSQVSGNPQDHIDALKSIRKQEPKGNPSLQNALEMARGLLLPVPAHCTREVLIVFGSLSTTDPGDIHQTIDSLVSEKIRVKVLGLSAQVAICKELCKATNYGDESFYKILLDETHLKELFNEAVTPLPVNKINKGFTLVKMGFPTRIFEDTPTFCSCHSKLVYGGYFCPNCHSKVCSLPTVCPCCDLMLILSTHLARSYHHLMPLKTFAEVPTTEKFPSEDCFSCQSRFPILKNHKNGKLLTSSRYRCEDCKQEFCVDCDVFIHEILHNCPGCESKPVIT

SEQ ID NO: 10171 - protein, 893 aa, Saccharomyces cerevisiae YJM789
MSREGYPNLEEVEIPDFQETNNTVPDLDDLELEYDQYKNNENNDTFNDKDLESNSVAKHNAVNSSKGVKDSKIDYFNPSDVSLYDNSVSQFEETTVSLKEYYDHSIRSHLTVKGACSYLKSVFPIINWLPHYNFSWFTADLIAGITIGCVLVPQSMSYAQVATLPAQYGLYSSFIGAYSYSFFATSKDVCIGPVAVMSLQTAKVIADVTAKYPDGDSAITGPVIATTLALLCGIISAAVGFLRLGFLVELISLNAVAGFMTGSAFNILWGQVPALMGYNSLVNTRAATYKVVIETLKHLPDTKLDAVFGLIPLFLLYVWKWWCGTYGPRLNDRYNSKNPRLHKIIKWTYFYAQASRNGIIIIVFTCIGWAITRGKSKSERPISILGSVPSGLKEVGVFHVPPGLMSKLGPNLPASIIVLLLEHIAISKSFGRINDYKVVPDQELIAIGVSNLLGTFFNAYPATGSFSRSALKAKCNVRTPLSGLFSGSCVLLALYCLTGAFFYIPKATLSAVIIHAVSDLLASYQTTWNFWKMNPLDFICFIVTVLITVFASIEDGIYFAMCWSCAMLILKVAFPAGKFLGRVEVAEVTDAYVRPDSDVVSYVSENNNGISTLEDGGEDDKESSTKYVTNSSKKIETNVQTKGFDSPSSSISQPRIKYHTKWIPFDHKYTRELNPDVQILPPPDGVLVYRLSESYTYLNCSRHYNIITEEVKKVTRRGQLIRHRKKSDRPWNDPGPWEAPAFLKNLKFWKKRENDPESMENAPSTSVDVERDDRPLLKILCLDFSQVAQTDATALQSLVDLRKAINQYADRQVEFHFVGIISPWVKRGLISRGFGTLNEEYSDESIVAGHTSYHVARVPQGEENPEKYSVYTASGTNLPFFHIDIPDFAKWDI

SEQ ID NO: 10172 - protein, 563 aa, Saccharomyces cerevisiae YJM789
MSEITLGKYLFERLSQVNCNTVFGLPGDFNLSLLDKLYEVKGMRWAGNANELNAAYAADGYARIKGMSCIITTFGVGELSALNGIAGSYAEHVGVLHVVGVPSISSQAKQLLLHHTLGNGDFTVFHRMSANISETTAMITDIANAPAEIDRCIRTTYTTQRPVYLGLPANLVDLNVPAKLLETPIDLSLKPNDAEAEAEVVRTVVELIKDAKNPVILADACASRHDVKAETKKLMDLTQFPVYVTPMGKGAIDEQHPRYGGVYVGTLSRPEVKKAVESADLILSIGALLSDFNTGSFSYSYKTKNIVEFHSDHIKIRNATFPGVQMKFALQKLLDAIPEVVKDYKPVAVPARVPITKSTPANTPMKQEWMWNQLGNFLREGDIVIAETGTSAFGINQTTFPTDVYAIVQVLWGSIGFTVGALLGATMAAEELDPKKRVILFIGDGSLQLTVQEISTMIRWGLKPYIFVLNNNGYTIEKLIHGPHAEYNEIQGWDHLALLPTFGARNYETHRVATTGEWEKLTQDKDFQDNSKIRMIEVMLPVFDAPQNLVKQAQLTAATNAKQ

SEQ ID NO: 10173 - protein, 692 aa, Saccharomyces cerevisiae YJM789
MNGKEVSSGSGRTQSNNNKKNNNGGSTGISHASGSPLTDGNGGNSNGNSRSRSRSRKSSGTTGGLLKKPPLLVNNEAVHASVPDASHTSCNNGTLEVSINNPEPHVVDAVARHLIRNPSNSLQLQGGDITRDLYKWTNDHPSSPSQYQYPSQPALSTSIPSQAPSFSNRKRSMSFSAASIASSSHLNNNSEANGNPLAAIGLAPAPMTHEEIRAPGGFRRSFIIQKRRKHNVDAPIPNFFTRNFIEFLTLYGHFAGEDLSEEEEEEEETEEEPEEEALETESTQLVSREHGRHPHKSSTVKAVLLLLKSFVGTGVLFLPKAFHNGGWGFSALCLLSCALISYGCFVSLITTKDKVGVDGYGDMGRILYGPKMKFAILSSIALSQIGFSAAYTVFTATNLQVFSENFFHLKPGSISLATYIFAQVLIFVPLSLTRNIAKLSGTALIADLFILLGLVYVYVYSIYYIAVNGVASDTMLMFNKADWSLFIGTAIFTFEGIGLLIPIQESMKHPNHFRPSLSAVMCIVAVIFISCGLLCYAAFGSDVKTVVLLNFPQDTSYTLTVQLLYALAILLSTPLQLFPAIRILENWTFPSNASGKYNPKVKWLKNYFRCAIVVLTSILAWVGANDLDKFVSLVGSFACIPLIYIYPPLLHYKASILSGTSRARLLLDLIVIVFGVAVMAYTSWQTIKMWSQ

SEQ ID NO: 10174 - protein, 1518 aa, Saccharomyces cerevisiae YJM789
MTGHVSKTSHVPKGRPSSLAKKAAKRAMAKVNSNPKRASGHLERVVQSVNDATKRLSQPDSTVSVATKSSKRKSRDTVGPWKLGKTLGKGSSGRVRLAKNMETGQLAAIKIVPKKKAFVHCSNNGTVPNSYSSSMVTSNVSSPSIASREHSNHSQTNPYGIEREIVIMKLISHTNVMALFEVWENKSELYLVLEYVDGGELFDYLVSKGKLPEREAIHYFKQIVEGVSYCHSFNICHRDLKPENLLLDKKNRRIKIADFGMAALELPNKLLKTSCGSPHYASPEIVMGRPYHGGPSDVWSCGIVLFALLTGHLPFNDDNIKKLLLKVQSGKYQMPSNLSSEARDLISKILVIDPEKRITTQEILKHPLIKKYDDLPVNKVLRKMRKDNMARGKSNSDLHLLNNVSPSIVTLHSKGEIDESILRSLQILWHGVSRELITAKLLQKPMSEEKLFYSLLLQYKQRHSISLSSSSENKKSATESSVNEPRIEYASKTANNTGLRSENNDVKTLHSLEIHSEDTSTVNQNNAITGVNTEINAPVLAQKSQFSINTLSQPESDKAEAEAVTLPPAIPIFNASSSRIFRNSYTSISSRSRRSLRLSNSRLSLSASTSRETVHDNEMPLPQLPKSPSRYSLSRRAIHASPSTKSIHKSLSRKNIAATVAARRTLQNSASKRSLYSLQSISKRSLNLNDLLVFDDPLPSKKPASENVNKSEPHSLESDSDFEILCDQILFGNALDRILEEEEDNEKERDTQRQRQNDTKSSADTFTISGVSTNKENEGPEYPTKIEKNQFNMSYKPSENMSGLSSFPIFEKENTLSSSYLEEQKPKRAALSDITNSFNKMNKQEGMRIEKKIQREQLQKKNDRPSPLKPIQHQELRVNSLPNDQGKPSLSLDPRRNISQPVNSKVESLLQGLKFKKEPASHWTHERGSLFMSEHVEDEKPVKASDVSIESSYVPLTTVATSSRDPSVLAESSTIQKPMLSLPSSFLNTSMTFKNLSQILADDGDDKHLSVPQNQSRSVAMSHPLRKQSAKISLTPRSNLNANLSVKRNQGSPGSYLSNDLDGISDMTFAMEIPTNTFTAQAIQLMNNDTDNNKINTSPKASSFTKEKVIKSAAYISKEKEPDNSDTNYIPDYTIPNTYDEKAINIFEDAPSDEGSLNTSSSESDSRASVHRKAVSIDTMATTNVLTPATNVRVSLYWNNNSSGIPRETTEEILSKLRLSPENPSNTHMQKRFSSTRGSRDSNALGISQSLQSMFKDLEEDQDGHTSQADILESSMSYSKRRPSEESVNPKQRVTMLFDEEEEESKKVGGGKIKEEHTKLDNKISEESSQLVLPVVEKKENANNTENNYSKIPKPSTIKVTKDTAMESNTQTHTKKPILKSVQNVEVEEAPSSDKKNWFVKLFQNFSSHNNATKASKNHVTNISFDDAHMLTLNEFNKNSIDYQLKNLDHKFGRKVVEYDCKFVKGNFKFKIKITSTPNASTVITVKKRSKHSNTSSNKAFEKFNDDVERVIRNAGRS

SEQ ID NO: 10175 - protein, 2145 aa, Saccharomyces cerevisiae YJM789
MPVLKSDNFDPLEEAYEGGTIQNYNDEHHLHKSWANVIPDKRGLYDPDYEHDACGVGFVANKHGGQSHKIVTDARYLLVNMTHRGAVSSDGNGDGAGILLGIPHEFMKREFKLDLDLDIPEMGKYAVGNVFFKKNEKNNKKNLIKCQKIFEDLAASFNLSVLGWRNVPVDSTILGDVALSREPTILQPLLVPLYDEKQPEFNETKFRTQLYLLRKEASLQIGLENWFYVCSLNNTTIVYKGQLTPAQVYNYYPDLTNAHFKSHMALVHSRFSTNTFPSWDRAQPLRWLAHNGEINTLRGNKNWMRSREGVMNSATFKDELDKLYPIIEEGGSDSAALDNVLELLTINGTLSLPEAVMMMVPEAYHKDMDSDLKAWYDWAACLMEPWDGPALLTFTDGRYCGAILDRNGLRPCRYYITSDDRVICASEVGVIPIENSLVVQKGKLKPGDLFLVDTQLGEMVDTKKLKSQISKRQDFKSWLSKVIKLDDLLSKTANLVPKEFISQDSLSLKVQSDPRLLANGYTFEQVTFLLTPMALTGKEALGSMGNDAPLACLNENPVLLYDYFRQLFAQVTNPPIDPIREANVMSLECYVGPQGNLLEMHSSQCDRLLLKSPILHWNEFQALKNIEAAYPSWSVAEIDITFDKSEGLLGYTDTIDKITKLASEAIDDGKKILIITDRRMGANRVSISSLIAISCIHHHLIRNKQRSQVALILETGEAREIHHFCVLLGYGCDGVYPYLAMETLVRMNREGLLRNVNNDNDTLEEGQILENYKHAIDAGILKVMSKMGISTLASYKGAQIFEALGLDNSIVDLCFTGTSSRIRGVTFEYLAQDAFSLHERGYPSRQTISKSVNLPESGEYHFRDGGYKHVNEPTAIASLQDTVRNKNDVSWQLYVKKEMEAIRDCTLRGLLELDFENSVSIPLEQVEPWTEIARRFASGAMSYGSISMEAHSTLAIAMNRLGAKSNCGEGGEDAERSAVQENGDTMRSAIKQVASARFGVTSYYLSDADEIQIKIAQGAKPGEGGELPAHKVSKDIAKTRHSTPNVGLISPPPHHDIYSIEDLKQLIYDLKCANPRAGISVKLVSEVGVGIVASGVAKAKADHILVSGHDGGTGAARWTSVKYAGLPWELGLAETHQTLVLNDLRRNVVVQTDGQLRTGFDIAVAVLLGAESFTLATVPLIAMGCVMLRRCHLNSCAVGIATQDPYLRSKFKGQPEHVINFFYYLIQDLRQIMAKLGFRTIDEMVGHSEKLKKRDDVNAKAINIDLSPILTPAHVIRPGVPTKFTKKQDHKLHTRLDNKLIDEAEVTLDRGLPVNIDASIINTDRALGSTLSYRVSKKFGEDGLPKDTVVVNIEGSAGQSFGAFLASGITFILNGDANDYVGKGLSGGIIVIKPPKDSKFKSDENVIVGNTCFYGATSGTAFISGSAGERFGVRNSGATIVVERIKGNNAFEYMTGGRAIVLSQMESLNAFSGATGGIAYCLTSDYDDFVGKINKDTVELESLCDPVEIAFVKNLIQEHWNYTQSDLAARILGNFNHYLKDFVKVIPTDYKKVLLKEKAEAAKAKAKATSEYLKKFRSNQEVDDEVNTLLIANQKAKEQEKKKSITISNKATLKEPKVVDLEDAVPDSKQLEKNSERIEKTRGFMIHKRRHETHRDPRTRVNDWKEFTNPITKKDAKYQTARCMDCGTPFCLSDTGCPLSNIIPKFNELLFKNQWKLALDKLLETNNFPEFTGRVCPAPCEGACTLGIIEDPVGIKSVERIIIDNAFKEGWIKPCPPSTRTGFTVGVIGSGPAGLACADMLNRAGHTVTVYERSDRCGGLLMYGIPNMKLDKAIVQRRIDLLSAEGIDFVTNTEIGKTISMDELKNKHNAVVYAIGSTIPRDLPIKGRELKNIDFAMQLLESNTKALLNKDLEIIREKIQGKKVIVVGGGDTGNDCLGTSVRHGAASVLNFELLPEPPVERAKDNPWPQWPRVMRVDYGHAEVKEHYDRDPREYCILSKEFIGNDEGEVTAIRTVRVEWKKSQSGVWQMVEIPNSEEIFEADIILLSMGFVGPELINGNDNEVKKTRRGTIATLDDSSYSIDGGKTFACGDCRRGQSLIVWAIQEGRKCAASVDKFLMDGTTYLPSNGGIVQRGYKLLKELASQV

SEQ ID NO: 10176 - protein, 835 aa, Saccharomyces cerevisiae YJM789
MGEEHKPLLDASGVDPREEDKTATAILRRKKKDNMLLVDDAINDDNSVIAINSNTMDKLELFRGDTVLVKGKKRKDTVLIVLIDDELEDGACRINRVVRNNLRIRLGDLVTIHPCPDIKYATRISVLPIADTIEGITGNLFDVFLKPYFVEAYRPVRKGDHFVVRGGMRQVEFKVVDVEPEEYAVVAQDTIIHWEGEPINREDEENNMNEVGYDDIGGCRKQMAQIREMVELPLRHPQLFKAIGIKPPRGVLMYGPPGTGKTLMARAVANETGAFFFLINGPEVMSKMAGESESNLRKAFEEAEKNAPAIIFIDEIDSIAPKRDKTNGEVERRVVSQLLTLMDGMKARSNVVVIAATNRPNSIDPALRRFGRFDREVDIGIPDATGRLEVLRIHTKNMKLADDVDLEALAAETHGYVGADIASLCSEAAMQQIREKMDLIDLDEDEIDAEVLDSLGVTMDNFRFALGNSNPSALRETVVESVNVTWDDVGGLEEIKEELKETVEYPVLHPDQYTKFGLSPSKGVLFYGPPGTGKTLLAKAVATEVSANFISVKGPELLSMWYGESESNIRDIFDKARAAAPTVVFLDELDSIAKARGGSLGDAGGASDRVVNQLLTEMDGMNAKKNVFVIGATNRPDQIDPAILRPGRLDQLIYVPLPDENARLSILNAQLRKTPLEPGLELTAIAKATQGFSGADLLYIVQRAAKYAIKDSIEAHRQHEAEKEVKVEGEDVEMTDEGAKAEQEPEVDPVPYITKEHFAEAMKTAKRSVSDAELRRYEAYSQQMKASRGQFSNFNFNDAPLGTTATDNANSNNSAPSGAGAAFGSNAEEDDDLYS

SEQ ID NO: 10177 - protein, 621 aa, Saccharomyces cerevisiae YJM789
MNSSYTQRYALPKYIAISDYLFHRLNQLNIHTIFGLSGEFSMPLLDKLYNIPNLRWAGNSNELNAAYAADGYSRLKGLGCLITTFGVGELSAINGVAGSYAEHVGILHIVGMPPTSAQTKQLLLHHTLGNGDFTVFHRIASDVACYTTLIIDSELCADEVDKCIKKAWIEQRPVYMGMPVNQVNLPIESARLNTPLDLQLHKNDPDVEKEVISRILSFIYKSQNPAIIVDACTSRQNLIEETKELCNRLKFPVFVTPMGKGTVNETDPQFGGVFTGSISAPEVREVVDFADFIIVIGCMLSEFSTSTFHFQYKTKNCALLYSTSVKLKNATYPDLSIKLLLQKLLANLDESKLSYQPSEQPSMMVPRPYPAGNVLLRQEWVWNEISHWFQPGDIIITETGASAFGVNQTRFPVNTLGISQALWGSVGYTMGACLGAEFAVQEINKDKFPATKHRVILFMGDGAFQLTVQELSTIVKWGLTPYIFVMNNQGYSVDRFLHHRSDASYYDIQPWNYLGLLRVFGCTNYETKKIITVGEFRSMISDPNFATNDKIRMIEIMLPPRDVPQALLDRWVVEKEQSKQVQEENENSSAVDTPTPEFQPLLKKIKLDTDLISPPYYQGPS

SEQ ID NO: 10178 - protein, 764 aa, Saccharomyces cerevisiae YJM789
MSTNSFHDYVDLKSRTNTRQFSDDEEFTTPPKLSNFGSALLSHTEKTSASEILSSHNNDKIANRLEEMDRSSSRSHPPPSMGNLTSGHTSTSSHSTLFGRYLRNNHQTSMTTMNTSDIEINVGNSLDKSFERIRNLRQNMKEDITAKYAERRSKRFLISNRTTKLGPAKRAMTLTNIFDEDVPNSPNQPINARETVELPLEDSHQTNFKETKRNTDYDSIDFGDLNPIQYIKKHNLPTSDLPLISQIYFDKQREENRQAALRKHSSRELLYKSRSSSSSLSSNNLLANKDNSITSNNGSQPRRKVSTGSSSSKSSIEIRRALKENIDTSNNSNFNSPIHKIYKGISRNKDSDSEKREVLRNISINANHADNLLQQENKRLKRSLDDAITNENINSKNLEVFYHRPAPKPPVTKKVEIVEPAKSASLSNNRNIITVNDSQYEKIELLGRGGSSRVYKVKGSGNRVYALKRVSFDAFDDSSIDGFKGEIELLEKLKDQKRVIQLLDYEMGDGLLYLIMECGDHDLSQILNQRSGMPLDFNFVRFYTKEMLLCIKVVHDAGIVHSDLKPANFVLVKGILKIIDFGIANAVPEHTVNIYRETQIGTPNYMAPEALVAMNYTQNSENQHEGNKWKVGRPSDMWSCGCIIYQMIYGKPPYGSFQGQNRLLAIMNPDVKIPFPEHTSNNEKIPKSAIELMKACLYRNPDKRWTVDKVLSSTFLQPFMISGSIMEDLIRNAVRYGSEKPHISQDDLNDVVDTVLRKFADYKI

SEQ ID NO: 10179 - protein, 896 aa, Saccharomyces cerevisiae YJM789
MTTTAQDNSPKKRQRIINCVTQLPYKIQLGESNDDWKISATTGNSALYSSLEYLQFDSTEYEQHVVGWTGEITRTERNLFTREAKEKPQDLDDDPLYLTKEQINGLTTTLQDHMKSDKEAKTDTTQTAPVTNNVHPVWLLRKNQSRWRNYAEKVIWPTFHYILNPSNEGEQEKNWWYDYVKFNEAYAQKIGEVYRKGDIIWIHDYYLLLLPQLLRMKFNDESIIIGYFHHAPWPSNEYFRCLPRRKQILDGLVGANRICFQNESFSRHFVSSCKRLLDATAKKSKNSSNSDQYQVSVYGGDVLVDSLPIGVNTTQILKDAFTKDIDSKVLSIKQAYQNKKIIIGRDRLDSVRGVVQKLRAFETFLAMYPEWRDQVVLIQVSSPTANRNSPQTIRLEQQVNELVNSINSEYGNLNFSPVQHYYMRIPKDVYLSLLRVADLCLITSVRDGMNTTALEYVTVKSHMSNFLCYGNPLILSEFSGSSNVLKDAIVVNPWDSVAVAKSINMALKLDKEEKSNLESKLWKEVPTIQDWTNKFLSSLKEQASSDDDMERKMTPALNRPVLLENYKQAKRRLFLFDYDGTLTPIVKDPAAAIPSARLYTILQKLCADPHNQIWIISGRDQKFLNKWLGGKLPQLGLSAEHGCFMKDVSCQDWVNLTEKVDMSWQVRVNEVMEEFTTRTPGSFIERKKVALTWHYRRTVPELGEFHAKELKEKLLSFTDDFDLEVMDGKANIEVRPRFVNKGEIVKRLVWHQHGKPQDMLKGIREKLPKDEMPDFVLCLGDDFTDEDMFRQLNTIETCWKEKYPDQKNQWGNYGFYPVTVGSASKKTVAKAHLTDPQQVLETLGLLVGDVSLFQSAGTVDLDSRGHVKNSESSLKSKLASKAYVMKRSASYTGAKV

SEQ ID NO: 10180 - protein, 285 aa, Saccharomyces cerevisiae YJM789
MCSFQVPSAFSFNYTSYCYKRHQARYYTAAKLFQEMPVIEINDQEQFTYLTTTAAGDKLIVLYFHTSWAEPCKALKQVFEAISNEPSNSNVSFLSIDADENSEISELFEISAVPYFIIIHKGTILKELSGADPKEFVSLLEDCKNSVNSGSSQTHTMENANVNEGSHNDEDDDDEEEEEETEEQINARLTKLVNAAPVMLFMKGSPSEPKCGFSRQLVGILREHQVRFGFFDILRDESVRQNLKKFSEWPTFPQLYINGEFQGGLDIIKESLEEDPDFLQHALQS

SEQ ID NO: 10181 - protein, 507 aa, Saccharomyces cerevisiae YJM789
MTMTHQQDLKGVFTAKDLDFKPAGKITKKDLNTGVTKAEYAVRGAIPTRADELKEELKKNPEVLPFDDIINANIGNPQQLDQKPLTFTRQVLAILEYPEILRVGHNELASLNLFSRDALERAERLLNDIGGSIGAYSHSQGVPGIRQTVADFITRRDGGEPATPEDIYLTTGASSAATSLLSLLCKDSQTGLLIPIPQYPLYTASASLFNAQVLPYYLDEESNWSTNSDEIEKVVQDALKKQIRPSVLIVINPGNPTGAVLSEETIARICLIAAKYGITIISDEVYQENIFNDVKFHSMKKVLRKLQHLYPGKFDNVQLASLHSISKGFMGECGQRGGYMEIIGFSQEIRDALFKLMSISICSVVTGQAVVDLMVKPPQPGDESYEQDHDERLKIFHEMRTRANLLYETFKELEGIECQKPQGAMYLFPRLVLPKKALCESERLGIEPDEFYCTSLLESTGICTVPGSGFGQRPGTYHVRTTFLAPGTKWIQDWKEFHQDFFSKYRN

SEQ ID NO: 10182 - protein, 811 aa, Saccharomyces cerevisiae YJM789
MLRQATKAPIQKYLQRTQLLRRSTPRIYTIVQCKRSICSFNARPRVANKLLADIKTNALNEVAISTCALKSSYGLPNFKRTYVQMRMDPNQQPEKPALEQFGTNLTKLARDGKLDPVIGRDEEIARAIQILSRRTKNNPCLIGRAGVGKTALIDGLAQRIVAGEVPDSLKDKDLVALDLGSLIAGAKYRGEFEERLKKVLEEIDKANGKVIVFIDEVHMLLGLGKTDGSMDASNILKPKLARGLRCISATTLDEFKIIEKDPALSRRFQPILLNEPSVSDTISILRGLKERYEVHHGVRITDTALVSAAVLSNRYITDRFLPDKAIDLVDEACAVLRLQHESKPDEIQKLDRAIMKIQIELESLKKETDPVSVERREALEKDLEMKNDELNRLTKIWDAERAEIESIKNAKANLEQARIELEKCQREGDYTKASELRYSRIPDLEKKVALSEKSKDGDKVNLLHDSVTSDDISKVVAKMTGIPTETVMKGDKDRLLYMENSLKERVVGQDEAIAAISDAVRLQRAGLTSEKRPIASFMFLGPTGTGKTELTKALAEFLFDDESNVIRFDMSEFQEKHTVSRLIGAPPGYVLSESGGQLTEAVRRKPYAVVLFDEFEKAHPDVSKLLLQVLDEGKLTDSLGHHVDFRNTIIVMTSNIGQDILLNDTKLGDDGKIDTATKNKVIEAMKRSYPPEFINRIDDILVFNRLSKKVLRSIVDIRIAEIQDRLAEKRMKIDLTDEAKDWLTDKGYDQLYGARPLNRLIHRQILNSMATFLLKGQIRNGETVRVVVKDAKLVVLPNHEEGEVVEEEAEK

SEQ ID NO: 10183 - protein, 1142 aa, Saccharomyces cerevisiae YJM789
MAINGNSIPAIKDNTIGPWKLGETLGLGSTGKVQLARNGSTGQEAAVKVISKAVFNTGNVSGTSIVGSTTPDALPYGIEREIIIMKLLNHPNVLRLYDVWETNTDLYLVLEYAEKGELFNLLVERGPLPEHEAIRFFRQIIIGVSYCHALGIVHRDLKPENLLLDHKYNIKIADFGMAALETEGKLLETSCGSPHYAAPEIVSGIPYQGFASDVWSCGVILFALLTGRLPFDEEDGNIRTLLLKVQKGEFEMPSDDEISREAQDLIRKILTVDPERRIKTRDILKHPLLQKYPSIRDSKSIRGLPREDTYLTPLSESNSSIDATILQNLVILWHGRDPEGIKEKLREPGANAEKTLYALLYRFKCDTQKELIKQQQIKKRQSISSVSVSPSKKVSTTPQRRRNRESLISVTSSRKKPISFNKFTASSASSSNLTTPGSSKRLSKNFSSKKKLSTVVNQSSPTPASRNKRASVINVEKNQKRASIFSTTKKNKRSSRSIKRMSLIPSMKRESVTTKLMSTYAKLAEDDDWEYIEKETKRTSSNFATLIDEIFEYEKYEQIRKEKEELERKVREAKAREELERRRRKQEEKERARKLLEKEDLKRKQEELKKQIEIDISDLEQELSKHKEENLDGNIRSISAPMENEEKNINHLEVDIDNILRRRNFSLQTRPVSRLDPGIMFSSPTEEVSPVEPKRTENERLTTEKKILETIRRSKFLGSSFNIDKELKLSKMEYPSIIAPQRLSEERVVSDSNDGYESLILPKDGNGVSQLKDSTTTTAPVSDGRLRKISEIRVPQFTRKSRHFSESNKRLSVLSMYSTKESFTNLVDILKNGNLDVNNQQSQRIPTPRSADDSEFLFETVNEEAEYTGNSSNDERLYDVGDSTIKDKSALKLNFADRFNGSNEAKQTDNLHLPILPPLNGDNELRKQNSQEGDQAHPKIKSMIPESGSSSHTEKEEENEEKEEKKPEQHKQEEDQEKREKVVEDMEPPLNKSVQKIREKNAGSQAKDHSKDHLKEHKQDKNTAIGNGSFFRKFSKSSDKTMELYAKISAKQMFNGLEKLLRGWTQYGLKNIKSHPNNLTLTGKLSSDNIFSLRSTLFEVNIYPRGKMSVVQFKKVSGSFKAVKKLVNEVENVLNKEGVLQK

SEQ ID NO: 10184 - protein, 773 aa, Saccharomyces cerevisiae YJM789
MLNGRLPLLRLGICRNMLSRPRLAKLPSIRFRSLVTPSSSQLIPLSRLCLRLPAVGKSLILQSFRCNSSKTVPETSLPSASPISKGSAKSAHAKEQSKTDDYKDIIRLFMLAKRDWKLLLTAILLLTISCSIGMSIPKVIGIVLDTLKTSSGSDFFDLKIPIFSLPLYEFLSFFTVALLIGCAANFGRFILLRILSERVVARLRANVIKKTLHQDAEFFDNHKVGDLISRLGSDAYVVSRSMTQKVSDGVKALICGVVGVGMMCSLSPQLSILLLFFTPPVLFSASVFGKQIRNTSKDLQEATGQLTRVAEEQLSGIKTVQSFVAEGNELSRYNVAIRDIFQVGKTAAFTNAKFFTTTSLLGDLSFLTVLAYGSYLVLQSQLSIGDLTAFMLYTEYTGNAVFGLSTFYSEIMQGAGAASRLFELTDRKPSISPTVGHKYKPDRGVIEFKDVSFSYPTRPSVQIFKNLNFKIAPGSSVCIVGPSGRGKSTIALLLLRYYNPTAGTITIDNQDISKLNCKSLRRHIGIVQQEPVLMSGTIRDNITYGLTYTPTKEEIRSVAKQCFCHNFITKFPNTYDTVIGPHGTLLSGGQKQRIAIARALIKKPTILILDEATSALDVESEGAINYTFGQLMKSKSMTIVSIAHRLSTIRRSENVIVLGHDGSVVEMGKFKELYANPTSALSQLLNEKAAPGPSDQQLQIEKVIEKEDLNESKEHDDQKKDDNDDNDNNHDNDSNNQSPETKDNNSDDIEKSVEHLLKDAAKEANPIKITPQP

SEQ ID NO: 10185 - protein, 754 aa, Saccharomyces cerevisiae YJM789
MAHEKFSIPENFTLAQSLQLLYSVVKNQYKNLADLIINSKGNKDTVTYGKIHKNLDTLLVYVNEGLRKIEKTYTLKKGLGNLVVDHPELRSIIEDFQILGQDIRIARRKAETLMAEGNGSPSLSSSSSVLGLGTGNGLRFPKLWRMGSKRDKLKEADEKEARINKQADNIRRARKLEEEKKLGAKLQYERDLELQREKLIELKVKEKVEFEVAQKLEEERVKREEEERKHREQAEKKRISTLKHERKTNYKSRASLDNFSSSSKSSGKIDNSLIKRRSLDVVRTSGERVRTPVRKSMEAAEIGMAAQLAWSQYQNGANHSKVSNNGSHSNELQIRYKPTPPLKKRYDYKKPTVNRPIIKSPTLNRQNSKSSRNIPTNSKLKASKSNTNKVSRRNEQNLEPSSPVLVSATAVPAESKPMRSKSGTPDKESSASSSLDSRKEDILKSVQGVDRNACEQILNEILVTDEKVYWEDIAGLRNAKNSLKEAVVYPFLRPDLFKGLREPVRGMLLFGPPGTGKTMIAKAVATESNSTFFSVSASSLLSKYLGESEKLVRALFYMAKKLSPSIIFIDEIDSMLTARSDNENESSRRIKTELLIQWSSLSSATAQSEDRNNTLDSRVLVLGATNLPWAIDDAARRRFSRKLYIPLPDYETRLYHLKRLMAKQKNSLQDLDYELITEMTEGFSGSDLTSLAKEAAMEPIRDLGDKLMFADFDKIRGIEIKDFQNALLTIKKSVSSESLQKYEEWSSKFGSNGS

SEQ ID NO: 10186 - protein, 150 aa, Saccharomyces cerevisiae YJM789
MFLPKFNPIRSFSPILRAKTLLRYQNRMYLSTEIRRAIEDAIESAPVVLFMKGTPEFPKCGFSRATIGLLGNQGVDPAKFAAYNVLEDPELREGIKEFSEWPTIPQLYVNKEFIGGCDVITSMARSGELADLLEEAQALVPEEEEETKDR

SEQ ID NO: 10187 - protein, 754 aa, Saccharomyces cerevisiae YJM789
MTSNNSLLGRGRMSYSSTAPPRFKRSVDQRDTFSDNFDYDKDSSNRGRTYIAASNSTTGVPPPNNSRSGCTNNTNNTNNTSNTSNTNNNDSVDENTVFETVPYYLPCFSWLPEYTFNKLWGDVIAGISVASFQIPLALSYTTSIAHVPPLCGLYSLAISPFVYGILGSVPQMIVGPESAISLVVGQAVESITLHKENVSLIDISTVITFVSGTILLFSGISRFGFLGNVLSKALLRGFISSVGLVMIINSLISELKLDKFLVSLPQHYHTPFEKILFLIDYAPAQYHIPTAIFSGCCLIVLFLTRLLKRKLMKYHKSAIFFPDILLVVIVTILISMKFNLKHRYGISIIGDFSMDNFDELKNPLTRPRRKLIPDLFSASLIVAMLGFFESTTASKSLGTTYNLTVSSNRELVALGFMNIVISLFGALPAFGGYGRSKINALSGAQSVMSGVFMGVITLITMNLLLQFVHYIPNCVLSVITTIIGISLLEEVPGDIKFHLRCGGFSELFVFAVTFCTTIFYSIEAGICIGCVYSIINIIKHSAKSRIQILARVAGTSNFTNLDDYMMNMKRNSLDVEGTEEIEGCMIVRIPEPLTFTNSEDLKQRLDRIERYGSSKIHPGRKSLRSKDSIKYVIFDLGGMTSIDSSAAQVLDEIITSYKRRNVFIYLVNVSINDKVRRRLFKAGVAASVERAQANNNENNSSNTFSDAGETYSPYFDSIDAALYEIEKMKIKGNNVPNNDSESFMSNTLFNSSLV

SEQ ID NO: 10188 - protein, 93 aa, Saccharomyces cerevisiae YJM789
MATPREPKKRTTRKKKDPNAPKRALSAYMFFANENRDIVRSENPDITFGQVGKKLGEKWKALTPEEKQPYEAKAQADKKRYESEKELYNATLA

SEQ ID NO: 10189 - protein, 877 aa, Saccharomyces cerevisiae YJM789
MSETVKDKVIIDEKVSTKGTVDYAEGAEYSERLSNHSSDFSQWYTDEQILHFMKKLGYENRTLYDIPEDVAYILKKMPELTLEDSFKILKDSIIYFKDDENIPHDQYEEWKRLVDLEDLDSKEGINEYDSFDIRAFASAIKFHSPYQEVRAVVDPEDDPTIPVETFRAYFLAIIWSVIGSGFNEFFSHRVVSISLGTPIIQMFLYICGKAWAKTIPCWAITIRGRKYGINIDKPWTQKEQMFSTLLYAICQGAFYTHYNILTQKLFYHSAFSFGYQFLLSLSVQFIGFGFAGILRKFVVYPARALWPTVMPTIAINKALLGKEKHESGMSRYKFFFLTFFIMFIYNWFPTYIINILNTFNWMTWIKPSNINLANITGGVTGLGINPISSFDWNVISFNSPLVYPFWSYLTQYLGCILAALIVIAVYYSNYMSCQYLPIFTNSLYTNTGHSFKVTEVLDSDNKLDVKKYQSYSPPYYSAGNLVSYGAFICAYPLMITWSFIVHSKLLFNAFKDWALNLWAMRKLKSWVTMFKSDYRALDDYDDPHSNAMKNYKEVPDWWYFAILIGSLVVGIAVVEHYPTNTPVWGLFVCLGFNFVFLIPTTILQATTGYSFGLNLLIEMVMGYALPGNPIAIMILKAFGYNIDGQADNYVSNLKIAHYCKIPPMALFRGQCVIVFIQIFVNLGVLNWQISNIKDFCTPHQNAKFTCPDAVTYYNASVVWGAIGPKRIFNYIYPIFKWCWLIGACIGIFFGVWKRWGKFYPRYFDPMLFVGGMLNMSPPYNLMYYTSGMIVSYISQYYMKRHHLNLWEKYNYVLSAGFSTGLVLSAIIIFFAVQYKDTAFNWWGNTVPYAGADGVGYPLKNITDTANGYFGYAPGHYP

SEQ ID NO: 10190 - protein, 572 aa, Saccharomyces cerevisiae YJM789
MCGIFAAFKHEDIHNFKPKALQLSKKIRHRGPDWSGNAVMNSTIFVHERLAIVGLDSGAQPITSADGEYMLGVNGEIYNHIQLREMCSDYKFQTFSDCEPIIPLYLEHDIDAPKYLDGMFAFCLYDSKKDRIVAARDPIGVVTLYMGRSSQSPETVYFASELKCLTDVCDSIISFPPGHVYDSETDKITRYFTPDWLDEKRIPSTPVDYHAIRHSLEKAVRKRLMAEVPYGVLLSGGLDSSLIAAIAARETEKANADANEDNNVDEKQLAGIDDQGHLHTSGWSRLHSFAIGLPNAPDLQAARKVAKFIGSIHHEHTFTLQEGLDALDDVIYHLETYDVTTIRASTPMFLLSRKIKAQGVKMVLSGEGSDEIFGGYLYFAQAPSAAEFHTESVQRVKNLHLADCLRANKSTMAWGLEARVPFLDKDFLQLCMNIDPNEKMIKPKEGRIEKYILRKAFDTTDEPDVKPYLPEEILWRQKEQFSDGVGYSWIDGLRDTAERVISDAMFANPKADWGDDIPTTKEAYWYRLKFDAWFPQKTAADTVMRWIPKADWGCAEDPSGRYAKIHEKHVSA

SEQ ID NO: 10191 - protein, 399 aa, Saccharomyces cerevisiae YJM789
MLAEKTRSIIKATVPVLEQQGTVITRTFYKNMLTEHTELLNIFNRTNQKVGAQPNALATTVLAAAKNIDDLSVLMDHVKQIGHKHRALQIKPEHYPIVGEYLLKAIKEVLGDAATPEIINAWGEAYQAIADIFITVEKKMYEEALWPGWKPFEITAKEYVASDIVEFTVKPKFGSGIELESLPITPGQYITVNTHPIRQENQYDALRHYSLCSASTKNGLRFAVKMEAARENFPAGLVSEYLHKDAKVGDEIKLSAPAGDFAINKELIHQNEVPLVLLSSGVGVTPLLAMLEEQVKCNPNRPIYWIQSSYDEKTQAFKKHVDELLAECANVDKIIVHTDTEPLINAAFLKEKSPAHADVYTCGSLAFMQAMIGHLKELEHRDDMIHYEPFGPKMSTVQV

SEQ ID NO: 10192 - protein, 266 aa, Saccharomyces cerevisiae YJM789
MSADETDAKFHPLETDLQSDTAAATSTAAASRSPSLREKPIEMPLDMGKAPSPRGEDQRVTNEEDLFLFNRLRASQNRVMDSLEPQQQSQYTSSSVSTMEPSADFASFSAVTTLPPPPHQQQQQQRQQQQQQQQLVVQAQYTQNQPNLQSDVLGTAIAEQPFYVNAKQYYRILKRRYARAKLEEKLRISRERKPYLHESRHKHAMRRPRGEGGRFLTAAEIKAMKSKKSGASDDPDDSHEDKKITTKIIQEQPHATSTAAAADNKT

SEQ ID NO: 10193 - protein, 1037 aa, Saccharomyces cerevisiae YJM789
MTVANTETHSAAKPSSTIGPWKLGETLGFGSTGKVQLAQHERTGHRTAVKVISKSIFNNNGNHSNDDSVLPYNIEREIVIMKLLSHPNVLSLYDVWETNSNLYLILEYAEKGELFNLLVDHGPLPEREAINCFRQIIIGISYCHALGIVHRDLKPENLLLDSFYNIKIADFGMAALQTDADLLETSCGSPHYAAPEIVSGLPYEGFASDVWSCGVILFALLTGRLPFDEENGNVRDLLLKVQKGQFEMPNDTEISRDAQDLIGKILVVDPRQRIKIRDILSHPLLKKYQTIKDSKSIKDLPRENTYLYPLADSNNHTSASIDDSILQNLVVLWHGRHADDIVSKLKENGTNKEKILYALLYRFKLDSVRGSNKKNRNKIKKTKKNKRSSTLSSSSSLLLNNRSIQSTPRRRTSKRHSREFSSSRKRSSFLLPSNPTDSSPIPLRSSKRITHINVASANTQATPSGVPNPHKRNSKKRSSKRLSYMPNTKRSSLTSKSLSNFTNLIDDDDWEYIEKDAKRTSSNFATLIDEIFEPEKFELAKREKAELQRKVQEAKRQSVNAQKINEDEFGSEVSDGMKELKKINDKVSSPLINYEFSQQELLQDIDTLLTNRYQLSSYTRPISRLDPGLTPVTETLPNNLKEKTALLQDTEKKIIETIRRSKFLGSLLNVRGGLSPGKSELAPIEESPIVSTTPLIYNDRMEPRRISDVEVPHFTRKSKHFTTANNRRSVLSLYAKDSIKDLNEFLIKEDPDLPPQGSTDYESRSEDPEIAESITDSRNIQYDEDDSKDGDNVNNDNILSDFPQGVGISQEYDMKDKNPNQSPISKSAEPTLVVKLPSLSSFQGKNASGLGLYQREPSKVTLPSLTSNNSSVGENIEDEAEKGTESEKITASLSDDDVKEDNGKKDNDTVNAPTTVKKPPNSVLLKKFSKGKILELEIHAKIPEKRLYEGLHKLLEGWKQYGLKNLVFNITNMIITGKLVNDSILFLRSTLFEIMVLPNGDGRSLIKFNKKTGSTKTLTKLATEIQIILQKEGVLDK

SEQ ID NO: 10194 - protein, 713 aa, Saccharomyces cerevisiae YJM789
MTASVSNTQNKLNELLDAIRQEFLQVSQEANTYRLQNQKDYDFKMNQQLAEMQQIRNTVYELELTHRKMKDAYEEEIKHLKLGLEQRDHQIASLTVQQQRQQQQQQQVQQHLQQQQQQLAAASASVPVAQQPPATTSATATPAANTTTGSPSAFPVQASRPNLVGSQLPTTTLPVVSSNAQQQLPQQQLQQQQLQQQQPPPQVSVAPLSNTAINGSPTSKETTTLPSVKVPESTLKETEPENNNTSKINDTGSATTATTTTATETEIKPKEEDATPASLHQDHYLVPYNQRANHSKPIPPFLLDLDSQSVPDALKKQTNDYYILYNPALPREIDVELHKSLDHTSVVCCVKFSNDGEYLATGCNKTTQVYRVSDGSLVARLSDDSAANNHRNSITENNTTTSTDNNTMTTTTTTTITTTAMTSAAELAKDVENLNTSSSPSSDLYIRSVCFSPDGKFLATGAEDRLIRIWDIENRKIVMILQGHEQDIYSLDYFPSGDKLVSGSGDRTVRIWDLRTGQCSLTLSIEDGVTTVAVSPGDGKYIAAGSLDRAVRVWDSETGFLVERLDSENESGTGHKDSVYSVVFTRDGQSVVSGSLDRSVKLWNLQNANNKSDSKTPNSGTCEVTYIGHKDFVLSVATTQNDEYILSGSKDRGVLFWDKKSGNPLLMLQGHRNSVISVAVANGSPLGPEYNVFATGSGDCKARIWKYKKIAPN

SEQ ID NO: 10195 - protein, 632 aa, Saccharomyces cerevisiae YJM789
MVDDSNYLTPHETALAVVATAMKKARLQLDTLLINSVLGGILFSSGSFLLVAVHSDDPDMVARNPGIVNLITGVTFAIGLFYVVIMGADLFNSNILFFSVGVMRRAVTIYDLIVSWFVSWLGNISGSLFVSYLFGHLTGIGSQELWIKGSKQIIEQKASYSSIQTFLKGIACNFFVCLAIYLQLMAKPIHVKFIIMSFPIITFVGIGFTHVVGDMSASFIAMLNGADVSVGKYIWKLLIPASLGNIVGGLFFSAVVPFYLHLVVVERDRKRLSLPEYEARDEQPELNMDSRVVRIPKNECEEDIKDEVSDDDATETGGDVEDLTEKDSASAYNTIHDSSSYLTGRSLNSLLSIPSSVVTSDNATMESDLGEPVPFIPRSNSTARSSHLKLPHNNSAKSIDKRHISKRHSLRSPPGVFPVRGMGEPLEREKTIEDATYDPKENELFLRRAETHNSTFVRDKKKENDKLLRLVKTEEDREQEEYEKNGGYNILENKPGTKLEKIITHLAENVSSREVTRPVLPRTTQDTFPHNAPASSPSYTDDAHSLRKANSTTLGGLFRAVSKEFHSSKDAESPDDLLKKMAAVGINRKARITANNVAGIVNLNKEDLDSIPRRQKFTEPKNSYNRHTSPQL

SEQ ID NO: 10196 - protein, 691 aa, Saccharomyces cerevisiae YJM789
MPFGIDNTDFTVLAGLVLAVLLYVKRNSIKELLMSDDGDITAVSSGNRDIAQVVTENNKNYLVLYASQTGTAEDYAKKFSKELVAKFNLNVMCADVENYDFESLNDVPVIVSIFISTYGEGDFPDGAVNFEDFICNAEAGALSNLRYNMFGLGNSTYEFFNGAAKKAEKHLSAAGATRLGKLGEADDGAGTTDEDYMAWKDSILEVLKDELHLDEQEAKFTSQFQYTVLNEITDSVSLGEPSAHYLPSHQLNRNADGIQLGPFDLSQPFIAPIVKSRELFSSNDRNCIHSEFDLSGSNIKYSTGDHLAVWPSNPLEKVEQFLSIFNLDPETIFDLKPLDPTVKVPFPTPTTIGAAIKHYLEITGPVSRQLFSSLIQFAPNADVKEKLTLLSKDKDQFAVEITSKYFNIADALKYLSDGAKWDTVPMQFLVESVPQMTPRYYSISSSSLSEKQTVHVTSIVENFPNPELSDAPPVVGVTTNLLRNIQLAQNNVNIAETNLPVHYDLNGPRKLFANYKLPVHVRRSNFRLPSNPSTPVIMIGPGTGVAPFRGFIRERVAFLESQKKGGNNVSLGKHILFYGSRNTDDFLYQDEWPEYAKKLDGSFEMVVAHSRLPNTKKVYVQDKLKDYEDQVFEMINNGAFIYVCGDAKGMAKGVSTALVGILSRGKSITTDEATELIKMLKTSGRYQEDVW

SEQ ID NO: 10197 - protein, 518 aa, Saccharomyces cerevisiae YJM789
MSIAWSSVFKRELRLERFLPRVYSTKVPDNAPRAADNEQWLETLRPITHPEQKKSDHDVSYTRHINVPLGEVTSVNYLQRYNKHKHSQGNFVDVRIVKCKSGAGGSGAVSFFRDAGRSIGPPDGGDGGAGGSVYIQAVAGLGSLAKMKTTYTAEDGEAGAARQLDGMRGRDVLILVPVGTVVKWCLPPQKVRELVEREMRKDNNATLRSILGSTAVNLSVSSGSHRKKIQLYRHEMAESWLFKDKAKEYHENKDWFKDLHKKMEAYDHSLEQSELFNDQFPLAGLDLNQPMTKPVCLLKGGQGGLGNMHFLTNLIRNPRFSKPGRNGLEQHFLFELKSIADLGLIGLPNAGKSTILNKISNAKPKIGHWQFTTLSPTIGTVSLGFGQDVFTVADIPGIIQGASLDKGMGLEFLRHIERSNGWVFVLDLSNKNPLNDLQLLIEEVGTLEKVKTKNILIVCNKVDIDAEKSESFAKYLQVEKFSKSQGWDCVPISALREENIDVLKKKMFKCARQSEFDK

SEQ ID NO: 10198 - protein, 1030 aa, Saccharomyces cerevisiae YJM789
MKASLTFSLSGIYAPCSISRDIYLEYGDKKAECLYGTIRLPQYGPGCTPGKIVHCVLDDSLPFCSIVVPSKLFGFMPTQPTMDFCYFEPILDNVVPVLDSVTFLINEQLYSKLMDLPQEMQQIQFLHYKYNINSMETVVHSRDILTSGLCQILNCSPFPQGLVDFTETQLILVNDTEQKLSTLKYANEDEEYALPKIGTNSALSVDLESLPCTISRDLLRPAPHINDDDSIYAFTDAETLLRLDVTSGSFITVSNMGCVRLVKLFVLLLPNGFKKRTIYAPPKIIASFPDCSVVTISKSNIGHTDIPIANQVFISRVGGWLQSQKCFQNIILTTLKKFFSESKRILCQNDLIPIAFDSSMADLNIAEENDESDDEDELGQYYKNDSLVWFFVTSAELDCFSKDNSHFIIDPNRTKLITTNITNIRPLPLSRSNLQRYYGFAETFYYDLHIFPYVRQLVNILETSFNCSQRGITLNASVLLHSTTNNVGKATMVRFASKYLGIHLLEIDCLSLTSNSRQLDSTSKIIGYIRAKCENVLPYASPAVIFLAHLDSILLDVNANQDPEAIKLQKSINFEMSKLLDDFTFKFPGTTFVGSVNNIDNVPSSFRSHMRFEILVPVPSEAQRLRIFQWYLSSHELNRDVQQKVPVSYMDNISFSSLSSYSAGLTPLDIKSIVETARMTATARFYQESKKYGWLPQSILITQEDLSKATSKARNEFSVSIGAPQIPNVTWDDIGGIDFVKGEILDTIDMPLKHPELFTSGIKKRSGILFYGPPGTGKTLMAKAIATNFSLNFFSVKGPELLNMYIGESEANVRRVFQKAREAKPCVIFFDEIDSVAPKRGNQGDSGGVMDRIVSQLLAELDGMSTDADGVFVIGATNRPDLLDEALLRPGRFDKLLYLGIPDTDTKQLNILEALTRKFVLDNDVKLIELAKLCPFNYTGADFYALCSDAMLNAMSRIARMVEKKVSQHNELTGENISTRRWFDKIATKEDTKVVVKMEDFLKAQEQLTPSVSRAELNHYEAVRANFEGA

SEQ ID NO: 10199 - protein, 350 aa, Saccharomyces cerevisiae YJM789
MSKKPIVLKLGKDAFGDQAWGELEKIADVITIPESTTREQFLREVKDPQNKLSQVQVITRTARSVKNTGRFDEELALALPSSVVAVCHTGAGYDQIDVEPFKKRHIQVANVPDLVSNATADTHVFLLLGALRNFGIGNRRLIEGKWPEAGPACGSPFGYDPEGKTVGILGLGRIGRCILERLKPFGFENFIYHNRHQLPSEEEHGCEYVGFEEFLKRSDIISVNVPLNHNTHHLINAETIEKMKDGVVIVNTARGAVIDEQAMTDALRSGKIRSAGLDVFEYEPKISKELLSMSQVLGLPHMGTHSVETRKKMEELVVENAKNVILTGKVLTIVPELQNEDWPNESKPLV

SEQ ID NO: 10200 - protein, 499 aa, Saccharomyces cerevisiae YJM789
MSYNFTGTPTGEGTGGNSLTTDLNTQFDLANMGWIGVASAGVWIMVPGIGLLYSGLSRKKHALSLLWASMMASAVCIFQWFFWGYSLAFSHNTRGNGFIGTLEFFGFRNVLGAPSSVSSLPDILFAVYQGMFAAVTGALMLGGACERARLFPMMVFLFLWMTIVYCPIACWVWNAEGWLVKLGSLDYAGGLCVHLTSGHGGLVYALILGKRNDPVTRKGMPKYKPHSVTSVVLGTVFLWFGWMFFNGGSAGNATIRAWYSIMSTNLAAACGGLTWMVIDYFRCGRKWTTVGLCSGIIAGLVGITPAAGFVPIWSAVVIGVVTGAGCNLAVDLKSLLRIDDGLDCYSIHGVGACIGCVLTGIFAADYVNATAGSYISPIDGGWINHHYKQVGYQLAGMCAALAWTVTVTSILLLTMNAIPFLKLRLSADEEELGTDAAQIGEFTYEESTAYIPEPIRSKTSAQMPPPHENIDDKIVGNTDAEKNSTPSDASSTKNTDHIV

SEQ ID NO: 10201 - protein, 713 aa, Saccharomyces cerevisiae YJM789
MVTNNGDGEHLGIRRNGNLRHPSNNMKIPRRAQSTVLNSNPFYSRKYSMSTLTPRDICRSVDSRVFVDMSSPNFQTLEDPHRDEIINSVRLNYLNSSKRSSVSHGNEAIPRVNPTKNSSASTIAAANVDSDDDETNLSSAGGDITHDIYKLVKAEDPKRLRRPRSMENVTSKIEHHTKLSSASGLNVPGGFRREFIVNKKRQEHQLNDSASSDFTSHESDSINQSSPSSNQDIDKVPFLTRNFLEFLYVFGHFAGESFEDDFIPDSSNMMIRGEDERSALLSRPDHMKVLPSAKGTTSTKKVFLILLKSFIGTGVLFLPNAFHNGGLFFSVSMLAFFGIYSYWCYYILVQAKSSCGVSSFGDIGLKLYGPWMRIIILFSLVITQVGFSGAYMIFTAKNLQAFLDNVFHVGVLPLSYLMVFQTIIFIPLSFIRNISKLSLPSLLANFFIMAGLVIVIIFTAKRLFFDLMGTPAMGVVYGLNADRWTLFIGTAIFAFEGIGLIIPVQDSMRNPEKFPLVLALVILTATILFISIATLGYLAYGSNVQTVILLNLPQSNIFVNLIQLFYSIAIMLSTPLQLFPAIKIIENKFFPKFTKIYVKHDDLTTRVELRPNSGKLNWKIKWLKNFIRSIIVIIVVSIAYFGSDNLDKFVSVIGSLACIPLVYIYPSMLHLRGNSLPETKGEFWRFKPMLDTILIFFGIASMLYTSYQSIFGV

SEQ ID NO: 10202 - protein, 386 aa, Saccharomyces cerevisiae YJM789
MKVISLKKDSFNKGGAVITLLPEDKEDLFTVYQIVDKDDELIFKKKFTSKLDEAGKKKSTDLVKLKIKVISEDFDMKDEYLKYKGVTVTDESGASNVDIPVGKYLSFTLDYVYPFTIIKQNFNKFMQKLLDEACNIEYKSDTAAVVLQEGIAHVCLVTSSSTILKQKIEYSMPKKKRTTDVLKFDEKTEKFYKAIYSAMKKDLNFDKLKTIILCSPGFYAKILMDKIFQYAEEEHNKKILDNKGMFFIAHCSTGYLQGINEVLKNPLYASKLQDTKYSKEIMVMDEFLLHLNKDDDKAWYGEKEVVKAAEYGAISYLLLTDKVLHSDNIAQREEYLKLMDSVESNGGKALVLSTLHSLGEELDQLTGIACILKYPLPDLDEDDGEE

SEQ ID NO: 10203 - protein, 761 aa, Saccharomyces cerevisiae YJM789
MMMWQRYARGAPRSLTSLSFGKASRISTVKPVLRSRMPVHQRLQTLSGLATRNTIHRSTQIRSFHISWTRLNENRPNKEGEGKNNDNKDNNSNKEDGKDKRNEFGSLSEYFRSKEFANTMFLTIGFTIIFTLLTPSSNNSGDDSNRVLTFQDFKTKYLEKGLVSKIYVVNKFLVEAELVNTKQVVSFTIGSVDIFEEQMDQIQDLLNIPPRDRIPIKYIERSSPFTFLFPFLPTIILLGGLYFITRKINSSPPNANGGGGGGLGGMFNVGKSRAKLFNKETDIKISFKNVAGCDEAKQEIMEFVHFLKNPGKYTKLGAKIPRGAILSGPPGTGKTLLAKATAGEANVPFLSVSGSEFVEMFVGVGASRVRDLFTQARSMAPSIIFIDEIDAIGKERGKGGALGGANDEREATLNQLLVEMDGFTTSDQVVVLAGTNRPDVLDNALMRPGRFDRHIQIDSPDVNGRQQIYLVHLKRLNLDPLLTDDMNNLSGKLATLTPGFTGADIANACNEAALIAARHNDPYITIHHFEQAIERVIAGLEKKTRVLSKEEKRSVAYHEAGHAVCGWFLKYADPLLKVSIIPRGQGALGYAQYLPPDQYLISEEQFRHRMIMALGGRVSEELHFPSVTSGAHDDFKKVTQMANAMVTSLGMSPKIGYLSFDQNDGNFKVNKPFSNKTARTIDLEVKSIVDDAHRACTELLTKNLDKVDLVAKELLRKEAITREDMIRLLGPRPFKERNEAFEKYLDPKSNTEPPEAPAATN

SEQ ID NO: 10204 - protein, 897 aa, Saccharomyces cerevisiae YJM789
MESQRSHHILTRLTKIRRRPQQPLTDFTELYSRIANETIYYLNLEEKKRYKEALQGWKALTTDVLFKQTLIEHNYPNTQSYTKDEVSLQNGIRELYHKSVMHLERVKKLVREEPAPRNDMSSSKTYTNHSSSFTRSTEPPPVFQMVPGRMMKTLRNRNACGYKTAYSNPSLSSYGNSTSIKRGEHAENIRVNFVPSKPLSNNASRQHKNPIEHNDPALKKETELYSDKYISEPILIDLTNDEDDHDVGILKGHNVFDEEESDGFEFDVSDYYDNFSEVDVEEEEEEKEERRRIKTLEAIQQQMCDLSVTSSTSSNKSVSSSENVPGSCIQSLPTTAPALPSLPPPPLLNVDRASSTGALKPHSLETSTTMDSSKIRNPQISKLMKNNHVPYLKGTKSTPTLITKSTPTFITRSKSNTKPIIKSNASSPTSSLTVPNSVIQKPKTAAMAAKRVLNSKKVASNPALNTTKKSHPILKSKTAKVPNSSSKKTSSHPSRPVSNSKPYSHGASQNKKPSKNQTTSMSKTNRKIPAQKKIGSPKIEDVGTEDATEHATSLNEQREEPEIDKKVLREILEDEIIDSLQGVDRQAAKQIFAEIVVHGDEVHWDDIAGLESAKYSLKEAVVYPFLRPDLFRGLREPVRGMLLFGPPGTGKTMLARAVATESHSTFFSISASSLTSKYLGESEKLVRALFAIAKKLSPSIIFVDEIDSIMGSRNNENENESSRRIKNEFLVQWSSLSSAAAGSNKSNTNNSDTNGDEDDTRVLVLAATNLPWSIDEAARRRFVRRQYIPLPEDQTRHVQFKKLLSHQKHTLTESDFDELVKITEGYSGSDITSLAKDAAMGPLRDLGDKLLETEREMIRPIGLVDFKNSLEYIKPSVSQDGLVKYEKWASQFGSSGS

SEQ ID NO: 10205 - protein, 527 aa, Saccharomyces cerevisiae YJM789
MPMDFQPTSSPSNWVVQKFGGTSVGKFPVQIVDDIVKHYSKPDGPNNNVAVVCSARSSYTKAEGTTSRLLKCCDLASQESEFQDIIEVIRQDHIDNADRFILNPALQAKLVDDTNKELELVKKYLNASKVLGEVSSRTVDLVMSCGEKLSCLFMTALCNDRGCKAKYVDLSHIVPSDFSASALDNSFYTFLVQALKEKLAPFVSAKERIVPVFTGFFGLVPTGLLNGVGRGYTDLCAALIAVAVNADELQVWKEVDGIFTADPRKVPEARLLDSVTPEEASELTYYGSEVIHPFTMEQVIRAKIPIRIKNVQNPLGNGTIIYPDNVAKKGESTPPHPPENLSSSFYEKRKRGATAITTKNDIFVINIHSNKKTLSHGFLAQIFTILDKYKLVVDLISTSEVHVSMALPIPDADSLKSLRQAEEKLRILGSVDITKKLSIVSLVGKHMKQYIGIAGTMFTTLAEEGINIEMISQGANEINISCVINESDSIKALQCIHAKLLSERTNTSNQFEHAIDERLEQLKRLGI

SEQ ID NO: 10206 - protein, 318 aa, Saccharomyces cerevisiae YJM789
MSTNSIKLLAGNSHPGLAELISQRLGVPLSKVGVYQYSNKETSVTIGESIRDEDVYIIQTGYGEHEINDFLMELLILIHACKTASVRRITAVIPNFPYARQDKKDKSRAPITAKLIANLLETAGCDHVITMDLHASQIQGFFHIPVDNLYGEPSVLNYIRTKTDFNNAILVSPDAGGAKRVASLADKLDMNFALIHKERQKANEVSRMLLVGDVAGKSCLLIDDMADTCGTLVKACDTLMDHGAKEVIAIVTHGIFSGSARERLINSRLSRIVCTNTVPVDLDLDIVDQVDISPTIAEAIRRLHNGESVSYLFTHAPV

SEQ ID NO: 10207 - protein, 244 aa, Saccharomyces cerevisiae YJM789
MTVVEIKSQDQFTQLTTTNAANKLIVLYFKAQWADPCKSMSQVLEAVSEKVRQEDVRFLSIDADKHPEISDLFEIAAVPYFVFIQNGTIVKEISGADPKEFVKSLEILSNASASLANNAKGPKSTSDEESSGSSDDEEDETEEEINARLVKLVQAAPVMLFMKGSPSEPKCGFSRQLVGILREHQIRFGFFDILRDENVRQSLKKFSDWPTFPQLYINGEFQGGLDIIKESIEEDPEYFQHALQ

SEQ ID NO: 10208 - protein, 799 aa, Saccharomyces cerevisiae YJM789
MSTIYRESDSLESEPSPTPTTIPIQINMEEEKKDAFVKNIDEDVNNLTATTDEEDRDPESQKFDRHSIQEEGLVWKGDPTYLPNSPYPEVRSAVSIEDDPTIRLNHWRTWFLTTVFVVVFAGVNQFFSLRYPSLEINFLVAQVVCYPIGRILALLPDWKCSKVPFFDLNPGPFTKKEHAVVTIAVALTSSTAYAMYILNAQGSFYNMKLNVGYQFLLVWTSQMIGYGAAGLTRRWVVNPASSIWPQTLISVSLFDSLHSRKVEKTVANGWTMPRYRFFLIVLIGSFIWYWVPGFLFTGLSYFNVILWGSKTRHNFIANTIFGTQSGLGALPITFDYTQVSQAMSGSVFATPFYVSANTYASVLIFFVIVLPCLYFTNTWYAKYMPVISGSTYDNTQNKYNVTKILNEDYSINLEKYKEYSPVFVPFSYLLSYALNFAAIIAVFVHCILYHGKDIVAKFKDRKNGGTDIHMRIYSKNYKDCPDWWYLLLQIVMIGLGFVAVCCFDTKFPAWAFVIAILISLVNFIPQGILEAMTNQHVGLNIITELICGYMLPLRPMANLLFKLYGFIVMRQGLNLSRDLKLAMYMKVSPRLIFAVQIYATIISGMVNVGVQEWMMHNIDGLCTTDQPNGFTCANGRTVFNASIIWSLPKYLFSSGRIYNPLMWFFLIGLLFPLAVYAVQWKFPKFKFAKHIHTPVFFTGPGNIPPSTPYNYSLFFAMSFCLNLIRKRWRAWFNKYNFVMGAGVEAGVAISVVIIFLCVQYPGGKLSWWGNNVWKRTYDNDYKKFYTLKKGETFGYDKWW

SEQ ID NO: 10209 - protein, 444 aa, Saccharomyces cerevisiae YJM789
MKQRFIRQFTNLMSTSRPKVVANKYFTSNTAKDVWSLTNEAAAKAANNSKNQGRELINLGQGFFSYSPPQFAIKEAQKALDIPMVNQYSPTRGRPSLINSLIKLYSPIYNTELKAENVTVTTGANEGILSCLMGLLNAGDEVIVFEPFFDQYIPNIELCGGKVVYVPINPPKELDQRNTRGEEWTIDFEQFEKAITFKTKAVIINTPHNPIGKVFTREELTTLGNICVKHNVVIISDEVYEHLYFTDSFTRIATLSPEIGQLTLTVGSAGKSFAATGWRIGWVLSLNAELLSYAAKAHTRICFASPSPLQEACANSINDALKIGYFEKMRQEYINKFKIFTSIFDELGLPYTAPEGTYFVLVDFSKVKIPEDYPYPEEILNKGKDFRISHWLINELGVVAIPPTEFYIKEHEKAAENLLRFAVCKDDAYLENAVERLKLLKDYL

SEQ ID NO: 10210 - protein, 572 aa, Saccharomyces cerevisiae YJM789
MSPLTRTVAIKKTVKVLSKCQSGREYTQKFLQRAYSTSHANSTYYSRTKLFISSHSKALNIALLSGSLLLTYSYYSPKKILSLDTINGIKDYSTNTSGNINMPSPNPKGTETQKSQRSQNDQSVLILNDSKIEAKLHDREESHFVNRGTGIFRYDVAQLPSNHPIEDDHVEQIITIPIESEDGKSIEKDLYFFGIFDGHGGPFTSEKLSKDLVRYVAYQLGQVYDQNKTVFHSDPNQLIDSAISKGFLKLDNDLVIESFRKLFQDPNNTNIANTLPAISGSCALLSLYNSTNSILKVAVTGDSRALICGLDNEGNWTVKSLSTDQTGDNLDEVRRIRKEHPGEPNVIRNGRVLGSLQPSRAFGDYRYKIKEVDGKPLSDLPEVAKLYFRREPRDFKTPPYVTAEPVITSAKIGENTKFMVMGSDGLFELLTNEEIASLVIRWMDKNMNLAPVKAEPGKLPKVIDVSEDKEAQRPAFRYKDNNSSSPSGSNPEYLIEDKNVATHLIRNALSAGGRKEYVSALVSIPSPMSRRYRDDLTVTVAFFGDSGTPSTVSNATSIVMNPEATTKPKPRL

SEQ ID NO: 10211 - protein, 809 aa, Saccharomyces cerevisiae YJM789
MSSVEELTQLFSQVGFEDKKVKEIVKNKKVSDSLYKLIKETPSDYQWNKSTRALVHNLASYVKGTDLPKSELIVNGIINGDLKTSLQVDAAFKYVKANGEASTKMGMNENSGVGIEITEDQVRNYVMQYIQENKERILTERYKLVPGIFADVKNLKELKWADPRSFKPIIDQEVLKLLGPKDERDLIKKKTKNNEKKKTNSAKKSSDNSASSGPKRTMFNEGFLGDLHKVGENPQAYPELMKEHLEVTGGKVRTRFPPEPNGYLHIGHSKAIMVNFGYAKYHNGTCYLRFDDTNPEKEAPEYFESIKRMVSWLGFKPWKITYSSDYFDELYRLAEVLIKNGKAYVCHCTAEEIKRGRGIKEDGTPGGERYACKHRDQSIEQNLQEFRDMRDGKYKPGEAILRMKQDLNSPSPQMWDLIAYRVLNAPHPRTGTKWRIYPTYDFTHCLVDSMENITHSLCTTEFYLSRESYEWLCDQVHVFRPAQREYGRLNITGTVLSKRKIAQLVDEKFVRGWDDPRLFTLEAIRRRGVPPGAILSFINTLGVTTSTTNIQVVRFESAVRKYLEDTTPRLMFVLDPVEVVVDNLSDDYEELATIPYRPGTPEFGERTVPFTNKFYIERSDFSENVDDKEFFRLTPNQPVGLIKVSHTVSFKSLEKDEAGKIIRIHVNYDNKVEEGSKPKKPKTYIQWVPISSKYNSPLRVTETRVYNQLFKSENPSSHPEGFLKDINPESEVVYKESVMEHNFGDVVKNSPWVVDSVKNSEFYVEEDKDSKEVCRFQAMRVGYFTLDKESTTSKVILNRIVSLKDATSK

SEQ ID NO: 10212 - protein, 1054 aa, Saccharomyces cerevisiae YJM789
MTIIVASLFLPYTPQFEADVTNSDTAKLVESSMIKVDCNNQELSNNKQERSSSVTSASSHYIGLPQEAQINGEPLQRANVGSPATGVNYHNEMEMLSSEQFLEELTANATHAANSGIPPANNPVSSGSTAQRPSVEEFFSAPSARVCSPSQEASASSISASRSSAHHNDLSSSLMKNPNLSFDSHPPRVRSSSKSAVITPVSKSVPDVDPAVVDVAKVREEFQQQASLPSMKRVSGSTAGDSSIASSSSNLRYSQQFQDNFIEDTDSEDDIDSDLETDATKKYNVPKFGGYSNNAKLRASLMRNSYELFKHLPWTIVDSDKGNGSLKNAVNIAVAEKTVKEPVSWVGTMGIPTDELPHDVCHKISKKLEQDFSSFPVVTDDITFKGAYKNYAKQILWPTLHYQIPDNPNSKAFEDHSWDYYQKVNQKFSDRIVSVYKPGDTIWIHDYHLMLVPQMVREKLPKAKIGFFLHVSFPSSEVFRCLANRERILEGIIGANFVGFQTKEYKRHFLQTCNRLLAADVSNDEVKYHCNIVSVMYAPIGIDYYHLTSQLRNGSVLEWRQLIKERWRNKKLIVCRDQFDRIRGLQKKMLAYERFLIENPEYIEKVVLIQICIGKSSDPEYERQIMVVVDRINSLSSNISISQPVVFLHQDLDFAQYLALNCEADVFLVDALREGMNLTCHEFIVSSFEKNAPLLLSEFTGSSSVLKEGAILINPWDINHVAQSIKRSLEMSPEEKRRRWKKLFKSVIEHDSDNWITKCFEYINNAWESNQETSTVFNLAPEKFCADYKASKKHLFIFKISEPPTSRMLSLLSELSSNNIVYVLSSFTKNTFEGLYNGVLNIGLIAENGAYVRVNGSWYNIVEELDWMKEVAKIFDEKVERLPGSYYKIADSMIRFHTENAEDQDRVPTVIGEAITHINTLFDDRDIHAYVHKDIVFVQQTGLALAAAEFLMKFYNSGVSPTDNSRISLSRTSSSMSVGNNKKHFQNQVDFVCVSGSTSPIIEPLFKLVKQEVEKNNLKFGYTILYGSSRSTYAKEHINGVNELFTILHDLTAA

SEQ ID NO: 10213 - protein, 275 aa, Schizosaccharomyces pombe
MSRRSLRTLYVTGFRDGMRARELAYEFEPFGPLIRCDIPIPRTRTSRPFAFVEYEDSRDAEDAYYEVHGRRLERGGGVLRVEWAKQPPPSGPGSKRGGRRERGGRVHGDSGRLRSRSPSPHEARSRSPYNDERSDRRSMSPRYRSRSRSPDGRSRSPDYDRRSPKRNHRSPSPVSFAPQKSPVENETETNVDNGDTKISESNEKSGTEVEQQSAPNSNGNEEVNNLEPVCQNESKQEPPKEENSNVSQEQPEQAQPEVSAASEQPESNPTTTESQ

SEQ ID NO: 10214 - protein, 532 aa, Saccharomyces cerevisiae YJM789
MKAFTSLLCGLGLSTTLAKAISLQRPLGLDKDVLLQAAEKFGLNLDLDHLLKELDSNVLDAWAQIEHLYPNQVMSLETSTKPKFPEAIKTKKDWDFVVKNDAIENYQLRVNKIKDPKILGIDPNVTQYTGYLDVEDEDKHFFFWTFESRNDPAKDPVILWLNGGPGCSSLTGLFFELGPSSIGPDLKPIGNPYSWNSNATVIFLDQPVNVGFSYSGSSGVSNTVAAGKDVYNFLELFFDQFPEYVNKGQDFHIAGESYAGHYIPVFASEILSHKDRNFNLTSVLIGNGLTDPLTQYNYYEPMACGEGGEPSVLPSEECSAMEDSLERCLGLIESCYDSQSVWSCVPATIYCNNAQLAPYQRTGRNVYDIRKDCEGGNLCYPTLQDIDDYLNQDYVKEAVGAEVDHYESCNFDINRNFLFAGDWMKPYHTAVTDLLNQDLPILIYAGDKDFICNWLGNKAWTDVLPWKYDEEFASQKVRNWTASITDEVAGEVKSYKHFTYLRVFNGGHMVPFDVPENALSMVNEWIHGGFSL

SEQ ID NO: 10215 - protein, 741 aa, Saccharomyces cerevisiae YJM789
MKNAINTAVLENIIPHRHVKWVGTVGIPTDEIPENILANISDSLKDKYDSYPVLTDDVTFKAAYKNYCKQILWPTLHYQIPDNPNSKAFEDHSWKFYRNLNQRFADAIVKIYKKGDTIWIHDYHLMLVPQMVRDVLPFAKIGFTLHVSFPSSEVFRCLAQREKILEGLTGADFVGFQTREYARHFLQTSNRLLMADVVHDEELKYNGRVVSVRFTPVGIDAFDLQSQLKDGSVMQWRQLIRERWQGKKLIVCRDQFDRIRGIHKKLLAYEKFLVENPEYVEKSTLIQICIGSSKDVELERQIMIVVDRINSLSTNISISQPVVFLHQDLDFSQYLALSSEADLFVVSSLREGMNLTCHEFIVCSEDKNAPLLLSEFTGSASLLNDGAIIINPWDTKNFSQAILKGLEMPFDKRRPQWKKLMKDIINNDSTNWIKTSLQDIHISWQFNQEGSKIFKLNTKTLMEDYQSSKKRMFVFNIAEPPSSRMISILNDMTSKGNIVYIMNSFPKPILENLYSRVQNIGLIAENGAYVSLNGVWYNIVDQVDWRNDVAKILEDKVERLPGSYYKINESMIKFHTENAEDQDRVASVIGDAITHINTVFDHRGIHAYVYKNVVSVQQVGLSLSAAQFLFRFYNSASDPLDTSSGQITNIQTPSQQNPSDQEQQPPASPTVSMNHIDFACVSGSSSPVLEPLFKLVNDEASEGQVKAGHAIVYGDATSTYAKEHVNGLNELFTIISRIIED

SEQ ID NO: 10216 - protein, 526 aa, Saccharomyces cerevisiae YJM789
MSTIPFRKNYVFKNWAGIYSAKPERYFQPSSIDEVVELVKSARLAEKSLVTVGSGHSPSNMCVTDEWLVNLDRLDKVQKFVEYPELHYADVTVDAGMRLYQLNEFLGAKGYSIQNLGSISEQSVAGIISTGSHGSSPYHGLISSQYVNLTIVNGKGELKFLDAENDPEVFKAALLSVGKIGIIVSATIRVVPGFNIKSTQEVITFENLLKQWDTLWTSSEFIRVWWYPYTRKCVLWRGNKTTDAQNGPAKSWWGTKLGRFFYETLLWISTKIYAPLTPFVEKFVFNRQYGKLEKSSTGDVNVTDSISGFNMDCLFSQFVDEWGCPMDNGLEVLRSLDHSIAQAAINKEFYVHVPMEVRCSNTTLPSEPLDTSKRTNTSPGPVYGNVCRPFLDNTPSHCRFAPLENVTNSQLTLYINATIYRPFGCNTPIHKWFTLFENTMMVAGGKPHWAKNFLGSTALAAGPVKKDTDYDDFEMRGMALKVEEWYGEDLKKFRKIRKEQDPDNVFLANKQWAIINGIIDPSELSD

SEQ ID NO: 10217 - protein, 326 aa, Saccharomyces cerevisiae YJM789
MNSESREDMAINSIKLLAGNSHPDLAEQISKKLGIPLSKVGVYQYSNKETSVTIGESLRDEDVYIIQTGIGEQEINDFLMELLILIHACKIASARKITTVIPNFPYARQDKKDKSRAPITAKLVANLLQTAGADHVITMDLHASQIQGFFHIPVDNLYAEPSVLNYIRTKTDFDNAILVSPDAGGAKRVAALADKLDLNFALIHKERQKANEVSKMVLVGDVTNKSCLLVDDMADTCGTLVKACDTLMEHGAKEVIAIVTHGIFSGSAREKLRNSRLSRIVCTNTVPVDLDLPIADQIDISPTFAEAIRRLHNGESVSYLFTHAPV

SEQ ID NO: 10218 - protein, 535 aa, Saccharomyces cerevisiae YJM789
MSITSEELNYLIWRYCQEMGHEVSALALQDETRVLEFDEKYKEHIPLGTLVNLVQRGILYTESELMVDSKGDISALNEHHLSEDFNLVQALQIDKEKFPEISSEGRFTLETNSESNKAGEDGASTVERETQEDDTNSIDSSDNLDGFVKILKEIVKLDNIVSSTWNPLDESILAYGEKNSVARLARIVETDQEGKKYWKLTIIAELRHPFALSASSGKTTNQVTCLAWSHDGNSIVTGVENGELRLWNKTGALLNVLNFHRAPIVSFKWNKDGTHIISMDVENVTILWNVISGTVMQHFELKETGGSSTNAENHSGDGSLGVDVEWVDDDKFVIPGPKGAIFVYQITEKTPTGKLIGHHGPISVLEFNDTNKLLLSASDDGTLRIWHGGNGNSQNCFYGHSQSIVSASWVGDDKVISCSMDGSVRLWSLKQNTLLALSIVDGVPIFAGRISQDGQKYAVAFMDGQVNVYDLKKLNSKSRSLNGNRDGILNPLPIPLYASYQSSQDNDYIFDLSWNCAGNKISVAYSLQEGSVVAI

SEQ ID NO: 10219 - protein, 469 aa, Arabidopsis thaliana
MDNNNNNNTFSSLDNVMTNQNPLLMDFIPSREDSTMLPWNTIRSDPLQMGGFDIFNSMLTNKYLSSSPRSIDVQDNRNVEFMAPPPHPPPLHPLDHLRHYDDSSNNMWGFEANSEFQAFSGVVGPSEPMMSTFGEEDFPFLISNKRNNELSLSLASDVSDECSEISLCAATRLASEQASCSSKDISNNVVTQGFSQLIFGSKYLHSVQEILSHFAAYSLDYSSRGTESGAASSAFTSRFENITEFLDGDSNNSEAGFGSTFQRRALEAKKTHLLDLLQMVDDRYSHCVDEIHTVISAFHAATELDPQLHTRFALQTVSFLYKNLRERICKKIISMGSVLERGKDKTQETSMFHQHCLLQQLKRKNHQIWRPQRGLPEKSVSVLRNWMFQNFLHPYPKDSEKHLLAIRSGLTRSQVSNWFINARVRLWKPMIEEMYAEMNKRKLNNSHIQPNGPTLRMPKSVMMSQAMHK

SEQ ID NO: 10220 - protein, 475 aa, Vicia faba var. minor; identical to SEQ ID NO: 546

SEQ ID NO: 10221 - protein, 486 aa, Vicia faba var. minor
MVENISRTNLSYRGDTGGIEEAIDDAPLQTDSKFYDDDGRVKRTGTVWTTCSHIITGVIGSGVLSLAWSVAQMGWIAGPATMIFFSIITLYTSSFLADCYRSGDTEFGKRNYTFMDAVHNILGGPSVKICGVVQYLNLFGSAIGYNIAAAMSMMEIRKSYCVHSSHGEDPCHVSGNAYMIAFGVAQLFFSQIPDFHNTWWLSIVAAVMSFFYSTIALALGISKVAETGTVMGSLTGISIGTVTPAQKVWGVFQALGNIAFAYSYSFILLEIQDTIKSPPSEGKAMKKAAKLSIGVTTTFYLLCGCTGYAAFGDAAPGNLLAGFGVSKAYILVDMANAAIVVHLFGAYQVYAQPLFAFVEKEAGKKWPKIDKGFEVKIPGLPVYNQNIFMLVWRTIFVIVPTLIAMLIPFFNDVLGVIGALGFWPLTVYFPVEMYIIQKKIPKWSRKWICLEIMSTFCLFVSVVAGLGSLIGVWIDLKKYKPFSLEN

SEQ ID NO: 10222 - protein, 481 aa, Vicia faba var. minor
MVVEKNASNNHHQTFYVSIDQQIDSKFFDDDGRVKRTGTSWTASAHVITAVIGSGVLSLAWAIAQLGWIAGPIVMFLFAWVTYYTSVLLCECYRNGDPVNGKRNYTYMEVVHSNLGGFQVQLCGLIQYLNLVGVAIGYTVASAISMMAIVRSNCFHRSGGKDPCHMNSNIYMIAFGAVQIIFSQIPDFDQLWWLSIVAVVMSFTYSTIGLGLGIGKVIENKKFAGTITGINDVTKAQKTWGSLQALGDIAFAYSFSMILIEIQDTIKAPPPSESKTMKKATLISVIVTTFFYMLCGCFGYAAFGNSSPGNLLTGFGFYNPFWLLDIANAAIVIHLIGAYQVYCQPLFAFVENYTAKRFPDSDFVNKDVKIPIPGLDRYKLNLFRLVWRTVYVILTTLISMLLPFFNDIVGLLGAIGFWPLTVYFPVEMYIIQKKIPKWSTKWICLQLLSGACLIITIAATIGSIAGLILDLKVFKPFKTIY

SEQ ID NO: 10223 - protein, 890 aa, Arabidopsis thaliana
MKSLHWFLHLLIIAFTVLRSVEAQNQAGFISLDCGLVPKETTYTEKSTNITYKSDVDYIDSGLVGKINDAYKTQFQQQVWAVRSFPVGQRNCYNVNLTANNKYLIRGTFVYGNYDGLNQFPSFDLHIGPNKWSSVKILGVTNTSMHEIIHVVPQDSLEVCLVKTGPTTPFISSLEVRPLNNESYLTQSGSLMLFARVYFPSSSSSFIRYDEDIHDRVWNSFTDDETVWISTDLPIDTSNSYDMPQSVMKTAAVPKNASEPWLLWWTLDENTAQSYVYMHFAEVQNLTANETREFNITYNGGLRWFSYLRPPNLSISTIFNPRAVSSSNGIFNFTFAMTGNSTLPPLLNALEIYTVVDILQLETNKDEVSAMMNIKETYGLSKKISWQGDPCAPQLYRWEGLNCSYPDSEGSRIISLNLNGSELTGSITSDISKLTLLTVLDLSNNDLSGDIPTFFAEMKSLKLINLSGNPNLNLTAIPDSLQQRVNSKSLTLILGENLTLTPKKESKKVPMVAIAASVAGVFALLVILAIFFVIKRKNVKAHKSPGPPPLVTPGIVKSETRSSNPSIITRERKITYPEVLKMTNNFERVLGKGGFGTVYHGNLDGAEVAVKMLSHSSAQGYKEFKAEVELLLRVHHRHLVGLVGYCDDGDNLALIYEYMANGDLRENMSGKRGGNVLTWENRMQIAVEAAQGLEYLHNGCRPPMVHRDVKTTNILLNERCGAKLADFGLSRSFPIDGECHVSTVVAGTPGYLDPEYYRTNWLSEKSDVYSFGVVLLEIVTNQPVIDKTRERPHINDWVGFMLTKGDIKSIVDPKLMGDYDTNGAWKIVELALACVNPSSNRRPTMAHVVMELNDCVALENARRQGSEEMYSMGSVDYSLSSTSDFAPGAR

SEQ ID NO: 10224 - protein, 888 aa, Arabidopsis thaliana
MRFLSFLIFVFAVLGLVQAQDQSGFISLDCGLVPTEITYVEKSTNITYRSDATYIDSGVPGKINEVYRTQFQQQIWALRSFPEGQRNCYNFSLTAKRKYLIRGTFIYGNYDGLNQLPSFDLYIGPNKWTSVSIPGVRNGSVSEMIHVLRQDHLQICLVKTGETTPFISSLELRPLNNNTYVTKSGSLIVVARLYFSPTPPFLRYDEDVHDRIWIPFLDNKNSLLSTELSVDTSNFYNVPQTVAKTAAVPLNATQPLKINWSLDDITSQSYIYMHFAEIENLEANETREFNITYNGGENWFSYFRPPKFRITTVYNPAAVSSLDGNFNFTFSMTGNSTHPPLINGLEIYQVLELPQLDTYQDEVSAMMNIKTIYGLSKRSSWQGDPCAPELYRWEVLTFGLSIRNLSGSNLSGTITSDISKLTHLRELDLSNNDLSGDIPFVFSDMKNLTLINLSGNKNLNRSVPETLQKRIDNKSLTLIRDETGKNSTNVVAIAASVASVFAVLVILAIVFVVIRKKQRTNEGPRSFTTGTVKSDARSSSSSIITKERKFTYSEVLKMTKNFERVLGKGGFGTVYHGNLDDTQVAVKMLSHSSAQGYKEFKAEVELLLRVHHRHLVGLVGYCDDGDNLALIYEYMEKGDLRENMSGKHFNLVESISLDSLKHSKPGTGKHSVNVLSWETRMQIAVEAAQGLEYLHNGCRPPMVHRDVKPTNILLNERSQAKLADFGLSRSFPVDGESHVMTVVAGTPGYLDPEYYRTNWLSEKSDVYSFGVVLLEIVTNQPVMNKNRERPHINEWVMFMLTNGDIKSIVDPKLNEDYDTNGVWKVVELALACVNPSSSRRPTMPHVVMELNECLALEIERKQGSQATYIKESVEFSPSSASDFSPLAR

SEQ ID NO: 10225 - protein, 356 aa, Arabidopsis thaliana
MSLLADLVNLDISDNSEKIIAEYIWVGGSGMDMRSKARTLPGPVTDPSKLPKWNYDGSSTGQAPGQDSEVILYPQAIFKDPFRRGNNILVMCDAYTPAGEPIPTNKRHAAAEIFANPDVIAEVPWYGIEQEYTLLQKDVNWPLGWPIGGFPGPQGPYYCSIGADKSFGRDIVDAHYKASLYAGINISGINGEVMPGQWEFQVGPSVGISAADEIWIARYILERITEIAGVVVSFDPKPIPGDWNGAGAHTNYSTKSMREEGGYEIIKKAIEKLGLRHKEHISAYGEGNERRLTGHHETADINTFLWGVANRGASIRVGRDTEKEGKGYFEDRRPASNMDPYVVTSMIAETTLLWNP

SEQ ID NO: 10226 - protein, 249 aa, Arabidopsis thaliana
MEGSSKGLRKGAWTAEEDSLLRLCIDKYGEGKWHQVPLRAGLNRCRKSCRLRWLNYLKPSIKRGRLSNDEVDLLLRLHKLLGNRWSLIAGRLPGRTANDVKNYWNTHLSKKHESSCCKSKMKKKNIISPPTTPVQKIGVFKPRPRSFSVNNGCSHLNGLPEVDLIPSCLGLKKNNVCENSITCNKDDEKDDFVNNLMNGDNMWLENLLGENQEADAIVPEATTAEHGATLAFDVEQLWSLFDGETVELD

SEQ ID NO: 10227 - protein, 1109 aa, Arabidopsis thaliana
MNSQQSTRTKQMLQQSSTHLLCGVVLLQLFAAQVDAQRSTSPWQTLSGDAPLVIARGGFSGLFPDSSLAAYQFAMVVSVADVVLWCDVQLTKDGHGICFPDLNLANASNSEEVYPNRQKSYPVNGVTTKGWFPIDFSLTELQKVLFSLIRGILSRSGKFDENGYSISTVQNVATQMKPALFWLNVQHDEFYEQHNLSMSSFLLSTSRTVSIDFISSPEVNFFRKIAGGFGNNGPSFVFQFMGKEDFEPTTNRTYGSILSNLSFVKTFASGILVPKSYILPLDDKQYLLPHTSLVQDAHKAGLKLYASGFANDVDIAYNYSWDPVSEYLSFVDNGNFSVDGMLSDFPLTASASVDCFSHIGRNATKQVDFLVISKNGASGEYPGCTKLAYEKAIKDGSDVIDCPVQMSSDGIPFCSSSIDLVNSTTVGQTHLRNRSIIVPEISSVAGIFTFSLTWHEIQSLTPAISNPFRENGMSRNPNERNSGNLISLYEFLNLAKNSTSLSGILISLENVVYLREKKGLDVVKVVLNRLTETGYIVGTLKVMIQSTTRLVLVDFKNQSTYKTVYKIKETIGNITDSAIEDIKKFANAVVINKASVFPNSDSFLTGQTTNVLERLQKFQLPVYVELFQNEFVSQPFDFFADETVEINAYIFGAGINGTITEFPYTAARYKRNRCLGREEVPPYMLPVNPGGVLTLISTSSLPPAQDPNPIFTHDDVTEPPLPPVIAKSPTSTLGTPSTIAKPLISWSVAGVVLFLVLLTLVFCFHRKRETRLRQQKLKALIPLEHYTYAQVKRITKSFAEVVGRGGFGIVYKGTLSDGRVVAVKVLKDTKGNGEDFINEVATMSRTSHLNIVSLLGFCSEGSKRAIIYEFLENGSLDKFILGKTSVNMDWTALYRIALGVAHGLEYLHHSCKTRIVHFDIKPQNVLLDDSFCPKVSDFGLAKLCEKKESILSMLDTRGTIGYIAPEMISRVYGNVSHKSDVYSYGMLVLEIIGARNKEKANQACASNTSSMYFPEWVYRDLESCKSGRHIEDGINSEEDELAKKMTLVGLWCIQPSPVDRPAMNRVVEMMEGSLEALEVPPRPVLQQIPISNLHESSILSEDVSVYTEG

SEQ ID NO: 10228 - protein, 627 aa, Arabidopsis thaliana
MSSLVPVMEKQESVRGNSVEEQQSLRCVGAENQVRKGRALDKQVSFLAVNVVEKHGIKGRAMEKQERAMERQRSFRGFVEKQKSFRVVMERQLSFMNVGGERKKKTDSPGKRGDSPLHLAARTGNLGKVMELIRACNGIEELKELSSKQNLEGETPLYSAAENGHSLVVEEMLKHMDLDTASVKARNGFDPFHVAAKQGHIEALKKLLETFPNLAMTVDLSCTTALHTAASQGHTDVVNLLLKTDSHLAKIAKNNGKTALHSAARMGHREVVKSLIGNDASIGFRTDKKGQTALHMAVKGQNEGIVLELVKPDPAILSVEDSKGNTPLHTATNKGRIKIVRCLVSFDGINLNAMNKAGDTALDIAEKIGNPELVSVLKEAGAATAKDLGKPRNPAKQLNQTVSDIKHEVQSQLQQSRQTGVRVRRIAKRLKKLHINGLNNAINSATVVAVLIATVAFAAIFTIPGQYEEDRTKGLLLLGEARIAGKAPFLVFFIFDSLALFISLAVVVVQTSVVVIEQKAKKNLVFVINKLMWLACLFISVAFVSLSFIVVGKEDIWLAICATIIGGTIMLTTIGAMCYCVVMHRIEESKLKSLRKERSKSKSFSLSHMPSESEILNGEFNKRMYAL

SEQ ID NO: 10229 - protein, 586 aa, Arabidopsis thaliana
MDSVNSFKGYGKVDEAQDLALKKKTRKRLLLLSISVVVLIAVIIAAVVATVVHKNKNESTPSPPPELTPSTSLKAICSVTRFPESCISSISKLPSSNTTDPETLFKLSLKVIIDELDSISDLPEKLSKETEDERIKSALRVCGDLIEDALDRLNDTVSAIDDEEKKKTLSSSKIEDLKTWLSATVTDHETCFDSLDELKQNKTEYANSTITQNLKSAMSRSTEFTSNSLAIVSKILSALSDLGIPIHRRRRLMSHHHQQSVDFEKWARRRLLQTAGLKPDVTVAGDGTGDVLTVNEAVAKVPKKSLKMFVIYVKSGTYVENVVMDKSKWNVMIYGDGKGKTIISGSKNFVDGTPTYETATFAIQGKGFIMKDIGIINTAGAAKHQAVAFRSGSDFSVYYQCSFDGFQDTLYPHSNRQFYRDCDVTGTIDFIFGSAAVVFQGCKIMPRQPLSNQFNTITAQGKKDPNQSSGMSIQRCTISANGNVIAPTYLGRPWKEFSTTVIMETVIGAVVRPSGWMSWVSGVDPPASIVYGEYKNTGPGSDVTQRVKWAGYKPVMSDAEAAKFTVATLLHGADWIPATGVINQLS

SEQ ID NO: 10230 - protein, 308 aa, Arabidopsis thaliana
MQVFQRKEDSSWGNSMPTTNSNIQGSESFSLTKDMIMSTTQLPAMKHSGLQLQNQDSTSSQSTEEESGGGEVASFGEYKRYGCSIVNNNLSGYIENLGKPIENYTKSITTSSMVSQDSVFPAPTSGQISWSLQCAETSHFNGFLAPEYASTPTALPHLEMMGLVSSRVPLPHHIQENEPIFVNAKQYHAILRRRKHRAKLEAQNKLIKCRKPYLHESRHLHALKRARGSGGRFLNTKKLQESSNSLCSSQMANGQNFSMSPHGGGSGIGSSSISPSSNSNCINMFQNPQFRFSGYPSTHHASALMSGT

SEQ ID NO: 10231 - protein, 356 aa, Arabidopsis thaliana
MLCIIIIENMERVCEFCKAYRAVVYCIADTANLCLTCDAKVHSANSLSGRHLRTVLCDSCKNQPCVVRCFDHKMFLCHGCNDKFHGGGSSEHRRRDLRCYTGCPPAKDFAVMWGFRVMDDDDDVSLEQSFRMVKPKVQREGGFILEQILELEKVQLREENGSSSLTERGDPSPLELPKKPEEQLIDLPQTGKELVVDFSHLSSSSTLGDSFWECKSPYNKNNQLWHQNIQDIGVCEDTICSDDDFQIPDIDLTFRNFEEQFGADPEPIADSNNVFFVSSLDKSHEMKTFSSSFNNPIFAPKPASSTISFSSSETDNPYSHSEEVISFCPSLSNNTRQKVITRLKEKKRARVEEKKA

SEQ ID NO: 10232 - protein, 532 aa, Arabidopsis thaliana
MGWFNKIFKGSNQRLRVGNNKHNHNVYYDNYPTASHDDEPSAADTDADNDEPHHTQEPSTSEDNTSNDQENEDIDRAIALSLLEENQEQTSISGKYSMPVDEDEQLARALQESMVVGNSPRHKSGSTYDNGNAYGAGDLYGNGHMYGGGNVYANGDIYYPRPITFQMDFRICAGCNMEIGHGRFLNCLNSLWHPECFRCYGCSQPISEYEFSTSGNYPFHKACYRERYHPKCDVCSHFIPTNHAGLIEYRAHPFWVQKYCPSHEHDATPRCCSCERMEPRNTRYVELNDGRKLCLECLDSAVMDTMQCQPLYLQIQNFYEGLNMKVEQEVPLLLVERQALNEAREGEKNGHYHMPETRGLCLSEEQTVSTVRKRSKHGTGKWAGNITEPYKLTRQCEVTAILILFGLPRLLTGSILAHEMMHAWMRLKGFRTLSQDVEEGICQVMAHKWLDAELAAGSTNSNAASSSSSSQGLKKGPRSQYERKLGEFFKHQIESDASPVYGDGFRAGRLAVHKYGLRKTLEHIQMTGRFPV

SEQ ID NO: 10233 - protein, 445 aa, Arabidopsis thaliana
MSFRGIVQDLRDGFGSLSRRSFDFRLSSLHKGKAQGSSFREYSSSRDLLSPVIVQTSRWANLPPELLFDVIKRLEESESNWPARKHVVACASVCRSWRAMCQEIVLGPEICGKLTFPVSLKQPGPRDAMIQCFIKRDKSKLTFHLFLCLSPALLVENGKFLLSAKRTRRTTRTEYIISMDADNISRSSNSYLGKLRSNFLGTKFLVYDTQPPPNTSSSALITDRTSRSRFHSRRVSPKVPSGSYNIAQITYELNVLGTRGPRRMHCIMNSIPISSLEPGGSVPNQPEKLVPAPYSLDDSFRSNISFSKSSFDHRSLDFSSSRFSEMGISCDDNEEEASFRPLILKNKQPRWHEQLQCWCLNFRGRVTVASVKNFQLVAARQPQPQGTGAAAAPTSAPAHPEQDKVILQFGKVGKDMFTMDYRYPLSAFQAFAICLSSFDTKLACE

SEQ ID NO: 10234 - protein, 159 aa, Arabidopsis thaliana
MSDDEHHFEASESGASKTYPQSAGNIRKGGHIVIKNRPCKVVEVSTSKTGKHGHAKCHFVAIDIFTAKKLEDIVPSSHNCDVPHVNRVDYQLIDITEDGFVSLLTDSGGTKDDLKLPTDDGLTAQMRLGFDEGKDIVVSVMSSMGEEQICAVKEVGGGK

SEQ ID NO: 10235 - protein, 130 aa, Arabidopsis thaliana
MVDQSPRRVVVAALLLFVVLCDLSNSAGAANSVSAFVQNAILSNKIVIFSKSYCPYCLRSKRIFSQLKEEPFVVELDQREDGDQIQYELLEFVGRRTVPQVFVNGKHIGGSDDLGAALESGQLQKLLAAS

SEQ ID NO: 10236 - protein, 338 aa, Arabidopsis thaliana
MARIGSFLIILYLIYALTLCICDDDESNYGGDKGNLFPGFYRSSCPRAEEIVRSVVAKAVARETRMAASLMRLHFHDCFVQGCDGSLLLDTSGSIVTEKNSNPNSRSARGFEVVDEIKAALENECPNTVSCADALTLAARDSSVLTGGPSWMVPLGRRDSTSASLSGSNNNIPAPNNTFNTIVTRFNNQGLDLTDVVALSGSHTIGFSRCTSFRQRLYNQSGNGSPDRTLEQSYAANLRQRCPRSGGDQNLSELDINSAGRFDNSYFKNLIENMGLLNSDEVLFSSNEQSRELVKKYAEDQEEFFEQFAESMIKMGNISPLTGSSGEIRKNCRKINNS

SEQ ID NO: 10237 - protein, 196 aa, Arabidopsis thaliana
MSRVYVGNLDPRVTERELEDEFRSFGVIRSVWVARRPPGYAFLDFEDSRDARDAIREVDGKNGWRVEQSHNRGGGGGRGGGRGGGDGGRGRGGSDLKCYECGESGHFARECRSRGGSGGRRRSRSRSRSPPRYRKSPTYGGRRSYSPRARSPPPPRRRSPSPRGRNYSRSPPPYRARDEVPYANGNGLKDVRRSRS

SEQ ID NO: 10238 - protein, 347 aa, Arabidopsis thaliana
MVGLNNAVSLDIEEICNGGKEHHVKTCHGSVSVVVYGDQEKPALITYPDVALNYMSCFQGLFLCPEAVSLLLHNFCIYHISPPGHEFGAAPVCSNDPSPSVEDLADQILEVLNFFSLEAVMCMGITAGAYILSLFAIKHKERVLGLILISPLCKAPSWSEWFYYKVVSNLLYYYGMSGLLKDIFLQRYFSKEARGSSEVPERDVVHECRRLLGERHGSSLMRFLEAVNRRHDLTDGLKSLKCRTLIFVGDQSPFHSETLHMVTALDRKYSALVEVQACGSMVTEEQPHAMLIPMEFFFMGFGLYRPGRVSDSPRSPLSPSCISPELLSPESLGLKLKPIKTRVPTKC

SEQ ID NO: 10239 - protein, 318 aa, Arabidopsis thaliana
MGERDDGLGLSLSLGNSQQKEPSLRLNLMPLTTSSSSSSFQHMHNQNNNSHPQKIHNISWTHLFQSSGIKRTTAERNSDAGSFLRGFNVNRAQSSVAVVDLEEEAAVVSSPNSAVSSLSGNKRDLAVARGGDENEAERASCSRGGGSGGSDDEDGGNGDGSRKKLRLSKDQALVLEETFKEHSTLNPKQKLALAKQLNLRARQVEVWFQNRRARTKLKQTEVDCEYLKRCCDNLTEENRRLQKEVSELRALKLSPHLYMHMTPPTTLTMCPSCERVSSSAATVTAAPSTTTTPTVVGRPSPQRLTPWTAISLQQKSGR

SEQ ID NO: 10240 - protein, 201 aa, Arabidopsis thaliana
MSGGGDVNMSGGDRRKGTVKWFDTQKGFGFITPSDGGDDLFVHQSSIRSEGFRSLAAEESVEFDVEVDNSGRPKAIEVSGPDGAPVQGNSGGGGSSGGRGGFGGGGGRGGGRGGGSYGGGYGGRGSGGRGGGGGDNSCFKCGEPGHMARECSQGGGGYSGGGGGGRYGSGGGGGGGGGGLSCYSCGESGHFARDCTSGGAR

SEQ ID NO: 10241 - protein, 519 aa, Arabidopsis thaliana
MGGGGDTTDTNMMQRVNSSSGTSSSSIPKHNLHLNPALIRSHHHFRHPFTGAPPPPIPPISPYSQIPATLQPRHSRSMSQPSSFFSFDSLPPLNPSAPSVSVSVEEKTGAGFSPSLPPSPFTMCHSSSSRNAGDGENLPPRKSHRRSNSDVTFGFSSMMSQNQKSPPLSSLERSISGEDTSDWSNLVKKEPREGFYKGRKPEVEAAMDDVFTAYMNLDNIDVLNSFGGEDGKNGNENVEEMESSRGSGTKKTNGGSSSDSEGDSSASGNVKVALSSSSSGVKRRAGGDIAPTGRHYRSVSMDSCFMGKLNFGDESSLKLPPSSSAKVSPTNSGEGNSSAYSVEFGNSEFTAAEMKKIAADEKLAEIVMADPKRVKRILANRVSAARSKERKTRYMAELEHKVQTLQTEATTLSAQLTHLQRDSMGLTNQNSELKFRLQAMEQQAQLRDALSEKLNEEVQRLKLVIGEPNRRQSGSSSSESKMSLNPEMFQQLSISQLQHQQMQHSNQCSTMKAKHTSND

SEQ ID NO: 10242 - protein, 586 aa, Arabidopsis thaliana
MTSFSLTFTSPLLPSSSTKPKRSVLVAAAQTTAPAESTASVDADRLEPRVELKDGFFILKEKFRKGINPQEKVKIEREPMKLFMENGIEELAKKSMEELDSEKSSKDDIDVRLKWLGLFHRRKHQYGKFMMRLKLPNGVTTSAQTRYLASVIRKYGEDGCADVTTRQNWQIRGVVLPDVPEILKGLASVGLTSLQSGMDNVRNPVGNPIAGIDPEEIVDTRPYTNLLSQFITANSQGNPDFTNLPRKWNVCVVGTHDLYEHPHINDLAYMPANKDGRFGFNLLVGGFFSPKRCEEAIPLDAWVPADDVLPLCKAVLEAYRDLGTRGNRQKTRMMWLIDELGVEGFRTEVEKRMPNGKLERGSSEDLVNKQWERRDYFGVNPQKQEGLSFVGLHVPVGRLQADDMDELARLADTYGSGELRLTVEQNIIIPNVETSKTEALLQEPFLKNRFSPEPSILMKGLVACTGSQFCGQAIIETKLRALKVTEEVERLVSVPRPIRMHWTGCPNTCGQVQVADIGFMGCLTRGEEGKPVEGADVYVGGRIGSDSHIGEIYKKGVRVTELVPLVAEILIKEFGAVPREREENED

SEQ ID NO: 10243 - protein, 462 aa, Arabidopsis thaliana
MARVLVSSPSSFFGSPLIKPSSSLRHSGVGGGGTAQFLPYRSNNNKLFTTSTTVRFSLNEIPPFHGLDSSVDIGAIFTRAESLLYTIADAAVVGADSVVTTDSSAVQKSGGWFGFISDAMELVLKILKDGLSAVHVPYAYGFAIILLTIIVKAATYPLTKQQVESTLAMQNLQPKIKAIQQRYAGNQERIQLETSRLYKQAGVNPLAGCLPTLATIPVWIGLYQALSNVANEGLFTEGFFWIPSLGGPTSIAARQSGSGISWLFPFVDGHPPLGWYDTVAYLVLPVLLIASQYVSMEIMKPPQTDDPAQKNTLLVFKFLPLMIGYFALSVPSGLSIYWLTNNVLSTAQQVYLRKLGGAKPNMDENASKIISAGRAKRSIAQPDDAGERFRQLKEQEKRSKKNKAVAKDTVELVEESQSESEEGSDDEEEEAREGALASSTTSKPLPEVGQRRSKRSKRKRTV

SEQ ID NO: 10244 - protein, 352 aa, Arabidopsis thaliana
MPESLNVGNGNPSIPIINERTLPKFLESARMEKSVNRTNTRLKLFSGTANPALAQEIAWYMGLDLGKVNIKRFADGEIYVQLQESVRGCDVYLVQPTCTPTNENLMELLIMVDACRRASAKKVTAVIPYFGYARADRKTQGRESIAAKLVANLITEAGADRVLACDLHSGQSMGYFDIPVDHVYCQPVILDYLASKSIPSEDLVVVSPDVGGVARARAFAKKLSDAPLAIVDKRRSGHNVAEVMNLIGDVRGKVAIMVDDMIDTAGTIVKGAALLHQEGAREVYACCTHAVFSPPAIERLSGGLLQEVIVTNTLPVAEKNYFPQLTILSVANLLGETIWRVHDDSSVSSIFL

SEQ ID NO: 10245 - protein, 208 aa, Arabidopsis thaliana
MTSSSSSPITFTLLLLLSLLVALNPNPSLASTGSNINTNDIVTQYSTYVRNACNVTRYNRLCVRTLWPFAIVARNNTSKWARASVAVTITDTKRVLRLLLKTQRSAVGESERIALSDCRELFVDSLDNLYKSLAVLRTLNADEFQRQISDLATWLSAALTDDDTCLDGFEETSSRTRTVRMVRRKATKCMRLCSNALALLKKLAFDGL

SEQ ID NO: 10246 - protein, 274 aa, Arabidopsis thaliana
MGFDDTCNTGLVLGLGPSPIPNNYNSTIRQSSVYKLEPSLTLCLSGDPSVTVVTGADQLCRQTSSHSGVSSFSSGRVVKRERDGGEESPEEEEMTERVISDYHEDEEGISARKKLRLTKQQSALLEESFKDHSTLNPKQKQVLARQLNLRPRQVEVWFQNRRARTKLKQTEVDCEFLKKCCETLADENIRLQKEIQELKTLKLTQPFYMHMPASTLTKCPSCERIGGGGGGNGGGGGGSGATAVIVDGSTAKGAFSISSKPHFFNPFTNPSAAC

SEQ ID NO: 10247 - protein, 338 aa, Arabidopsis thaliana
MAGVNLQLRHAYSIAQFVPTVSSPPPLPTQRVRLGTSPSRVLLCNLRANSAAAPILRTTRRSVIVSASSVSSAVDSDSLVEDRDDVGRIPLLEVRDLRAVIAESRQEILKGVNLVVYEGEVHAVMGKNGSGKSTFSKVLVGHPDYEVTGGSIVFKGQNLLDMEPEDRSLAGLFMSFQSPVEIPGVSNMDFLNMAFNARKRKLGQPELDPIQFYSHLVSKLEVVNMKTDFLNRNVNEGFSGGERKRNEILQLAVLGAELAILDEIDSGLDVDALQDVAKAVNGLLTPKNSVLMITHYQRLLDYIKPTLIHIMENGRIIKTGDNSLAKLLEKEGYKAISG

SEQ ID NO: 10248 - protein, 218 aa, Arabidopsis thaliana; identical to SEQ ID NO: 494

SEQ ID NO: 10249 - protein, 498 aa, Arabidopsis thaliana
MSGAITCSAADLATLLGPNATAAADYICGQLGTVNNKFTDAAFAIDNTYLLFSAYLVFAMQLGFAMLCAGSVRAKNTMNIMLTNVLDAAAGGLFYYLFGYAFAFGGSSEGFIGRHNFALRDFPTPTADYSFFLYQWAFAIAAAGITSGSIAERTQFVAYLIYSSFLTGFVYPVVSHWFWSPDGWASPFRSADDRLFSTGAIDFAGSGVVHMVGGIAGLWGALIEGPRRGRFEKGGRAIALRGHSASLVVLGTFLLWFGWYGFNPGSFTKILVPYNSGSNYGQWSGIGRTAVNTTLSGCTAALTTLFGKRLLSGHWNVTDVCNGLLGGFAAITAGCSVVEPWAAIVCGFMASVVLIGCNKLAELVQYDDPLEAAQLHGGCGAWGLIFVGLFAKEKYLNEVYGATPGRPYGLFMGGGGKLLGAQLVQILVIVGWVSATMGTLFFILKRLNLLRISEQHEMQGMDMTRHGGFAYIYHDNDDESHRVDPGSPFPRSATPPRV

SEQ ID NO: 10250 - protein, 386 aa, Arabidopsis thaliana
MASSSSSSLSFSTSKKNKTFFKKPNSAFSSSRATSLIKRQQTVFKKAKELSILCDIDVCVICYGSNGELKTWPEEREKVKAIARRYGELSETKRRKGSVDLHEFLEKMNKDDPEKEEKKKIKVRRVPKVKYPVWDPRFDNYSVEQLMGLVQSLERNLTRIQHRTCAVVEAQGQRRVQYTNMANQELMMANTMNQLQQHSNQVSMYLWNHGNGAFSQIPVSALASNQTQSLAPIPPELMIYPNSDAGNYSGSLGVQGTGINGLQNMNMLTYNNINSVNDFSKQFDQNSRAESYSSLLGVHEDGNNEFENPNMSSRNNFNVQDCAGLLGMQGAGTNGLQSMNMHDYSNNNSINSNGLSHQYVQFPTYNSQHQDRVFNLDQNGNNTRSL

SEQ ID NO: 10251 - protein, 889 aa, Arabidopsis thaliana
MEFPHSVLLVVLIIATFAISNLVQAEEDQEGFISLDCGLPPNEVSPYIEPFTGLRFSSDSSFIQSGKIGKVDKSFEATTLKSYMTLRYFPDGKRNCYNLIVKQGKTYMIRATALYGNYDGLNISPKFDLYIGANFWTTLDAGEYLSGVVEEVNYIPRSNSLDVCLVKTDTSTPFLSLLELRPLDNDSYLTGSGSLKTFRRYYLSNSESVIAYPEDVKDRIWEPTFDSEWKQIWTTLKPNNSNGYLVPKNVLMTAAIPANDSAPFRFTEELDSPTDELYVYLHFSEVQSLQANESREFDILWSGEVAYEAFIPEYLNITTIQTNTPVTCPGGKCNLELKRTKNSTHPPLINAIEFYTVVNFPQLETNETDVVAIKDIKATYELNRITWQGDPCVPQKFIWEGLDCNSKDALTLPRITSLNLSSTGLTGNIAAGIQNLTHLDKLDLSNNNLTGGVPEFLASMKSLSFINLSKNNLNGSIPQALLKREKDGLKLSVDEQIRCFPGSCVITKKKFPVMIVALVSSAVVVILVVLVLIFVFKKKKPSNLEDLPPSSNTPRENITSTSISDTSIETKRKRFSYSEVMEMTKNLQRPLGEGGFGVVYHGDINGSSQQVAVKLLSQSSTQGYKEFKAEVELLLRVHHINLVSLVGYCDERDHLALIYEYMSNKDLKHHLSGKHGGSVLKWNTRLQIAVDAALGLEYLHIGCRPSMVHRDVKSTNILLDDQFTAKMADFGLSRSFQLGDESQVSTVVAGTPGYLDPEYYRTGRLAEMSDVYSFGIVLLEIITNQRVIDPAREKSHITEWTAFMLNRGDITRIMDPNLQGDYNSRSVWRALELAMMCANPSSEKRPSMSQVVIELKECIRSENKTQGMDSHSSFEQSMSFDTKAVPSAR

SEQ ID NO: 10252 - protein, 793 aa, Arabidopsis thaliana
MRNCYNLSVHKETKYLIRVTSNYGNYDGRNEPPRFDLYLGPNFWVTIDLGKHVNGDTWKEIIHIPKSNSLDVCLIKTGTTTPIISTLELRSLPKYSYNAISGSLKSTLRAFLSESTEVIRYPNDFYDRMWVPHFETEWKQISTNLKVNSSNGYLLPQDVLMTAAIPVNTSARLSFTENLEFPHDELYLYFHFSEVQVLQANQSREFSILWNGMVIYPDFIPDYLGAATVYNPSPSLCEVGKCLLELERTQKSTLPPLLNAIEVFTVMNFPQSETNDDDVIAITKIKDTHRLNRTSWQGDPCVPQLFSWAGLSCIDTNVSTPPRIISLNLSSSGLTGNIATGIQNLTKLQKLDLSNNNLTGVVPEFLANMKSLLFIDLRKNKLNGSIPKTLLDRKKKGLQLFVDGDDDKGDDNKCLSGSCVPKMKFPLMIVALAVSAVVVIAVVMILIFLFRKKKKSSLGITSAAISEESIETKRRRFTYSEVVEMTKNFQKTLGEGGFGTVYYGNLNGSEQVAVKVLSQSSSQGYKHFKAEVELLLRVHHINLVSLVGYCDERNHLALIYECMSNGDLKDHLSGKKGNAVLKWSTRLRIAVDAALGLEYLHYGCRPSIVHRDVKSTNILLDDQLMAKIADFGLSRSFKLGEESQASTVVAGTLGYLDPEYYRTCRLAEMSDVYSFGILLLEIITNQNVIDHAREKAHITEWVGLVLKGGDVTRIVDPNLDGEYNSRSVWRALELAMSCANPSSEHRPIMSQVVIDLKECLNTENSMKIKKNDTDNDGSLELSSSDTEAVPCAR

SEQ ID NO: 10253 - protein, 155 aa, Arabidopsis thaliana
METLQCRHQHVFILLLVLFHSSLFGLASKIDVSDDARGIRIDGGQKRFLTNSPQHGKEHAACTNEEPDLGPLTRISCNEPGYVITKINFADYGNPTGTCGHFRRGNCGARATMRIVKKNCLGKEKCHLLVTDEMFGPSKCKGAPMLAVETTCTIA

SEQ ID NO: 10254 - protein, 308 aa, Arabidopsis thaliana
MQEFHSSKDSLPCPATSWDNSVFTNSNVQGSSSLTDNNTLSLTMEMKQTGFQMQHYDSSSTQSTGGESYSEVASLSEPTNRYGHNIVVTHLSGYKENPENPIGSHSISKVSQDSVVLPIEAASWPLHGNVTPHFNGFLSFPYASQHTVQHPQIRGLVPSRMPLPHNIPENEPIFVNAKQYQAILRRRERRAKLEAQNKLIKVRKPYLHESRHLHALKRVRGSGGRFLNTKKHQESNSSLSPPFLIPPHVFKNSPGKFRQMDISRGGVVSSVSTTSCSDITGNNNDMFQQNPQFRFSGYPSNHHVSVLM

SEQ ID NO: 10255 - protein, 315 aa, Arabidopsis thaliana
MSERDDGLGLSLSLSLGFNQKDPSSRLNPMPLASYASSSHMQHMQQSNYNHPQKIQNTWINMFQSSERNSDMRSFLRGIDVNRAPSTVVVDVEDEGAGVSSPNSTVSSVMSGKKSERELMAAAGAVGGGRVEDNEIERASCSLGGGSDDEDGSGNGDDSSRKKLRLSKEQALVLEETFKEHSTLNPKQKMALAKQLNLRTRQVEVWFQNRRARTKLKQTEVDCEYLKRCCENLTDENRRLQKEVSELRALKLSPHLYMHMKPPTTLTMCPSCERVAVTSSSSSVAPPVMNSSSPMGPMSPWAAMPLRQRPAAGSH

SEQ ID NO: 10256 - protein, 254 aa, Arabidopsis thaliana
MGGEEEVVSVELPAPSSWKKLFYPNKVGSVKKTEVVFVAPTGEEISNRKQLEQYLKSHPGNPAIAEFDWTTSGTPRRSARISEKTKATPSPDKEPPKKRGRTKSPVSKKDAEGEKSEGGGEENSHVKDTEMNPPEGIAENENVTDKNGSGETERVNDAKENIVAEETPNAAPVQEEGESMKEKALDSVDDKSKETDKEKDTGSIEKNSVDVEKKTVEASDEKKNSEAETRNHEENGLTTEAEGKEKTAEGEATG

SEQ ID NO: 10257 - protein, 173 aa, Arabidopsis thaliana
MALRSVKTPTLITSVAVVSSSVTNKPHSIRFSLKPTSALVVHNHQLSFYGSNLKLKPTKFRCSASALTPQLKDTLEKLVNSEKVVLFMKGTRDFPMCGFSNTVVQILKNLNVPFEDVNILENEMLRQGLKEYSNWPTFPQLYIGGEFFGGCDITLEAFKTGELQEEVEKAMCS

SEQ ID NO: 10258 - protein, 364 aa, Arabidopsis thaliana
MEPKCDHCATSQALIYCKSDLAKLCLNCDVHVHSANPLSHRHIRSLICEKCFSQPAAIRCLDEKVSYCQGCHWHESNCSELGHRVQSLNPFSGCPSPTDFNRMWSSILEPPVSGLLSPFVGSFPLNDLNNTMFDTAYSMVPHNISYTQNFSDNLSFFSTESKGYPDMVLKLEEGEEDLCEGLNLDDAPLNFDVGDDIIGCSSEVHIEPDHTVPNCLLIDKTNTSSFTGSNFTVDKALEASPPGQQMNINTGLQLPLSPVLFGQIHPSLNITGENNAADYQDCGMSPGFIMSEAPWETNFEVSCPQARNEAKLRYKEKKLKRSFGKQIRYASRKARADTRKRVKGRFVKAGDSYDYDPSSPTTNN

SEQ ID NO: 10259 - protein, 863 aa, Arabidopsis thaliana
MRANLVFGIFCALVTTILVHGQDQSGYISIDCGIPPYDTPEDTMTNINYVSDEAFITTGVNFKVSEEYGYPKNPVLLSTLAEVRAFPQGNRNCYTLKLSQGKDHLYLIRASFMYGNYDGKKALPEFDLYVNVNFWSTVKFKNASDQVTKEILSFAESDTIYVCLVNKGKGTPFISGLELRPVNSSIYGTEFGRNVSLVLYRRWDIGYLNGTGRYQDDRFDRIWSPYSSNISWNSIITSGYIDVFQNGYCPPDEVIKTAAAPENVDDPLELFWTSDDPNVRFYAYLYFAELETLEKNETRKIKILWNGSPVSETSFEPSSKYSTTFSNPRAFTGKDHWISIQKTVDSTLPPILNAIEIFTAQSLDEFSTTIEDIHAIESIKATYKVNKVWSGDPCSPRLFPWEGVGCSDNNNNHQIKSLNLSSSGLLGPIVLAFRNLSLLESLDLSNNDLQQNVPEFLADLKHLKVLNLKGNNFTGFIPKSLMKKLKAGLLTLSADEQNLCNSCQEKKKKKSMVVPIAVAASVIVLVVVLVIIWIILRQRKKGAYSGPLLPSGKRRFTYNEVSSITNNFNKVIGKGGFGIVYLGSLEDGTKIAVKMINDSSLAKPKGTSSSSLSRASNQFQVEAELLLTVHHRNLASFVGYCDDDRSMALIYEYMANGNLQAYLSSENAEDLSWEKRLHIAIDSAQGLEYLHDGCRPAIVHRDVKTANILINDNLEAKIADFGLSKVFPEDDLSHVVTTVMGTPGYVDPEYYRTFVLNEKSDVYSFGVVLLELITGQRAIIKTEEGDNISVIHYVWPFFEARELDGVVDPLLRGDFSQDSAWKFVDVAMSCVRDKGSNRPTMNQIVAELKQCLAAELDREPQSQ

SEQ ID NO: 10260 - protein, 282 aa, Arabidopsis thaliana
MGRSPCCDKNGVKKGPWTAEEDQKLIDYIRFHGPGNWRTLPKNAGLHRCGKSCRLRWTNYLRPDIKRGRFSFEEEETIIQLHSVMGNKWSAIAARLPGRTDNEIKNHWNTHIRKRLVRSGIDPVTHSPRLDLLDLSSLLSALFNQPNFSAVATHASSLLNPDVLRLASLLLPLQNPNPVYPSNLDQNLQTPNTSSESSQPQAETSTVPTNYETSSLEPMNARLDDVGLADVLPPLSESFDLDSLMSTPMSSPRQNSIEAETNSSTFFDFGIPEDFILDDFMF

SEQ ID NO: 10261 - protein, 350 aa, Arabidopsis thaliana
MKPVFCGNFEYDAREGDLERLFRKYGKVERVDMKAGFAFVYMEDERDAEDAIRALDRFEFGRKGRRLRVEWTKSERGGDKRSGGGSRRSSSSMRPSKTLFVINFDADNTRTRDLEKHFEPYGKIVNVRIRRNFAFIQYEAQEDATRALDASNNSKLMDKVISVEYAVKDDDARGNGHSPERRRDRSPERRRRSPSPYKRERGSPDYGRGASPVAAYRKERTSPDYGRRRSPSPYKKSRRGSPEYGRDRRGNDSPRRRERVASPTKYSRSPNNKRERMSPNHSPFKKESPRNGVGEVESPIERRERSRSSPENGQVESPGSIGRRDSDGGYDGAESPMQKSRSPRSPPADE

SEQ ID NO: 10262 - protein, 603 aa, Arabidopsis thaliana [sequence omitted]

SEQ ID NO: 10263 - protein, 603 aa, Arabidopsis thaliana
MAVDSPLQSRMVSATTSEKDVKALKFIEEMTRNPDSVQEKVLGEILTRNSNTEYLKRFDLDGVVDRKTFKSKVPVVTYEDLKPEIQRISNGDCSPILSSHPITEFLTSSGTSAGERKLMPTIEEDLDRRQLLYSLLMPVMNLYVPGLDKGKGLYFLFVKSESKTSGGLPARPVLTSYYKSDHFKRRPYDPYNVYTSPNEAILCSDSSQSMYAQMLCGLLMRHEVLRLGAVFASGLLRAISFLQNNWKELARDISTGTLSSRIFDPAIKNRMSKILTKPDQELAEFLVGVCSQENWEGIITKIWPNTKYLDVIVTGAMAQYIPTLEYYSGGLPMACTMYASSESYFGINLKPMCKPSEVSYTIMPNMAYFEFLPHNHDGDGAAEASLDETSLVELANVEVGKEYELVITTYAGLYRYRVGDILRVTGFHNSAPQFKFIRRKNVLLSVESDKTDEAELQKAVENASRLFAEQGTRVIEYTSYAETKTIPGHYVIYWELLGRDQSNALMSEEVMAKCCLEMEESLNSVYRQSRVADKSIGPLEIRVVRNGTFEELMDYAISRGASINQYKVPRCVSFTPIMELLDSRVVSAHFSPSLPHWSPERRR

SEQ ID NO: 10264 - protein, 372 aa, Arabidopsis thaliana
MSNHLLPPENKIPTLNFDHLEIFSALGRGSKGVVFLVKADNKWLALKVILRESIESKKAKDEYKRISFEQGVLSRFDHPLFPRLHGVISTDKVIGYAIDYCPGRDLNSLRKKQSEEMFSDEIIRFYAAELVIALEYLHNQGIVYRDLKPDNVMIQENGHLMLVDFDLSTNLPPRTPQSSFSSSPRLSTATKKERSIFAFSGLCNSGISPDDSVSRSSESEFSGEKSNSFVGTEEYVAPEVITGSGHDFAVDWWSLGVVLYEMLYGATPFRGSNRKETFLKILTEPPSLVGETTSLRDLVRKLLEKDPSRRINVEGIKGHDFFKGLDWDLVLKVSRPPYIPAPENYEISKIDVEKFVHEIFTKCEHNGNFIVF

SEQ ID NO: 10265 - protein, 294 aa, Arabidopsis thaliana
MKRLSSSDSMCGLISTSTDEQSPRGYGSNYQSMLEGYDEDATLIEEYSGNHHHMGLSEKKRRLKVDQVKALEKNFELENKLEPERKTKLAQELGLQPRQVAVWFQNRRARWKTKQLEKDYGVLKGQYDSLRHNFDSLRRDNDSLLQEISKIKAKVNGEEDNNNNKAITEGVKEEEVHKTDSIPSSPLQFLEHSSGFNYRRSFTDLRDLLPNSTVVEAGSSDSCDSSAVLNDETSSDNGRLTPPVTVTGGSFLQFVKTEQTEDHEDFLSGEEACGFFSDEQPPSLHWYSASDHWT

SEQ ID NO: 10266 - protein, 261 aa, Arabidopsis thaliana
MVEEVWRKGPWTAEEDRLLIEYVRVHGEGRWNSVSKLAGLKRNGKSCRLRWVNYLRPDLKRGQITPHEESIILELHAKWGNRWSTIARSLPGRTDNEIKNYWRTHFKKKAKPTTNNAEKIKSRLLKRQHFKEQREIELQQEQQLFQFDQLGMKKIISLLEENNSSSSSDGGGDVFYYPDQITHSSKPFGYNSNSLEEQLQGRFSPVNIPDANTMNEDNAIWDGFWNMDVVNGHGGNLGVVAATAACGPRKPYFHNLVIPFC

SEQ ID NO: 10267 - protein, 160 aa, Arabidopsis thaliana
MSGTVKDIVSKEELDNLRHSGAPLVLHFWASWCDASKQMDQVFSHLATDFPRAHFFRVEAEEHPEISEAYSVALVPYFVFFKDGKTVDTLEGADPSSLANKVGKVAGSITPASLGLAAGPTILETVKKNAKASGQDRAQPVSTADALKNRLEKLTLLCYS

SEQ ID NO: 10268 - protein, 316 aa, Arabidopsis thaliana
MLKVVLLMMIMMLASQSEAQLNRDFYKESCPSLFLVVRRVVKRAVAREPRMGASLLRLFFHDCFVNGCDGSLLLDDTPSFLGEKTSGPSNNSVRGFEVIDKIKFKVEKMCPGIVSCADILAITARDSVLLLGGPGWSVKLGRRDSTTANFAAANSGVIPPPITTLSNLINRFKAQGLSTRDMVALSGAHTIGRAQCVTFRNRIYNASNIDTSFAISKRRNCPATSGSGDNKKANLDVRSPDRFDHGFYKQLLSKKGLLTSDQVLFNNGPTDSLVIAYSHNLNAFYRDFARAMIKMGDISPLTGSNGQIRQNCRRPN

SEQ ID NO: 10269 - protein, 283 aa, Arabidopsis thaliana
MMMGKEDLGLSLSLGFSQNHNPLQMNLNPNSSLSNNLQRLPWNQTFDPTSDLRKIDVNSFPSTVNCEEDTGVSSPNSTISSTISGKRSEREGISGTGVGSGDDHDEITPDRGYSRGTSDEEEDGGETSRKKLRLSKDQSAFLEETFKEHNTLNPKQKLALAKKLNLTARQVEVWFQNRRARTKLKQTEVDCEYLKRCVEKLTEENRRLQKEAMELRTLKLSPQFYGQMTPPTTLIMCPSCERVGGPSSSNHHHNHRPVSINPWVACAGQVAHGLNFEALRPRS

SEQ ID NO: 10270 - protein, 341 aa, Arabidopsis thaliana
MKQASSSSSSRNSTSLTNRLKTIFKKAEELSILCAIEVCVIYYGPDGELRTWPKERETVKDMALRYKEARKRKKSRNLHEFLEKEKDKDKGKTNLKKNWYPNFDHYSPQQLSQLIQSLERTLSTLQERLRIVEAQKLQNTNLVHQSLTPSYLNQTQHLNPSKFSLFMYNHGDATLSQLPLSAPHSNQLINYQNHLMQHGFGQNMCSDNITNNNFEHPGVSNTQDYSPLLSVQASAVNNYGLNNHLMQQQDQLHGFDQNMCMVSEIINNNNGLQHPNLSNTVPHEFSSDFNQNPYGNAVGNISFSQDMFSSYDASSLLQTSSLPPLHNIPSSYCFPGNSRLL

SEQ ID NO: 10271 - protein, 892 aa, Arabidopsis thaliana
MDSPCWLLLLLLGAFAIIGCVQAQDQQEFISLDCGLPMTEPSSYTESVTGLRFSSDAEFIQTGESGKIQASMENDYLKPYTRLRYFPEERRNCYSLSVDKNRKYLIRARFIYGNYDGRNSNPIFELHLGPNLWATIDLQKFVNGTMEEILHTPTSNSLNVCLVKTGTTTPLISALELRPLGNNSYLTDGSLNLFVRIYLNKTDGFLRYPDDIYDRRWHNYFMVDDWTQIFTTLEVTNDNNYEPPKKALAAAATPSNASAPLTISWPPDNPGDQYYLYSHFSEIQDLQTNDTREFDILWDGAVVEEGFIPPKLGVTTIHNLSPVTCKGENCIYQLIKTSRSTLPSLLNALEIYTVIQFPRNQLHLLILTSLSSTSVVAVKNIEAAYKLSRIRWQGDPCVPQKYAWDGLNCSNNTDVSKPPRVLSLNLSSSGLTGIIAAAIQNLTHLEKLDLSNNTLTGVVPEFLAQMKSLVIINLSGNNLSGPLPQGLRREGLELLVQGNPRLCLSGSCTEKNSKKKFPVVIVASVASVAIIVAVLVIIFVLSKKKSSTVGALQPPLSMPMVHDNSPEPSIETKKRRFTYSEVIKMTNNFQRVVGEGGFGVVCHGTINGSEQVAVKVLSQSSSQGYKHFKAEVDLLLRVHHTNLVSLVGYCDERDHLALIYEFLPKGDLRQHLSGKSGGSFINWGNRLRIALEAALGLEYLHSGCTPPIVHRDIKTTNILLDEQLKAKLADFGLSRSFPIGGETHISTVVAGTPGYLDPEYYQTTRLGEKSDVYSFGIVLLEIITNQPVIDQSRSKSHISQWVGFELTRGDITKIMDPNLNGDYESRSVWRVLELAMSCANPSSVNRPNMSQVANELKECLVSENLRENMNMDSQNSLKVSMSFDTELFPRAR

SEQ ID NO: 10272 - protein, 446 aa, Arabidopsis thaliana
MTKKMRRVGKYEVGRTIGEGTFAKVKFARNTDTGDNVAIKIMAKSTILKNRMVDQIKREISIMKIVRHPNIVRLYEVLASPSKIYIVLEFVTGGELFDRIVHKGRLEESESRKYFQQLVDAVAHCHCKGVYHRDLKPENLLLDTNGNLKVSDFGLSALPQEGVELLRTTCGTPNYVAPEVLSGQGYDGSAADIWSCGVILFVILAGYLPFSETDLPGLYRKINAAEFSCPPWFSAEVKFLIHRILDPNPKTRIQIQGIKKDPWFRLNYVPIRAREEEEVNLDDIRAVFDGIEGSYVAENVERNDEGPLMMNAFEMITLSQGLNLSALFDRRQDFVKRQTRFVSRREPSEIIANIEAVANSMGFKSHTRNFKTRLEGLSSIKAGQLAVVIEIYEVAPSLFMVDVRKAAGETLEYHKFYKKLCSKLENIIWRATEGIPKSEILRTITF

SEQ ID NO: 10273 - protein, 741 aa, Arabidopsis thaliana
MDEIVEDSSRVMEIEGQNDDLDRCVVEEVELTVPKTDDPTLPVLTFRMWTLGLGACIILSFINQFFWYRQMPLTISGISAQIAVVPLGHLMAKVLPTRMFLEGSKWEFSMNPGPFNVKEHVLITIFANSGAGTVYATHILSAIKLYYKRSLPFLPAFLLMITTQFLGFGWAGLFRKHLVEPGEMWWPSNLVQVSLFSALHEKEKKKKGGMTRIQFFLIVLVTSFAYYILPGYLFTMITSISWICWLGPKSVLVHQLGSGEQGLGIGAIGIDWATISSYLGSPLASPLFATINVTIGFVVIMYVATPICYWLNIYKAKTYPIFSSGLFMGNGSSYDVLSIIDKKFHLDRDIYAKTGPINMSTFFAVTYGLGFATLSATIVHVLLFNGRDLWKQTRGAFQRNKKMDFHTRIMKKNYREVPMWWFYVILVLNIALIMFISFYYNATVQLPWWGVLLACAIAVFFTPLIGVIAATTNQEPGLNVITEYVIGYLYPERPVANMCFKVYGYISMTQALTFIQDFKLGLYMKIPPRSMFMAQVVGTLVSVVVYTGTAWWLMVDIPHLCDKSLLPPDSEWTCPMDRVFFDASVIWGLVGPRRMFGNLGEYAAINWFFLVGAIAPFFVWLATKAFPAHKWISKIHFPVILGATSMMPPAMAVNFTSWCIVAFVFGHFLYKYKRQWWKKYNYVLSGGLDAGTAFMTILIFLSVGRKGIGLLWWGNADDSTNCSLASCPTAKGVIMHGCPVL

SEQ ID NO: 10274 - protein, 360 aa, Arabidopsis thaliana
MAAAISAAVSLPSSKSSSLLTKISSVSPQRIFLKKSTVCYRRVVSVKAQVTTDTTEAPPVKVVKESKKQEEGIVVNKFKPKNPYTGRCLLNTKITGDDAPGETWHIVFTTEGEVPYREGQSIGVIPEGIDKNGKPHKLRLYSIASSAIGDFGDSKTVSLCVKRLVYTNDGGEIVKGVCSNFLCDLKPGDEAKITGPVGKEMLMPKDPNATIIMLGTGTGIAPFRSFLWKMFFEEHEDYKFNGLAWLFLGVPTSSSLLYKEEFEKMKEKNPDNFRLDFAVSREQTNEKGEKMYIQTRMAEYAEELWELLKKDNTFVYMCGLKGMEKGIDDIMVSLAAKDGIDWLEYKKQLKRSEQWNVEVY

SEQ ID NO: 10275 - protein, 289 aa, Arabidopsis thaliana
MDSSMSTKKKTKLSVRNQTCFKKSSLSSSSTAKKTTNLSMREQTMFKKALELSTLCNIDVCVIYYGRDGKLIKTWPDDQSKVRDMAERFSRLHERERCKKRTNLSLFLRKKILDDTKLSEKVLEMEDSLESGLRVLQDKLLLLQPEKNQTEFGQTRAVSSTTNPLSPPPSLIEDHRHQQRTEPLMSGVSNTEQDLSTSSLSQNQSKFSVFLYNHDNCSFYQVPDSVSSFDSLTSTGLLGEQGSGLGSSFDLPMVFPPQMQTQTPLVPFDQFAPWNQAPSFADPMMFPYN

SEQ ID NO: 10276 - protein, 607 aa, Arabidopsis thaliana
MDTKIGSIDACNPTNHDIGGPPNGGVSTVQNTSPLHSTTVSPCDATLGRYLARRLVEIGVTDVFSVPGDFNLTLLDHLIAEPNLKLIGCCNELNAGYAADGYARSRGVGACVVTFTVGGLSVLNAIAGAYSENLPLICIVGGPNSNDYGTNRILHHTIGLPDFTQELRCFQAVTCFQAVINNLEEAHELIDTAISTALKESKPVYISISCNLPAIPLPTFSRHPVPFMLPMKVSNQIGLDAAVEAAAEFLNKAVKPVLVGGPKMRVAKAADAFVELADASGYGLAVMPSAKGQVPEHHKHFIGTYWGAVSTAFCAEIVESADAYLFAGPIFNDYSSVGYSLLLKKEKAIIVQPDRVTIGNGPAFGCVLMKDFLSELAKRIKHNNTSYENYHRIYVPEGKPLRDNPNESLRVNVLFQHIQNMLSSESAVLAETGDSWFNCQKLKLPEGCGYEFQMQYGSIGWSVGATLGYAQAMPNRRVIACIGDGSFQVTAQDVSTMIRCGQKTIIFLINNGGYTIEVEIHDGPYNVIKNWNYTAFVEAIHNGEGKCWTAKVRCEEELVKAINTATNEEKESFCFIEVIVHKDDTSKELLEWGSRVSAANSRPPNPQ

SEQ ID NO: 10277 - protein, 287 aa, Arabidopsis thaliana
MDSSMSTKKKTKLSVRNQTCFKKSSLSSSSTAKKTTNLSMREQTMFKKALELSTLCNIDVCVIYYGRDGKLIKTWPEDQSKVRDMAERFSRLHERERCKKRTNLSLFLRKKILDDTKLSEKVLEMEDSLESGLRVLQDKLLLLQPEKNQTEFGQTRAVSSTTNPLSPPPSLIEDHRHQQWTEPLMSGVSNTEQDLSTSSLSQNQSRISVFLYNHDNRSFYQVPDSVSSFDQSALLGEQGSGLGSNFDLPPMVFPPQMQTQTPLVPFDQFAAWNQAPSFADPMMFPYN

SEQ ID NO: 10278 - protein, 103 aa, Arabidopsis thaliana
MSATPEEDKKPDQGAHINLKVKGQDGNEVFFRIKRSTQLKKLMNAYCDRQSVDFNSIAFLFDGRRLRAEQTPDELEMEDGDEIDAMLHQTGGGAKNGLKLFCF

SEQ ID NO: 10279 - protein, 307 aa, Arabidopsis thaliana
MGDKGRSLKINKNMEEFTKVEEEMDVRRGPWTVEEDLELINYIASHGEGRWNSLARCAELKRTGKSCRLRWLNYLRPDVRRGNITLEEQLLILELHTRWGNRWSKIAQYLPGRTDNEIKNYWRTRVQKHAKQLKCDVNSQQFKDTMKYLWMPRLVERIQAASIGSVSMSSCVTTSSDQFVINNNNTNNVDNLALMSNPNGYITPDNSSVAVSPVSDLTECQVSSEVWKIGQDENLVDPKMTSPNYMDNSSGLLNGDFTKMQDQSDLNWFENINGMVPNYSDSFWNIGNDEDFWLLQQHQQVHDNGSF

SEQ ID NO: 10280 - protein, 401 aa, Arabidopsis thaliana
MKSSRMKFAKKLKSIRAGEYLNQDRILQVLSAADEFLPKISNHIPQITSAASIWRTPQKSENQIANVTELLENVRQGEEEASGNFVGDEENVRPPVNQIPRVPCDRKESKLAVSCGSDTGIGRKSFGSGFRRPDLNSTTLFDPKLLEAFELAALCFRKIKDFSREARVNDEDDIVFPEEEEIRKDGNSIPPVISVVEYRRKDENVVVLHKDDGNALQIVNAIREEVIGEEDIGKDGNTLMDPLLEFEERCPPGGEESVVFYTTTLRGIRKTFDDCNMIRFLLDSFKVKYYERDVSMHREYREELRRISAAETEVLPPVLFVKGRCIGGAQRVLGLHEQGKFKILFEGIPITGDERCRRCDGFRFLMCDGCRGSRRIISGDGSRIQCLICNENGLIVCVGCS

SEQ ID NO: 10281 - protein, 135 aa, Arabidopsis thaliana
MTMFRSISMVMLLVALVTFISMVSSAASSPEADFVKKTISSHKIVIFSKSYCPYCKKAKSVFRELDQVPYVVELDEREDGWSIQTALGEIVGRRTVPQVFINGKHLGGSDDTVDAYESGELAKLLGVSGNKEAEL

SEQ ID NO: 10282 - protein, 384 aa, Arabidopsis thaliana
MAMRQAAKATIRACSSSSSSGYFARRQFNASSGDSKKIVGVFYKANEYATKNPNFLGCVENALGIRDWLESQGHQYIVTDDKEGPDCELEKHIPDLHVLISTPFHPAYVTAERIKKAKNLKLLLTAGIGSDHIDLQAAAAAGLTVAEVTGSNVVSVAEDELMRILILMRNFVPGYNQVVKGEWNVAGIAYRAYDLEGKTIGTVGAGRIGKLLLQRLKPFGCNLLYHDRLQMAPELEKETGAKFVEDLNEMLPKCDVIVINMPLTEKTRGMFNKELIGKLKKGVLIVNNARGAIMERQAVVDAVESGHIGGYSGDVWDPQPAPKDHPWRYMPNQAMTPHTSGTTIDAQLRYAAGTKDMLERYFKGEDFPTENYIVKDGELAPQYR

SEQ ID NO: 10283 - protein, 214 aa, Arabidopsis thaliana
MEKRESSGGSGSGDAEVRKGPWTMEEDLILINYIANHGEGVWNSLAKSAGLKRTGKSCRLRWLNYLRPDVRRGNITPEEQLTIMELHAKWGNRWSKIAKHLPGRTDNEIKNFWRTKIQKYIIKSGETTTVGSQSSEFINHHATTSHVMNDTQETMDMYSPTTSYQHASNINQQLNYGNYVPESGSIMMPLSVDQSEQNYWSVDDLWPMNIYNGN

SEQ ID NO: 10284 - protein, 354 aa, Raphanus sativus
MSLLSDLVNLNLSDSTEKIIAEYIWIGGSGMDIRSKARTLPGPVSDPSKLPKWNYDGSSTGQAAGDDSEVIIYPQAIFRDPFRRGNNILVMCDAYTPAGNPIPTNKRHNAAKIFSTSKVASEEPWYGIEQEYTLMQKGVNWPIGWPVGGFPGPQGPYYCGVGADKAIGRDIVDAHYKACLYAGISISGVNGEVMPGQWEFQVGPVEGISAGDQVWVARFLLERITEISGVNVSFDPKPVPGDWNGAGAHCNYSTKSMRNDGGLAVIKKAIEKLQVKHKEHIAAYGEGNERRLTGKHETADINTFSWGVANRGASVRVGRDTEKEGKGYFEDRRPASNMDPYVVTSMIAETTILG

SEQ ID NO: 10285 - protein, 356 aa, Raphanus sativus
MSLLTDLINLDLSDNTEKIIAEYIWVGGSGMDMRSKARTLSGPVTDPSQLPKWNYDGSSTGQAPGEDSEVILYPQAIFKDPFRRGNHILVMCDTYTPAGEPIPTNKRHAAAQIFSHPDVVAEVPWYGIEQEYTLLQKDVKWPVGWPIGGFPGPQGPYYCSVGADKSFGRDIVDAHYKACLYAGINISGINGEVMPGQWEFQVGPSVGISAADEVWIARYILERITEIAGVVVSFDPKPIPGDWNGAGAHTNYSTKSMREEGGYEIIKKAIDKLGLRHKEHISAYGEGNERRLTGHHETADINTFKWGVANRGASIRVGRDTEKEGKGYFEDRRPASNMDPYIVTSMVAETTILWNP

SEQ ID NO: 10286 - protein, 356 aa, Raphanus sativus
MSLLTDLINLNLSETTDKIIAEYIWVGGSGMDMRSKARTLPGPVSDPSELPKWNYDGSSTGQAPGEDSEVILYPQAIFKDPFRRANNILVMCDAYTPAGEPIPTNKRHAAAKVFSQPDVVAEVPWYGIEQEYTLLQKDVKWPVGWPIGGFPGPQGPYYCGVGADKSFGRDVVDAHYKACLYAGINISGINGEVMPGQWEFQVGSAVGISAGDEIWVARYILERITEIAGVVVSFDPKPIPGDWNGAGAHCNYSTKSMREDGGYEIIKKAIDKLGLRHKEHIAAYGEGNERRLTGHHETADINTFLWGVANRGASIRVGRDTEKEGKGYFEDRRPASNMEPYIVTSMIAETTILWNP

SEQ ID NO: 10287 - protein, 448 aa, Salmonella enterica subsp. enterica serovar Typhimurium
MKKVKKLSLTDLVLYGLVFMVPIAPVSLYGVVYNLSHGMVALVSILWAAIAMFFTAYSYSTLSQHISSSGSAYAYAGVSINPAVGFLTGWILLLDYLLFPTLVAVLGGVAVHAILPQIPVWVWPLIYVAIGTGVNYLGIQQTAKFDKLLVFIQLGILAIFVLLIVRLMLLDSSQITLSFRPFFDSQWFTPGLIATAISVAALNFLGFDAISTLSEESEGGGRAVSKATLLALVLATVLFIIVVAFAAFATGNVDRFAEGNATNEAFFTIAGNVGGIWLKVAFSIIVAFVCAVGNIITAQTAVSRVLFSMGRDRMLPAFLAHVHTTRKTPDYAILFTGGVTLLLSYLFSGKIESISTLVNFGALFAFFVVNLCVFILFNFRMKAQRRIFAHVISPIMGMIVIGYVCLNMNIHALILGISWAAIGIAILCYRKAHNQNIAIDLEGKKLLD

SEQ ID NO: 10288 - protein, 276 aa, Streptococcus suis
MTLKPFTKWTGGKRKLLTQLHEHLPFEYNRYFEPFVGGGALFFDLAPENAVINDFNEELINTYLQIRDNPEALLDLLHIHQENNSKEYYLNVRSVDRDGRIEIMSDVERAARILYMLRVNFNGLYRVNSKNQFNVPYGRYKNPKIVDTELIQRVSRYLNNNNILIMQGDFATAVEEAVAGDFVYFDPPYVPLTATSSFTSYTHEGFSDQDQRRLRDTFVALDRRGVNVMLSNSSSPVVEELYAGFNISRVDVSRTNGASNSSRGKIQEIIVRNYGE

SEQ ID NO: 10289 - protein, 612 aa, Arthrospira platensis
VQLQTKIAAKRATGAFRLIDSLKRHGVQHIFGYPGGAILPIYDELYRAEAEGDIQHILVRHEQGASHAADGYARATGRVGVCFGTSGPGATNLVTGIATAHMDSIPMVIITGQVARPAIGTDAFQDSDIFGITLPIVKHSYVVREPGDMARIVAEAFHIASTGRPGPVLIDVPKDVGLEEFDYIPVNPGEVSLPGYRPTVKGNVRQINQAIKLIEEAERPLMYVGGGAISATAHAEIAELAELFQIPVTTTLMGKGSFDEKHPLSVGMLGMHGTAYANFAVSECDFLIAVGARFDDRVTGKLDEFGSRAKVIHIDIDPAEVGKNRTPEVPIVGDVRQVLIHLLRRCREIGDVGNDNQTQSWLERINRWPEDYPLVVPSYSDSLSPQEVIAELGKMAPDGYYTTDVGQHQMWAAQFLKNGPRQWISSAGLGTMGYGIPSAMGAKVALERSQVICIAGDASVQMNIQELGTIAQYGINVKTVIINNGWQGMVRQWQQAFYGERYSASNMEIGMPDFEMLARSYGVKGMVVKSRDELHQALAEMLAYDGPVLMDVHVTKDENCYPMVAPGRSNAQMIGLPERRQLEKAVELIYCSNCGAKNVASNNFCPECGTKL

SEQ ID NO: 10290 - protein, 486 aa, Kineococcus radiotolerans SRS30216
MDHSRTPVLEAIEAFHARGDVVFGPPGHRQGLGVDPRVLAVLGRGTFAADILTLNGLDDRRESQGVVSQAEELMADAVGADRAFFSTCGSSLSVKSAMISVAGPGEKLLVSRNAHKSVIAGVIISGIDPVWVHPHFDPERHLAHPPEPADVRAALRANPDAKGMLLISPTDWGTCADIGGVAEVCHEFGVPLIVDEAWGAHLPFHPDLPEWGMNVGADLVVTSVHKMGGAIEQSSVFHLKGDRIDPDVLSAREDLLGTTSSSPLVYASLDGWRRQMVEQGRELLGAALERTRRLRAAVGGIEGLDVLGEEVLGAGGAFELDPFAVTVDVRGLGITGFQAGDWLRSACQVDIGSADTRRIGARLTYADDDARLERLLESLRRLAAESGDLERQPPVDLPRPGALELENAMLPRDAFFGPTEQVPAAEAVGRIAAEVVSPYPPGVPVLTPGEVVGAEVVDYLRSGVAAGMLVPDAADGSVETLRVVAR

SEQ ID NO: 10291 - protein, 312 aa, Kineococcus radiotolerans SRS30216
MREIVLFSGSAHPELARAVAGELGIELSPTRTSRFSNDCLEVQLEANCRQRDVYIVQPLVPPVQEALVELLLMVDAAKHASAGRVTAVVPHYAYARSDKKDTGRISIGGRLVADLLETAGADHVLAVTLHSPQVHGFFRVPVDHLHALHQLATHFAGEDLSNAVVVSPDLGYAKPAAAFARLLGCSVAAGAKQRFPDDRVVIADIIGEVTGKDVIVIDDEIAKGSTVFELVARLKELRVRSVRVVCTHGIFAGDALDRLIKHPDIDEVVCTDTVPLRGGPRPGLSVISIAPALATAIRHIHEGESVSALFQH

SEQ ID NO: 10292 - protein, 561 aa, Kineococcus radiotolerans SRS30216
MTPAPAPDTSTTTVGGYLGRRLEQLGVGHVFGLPGDFNLALLDEVLAATGLRWVGSSNELNAGYAADGYARLRRGPAAVVTTFGVGELSAVNALAGSYAEDVPVVHVVGLPPTTAMSRGALLHHSLADGDFGHFVRIAAEVTASAVVVRAQGATTAIDQALLTAVGTSKPVYLGVPADVAVHPVPAAPLSRPLRVLRSDAGAAEEFRTALAQFLGDAPEVTVLAGPRLHRRNLEDLVRAIAAQNGVRVATQSASKAMLDESHPANLGVYAGEFTRSARTRRAVDGARPLVLAGVLMSDFLTGSFSHAFDPEASVDLQLDHARIAGTAFYGLYLEESLRILEEVLDARSPRPGPLPRQEVPALAPHVPAEPDGPLTHADLWPLLQRWLNPGTLLVAEAGTSFYGALELTTPDGCDLLGQPVWSSIGYTLPATLGAMLARPGRETVLVIGDGSAQLTIQELGRILAEGLTPTILLVNNSGYTVERAIRSPEAVYQDVVAWDWTKLPAALGSPGTPTYRAATPADLVEVLGKVRADPDHAAFVELLLPRDDAPDSLVQLARSVR

SEQ ID NO: 10293 - protein, 326 aa, Kineococcus radiotolerans SRS30216
MKIVITDCDHDSLAEERAVADAAGAELLLAPSAAAADVVAAATGADALVVQYARVDADLLDALPTVRAVGRYGVGVDTVDVDACTARGVAVCNVPDYGTESVSDHAIALALAAARRIAWMDRRVRAGAGELAPLRPVHQFGGRVFGVVGLGLIGAATARKAAGLGYRVVATDARRAPGTTVDGVEVVTLDDLLARAHVVSLHVPLTEGTRHLIGAAELARMRPDAVVVNTSRGGVLDTAALADALRAGRLHGAGLDVFEEEPLPPGHPLATLDTAVLTPHLAWYSEESYGELKRRTVQNVVDVCAGRPPADVLNPEALGTPAGGRR

SEQ ID NO: 10294 - protein, 67 aa, Kineococcus radiotolerans SRS30216
MAQGTVKWFNAEKGYGFIEQDGGGPDVFVHYSAIGGNGYRSLEENQRVEFEVTQGQKGPQAEDVRAL

SEQ ID NO: 10295 - protein, 233 aa, Kineococcus radiotolerans SRS30216
MSALPGWLQPLAARLPTVTAADLRWRADRSPDPGTAAAAAAAASRPAAVLVLLAEGPGGPEVLLTERAGTLRQHSGQVAFPGGRSDPGDADAAATALREAEEETGLEPGGVSVLGQLPPLALAHSGHRVTCVVGHWHAPCPVGVVDPSEVARVERVPLAELFAEGAVRRVRGPGGPGAYVGPAFAVRGLLVWGFTAEVLVRVLDLGGLRPPPPATAVAELSLEQALDWAGAGA

SEQ ID NO: 10296 - protein, 242 aa, Kineococcus radiotolerans SRS30216
MEHGQVEGIPEPVRLGDRPGDVVRRAPLFAALDDDAAGELLETMESVHLGRGEQLFAEGEPGDRVYVVRTGKIKLVRSWPDGRENLLAVLGPGEMFGELSLFDPGPRTSSARAVSEAELIALGHDDMLRWLARRPEVARHLLQALAQRLRRTNVTLADLVFTDVPGRVAKALLDLARRFGRPIADGQLVAHDLTQEELAQLVGASRETVNKALADFASRGWLRLEARAVVLHDVERLARRAR

SEQ ID NO: 10297 - protein, 446 aa, Kineococcus radiotolerans SRS30216
MSTAGSTAPRSVESLVVALVVQKFGGSSVADADGIKRVAKRIAATKRAGHEVVVVVSAMGDTTDELIDLAEQVSPMPPARELDMLLTSGERISMAVLAMAISNLGLEARSFTGSQAGVITDSSHGRARIIDVTPGRIRSALDEGAIAIVAGFQGVSQDTKDITTLGRGGSDTTAVALAAALKADVCEIYTDVDGVFTADPRIVPTARKINRIATEEMLEMAANGAKILMLRCVEYARNYDLPIHVRSSFSPHEGTWVTDFPIPAALSSHSPEEPVEQPIISGVAHDRSEAKITVVGVPDNPGTAAAIFKAVAEAEINIDMIVQNVAAGASGRTDISFTLPKAEGATAIAALDKAQAAIGFERVEYDDQIGKVSLIGVGMRSHPGVSATFFDALGSKAINMEMISTSEIRISVVTRLDQLDDAVRAIHTAFGLDTEAEAVVYGGTGR

SEQ ID NO: 10298 - protein, 415 aa, Kineococcus radiotolerans SRS30216
MSPVTAQTSPPASTDVRPRVSARIAGIAESATLAVDAKAKALKAAGRPVIGFGAGEPDFPTPQAVVEAAVAACTDPANHRYTPAGGLPALREAIAAKTLRDSGYEVSPGQVLVTNGGKQAVYEAFAAILDPGDELLLPAPYWTTYPEAARLAGGVAVEVFAGLDQGYKVTVDQLEAARTPRTKALLFNSPSNPTGAVYTPEEVRAIGHWALEHGVWVVTDEIYEHLVYDGVRAASMPVEVPELADTCVVLNGVAKTYAMTGWRVGWLIGPADVVKGAGNLQSHLTSNVANVSQRAAVQALTGDLTAVARMREAFDRRRRTMVRMLDAVDGVDCPLPQGAFYAYPSVQGLIGKSLRGREITSSAVLAELILTEAEVAVVPGEAFGPSGFLRLSYALADEDLVTGVERIQALLSEVR

SEQ ID NO: 10299 - protein, 470 aa, Kineococcus radiotolerans SRS30216
MSKVLTSLPAGERVGIAFSGGLDTSVAVAWMREKGAVPCTYTADIGQYDEPDIDSVPGRAGAYGAELARLVDCRAALVEEGLAALTTGAFHIRSAGRSYFNTTPLGRAVTGTLLVRAMLEDDVQIWGDGSTYKGNDIERFYRYGLLANPSLRIYKPWLDAGFVAELGGRKEMSEWLQARDLPYRASTEKAYSTDANIWGATHEAKRLEHLDVGVELVEPIMGVRFWDPEVEIAPEDVSIGFEQGRPVSINGATFESAVDLVLEANAIGGRHGLGMSDQIENRIIEAKSRGIYEAPGMALLHAAYERLVNAIHNEDTVASYHNEGRRLGRLMYEGRWLDPQALMLRESLQRWVGNAVTGTVTLRLRRGEDYSILDTQGPAFSYHPDKLSMERTEDSAFGPVDRIGQLTMRNLDIADSRAKLEQYAGMGMVGSSQVSLIGALESGGAEAIASRGESSGDELLDRAAMESGTD

SEQ ID NO: 10300 - protein, 409 aa, Kineococcus radiotolerans SRS30216
MSTSQGSVVVVNCGSSSVKLALVDPVTGERSLSCLGERIGSPDAVVHMTTTGPDGRPSTRTITPAATTHRGALAHVLQRLLDLDLPPLLGVGHRVVQGGSVFHGSVRVDDRVLAQIHELSALAPLHNPANASGIEAARAVLPDLAHVAVFDTAFHQTMPETNYRYAVPTRWYEEFGVRRYGMHGTSHRYVSQRATEVLATAGREPRGLKLVVAHLGNGCSATAVLDGRSVDTTMGLTPLEGLVMGTRSGDLDPAVVELVAERTGAGVAEVVKQLNSESGLLALSGLSNDVRTLSEKAAEGHAGAKLALDVFVHRAAKHVAALTVSLGGLDALVLTGGIGENAKNVRSMLLARLAHLGLVEDPAANADHGRSSTPAGRITVPGDGPLAMVVPTDEELLIARDTVALVEHR

SEQ ID NO: 10301 - protein, 699 aa, Kineococcus radiotolerans SRS30216
MARVLLVVPTGHGAGLTSTCLGLVRALDARGVAVGFHKPLAQPTRATGPDRSVALVRLTTALDPSEPIPASRVVERLSRGDIDDLMEEVVAAAEGVLAAHDVVVVEGLAPSADQVFSGRVNQALATALDADVLLVGSAGVDGTDPGAPERIAEDMAVTAGTYRTGEALRVIGGVVSRWPVPEDPETAVARVARLRGALEHHGIPLVGAVPFRADLVWARVRDLVHDLDVEVLTHGDQGRRIKEVVVAAQAVPGMLPLLREGRLILVPGDRHDVVMATCLAALNGNRLAGLLLTAGVGMDPRVAELTAAAAATGLPILRSDRSTYATATAVNRLDPEVPADDAERALAVSTTVADALDPGWLAKLPTASHTPRLSPAAFRRRLTTLAAERVQRIVLPEGAEPRTVQAAAICAERGIARPVLLAHPDEVASVAAGLGLTLPEGVEVLDPAGLVERYVDVLVEARKHKGMQPDVARDSLADPIWLGTTMLQAGDVDGLVAGAVHTTAATVRPALQVVRTKPGARLVSSVFFMCLPDDVVIYGDCAVNPDPGAEDLADIALQSAASARAFGIEPRVAMISFSTGSSGSGSSVDKVAEATRIARERDPDLIIDGPLQYDAAAVASVAASKAPDSPVAGRATVFVFPDLNTGNTTYKAVQRNAGVISVGPMLQGLAKPVNDLSRGALVDDIVYTIALTAIQASRG

SEQ ID NO: 10302 - protein, 590 aa, Kineococcus radiotolerans SRS30216
MPQYDDRSYRSNRPSRSDEGGFQRRESRGYRTEDRPADRSFDRDDRPRSGGYRGQGGGGSSYQGGGASSGGYQGGGSSSYQNRGGSSSGGYQGGSSRGGYQGGSSRGGYQGGSSRRSGPPRSPRSFAPSATEQALTAAEQIEVAESTFAELGLPEELVAALERRGMTAPFAIQSRTLPDGIAGRDILGRARTGSGKTLGFGLPMLARLAQQKRPRITGAPRGLVLVPTRELAMQVADALRPLGDSLDLRLSVVVGGVPYGRQIAALQRGIDVLIATPGRLVDLIDRDAVSLAEVDVAVLDEADHMADLGFLPNVRAILEGTKPGGQRMFFSATLDRGVEALVTDFLTDPAFHAAPADPDDVGHMEHRVFAVRPHDKLSILTEISKRPARSIFFVRTKLGAQRLADQLNEAGAPAEAIHGDLRQSQRSKAIDAFSAGETRVLVATDVAARGIHVDDVDLVVHVDPPNDHKDYLHRSGRTARAGATGTVLAIALPDQVRRYGWLHRDAGVEAQNVEHVLAGDETVRAVAESGEPVVIKPRRTETREGARGPRRGPRREGGFRSGPRREGSGPRGPRREGGQGGVPRQSAPRD

SEQ ID NO: 10303 - protein, 483 aa, Kineococcus radiotolerans SRS30216
MAGDYDLVVVANRLPVDRVEEPDGSTSWRRSPGGLVTALEPVMQREDGAWVGWAGTPGDPPEPFDAEGVRCVPVGLSEQEVEDYYEGFSNGTLWPLYHDVIVAPGYHRSWWEAYVRVNERFAEAAAEQATEGATVWVQDYQLQLVPRMLRRRRPDLSIGFFNHIPFPPFEIFAQLPWRKAVIDGLLGADLIGFQRAADANNFTRACRRASNLPARSGRIRLDAEGGREVRAASFPISIDFAALDELAEREDVKARAAEIRRDLGNPEHVLLGVDRLDYTKGILHRLKAFEELLDDGGVKVEEASLIQVATPSRERVEQYVQLRQDVEVTVGRINGTHGTIKNTAVHYLHHSYGREEMAALFLAADVMLVTALRDGMNLVAKEYVASRHDERGVLVLSEFTGAADELGQALMINPHDIDGLKDAILRALRMSPREAGRRMRSLRRRVGDHDVQRWAASFLQALADHHTTEAAVSVAAAAERGSS

SEQ ID NO: 10304 - protein, 392 aa, Kineococcus radiotolerans SRS30216
MRLAQRARTVQPFHALAFGQQAADLEARGEHVVRLSIGEPDFGAPPAVREAMREVMDGRPLPYTPSTGAPALRRAIAGFYRDRHGVEVDPERIVVTSGASSALLLVLAATVDPGSEVVVADPSYPCNRQLVETFGGVVAAVATTAASRYQLDPASVERAWSERTAAVMVATPSNPTGTSVPPGQLAEICALARARGAWRIVDEIYLDLADPSPGGAAPRTVLAVDPDAVVVNSFSKYFGMTGWRLGWAVLPAELVPAVEKLAMNYFLCASAPAQQAALACFTPESLALCEERRVELAARRRAVLDGLAGLGLPVPVEPDGAFYVYFDVSGTGLGSWEFCERALREAHVALTPGRDFGVDTAETHVRLSYAASRAEIAEGLRRLGAFLAGLRP

SEQ ID NO: 10305 - protein, 325 aa, Kineococcus radiotolerans SRS30216
MTGITTTGEKRMVLISGRAHPELAEEVSAALGAELVPTSAYDFANSEIYVRFEESVRGSDAFVIQSHTSNVNQWIMEHLIMVDALKRASAKRITVVAPFYGYARQDKKGRGREPISARLIADMFKTAGADRLMSVDLHTAQIQGFFDGPVDHLWALPLLADHVGKRVDRSNITIVSPDAGRVRVADLWSDRLGAPLAIIHKRRDPNVPNQVKVHEVVGDVEGRTCVLVDDLIDTAGTIVQAAEALKANGAADVIATATHAVLSGPAVDRLKNSPISELVVTNTLPISESQQFPQLKVLSIAPLLARAIREVFDDGSVTSLFDGHS

SEQ ID NO: 10306 - protein, 574 aa, Kineococcus radiotolerans SRS30216
MSSPPEHRSDASSTPPGSSAAGAVSSRDLARTAHPPVDRRTFAVAAGVVVLFLLVGAVWPEQLQSGADAVLEVVVGDFGWAFVLGATGFVVLALVLAFSRFGRIRLGRDEDRPEHSRASWIAMMFSAGMGIGLMFYGVTEPVTHLMTVPQNDAAPGSQAAAREAVNYSLFHWGLHPWAIYAVVGLALAYSSYRKERVGGFSAAFAPLLRGRRGRGAARVIDVFAIFATLFGSAVSLGLGAAQMNGGLTEVFGVPNSTTVKATIIAVLTVCFVVSAVSGIERGIKWLSNTNMVLALLLLLFLFVVGPTVFVLNLVPASLGNYLTALPTMSFRTGAFGGTDWLSGWTLFYWAWWVSWTPFVGAFLAKISKGRTVREFVVGVMLVPTAVSLLWFSVLGGAAIDLQRRFVAGTGGADIAGIADQESQMFTFLQQFPWAGATSVLVVVLVAIFFVSGADASSIVMGSLSSYGVDEPRRWVVAVWGGLMGLVAIVLFFAGGLEALQDITIIAAAPFLVIMALMCVALVKDLLRDPRITTRERRHGDRRDPRVTAVDHEWESPLPVEGPPTPPAPGARPSR

SEQ ID NO: 10307 - protein, 565 aa, Kineococcus radiotolerans SRS30216
MTDSSTTDVETPDQTTAPDTAVEAPHVGTFAEHGVDPRIAQSLAGAGITTPFPIQSMTLPVALSGHDIIGQAKTGTGKTLGFGVPLLQRTAVPGDPAYDALPNPGKPQALVIVPTRELATQVAGDLTTASRNYPARILTVYGGRAYEPQIDALTKGVDVVVGTPGRLLDLAQQRHLDLSNVKCVVLDEADEMLDLGFLPDVERLIAQTDPARQTMLFSATMPGPVVAMARSYMSRPTHIRAVDPTDDGATVAAITQFAYRTHALDKVEVLARMLQATGRGLTIVFSRTKRTAASVAEQLTERGFAAASIHGDLGQGAREQALRAFRHGKVDVLVATDVAARGIDVEDVTHVINYQCPEDEKTYLHRIGRTGRAGNTGVAVTFVDWDELPRWSLIDKALGLGFGEPVETYSTSPNLYEDLGIPAGTTGRLPRGQRTRAGLEAEQVEDLGEVGAAKGRRPRKDSRDGAGSRDGGARGAGPAPAAEEGVVEERVARPRRDRQRRRTRNGVEVEETAVEAGSTATAPPAASAPAGAEDAERPRRRRRTRTRADEAGTGTDAAASAPAAD

SEQ ID NO: 10308 - protein, 530 aa, Kineococcus radiotolerans SRS30216
MNPSASRGPRTSSATPRSEGPVPNPRRRRRSSGSGAAGTSGVPAAQAAPRTVPAQRPATAEVIPDAGVEVVADGRSFADLFVPQPLVDVLAATGVVSPFPIQTATLPDSMAGRDVLGRGRTGSGKTIAFALPLVTRVAASSRPRRAGRPRSLVLVPTRELANQVAATITPLAKALGLRTTVVFGGVGQNPQVSALREGVDVLIACPGRLEDLIRQGHCHLDAVEVTVLDEADHMADLGFLPGVKRLLDATPAGGQRLLFSATLDNGIDVLVKRYLSEPVVHSVDPAVAPVSTMEHHVLEVGADGKNTLVRELASGQGRTVLFTRTKHSAKKLAKQLTAAGIPAVDLHGNLSQNARERNLAAFSDGSVKVLCATDIAARGIHVDDVSLVVHVDPPTEHKAYLHRSGRTARAGAGGLVVTVATPDQRGDVRTLARQAGISPQWTNVGAQHEVVERLVGPAAAWVDPADSPVPTAPAQPERRAKAPAPVTARRSAPAGETSRRSALAGEATGAPRRRRRGGRGRGPATGAATS

SEQ ID NO: 10309 - protein, 450 aa, Kineococcus radiotolerans SRS30216
MGADRAGPTEGTLAVEPVKVALLGCGVVGTEVARLLTTQSGELASRVGAPLELVGIAVRRLGRDRDLPVDPSLFTTDAEELVTRADVVVEVIGGIEPARSLVLRAFAHGASVVTANKALLAADGPTLYEAAAENGVDLYYEASVAGAIPLLRPLKESLAGDRVTRVLGIVNGTTNYVLDQMDTTGMGFAEAVEQAQALGYAEADPTADVEGFDAAAKAAILASLAFHTRVSLDDVHREGITEVSAADVRAAQLQGCVVKLLAICERGVDAAGDETVSVRVHPAMLPRAHQLAGVRGAFNAVYVEAESAGQLMFYGPGAGGQPTASAVMGDVVAVARHKVVGGRGPGESAYAQLAVQPMAETVTRYHVRLDVADKPGVLAQVAGVFAQHGVSIEAVQQRQVTTGDGAGRAVLVVVTHSATDAALAATVEELEDLEIVDSVAGVLRVEGGDA

SEQ ID NO: 10310 - protein, 408 aa, Kineococcus radiotolerans SRS30216
MSAYLDHASTTALRPEALEALVAGSARGAGNPSSLHSAGRRARVAVEESREALAAALGARPGEVVWTSGGTESDNLALQGLLRARRAADPARRRVLLAATEHHAVLDCVRWLEAHEGALVTWLPVDGTGCLDPDALEAALRHPDDVALVSLMWANNEVGTVQPVARAAELAHAAGVPLHTDAVQAVGSLPVDFAASGADLLSLSAHKFGGPVGTGALLVRRGTTLVPLVHGGGQELGVRSGTLDATGARATAAALTAALAHRPEEAARLAALRDRLLAGLLQVPGATLRGAPPGPQRLPGNAHVTFEGCEGDSLTYLLDAAGVECSTGSACQAGVPRPSHVLLAMGLSAAEAAGALRFSLGWDSTADDVDTALAAIGPAVERARRATGSRSARARRRVRPALGAGVSR

SEQ ID NO: 10311 - protein, 611 aa, Kineococcus radiotolerans SRS30216
MPQQLPLDPKLPVAELTGAQSLIRSLEAVGVEVVFGLPGGAILPAYDPLMDSPHVRHVLVRHEQGAGHAAEGYAVATGKVGVCMATSGPGATNLVTPIADANMDSVPMVAITGQVAAKAIGTDAFQEADIAGITIPITKHNYLVTDPADIPRVIAEAFHLAATGRPGPVLVDVAKSALTATTSFAWPETVDLPGYRPVTRPHGKQIREAARLIAAAERPVLYVGGGVIKADASAELAALADLTGIPAVTTLMARGALPDSHPNNLGMPGMHGTVAAVTALQKSDLLITLGARFDDRVTGELSSFAPGAKVIHADIDPAEIGKNRAVDVPIVGDAKLVIAELTTAVAAEFENGRADLTAWTALTQSWKETYPLGYAESDDGTLAPQHVIARIGAIAGPEAIYVSGVGQHQMWSAQFVQYENPRTWLNSGGLGTMGYAVPAAMGAKVGKPDTVVWAIDGDGCFQMTNQELATCTLNGIPVKVAIINNSSLGMVRQWQTLFYSERYSNTDLNSGDHHGTHAAPIPDFVKLAEAYGCVGLRCDRAEDVDATIEKAMAIDDVPVVIDFRVHRDAMVWPMVEAGVSNDAIQYARGVSPVWDREEEGDNESGPEKVIS

SEQ ID NO: 10312 - protein, 413 aa, Kineococcus radiotolerans SRS30216
MSTGLDRGASAPPPGAPPPPPDPRVVARMRRFGPTVFAEMSALAARTGAVNLGQGFPDADGPASLLEDAVAAIRSGRNQYPPGTGVPALLEAVAEHQHRFYGLTLDPGTEVLVTAGATEAIAASLLALCGPGDEVVVLEPAYDSYAAVIALSGAVQRSVPLVPGPDGSTLDAQDLRAAFSARTRVVLLNTPHNPTGTVLSPAQVAAVAALAVEHDAVVLTDEVYEHLVFDEHRHVPVATLPGMAERTLTVSSAGKTFSVTGWKVGWVSGPAPLVAAVRMVKQFLTYVNAGPFQPAVAGALALPDDFYLGLAADLQRRRDLLVEGLLSAGFGVSVPAGTYFVVADPRPLGHDDGTALCRELPGLAGVVGVPVSAFCEPGSPAAAAVRPLVRFTFCKSDAVLEEACRRLQALRPR

SEQ ID NO: 10313 - protein, 580 aa, Kineococcus radiotolerans SRS30216
MTLPAGTTTEDDLPGVPSPGPGSGRDPLTMLVPDFPFPYDEYLTHPAGLGSVPEHRHGTEVAVIGAGMSGLVAAHELMKLGLRPVVYEAGEIGGRLRSTAFPGVPGAVADLGGMRFPASGRAFFHYVDALGLRTSPFPNPLAPQTPSTVIELRNRAHYAETAADLPAEFGEVAAAWRRALVEGAELEAMQDAIRRRDLAAIKEIWNRTVPRLDEETFYGFVAKSPAFAALPYSYRETFGQVGFGTGGWDTDFPNSVLEILRVVHTDADDQHHRITGGAQSVPLGLWRYAPDGLAHWPAGTSLQSLHGGSPRPAVTRVRRGEDGRLHVLDRWGTERPYEAVVATCQSWLLSAGIDTEESLFSHDMWMAMERSHYMQSSKTFVLVDRPFWRDVDPATGRRVMSTTLTDRMTRGTYLLDGGDGVDDPAAADSPAVICLSYTWNDDALKWLALDTDERVRLMLHNLKQIYPDVDIASHVLGEPITVSWEREPHFMGAFRGNLPGHYRYQQRLFSHFVQDDLPAHQRGIFLAGDDISFTPGWAEGAVTTGLNAVWGVVHQLGGSSAPGNPGPGDRFAELQPLRLP

SEQ ID NO: 10314 - protein, 321 aa, Kineococcus radiotolerans SRS30216
MSSPSTPSPQGPVDATRVPRYGGPATFARLPRLDEVSRADVAVVGLPFDSGVSYRPGARFGPGHIRASSKLLRPYNPALGVSPFAAQQVADAGDLGLNPFDIDEALRDTESALTRLTEDGATVMALGGDHTLALPALRALAKQHGKLAVLHFDAHLDTWDTYFGAPYTHGTPFRRASEEGLLDLERCLHVGTRGPLYSAQDLEDDAVLGFQVVRADDYEVDGVAGAVERVRRRLDGGPVYVSVDIDVLDPAAAPGTGTPEAGGLTSRELLGTLRGLTGLNVVGADVVEVAPAYDHAEITGIAAAHVTYELLSVLATTRTGS

SEQ ID NO: 10315 - protein, 305 aa, Kineococcus radiotolerans SRS30216
MNSIRTAVLAGAATALLALSACGNEGSPETAGGSSTSGGSAAAAPEYAVATDVAITGSPTYDKIKAAGKVVIGVKADQPGIGQKDAGSGEYTGFDIEMAKLMAANLGLTPDEIDFVETVSANREPFLQQGTVDMVIASYTINDKRKQVVDFAGPYYVAGQDLLVRADEEEITGPDALAGKKVCSVEGSTPATRIRDEHPDAQLVTFDAYSKCVEQLTSNAVDAVTTDDAILRGYAAQQPEALKVVGAPFSEEPYGIGLPKGDTALRNALNDAIETAVEDGDWKKAYDHTLGGSGTDPEPPTVDRY

SEQ ID NO: 10316 - protein, 425 aa, Kineococcus radiotolerans SRS30216
MRETGPPRTRTKQEEPVSAPDLAPVRPGRALLLENIHADARTLLSEAGWEVETASGALDEAELAERLDGVSLLGIRSQTQVTAKVLEAATDLRAVGAFCIGTNQIDLFAAAAHGVAVFNAPYSNTRSVVELALAEIIALTRRLTVKDRAMHEGVWDKSAAGSHEVRGRRLGIVGYGNIGSQLSVVAEALGLSVFFYDTTDKLALGNARRCGSLHELLEIVDVVTLHVDGRSSNLGFFGEAEFSRMRPGSIFLNLSRGFVVDHEALSRHIRSGHIAGAAIDVFPTEPKGSGQGFESELRGLPNVILTPHVGGSTEEAQEDIGRFVAAKLRDYALHGATTLSVNLPTLGTETTPGTVRLAHLHRNVPGVLANINKVLAEAGVNIEGQQLATRGDLGYVVTDIAAHASEDVGRRLRELPETVRVRQLG

SEQ ID NO: 10317 - protein, 289 aa, Kineococcus radiotolerans SRS30216
MAYKTPDQIAVAAVASGIKKAHLPIPKMLVGGFLAGAYIAFAGLLAVDVTAGLDPAIWGGVTTLLTGAVFSMGLVLVIVAGSELLTGNMALVPIALLSRKVSLGLLARNWTFVLLGNLVGALFVAYLLAVQTGVIGPEGSPSFTRLAAIATTKAVTEDDATIFLRAIGCNWLVCLGVWMALAAEDVAGKVLAIFFPITAFVALGFDHVVANMFFLPAAQWAGVPGIGWGNIVGNWVFAALGNAVGGGVFVALAYWFLYLKGTEHSGRDTAPAAAPAASDGAGTAGAPRH

SEQ ID NO: 10318 - protein, 620 aa, Kineococcus radiotolerans SRS30216
MSMDSVARSSLWRAMSAPDQTPFRPGTFRRVLGMARERRRLLALFVAGSVVLAVLAVATPVLAGHAIDAVGARDRRRVVSIALLIALVALAEAGLGLVVRWLSSRLGEDLILDLRTRVYDHVQRMPVAFFTRTHTGALVSRLNNDVIGAQRAFSDTLSGIVSNVVAVALTTVVMAGISWRITLIALVMLPVFVLPARRMGRHLAQLSRRAAALNAAMINQTTERFSAPGATLVKLFGRPEDESRAFADAARAVRDIGVKTAVRQSVFVTALTTVSALALAVVYGVGGVAAIAGTLDAGSIVALALLLTRLYAPLTALASARVDVMSALVSFDRVFEVLDLVPLVRERPGARPSPPGPVAVEFDAVRFAYPAASEVSLASLEEVATLDTRGGVEVIHDVSFRVEPGQVVAIVGSSGAGKSTLAQLLARLYDVDSGAVRVGGTDVRDLTAASLRQTVGVVTQDGHLFHESLRSNLRLARPGASDAEVFDALRRARLDELVASLPDGLDTVVGERGYRFSGGERQRLTIARLLLAQPRVVVLDEATASLDTTSEVAVQAALDEALEGRTAIVIAHRLSTVRNADAILVLEAGRVVERGTHEELLARGGRYAELHRHSAFSPET

SEQ ID NO: 10319 - protein, 491 aa, Kineococcus radiotolerans SRS30216
MGIFRTKSVEDAIASTDEPGQRLRKSLSAWDLTVFGVGVIIGTGIFVLTGEAAGTRAGPAVALSFVVSGIVCALAALCYAEFASTVPVAGSAYTFSYASLGEVVAWIIGWDLILELALGASTVAVGWSSYAADLLGQTLGLAVPAWLYSATPSPTQPNLIAAAVVLVLTAVLCVGTKTSARFNAVVVGIKLAVVGVVIVAGLFFVKVSNWSPFVPPTGSAGASSTPADPSLWQDLGLPLGTFGVGGILTAAALVFFAFIGFDIVATAAEETKNPQRDVPRGIFGSLAVCTALYVLVSLVVTGMVRYDEISVEAPLANAFRAVGADVVATLISVGTVAGLLTVMMILMLGQSRVLFAMARDRLIPAWFSKVSERTQVPVRITAITGVVVAVVAAVTPISDLAEMVNIGTLFAFVLVSVGVVVLRRTRPDLPRAFRVPWVPVLPIASALAAVVLMGFLPAVSWVRLGIWMALGLLVYLAYGYRHSRLARRPGA

SEQ ID NO: 10320 - protein, 294 aa, Kineococcus radiotolerans SRS30216
MRVGFIGPGIMGRPMTANLVAAGHDVRCYGRSDASRERARSTGAEVTDSVAAACEDAEVVVTMLPAGPDVLAVTTGDDGVLPSMPPGAVLLDHSTISPDEAREVHAAATTAGVRCLDAPVSGGEAGAVEGTLAVMVGGDPQTLAHVRPVLDAVGSTIVHVGGPGAGQVVKAANQLVVAGNLQVLAEALVFLRAHLGEQDLPAALDVLGGGLAGSTALTRKRRALLEQHYQPGFRIALHDKDMGIVETAARHAGLALPVTSVVATMIAAVKARGGGDLDHSALAELAADLNGSAR

SEQ ID NO: 10321 - protein, 252 aa, Kineococcus radiotolerans SRS30216
MSTLEIRDLHVTVDEADGSVKEILRGVDLTIRSGEVHAVMGPNGSGKSTLAYSIAGHPKYTVTGGTVTLDGEDVLAMSVDERARAGMFLAMQYPVEVPGVTVSNFLRTAKTAIDGEAPKLRTWVKDVKQAMDDLKMDSSFAERNVNEHFSGGEKKRHEILQMELLKPKIAILDETDSGLDVDALKIVSEGVNRSLSTANPGVLLITHYTRILRYIKPDFVHVFVNGRVAEQGGPELADALEESGYDRFLAPA

SEQ ID NO: 10322 - protein, 386 aa, Kineococcus radiotolerans SRS30216
MSTSATAAKPARPAKPSFADRWTALPKPVQVLVWVLLALFFFVLPLLNLPIVSTPDAEFGSVLASVANYALVALGLNIVLGYAGLLDLGYVGFYAIGAYTVGVGGSLHGEINWFVLIIMAVTISTASGLLLGAPTLRVRGDYLAIVTLGFGEIIRLTALNTEWLNQARGITGIPRPPSTELFGLPSLVWDGATAKVDLGEGARSIFLKFGLLDAVPYYWLALIVIILVLIADKLLQASRVGRAWEATREDEEAAELNGVPTFRFKLLAFAMGAFVGGLSGALYASRIGAINPDSFMIQLSMMFLAAVVIGGQGNRWGAIVGGVVVAYLPERFREFADFRIVVFGLLLLLLANFRPQGLLPPRRAKRAQRADAATQELEGTQEGARA

SEQ ID NO: 10323 - protein, 308 aa, Kineococcus radiotolerans SRS30216
MTETTPGTPAPHRSGFACLVGRPNAGKSTLTNALVGQKVAITSSRPQTTRHTVRGVVHRPDAQLVLVDTPGLHRPRTLLGQRLNDRVHETLAEVDIVALCVPADEKIGPGDRFIAEALGKIPRSTKIGLVTKTDKASKQQVAEQLLALTALGEQVLGGFADVVPASAKTGEQVDTVADVLLSHLPVGPRLYPDGELTDEPEAVMVAELVREAALEGVRDELPHSLAVVVEEMTEGENGVLQVFVWLYVERDSQKGIVIGKGGARLKDVGTRARRSVEALLGTRVHLDLRVKVAKDWQRDPKQLQRLGF

SEQ ID NO: 10324 - protein, 594 aa, Kineococcus radiotolerans SRS30216
MCGLCGEVRFDGRAADVAAVQRMSETMAARGPDGEGVWAQGRVAFGHRRLSVIDLSACGAQPMQDPELGLTAVFNGCIYNYPELRAELAGHGYRFTSTSDTEVIVKGYHRWGVDVVDHLVGMFAVVLHERDSGRVVLMRDRLGIKPLYLAETPGRLRFASTLPALLAGGDVDTTIDPVALHHYLSWHAVVPAPRTVLQGVRKLPPATVRVLEADGTSREHRYWAPDHVRREEFAGFSERDWEDAVLESLRTAVRRRTVSDVPVGVLLSGGLDSSLITALLAEQGQTDLATYSIGFESVGGRGGDEFEYSDVIAERFATDHHRIRVSGDELVGALGHAVGAMSEPMVSHDVAAFDLLSQQVSQSIKVVQSGQGADEVFGGYHWYPPLAGLTPQQGVDVYARAFFDRDHAGMAQVLDPRWLTATDVSREFLAEHFARPGADTAVDAALRLDTEVMLVDDPVKRVDNTTMAWGLEARVPFLDHELVELAAAVPPELQLSGGGKGILKRVGYRVIPREVIDRPKGYFPVPAITHLEGKVLGTVKDALTSRAAQDRGLFRPEYVQGLLRDPNGELTPLRGNKLWQLGLLEMWLQQHGIG

SEQ ID NO: 10325 - protein, 513 aa, Kineococcus radiotolerans SRS30216
MSTHFVDRVVVHASGGDGGNGCASVHREKFKPLGGPDGGNGGKGGDVILEVDPQVTTLLDLQRRPHRSAPDGRFGMGSHRNGADGDDLVIGVPDGTIVRSASGELLADLVGPGTRYVAAPGGRGGLGNAALASAKRKAPGFALLGEPGEVLDLHLEVKTLADVALVGFPSAGKSSLVAALSAARPKIADYPFTTLVPNLGVVEAGSTRYTVADVPGLIPGASEGRGLGLDFLRHVERCVALVHVLDGANLETDRDPVSDLEAIEKELAAYRVDDGAVPLQDRPRIIVINKADVPDARDMAEIVRADLEEQGAPVFVVSAVAHTGLRELSFAMAELVSAARAAEPEAVPTRIVLSPRAVDDQGFKVTREEYGDQENRQVRFRVRGEKPRRWVRQTDFTNDEAVGYLADRLARLGVEDELFKAGATPGAEVVIGDDANAVVFDWEPTMHAGAEVLGQRGSDLRLEDHSRPTRDEKRLQERERRAAKVTARDELEAERRAGHWTAADEADEELSQR

SEQ ID NO: 10326 - protein, 203 aa, Kineococcus radiotolerans SRS30216
MTTLDERPAGLDETARAALFGDARTANSFASTPVTDEQLAQVWELARWAPTAANLQPARVLYVRTPEAKARLVPLLNDTNRDRAASAPVTAVLALDERFHDAIPTVAPFLAGLQPVLEEDTAMRSGMGSYSAALQAGYFILAVRALGLAAGPMAGFDRDAVDAEFFAGTTWRSHLVVNIGYPGPDAFRPRLPRLAPEDVVRYA

SEQ ID NO: 10327 - protein, 377 aa, Kineococcus radiotolerans SRS30216
MSVYLDHAATSPPRREVLEAVWPYLTQVTGNPSSSHEAGRAAKAGLDAARQVIADVLGARPGEVVLTSGGTEADNLAVTGIATANPRGRHVVVSAIEHPAVLETALALRGDGFTVDVVGVDGDGLLDLDALAAVLRPDTTLVSVMYANNEIGTVQPLAEISRLCRALGIPLHTDAVQAAGHLPLDVAELGVDALSASAHKFGGLRGAGFLWVRGAVPLVPLLHGGGQERGRRSGTTDVASAVGTAVALHAAASTREAEVARLTGLRDRLVDGVLAGVPGARLTGHRTRRLPGHASFCFAGVGGETVLAELEQVGIVCSSGSACSADSDDASHVLLATGLDPDVARTAVRFTLGPTTTAPDVDAVLDALPGAVRAASR

SEQ ID NO: 10328 - protein, 152 aa, Kineococcus radiotolerans SRS30216
MNAHPPVRAAPPQRPAPQLEKVPVPTGKVKWFDADKGFGFLAAEDGAEVFVHASALPAGTTTLSKGSRVEFGVVQGKNGTQALSVRLLDPVHSVARATRKKPEDVVPIVEDLIKLLDGVSGSLRRGRYPDKAGAKKVATVLRAVADDFEAGA

SEQ ID NO: 10329 - protein, 405 aa, Kineococcus radiotolerans SRS30216
MKLEQSDKLADVLYDVRGPALRRAQQLEEAGHRILKLNIGNPAPFGFEAPEELLQDMVANLPVAQGYSDSKGVPSARRAVVQSSQLKGVPGVDVNDVYMGNGVSELIVMTMQALLNDGDEVLVPAPDYPLWTAATSLAGGRAVHYLCDESAGWEPDLDHLRAQVTPRTKAMVVINPNNPTGAVYGKAVLEGMLQVAREHGLLVLSDEIYDKILYDDAVHVSTASLAPDLLCITFNGLSKAYRVAGFRSGWMYLSGPKGHAAGFVEGLDLLANMRLCANVPAQHVVQAALSGHQSINDLVLPGGRLAEQSHRTWELLNQIPGVSCVKPRGALYCFPRLDPEVHRVEDDYQLIVDLLESQHVLVVQGTGFNWPKPDHFRIVTLPRVEDLESAVGRIGTFLTGRLAGR

SEQ ID NO: 10330 - protein, 67 aa, Kineococcus radiotolerans SRS30216
MAQGTVKWFNGEKGFGFIAPTDGGPDVFVHYSAIAGNGFRNLEENDQVEYEVTQGAKGPQASNVTRL

SEQ ID NO: 10331 - protein, 67 aa, Kineococcus radiotolerans SRS30216
MAQGTVKWFNSEKGYGFITVDDGGADVFVHYSAITADGYRSLEEGQRVEFEVGQGQKGPQAESVRAL

SEQ ID NO: 10332 - protein, 225 aa, Kineococcus radiotolerans SRS30216
MRGRVLVVDDDTALAEMLGIVLQGEGLETRFCADGDQAVGAFRATRPDLVLLDLMLPGTDGMEVCRQIRAESGVPIVMLTAKSDTVDVVLGLEAGADDYVVKPFKPKELVARVRARLRSAGERPPETLRIGDLTIDVAGHSVRRDGRSLPLTPLEFELLVTLARKPWQAFTRELLLEQVWGYRHAADTRLVNVHVQRLRSKIERDPEHPEIVVTVRGVGYRAGPL

SEQ ID NO: 10333 - protein, 233 aa, Kineococcus radiotolerans SRS30216
MLDTPLETLHAPLRPVEEAVAQVLVHLHDVGAPWPLAVLGLVVLARTLLLPLFVAQQRAVLRAAALRPRVLAVQDRYRGRTDPASRRALQQEVAALHRQAGVNPLGGCLPGLLQAPVFLALTLTLQSGDTLTAFGSATLAGAPLSGVLTHAPGPATLLVGILLLLLTAATQVVTVRAGTSGVPAPTALLVVLPALVVVPAVHFPIGVLLYWAASGVWSAGQQLVARWVVLRRR

SEQ ID NO: 10334 - protein, 376 aa, Kineococcus radiotolerans SRS30216
MRIGVPTEVKNREYRVALTPAGVHELVGHGHEVLVQAGAGLGSSLPDADYEAAGAKVLTDVDEVWGGADLLLKVKEPIAEEHHRLRADQVLFTYLHLAASRPCTDALLTSGTTAIAYETVQLPDRSLPLLAPMSEVAGRLAPQVGAYSLMRATTSGGGGRGVLMGGVPGVRGADVVVIGAGVSGQNAAQIALGMGAEVTVLDLSLPKLREVDARFGGAVRTIVSNSFELARAVRGADLVIGAVLVPGAKAPKLVSDELVAQMRPGSVLVDIAIDQGGCFESSRPTTHDDPTFPVHGSVFYCVANMPGAVPHTSTYALTNATLPYVVKLADRGWKAALSADAALAGGLSTHAGSLTNAEVAAAHGLPAITLAEALAG

SEQ ID NO: 10335 - protein, 337 aa, Kineococcus radiotolerans SRS30216
MIDFFYDLLYPIQWVVAWIMVRFHDALTFVGLDPAGGAAWSLSIVGLVVVIRILLIPLFVKQIKAMRGMQVIQPEMRKIQAKYKGKNDPASRQAMQQEMMALYRESGTNPMASCLPILLQSPIFLALFHTLNGIGKGETVGPLDRTLVDQADNATIFGSQLSDIFMKSWSTGEWNTIILTAVMIVLMSLSQFVTQKQLMAKNTSSASMEGNPFAQQQKMMLYILPVIFAVSGVNFPIGVLLYWLTTNVWSMGQQFFVIRRMPNPGSLAEKELQERKARRAARRGQVLTTDTSAPAVGTTAEHTTNAPARRQRQQPKRGASREQRRPGGPRSSQGPNR

SEQ ID NO: 10336 - protein, 638 aa, Klebsiella pneumoniae subsp. pneumoniae MGH 78578
MGKIIGIDLGTTNSCVAIMDGTTARVLENAEGDRTTPSIIAYTQDGETLVGQPAKRQAVTNPQNTLFAIKRLIGRRFQDEEVQRDVSIMPYKIVAADNGDAWLDVKGTKTAPPQISAEVLKKMKKTAEDYLGEPVTEAVITVPAYFNDAQRQATKDAGRIAGLEVKRIINEPTAAALAYGLDKEVGNRTIAVYDLGGGTFDISIIEIDEVDGEKTFEVLATNGDTHLGGEDFDTRLINYLVDEFKKDQGIDLRNDPLAMQRLKEAAEKAKIELSSAQQTDVNLPYITADATGPKHMNIKVTRAKLESLVEDLVNRSIEPLKVALQDAGLSVSDINDVILVGGQTRMPMVQKKVAEFFGKEPRKDVNPDEAVAIGAAVQGGVLTGDVKDVLLLDVTPLSLGIETMGGVMTALISKNTTIPTKHSQVFSTAEDNQSAVTIHVLQGERKRASDNKSLGQFNLDGINPAPRGMPQIEVTFDIDADGILHVSAKDKNSGKEQKITIKASSGLNEEEIQKMVREAEANAESDRKFEELVQTRNQGDHLLHSTRKQVEEAGDKLPADDKTAIESALTALESSLKGEDKADIEAKMQALAQASQKLMEIAQQQHAQQQAGSADAQASNAKDDDVVDAEFEEVKDKK

SEQ ID NO: 10337 - protein, 574 aa, Klebsiella pneumoniae subsp. pneumoniae MGH 78578
MEMLSGAEMVVQSLVDQGVKQVFGYPGGAVLDIYDALHTLGGIDHVLVRHEQAAVHMADGLARATGEVGVVLVTSGPGATNAITGIATAYMDSIPLVILSGQVATSLIGYDAFQECDMVGISRPVVKHSFLVKQTEDIPGVLKKAFWLAASGRPGPVVVDLPKDILNPAKKLPYVWPDAVSMRSYNPTTSGHKGQIKRALQTLVAASKPVVYVGGGAINAHCEPQLRELVEKLKLPVASSLMGLGAFPATHSQALGMLGMHGTYEANMTMHHSDVIFAVGVRFDDRTTNNLAKYCPNATVLHIDIDPTSISKTVPADVPIVGDARLVLEQMLELLEQEEAQQPLDDIRDWWQQIEQWRARHCLRYDDQSDKIKPQAVIETIWRLTQGDAYVTSDVGQHQMFAALYYPFDKPRRWINSGGLGTMGFGLPAALGVKMALPDEMVVCVTGDGSIQMNIQELSTALQYELPVLVLNLNNRYLGMVKQWQDMLYSGRHSQSYMESLPDFVRLAEAYGHVGIRISEPQELETKLAEALEQVRQRRLVFVDVTVDGSEHVYPMQIRGGGMDEMWLSKTERT

SEQ ID NO: 10338 - protein, 126 aa, Klebsiella pneumoniae subsp. pneumoniae MGH 78578
MMRNMLQGKLHRVKVTQADLHYEGSCAIDQDFLDAAGILENETIHLWNVTNGNRFSTYAIAAERGSRIISVNGAAAHCASVGDILIIASFVTMSDEEARSWQPNIAYFEGDNEMKRQAKAIPVQVA

SEQ ID NO: 10339 - protein, 205 aa, Klebsiella pneumoniae subsp. pneumoniae MGH 78578
MRKHAILAALVFFRSKPVAKSVPAIFLDRDGTINVDHGYVHEIDNFEFIDGVIDAMRELKEMGYALVLVTNQSGIARGKFTEAQFETLTEWMDWSLADRGVDLDGIYYCPHHPQGAVEEYRQTCDCRKPHPGMLISARDYLHIDMAASYMVGDKLEDMQAAAAADVGTKVLVRTGKPLTEEAEKAANWVLNSLAELPAAIKKQQK

SEQ ID NO: 10340 - protein, 407 aa, Klebsiella pneumoniae subsp. pneumoniae MGH 78578
MEIILGVVMFTLIVLVLSGLILAARSKLVNAGDVVIEINNEADKQIRTPAGDKLLNTLSSNGIFVSSACGGGGSCGQCRVTVKEGGGDILPTELSHITKRDAKAGCRLACQVAVKQNMKIELPEEIFGVKKWECEVISNDNKATFIKELKLRIPEGEVVPFRAGGYIQIECPPHKVAYADFDVPDEYRSDWDKFNLFRYVSEVKEPTLRAYSMANYPEEKGIIMLNVRIATPPPKVPDAPPGIMSSYIWSLKPGDKVTISGPFGEFFAKETDAEMVFIGGGAGMAPMRSHIFDQLKRLHSTRKISFWYGARSLREMFYDEEFEQLARDNPNFTFHVALSDPLPEDNWTGHTGFIHNVLYENYLRDHPAPEDCEFYMCGPPVMNAAVIKMLKDLGVEDENILLDDFGG

SEQ ID NO: 10341 - protein, 269 aa, Klebsiella pneumoniae subsp. pneumoniae MGH 78578
MRNKTTKIALALGMLLLASQAQADQLADIKAAGVVKVATFDANPPFGSVDAKTHHIVGYDVDFAQALAKALGVKLELVATNPANRIPLLQSGKADLIVADITITPERAQVIDFSTPYFVTGQQFLVPAGSPDKLDEYSKARIGAVKGTTGEQALHQRFPQARVLSYDDIPLALTALRNGNVQAITQDSTILAGLLAEAPDKAKFKILPDLLSKEEIGVGVKKGEPALLKAVNDELVKLEKTGEAAKIYDVWFGPATKTPQPRAFTIEAK

SEQ ID NO: 10342 - protein, 349 aa, Klebsiella pneumoniae subsp. pneumoniae MGH 78578
MLNATTTAGAQLRNLVIIVICIALLAGINVVFNDYIVRVISTIFIFMILAVSYNLINGVTGQLSLEPNGFVAVGAYVTALLILSSDSKVDMFEMAAPSPWILSLHAGFLPALLISGLCAAALAVCLAVPVFRVRGDYLAIVTLGFGFIIKILAINNPQITNGAIGLNDIPQQPHLLFWCGLFALLATGMILQLVWSKYGRMMKAIRDDEDAAIAMGVNTFRIKTCAFATSAFFEGIGGGLLASLLTTISPGLFDFMLTFQLLIIIVLGGLGSTTGALLGTVLVVGSGEWLRFLDQPLQFFGHDLGAYPGLRMVVFSLLLLIIMLFAREGLLGKKEIWQTGRRSGGYGGK

SEQ ID NO: 10343 - protein, 459 aa, Klebsiella pneumoniae subsp. pneumoniae MGH 78578
MTEHTTTLKRTLGSFRLWGIAVGLVISGEYFGWSYGWSQAGTMGFMVVALAVAAMYCAFIFSFTELTTAIPHAGGPFAYAYRAFGPTGGFIAGFATLIEFVFAPPAIAMAIGAYLNVQFPALDPKWVACGAYVIFMTLNILGVGIAATFELIVTLLAIFELLVFMGVVAPGFSWSHFTTNGWAGADSFSGLALPGMFAAIPFAIWFFLAIEGASMAAEEAKDPQRTIPRALGGGILTLTVLAIGVMVFAGGVGDWRALSNINDPLPQAMKTVVGNGSGWLHMLVWLGLFGLVASFHGIIMGYSRQIYSLARAGYLPAGLASLNRRTRTPHLAILAGGVVGIAAIFSDSLITISGMPLTACIVTMSVFGAIVMYITSMAALFKLRRSEPKLIRPFRAPLYPLAPAFALGMAVLCLVAMVWYNLLLALIFAAMMLGGYLWFRKTAAARERAPVDPQLRTVS

SEQ ID NO: 10344 - protein, 469 aa, Klebsiella pneumoniae subsp. pneumoniae MGH 78578
MQSTTQQQGGQLKRTMKTRHLIMLSLGGVIGTGLFFNTGYIISTTGAAGTLLAYLIGALVVWLVMQCLGELSVAMPETGAFHVYAARYLGPATGYTVAWLYWLTWTVALGSSFTAAGFCMQYWFPQVPVWIWCVVFCAVIFGLNIISTRFFAEGEFWFSLVKVITIVAFIILGGAAIFGIIPMQDGSPAPGLRNITAEGWFPHGGLPILMTMVAVNFAFSGTELIGIAAGETENPHKVIPVAIRTTIARLIIFFIGTVFVLAALIPMQQAGVEKSPFVLVFEKVGIPYAADMFNFVILTAILSAANSGLYASGRMLWSLSNEKTLPACFAKVNKRGVPVTALSVSMLGGVLALFSSVVAPDTVFVALSAISGFAVVAVWLSICASHFMFRRRHLQQGKALSDLQYRAPWYPVVPVLGFVLCLVACVGLAFDPSQRIALWCGIPFVALCYGAWYLTRSRNMTQEPQHVAD

SEQ ID NO: 10345 - protein, 439 aa, Klebsiella pneumoniae subsp. pneumoniae MGH 78578
MALGSAIGTGLFYGSADAIKMAGPSVLLAYIIGGVAAYIIMRALGEMSVHNPAASSFSRYAQENLGGLAGYITGWTYCFEILIVAIADVTAFGIYMGVWFPTVPHWIWVLSVVLIICAVNLMSVKVFGELEFWFSFFKVATIIIMILAGFGIIIWGIGNGGQPTGIHNLWSNGGFFSNGWLGMVMSLQMVMFAYGGIEIIGITAGEAKDPEKSIPRAINSVPMRILVFYVGTLFVIMSIYPWNQVGTDGSPFVLTFQHLGITFAASILNFVVLTASLSAINSDVFGVGRMLHGMAEQGSAPKVFAKTSRRGIPWVTVMVMTIALLFAVYLNYIMPENVFLVIASLATFATVWVWIMILLSQIAFRRRLSPEEVKALKFKVPGGVVTTVIGLLFLAFIIALIGYHPDTRISLYVGMAWIALLLLGWVFKTRRERRLAQAQ

SEQ ID NO: 10346 - protein, 458 aa, Klebsiella pneumoniae subsp. pneumoniae MGH 78578
MKDASTSSETVTESGPTLHRGLQNRHIQLIALGGAIGTGLFLGIGPAIQMAGPAVLLGYAVAGIVAFLIMRQLGEMVVEEPVSGSFAHFAYKYWGPFAGFLSGWNYWVMFVLVGMAELTAAGIYMQYWLPDVPTWVWAAAFFIIINAVNLVNVRLYGEAEFWFALIKVLAIIGMIAFGLWMLFGGHGGSKAGFDNLWKHGGFLATGWHGLILSLAVIMFSFGGLELIGITAAEAQNPEKSIPKAVNQVVYRILLFYIGSLVVLLALYPWVEIKSDSSPFVMIFHNLDSNLVASALNFVILVASLSVYNSGVYSNSRMLFGLSVQGNAPKFLARVSKRGVPVNSLLLSGIITSLVVVLNYLLPHEALGLLMALVVATLLLNWIMICMAHLKFRAAQRRKGRESKFKALLAPASNYFCIAFLGLILALMCTIDGMRLSAILLPVWILFLFIAFKLLRRPA

SEQ ID NO: 10347 - protein, 677 aa, Klebsiella pneumoniae subsp. pneumoniae MGH 78578
MTDLSQSREKDKINPVVFYTSAGLILLFSLMTIFFRDFSAEWIGRTLDWVSKTFGWYYLLAATLYIVFVVCIACSRFGSVKLGPEQSKPEFSLLSWAAMLFAAGIGIDLMFFSVAEPVTQYMQPPEGAGQTIEAARQAMVWTLFHYGLTGWSMYALMGMALGYFSYRYNLPLTIRSALYPIFGKRINGPIGHSVDIAAVIGTIFGIATTLGIGVVQLNYGLSVLFDIPDSLAAKAALIALSVIIATISVTSGVDKGIRVLSELNVALALGLILFVLFMGDTSFLLNALVLNVGDYVNRFMGMTLNSFAFDRPVEWMNNWTLFFWAWWVAWSPFVGLFLARISRGRTIRQFVMGTLIIPFTFTLLWLSVFGNSALYEIIHGDAAFAQEAMAHPERGFYSLLAQYPAFTFSASVATITGLLFYVTSADSGALVLGNFTSKLKDINSDAPNWLRIFWSVAIGLLTLGMLMTNGISALQNTTVIMGLPFSFVIFFVMAGLYKSLKVEDYRRVSASRDTAPRPMGLQDRLSWKKRLSRLMNYPGTRYTKLMMETVCYPAMEEVAQELRLRGAAVELKSLPPEEGENLGHLDLLVHMGDEQNFIYKIWPQQYSVPGFTYRARSGKSTYYRLETFLLEGSQGNDLMDYSKEQVITDILDQYERHLNFIHLHREAPGNSVMFPDG

SEQ ID NO: 10348 - protein, 362 aa, Klebsiella pneumoniae subsp. pneumoniae MGH 78578
MSNSDIRVVPGPANYFSHPGSLERLSDFFSADQLSRAVWVYGERALAGAEPFLPAAFHLPEAKKIRFTGHCSERDVAALVQASGDDRAVVIGVGGGALLDSAKVLARRLGVPLVAIPTIAATCAAWTPLSVWYSDAGQALNFEIFDDANFLVLVEPRIILNAPAEYLLAGIGDTLAKWYEAVVLAPQPEALPLTVRLGINGALAIRDMLLASSETALADQRRGDLTQAFRDVVEAIIAGGGMVGGLGERYTRVAAAHAVHNGLTVLPQTDKFLHGTKVAYGILVQSALLAQDDVLAQLVQAYQRFNLPTTLAALEVDINNRTELDRVIAHTLRPGESIHYLPVTLTPEVLRAAFEKVEYFSR

SEQ ID NO: 10349 - protein, 386 aa, Klebsiella pneumoniae subsp. pneumoniae MGH 78578
MNNNPLIPESKLPALGTTIFTQMSALAQQHQAINLSQGFPDFDGPRYLQERLAYHVAQGANQYAPMTGVPALREAIAGKTAELYGYQPDVNSEITVTAGATEALYAAITALVRRGDEVICFDPSYDSYAPAVALAGGELRRIALQPPHFRVDWRQFAAALSEKTRLVILNTPHNPSATVWQREDFAALWQAIAEREIYVLSDEVYEHICFAEGGHASVLAHPQLRERAVAVSSFGKTFHMTGWKVGYCVAPTAISAELRKVHQYLTFSVNTPAQLAIADMLREAPEHYRELPAFYRERRDLFIEALRPSRLEILPCEGTYFLLADYSAISDLDDVSFCRWLTTQIGVAAIPLSVFCADPFPHKLIRLCFAKQPATLLAAAARLCQL

SEQ ID NO: 10350 - protein, 554 aa, Klebsiella pneumoniae subsp. pneumoniae MGH 78578
MCSIFGVLDIKTDAGELRKKALELSRLMRHRGPDWSGVYASDKAILAHERLSIVDVNAGAQPLYNAEKTHALAVNGEIYNHQALRAEYGDRYQFQTGSDCEVILALYQEKGPEFLDDLQGMFAFALYDSEKDAYLIGRDHIGIIPLYMGHDEHGNFYVASEMKALVPVCRTIKEFPAGSYLWSKDGEIRQYYQRDWFDYDAVKDNVTDKNELRQALEESVKSHLMSDVPYGVLLSGGLDSSVISAITKKFAARRVEDQERSEAWWPQLHSFAVGLEGSPDLKAAQEVANHLGTVHHEIHFTVQEGLDAIRDVIYHIETYDVTTIRASTPMYLMSRKIKAMGIKMVLSGEGSDEVFGGYLYFHKAPNAKELHEETVRKLQALHMFDCARANKAMSAWGVEARVPFLDKKFLDVAMRINPQDKMCGNGKMEKHILRECFESYLPASVAWRQKEQFSDGVGYSWIDTLKEVAAKQISDQQLETASFRFPYNTPTSKEGYLYREIFEELFPLPSAAECVPGGPSVACSSAKAIEWDEAFKTMNDPSGRAVGVHQSAYK

SEQ ID NO: 10351 - protein, 555 aa, Klebsiella pneumoniae subsp. pneumoniae MGH 78578
MSEAEARPTNFIRQIIDEDLATGKHTTVHTRFPPEPNGYLHIGHAKSICLNFGIAQDYQGQCNLRFDDTNPVKEDIEYVESIKNDVQWLGFHWSGDVCYSSDYFDQLHQYAVELINKGLAYVDELSPDEIREYRGTLKAPGKNSPYRDRSVEENLALFEKMRSGGFEEGKACLRAKIDMASPFIVMRDPVLYRIKFAEHHQTGNKWCIYPMYDFTHCISDALEGITHSLCTLEFQDNRRLYDWVLDNISIPVHPRQYEFSRLNLEYTVMSKRKLNQLVTEKHVEGWDDPRMPTISGLRRRGYTAESIREFCKRIGVTKQDNTIEMASLESCIREDLNENAPRAMAVIDPVKLVIENYPQGESEMVVMPNHPNKPEMGSREVPFSAEIWIDRADFREEANKQYKRLVLGKEVRLRNAYVIKAERVEKDAEGNITTIFCTYDADTLSKDPADGRKVKGVIHWVSAAHALPVEIRLYDRLFSVPNPGAADDFLAVINPESLVIKQGYAEPSLAQAEAGKAYQFEREGYFCLDSRYATATNLVFNRTVGLRDTWAKAGE

SEQ ID NO: 10352 - protein, 460 aa, Klebsiella pneumoniae subsp. pneumoniae MGH 78578
MQQQHKPHLLRGLNARHIRFIALGSAIGTGLFYGSASAIKAAGPAVLLAYLIGGAAVFIVMRALGEMAVRNPVSGSFGSYARQYLGPLAGFITGWTYTFEMVIVALADVTAFGIYMGLWYPDVPRWIWILSIIFFIGAMNLCNVRVFGEMEFWLSLVKVVAIIAMMLAGAGIIFFGFGHSFPATGLENLWSHGGFAPNGWQGVIASLGIVMFAFGGVEIIGVTAAEAKDPKKVIPQAINTIPLRIILFYVCTLAVLMAIFPWNSFGEQGSPFVLIFDGLGIPAAATILNIIVISASISAINSDIFGAGRMMYGMSKEGLAPKSFQRIASNGVPWMTVVVMGGALLAAVVLNYLIPEQVFVLIASLAAFATVWVWLMILLSHFAMRRGLSAEERSQIAFPIPFWPVAPLLTLLFMGLVIAVLGMFAETRMALIAGLVWLGLLTVVWYARVRKTALQVATEQ

SEQ ID NO: 10353 - protein, 250 aa, Klebsiella pneumoniae subsp. pneumoniae MGH 78578
MFFGEMTMKKVLIAALLAGMSLSASAAQTIRFATEASYPPFELVDANNQIVGFDVDLANALCKEIDATCTFTNQAFDSLIPGLKFRRFDAVMAGMDITPEREKQVLFSTPYYDNSALFVGQQGKFTSIDQLKGKKVGVQNGTTHQKFITDKHPEITTVPYDSYQNAKLDLQNGRIDAVFGDTAVVTEWLKSNPKLAAVGDKVTDKAYFGTGLGIAVRQGNTDLQQKFNAALEKVKKDGTYQTIYNKWFQK

SEQ ID NO: 10354 - protein, 271 aa, Klebsiella pneumoniae subsp. pneumoniae MGH 78578
MAKVAEEAGVYKATKHPMKTFYLAITAGVFISIAFVFYITATTGTAAMPYGIAKLIGGICFSLGLILCVICGADLFTSTVLIVVAKASGRITWGQLAKNWLNVYFGNLVGALLFVLLMWLSGEYMTANGGWGLNVLQTADHKMHHTFVEAVSLGILANLMVCLAVWMSYSGRSLMDKAMIMVLPVAMFVASGFEHSIANMFMIPMGIVIRNFASPEFWTAIGSTPESFSHLTVMNFITDNLIPVTIGNIIGGGLLVGLTYWVIYLRGNDHH

SEQ ID NO: 10355 - protein, 582 aa, Klebsiella pneumoniae subsp. pneumoniae MGH 78578
MQNDKDLSTWQTFRRLWPIIAPFKAGLIVAAVALVLNAGSDTFMLSLLKPLLDDGFGKTDRSVLLWMPLVVIGLMVLRGITSYISSYCISWVSGKVVMTMRRRLFGHMMGMPVAFFDKQSTGTLLSRITYDSEQVASSSSSALITVVREGASIIGLFVMMFYYSWQLSLILIVLAPIVSVAIRVVSKRFRNISKNMQNTMGQVTTSAEQMLKGHKEVLMFGGQEVETKRFDKVSNKMRLQGMKMVSASSISDPIIQLIASLALAFVLYAASFPSVMDTLTAGTITVVFSSMIALMRPLKSLTNVNAQFQRGMAACQTLFAILDSEQEKDEGTRVIERAKGNLKFENVTFTYPGREVAALRNINLDIPEGKTVALVGRSGSGKSTIASLITRFYDVDEGQILLDGHDLREYKLSSLRDQVALVSQNVHLFNDTVANNIAYARTEEYSREQIEEAARMAYAMDFINKMDNGLDTIIGENGVMLSGGQRQRIAIARALLRNSPILILDEATSALDTESERAIQAALDELQKNRTSLVIAHRLSTIEQADEIVVVEDGRIVERGTHHDLLEHKGVYAQLHKMQFGE

SEQ ID NO: 10356 - protein, 308 aa, Klebsiella pneumoniae subsp. pneumoniae MGH 78578
MQAFVILLSGGIFCMSSWIGINNGLQRLSKMVGWGAFLLPLVVLLVGPTEFITNNVINAVGLTTQNFLQMSLFTDPLGDGAFTRNWTVFYWLWWISYTPGVAMFVTRVSRGRKIKEVIWGLLLGSTAGCWFFFGVMESYAMHQFVNGVINVPQVMQTLGGETAVQQVLMSLPAGKLFLAAYLFVMIVFLASHMDAVAYTMAATSTRNLREGEDPDRGMRLFWCVVITLIPLSILFTGASLETMKTTVVLTALPFLAILLIKTGGFVRWLKQDYAHVPVHQIETHTPEPIIKAETLPVGAVLKGDGQSL

SEQ ID NO: 10357 - protein, 463 aa, Klebsiella pneumoniae subsp. pneumoniae MGH 78578
MAINPPAHNAAQAGRPRLRKSLKLWQVVMMGLAYLTPMTVFDTFGIVSGISNGHVPASYLLALAGVLFTAISYGKLVRQFPEAGSAYTYAQKSISPHVGFMVGWSSLLDYLFLPMINVLLAKIYLSALFPEVPPWVWVVTFVAILTAANLKSVNLVANFNTLFVLVQISIMVVFVILVVQGLHKGEGVGTVWSLQPFISQNAHLIPIITGATIVCFSFLGFDAVTTLSEETPDAARVIPKAIFLTAMYGGIIFIVASFFMQLFFPDIHRFKDPDAALPEIALYVGGKLFQSIFLCTTFVNTLASGLASHASVSRLLYVMGRDNVFPERIFGYVHPKWRTPALNVIMVGIVALSALFFDLVTATALINFGALVAFTFVNLSVFNHFWRRKGYNKTWKDRLHYLLLPMVGALTVGVLWINLEATSLTLGLVWAALGLLYLTYLTRRFRKPPPQFDAAKAEQAWES

SEQ ID NO: 10358 - protein, 196 aa, Klebsiella pneumoniae subsp. pneumoniae MGH 78578
MNDAINHTACETLFTQARTHNGWLDKPVSDAQLQAVWDLMKMGPTSANCSPARIVFVRSAEGKEKLRPTLSSGNLQKTMQAPVTAIVAWDSAFYDRLPTLFPHGDARSWFTSSPQLAEETAFRNSSLQAAYLIFACRARGLDTGPMSGFDREKVDAAFFADNGWKSNLLVNIGYGDPGKLYGRLPRLSFDEACLLA

SEQ ID NO: 10359 - protein, 502 aa, Klebsiella pneumoniae subsp. pneumoniae MGH 78578
MAISTPMLVTFIVYIFGMVLIGFIAWRSTKNFDDYILGGRSLGPFVTALSAGASDMSGWLLMGLPGAIFLSGISESWIAIGLTLGAWINWKLVAGRLRVHTEVNNNALTLPDYFTGRFEDKSRVLRIISALVILLFFTIYCASGIVAGARLFESTFGMSYETALWAGAAATIIYTFVGGFLAVSWTDTVQASLMIFALILTPVIVIISVGGFGDSLEVIKQKSIENIDMLKGLNFVAIISLMGWGLGYFGQPHILARFMAADSHHSIVHARRISMTWMILCLGGAVAVGFFGIAYFNNNPSLAGAVNQNAERVFIELAQILFNPWIAGILLSAILAAVMSTLSCQLLVCSSAITEDLYKAFLRKNAGQKELVWVGRMMVLVVALVAIALAANPENRVLGLVSYAWAGFGAAFGPVVLFSVMWSRMTRNGALAGMVIGALTVIVWKQFGWLGLYEIIPGFVFGSIGIVVFSLLDKAPSASMQQRFAEADAHYHTPPPVRATAE

SEQ ID NO: 10360 - protein, 459 aa, Klebsiella pneumoniae subsp. pneumoniae MGH 78578
MTTQQEHQLKRGLKNRHIQLIALGGAVGTGLFLGIAQTIRMAGPSVLLGYAIAGVIAFFIMRQLGEMVVEEPVAGSFSHFANRYWGPFAGFMSGWNYWVLYVLVSMAELTAVGIYIQYWWPEVPTWLSAAIFFVVINAINLTHVKVYGELEFWFSIVKVAAIISMIAFGCYLLFSGHGGPAATVANLWQDGGFFPNGITGLVMAMAVIMFSFGGLELVGITAAEADEPHKTIPKATNQVIYRILLFYVGSLAVLLSLYPWRNVVEGGSPFVLIFHAIDSNIVANALNLVVLTAALSVYNSCVYCNSRMLFGLAQQGNAPRALLRVNHRGIPLTALAVSAVATALCVVINYVMPGKAFALLMALVVAALVINWAMICITHLKFRRAMQRAGKVTAFQSFAYPLTNWLCLLFLAAILGVMYLTPDIRISVCLIPVWLLILAAGYLLRRKSAPAPVAALEER

SEQ ID NO: 10361 - protein, 356 aa, Klebsiella pneumoniae subsp. pneumoniae MGH 78578
MTTFYSLKVARVEPETRDAVTITFAIPQALQAEYCFRPGQHLTLKARLGGEELRRCYSICRSRTPGEISVAVKAIDGGRFSRYAQQDIQQGMELEVMVPQGHFGYQPQAERQGEYLAIAAGSGITPMMAIISATLATEPQSRFTLIYGNRSSHSMMFRQALADLKDRYPQRLQVIHLFSQESMDSDLLQGRIDGDKLRQLADHLLDFSRFDEAFICGPAAMMDEAEATLRELGVAEKSIHLERFNTPGGNVKRVAGVQAEGRTVTIRQDGRDRLIALSAEDDSILDAALRQGADLPFACKGGVCATCKCKVLRGEVAMAANYSLEADELAAGYVLSCQSLPTSGDVVVDFDARGMA

SEQ ID NO: 10362 - protein, 401 aa, Klebsiella pneumoniae subsp. pneumoniae MGH 78578
MRDAFICDGIRTPIGRYGGALASVRADDLAAIPLRELLSRNPGLDPAAIDDVIFGCANQAGEDNRNVAHMATLLAGYPHTVPGTTINRLCGSGLDAIGFAARAIKAGDADLLIAGGVESMSRAPFVMGKASAPYQRQAELFDTTIGWRFVNPLMAQHFGTDSMPETAENVAELLNISRADQDAFAWRSQQRTAQAQRDGILAQEIVPVQIVGRKGAVSDVREDEHPRPETTLEQLAKLKAPFRQGGVITAGNASGVNDGAAALIVASEQQAAIQGLTPRARIVAMATAGVEPRLMGLGPVPAVRKVLERAGLNINDMDLIELNEAFAAQALGVLRQLGVPDDAAHVNPNGGAIALGHPLGMSGARLALSASLELQRRGGRYALCTMCIGVGQGIAMILERV

SEQ ID NO: 10363 - protein, 514 aa, Klebsiella pneumoniae subsp. pneumoniae MGH 78578
MEGKTMRIGVPQERLAQETRAAATPKTVEQLLKLGFSVAVESGAGKLASFDDEAFAEAGAEIVTGDEVWQSDVILKVNAPNDDEIALLNPGTTLISFIWPAQNPQLMEKLAARNINVMAMDSVPRISRAQSLDALSSMANIAGYRAIVEAAHEFGRFFTGQITAAGKVPPAKVMVIGAGVAGLAAIGAANSLGAIVRAFDTRPEVKEQVQSMGAEFLELDFKEEAGSGDGYAKVMSEAFIKAEMALFAAQAKEVDIIVTTALIPGKPAPKLITREMVDSMKSGSVVVDLASQNGGNCEYTVPGEVVTTANGVKIIGYTDLPGRLPTQSSQLYGTNLVNLLKLLCKEKDGNIVIDFDDVVVRGVTVVREGEITWPAPPIQVSAQPQAAAKKVEAPKEAVKPASPWRKYALMALAIILFGWLANVAPKEFLGHFTVFALACVVGYYVVWNVSHALHTPLMSVTNAISGIIVVGALLQIGHGGWVSFLSFIAVLIASINIFGGFTVTQRMLKMFRKG

SEQ ID NO: 10364 - protein, 401 aa, Klebsiella pneumoniae subsp. pneumoniae MGH 78578
MMNQAFICDAVRTPFGRFGGALATMRADDLAALPLKALLARNPGLDPSRIDDVIFGCANQAGEDNRNVARMALLLAGLPESVPGSTINRLCGSSLDAIGVAARAIKSGETQLMIAGGVESMSRAPFVMGKAESAFSRSMQMEDTTIGWRFINPQMKALYGVHSMPETAENVADEFAISRADQDAFALRSQLRTAAAQEAGRFADELIAVQVPQRKGEPLLFSRDEHPRSTSLEALAKLRGVVRADGSVTAGNASGVNDGACALLLASETALSANDLQPLARVVGVATAGVAPRIMGFGPAPAVRKVLAQTGLTLGQMDVIELNEAFAAQALAVTRDLGLPDDAAHVNPNGGAIALGHPLGASGGRLAMTAAYQLKRTGGRYALCTMCIGVGQGIALIIERV

SEQ ID NO: 10365 - protein, 329 aa, Klebsiella pneumoniae subsp. pneumoniae MGH 78578
MSGGHMRDILPVVVDGLWRQGAKNLAVRLVSAEGQPLPAWTPGAHIDLHLPCGLIRQYSLTGSPAERDRYLLCIARESQSRGGSRYIHDTLRPGQPLMISAPRNHFPLHEGGHVVLLAAGIGITPLLAMAHARAASGASFTLHYYVSRAQEAAFATEIARQLAGGICQIHCSDEGQSPRQRLAQDLGAPDADTRVYFCGPPGFMARVRDTARAVGWGEEQLHSEAFQPPAPTAASAADGTFTITLASTGERWPVPGDKTIAQVLQEHGVAVPLSCEMGICGACLTPVREGTVDHRDTVQSEAEKQAAEQHIALCCSRSLSANLVIDLAG

SEQ ID NO: 10366 - protein, 396 aa, Klebsiella pneumoniae subsp. pneumoniae MGH 78578
MTQANDIVIVSGVRTAIGTFNGSLKHTHQHDLGAAVIREAIARAGIAPQDIDETIVGNVGQIAESGFIARICQLRAGIPQESTAYSVNRQCGSGLQALADGMMQLQSGQAEVVVACGTENMTQLPYYLRKARDGYRMGHGELEDGLISILTWPEGPYHNGITAENVAQRFGITREAMDDFAWSSQQKALKAIAEGRFREQILALEVPDGKKATRLFATDEHPRDTPREKLATLRPAFKADGVVTAANSSGINDGAAALVMMTRQQAEKRGLTPRMRIRGWAVAGCGAEIMGFGPSPATRRLMDRLNIDVQSIDLIELNEAFAAQALAVMNDLRLDPARVNVNGGAIALGHPVGASGAILPVKLMYEMARSGARTGLVTMCIGGGQGISMLFEREGA

SEQ ID NO: 10367 - protein, 261 aa, Klebsiella pneumoniae subsp. pneumoniae MGH 78578
MKKLLIALAGAACLLSSVSAAQADQLQDIEKRGVIRIAVPQDFPPFGSVGTDLQPQGYDIDMARYLAKSMKLKLQLVPVTSANRVPYLQTDKVDLVISSLGKNAEREKVIDFSRAYAPFFLGVFGPKGAELKDAAALSGKSIGVTRGAVEDMVLTSVAPQAAQIKRYEDNNTTLSAYLSGQVQYVATGNLVVAAISRQNADKAPVPSFMLKDSPCFIGLKKNEPALKAKVDTLIEQGIKDGTLNGLSEKWLKAPLPASLGA

SEQ ID NO: 10368 - protein, 338 aa, Klebsiella pneumoniae subsp. pneumoniae MGH 78578
MTFNIALNFEDGVTRFIQCNAGEKVLDAAYRQKVNLPMDCSDGVCGTCKCHCASGEYDLGEDYLDEALSDDEAQARQVLTCQMVPTSDCVIDVPVAAAQCKTALATLGAQVRQVNLLSDTAIELVVALDEPLAFLPGQYVNIQVPGTLHVRAYSFSSQPGSLEGRFLIRNVPGGMMSQWLTQRARPGDRLTLSGPMGSFYLRHGERPLLMLAGGTGLAPLLSMLHTLQTQGSQRPVMLLYGVTRDCDLVKTDALDTFIQQLTGYRWLPVVADENSTCPQRGFVTDHLDDAMLNNGDVDIYLCGPPPMVNAVATALRDRGITPAGFWYEKFIASQSAAA

SEQ ID NO: 10369 - protein, 334 aa, Klebsiella pneumoniae subsp. pneumoniae MGH 78578
MNKTQTPRQVLNLPAGYFGMVLGTIGMGFAWRYASTLWPVSRSIGDGLVTLAMAMWVLLSMAFISRAIRFPASVLREMRHPVSSSFVSLFPATTLLVAIGLAPWCRPLAIGLFVPGVALQLAYAAWQSGGLWRGNHPREATTPGLYLPTVANNFISAMACGALGFSDAGLVFLGAGVFSWLSLEPAILQRLRSAGELPTPLRTSLGIQLAPALVACSAWLSVNGGEADTFAKLLFGYGLLQLLFMLRLMPWYLRQPFNASFWSFSFGISSLATTGLHLGQARGDGFFHHLAMPLFIFSNLVVGLLLLRTALLLVSGKLLLQVDRETLLNKKEGS

SEQ ID NO: 10370 - protein, 115 aa, Klebsiella pneumoniae subsp. pneumoniae MGH 78578
MSSTLEKIQRQIAENPILLYMKGSPKLPSCGFSAQAVQALSACGERFAYVDILQNPDIRAELPKYANWPTFPQLWVDGELVGGCDIVIEMYQRGELQQLIKETAAKYHTDEPKAE

SEQ ID NO: 10371 - protein, 393 aa, Klebsiella pneumoniae subsp. pneumoniae MGH 78578
MTDIAIVAAVRTPVGSFHGAFAPLSAVDLGAAVVRGLLERCQLPAAAVDELIFGQVLTAGCGQNPARQTALRAGLPVDTPAVTVNLVCGSGLKAVQQAVQAIRCGDAGIVIAGGQESMSNAPYLMHGARDGLRFGHASLQDSMIQDGLWDAFNDYHMGITAENLADAFDISRERQDAFAASSQRKAAAAIAAGRFREEIVPVSVPQGKKPPRVVTDDEQPRPETSEQQLAQLRPAFRPADGSVTAGNASSLNDGAAAVLLMRVDKARELGLPVLARIVSSAVAGVDPSVMGIGPVSACRQALHRAGWTLDEVDLIEANEAFAVQALAVGQLLEWDSEKVNVNGGAIALGHPIGASGCRILVSLVHEMQRRGASKGLATLCVGGGQGIAMTLQR

SEQ ID NO: 10372 - protein, 559 aa, Klebsiella pneumoniae subsp. pneumoniae MGH 78578
MDKQYPVRQWAHGADLVVSQLEAQGVRQVFGIPGAKIDKVFDSLLDSSIRIIPVRHEANAAFMAAAVGRITGKAGVALVTSGPGCSNLITGMATANSEGDPVVALGGAVKRADKAKQVHQSMDTVAMFSPVTKYAVEVTAPDALAEVVSNAFRAAEQGRPGSSFVSLPQDVVDGPVSGKVLPASGAPQMGAAPDDAIDQVAKLIAQAKNPIFLLGLMASQPENSKALRRLLETSHIPVTSTYQAAGAVNQDNFSRFAGRVGLFNNQAGDRLLQLADLVICIGYSPVEYEPAMWNSGNATLVHIDVLPAYEERNYTPDVELVGDIAGTLNKLAQNIDHRLVLSPQAAEILRDRQHQRELLDRRGAQLNQFALHPLRIVRAMQDIVNSDVTLTVDMGSFHIWIARYLYSFRARQVMISNGQQTMGVALPWAIGAWLVNPERKVVSVSGDGGFLQSSMELETAVRLKANVLHLIWVDNGYNMVAIQEEKKYQRLSGVEFGPMDFKAYAESFGAKGFAVESAEALEPTLRAAMDVDGPAVVAIPVDYRDNPLLMGQLHLSQIL

SEQ ID NO: 10373 - protein, 248 aa, Klebsiella pneumoniae subsp. pneumoniae MGH 78578
MLSIQDLHVAVEDKAILRGLNLEVRPGEVHAIMGPNGSGKSTLSATLAGREDYEVTGGRVEFKGKNLLELAAEDRAGEGIFMAFQYPVEIPGVSNQFFLQTALNAVRNYRGQEALDRFDFQDLMEEKIKLLQMPEDLLTRSVNVGFSGGEKKRNDILQMAVLEPELCILDESDSGLDIDALKIVSQGVNALRDGKRAFIIVTHYQRILDYIKPDYVHVLYQGRIVKSGDFSLVKQLEEQGYGWLTEQQ

SEQ ID NO: 10374 - protein, 447 aa, Klebsiella pneumoniae subsp. pneumoniae MGH 78578
MAVRVSVDKGVLQCVCTVGRFFFAHGGADMGDKFSISRRRLLQAGAALGGAMLLPGVMQAAWAGGSDKPEQTRVRVGFIPLTDCAPLAIAAAKGFDQKYGITLVASKEASWAAVRDKLVAGELDAAHILYGLLYGLELGIASKPQAMANLMTLNRNGQAITLSSELQEKGGTDLGGLKRLIDRSAPGSYTFAHTFPTGTHAMWLYYWLASAGIDPFNDVRTVVVPPPQMVMNMRIGNMSGFCVGEPWNARAINDRIGFTAATSQDIWPEHPEKVLGTRRDWVERNPNTARALVAALMEAQRWIAASPENTRETARLLARRGWLNTKEQYLTGRMLGEYDNGLGRRWQDAHPMRFWAGGEVSFPWLSDGMWFLTQFRRWGLLKQAPDYLAVASRINRIDVWQAAAQAVGGISAPAARMRSSTLMDGTVWNGSDPEGYARHFSIQRKGA

SEQ ID NO: 10375 - protein, 312 aa, Klebsiella pneumoniae subsp. pneumoniae MGH 78578
MKLFAGNATPELAQRIANRLYTSLGDAAVGRFSDGEVSVQINENVRGGDIFIIQSTCAPTNDNLMELVVMVDALRRASAGRITAVIPYFGYARQDRRVRSARVPITAKVVADFLSSVGVDRVLTVDLHAEQIQGFFDVPVDNVFGSPILLEDMLQLNLDNPIVVSPDIGGVVRARAIAKLLNDTDMAIIDKRRPRANVSQVMHIIGDVAGRDCVMVDDMIDTGGTLCKAAEALKERGAKRVFAYATHPIFSGNAIQNIKNSVIDEFVVCDTIPLAPEIKALDKVRTLTLSGMLAEAIRRISNEESISAMFEH

SEQ ID NO: 10376 - protein, 428 aa, Klebsiella pneumoniae subsp. pneumoniae MGH 78578
MGEITRQPARAIQNALIDSVLAGLCALIVFGPIVGVVLKGYGFTLAPARVAILVAVVMAGRLALSLLLQSHRGKAFIARFEGADDGVYVRPPGYRSRLRWIIPLLVGLAIVFPFLATKYLLTVAILGLIYVLLGLGLNIVVGLAGLLDLGYVAFYAIGAYGLALGYQYLGLGFWAMLPLGAVMAALAGALLGFPVLRMHGDYLAIVTLGFGEIIRLVLNNWVSFTGGPNGVPVPSPTLFGLEFTRRAKDGGIPIHEFFHVSYNPNLKFIFLYAVLCLVVMLVLLVKHRLTRMPIGRAWEALREDEIACRAMGLNHVLVKLSAFMLGASTAGIAGVFFASYQGFVNPTSFTFFESALILAIVVLGGMGSTLGVVLAAFVLTVTPELLRGFDEYRVLLFGVLMVMMMIWRPRGLVRTSRSGVALRKGVAP

SEQ ID NO: 10377 - protein, 402 aa, Klebsiella pneumoniae subsp. pneumoniae MGH 78578
MTEFPVVLVINCGSSSIKFSVLGAASCDCLLNGVAEGINAERASLSLNGGEPVALAQRGYEGALQAIAGALAQRDLIDSVALIGHRVAHGGDLFTESVIISEEVINNIRQVSSLAPLHNYASLSGIASAQRLFPEVMQVAVFDTSFHQTLAPEAFLYGLPWEYYQNLGVRRYGFHGTSHRYVSQRALALLGLPEQESGLVIAHLGNGASICAVRNGRSVDTSMGMTPLEGLMMGTRSGDVDFGAMAWIAGETRQTLSDLERVANTASGLLGISGLSSDLRVLEQAWHEGHARARLAIKTFVHRIARHIAGHAAALQRLDGIIFTGGIGENSVLIRRLVSERLAVFGLAMDAARNQQPNSAGERLISADGSRVRCAVIPTNEERMIALDAIRLGRIHTAAALA

SEQ ID NO: 10378 - protein, 192 aa, Klebsiella pneumoniae subsp. pneumoniae MGH 78578
MADRALNLDDFLSRFQLLRPQPSRHALNQRQAAVLVPIVRRPQPGLLLTQRSPLLRKHAGQVAFPGGAVDNTDATLIAAALREAQEEVAIPPEAVEVIGVLPPVDSVTGFQVTPVVGIIPPDLHYHASQDEVSAVFEMPLAEALRLGRYHPLDIHRRGNDHRVWLSWYQHYFVWGMTAGIIRELALQIGARP

SEQ ID NO: 10379 - protein, 474 aa, Klebsiella pneumoniae subsp. pneumoniae MGH 78578
MSRLVVVSNRIALPDDKKSSAGGLAVGILGALRAAGGLWFGWSGEIGDDQQPLKQVSRGNISWASFNLNERDHDEYYNQFSNAVLWPAFHYRLDLVSFQREAWEGYLRVNAMLADKLLPLIEPDDTLWIHDYHLLPFASELRKRGVNNRIGFFLHIPFPTPEIFNALPPHAELLEQLCDYDLLGFQTESDRTAFLDSIAMQTRLSDLGDKRYQAWGKAFSTEVYPIGIDPDEITRNAKGPLPPKLAQLKNELKNVKNIFSVERLDYSKGLPERFLAYETLLEKYPQHHGKIRYTQIAPTSRGDVQAYQDIRHQLETAAGRINGQFGQLGWTPLYYLNQHFDRKLLMKVFRYSDVGLVTPLRDGMNLVAKEYVAAQDPDNPGVLVLSQFAGAAQELTSALIVNPYDRDEVAAALDRALSMPLAERIARHSAMLDVIRENDIHNWQARFVEDLQHISPRSEESRLRGKIATFPKLA

SEQ ID NO: 10380 - protein, 452 aa, Klebsiella pneumoniae subsp. pneumoniae MGH 78578
MSHNATPNTSRVELRKTLTLVPVVMMGLAYMQPMTLFDTFGIVSGMTDGHVPTAYAFALIAILFTALSYGKLVRRYPSAGSAYTYAQKSISPTVGFMVGWSSLLDYLFAPMINILLAKIYFEALVPSIPSWVFVIALVAFMTAFNLRSIKSVANFNTVIVVLQVVLIAVILGMVIYGVFEGEGAGTLASSRPFWSGDAHVIPMITGATILCFSFTGFDGISNLSEETKDAERVIPRAIFLTALIGGLIFIFATYFLQLYFPDISRFKDPDASQPEIMLYVAGKAFQVGALIFSTITVLASGMAAHAGVARLMYVMGRDGVFPKSFFGYVHPTWRTPAMNIILVGAIALLAINFDLVMATALINFGALVAFTFVNLSVISQFWIREKRNKTLKDHFQYLFLPMCGALTVGALWVNLEESSMILGLIWAGIGLVYLACVTKSFRNPVPQYEDVA

SEQ ID NO: 10381 - protein, 355 aa, Klebsiella pneumoniae subsp. pneumoniae MGH 78578
MTQKYLFIDRDGTLISEPPEDFQVDRFDKLAFEPQVIPALLKLQQEGYKLVMITNQDGLGTDSLPQEAFDGPHNLMMQIFASQGVNFEEVLICPHFPGDNCACRKPKTQLVLPWLEEGVLDKSHSYVIGDRATDLELADNMGITGLRYDRETLDWPTICEQLTRSDRYAHVERITKETQVDVKVWLDREGGSKIHTGVGFFDHMLDQIATHGGFRMEVNVGGDLYIDDHHTVEDTGLALGEALKLALGDKRGINRFGFVLPMDECLARCALDISGRPHLEYKADFTYQRVGDLSTEMVEHFFRSLSYTMAVTLHLKTKGKNDHHRVESLFKAFGRTLRQAIRVQGDALPSSKGVL

SEQ ID NO: 10382 - protein, 581 aa, Klebsiella pneumoniae subsp. pneumoniae MGH 78578
MSSAPTDTHKTFLADLARLVGPSHLLTDPAKTQRYRKGFRSGQGEALAVVFPGTLLELWRVLNACVDADKIILMQAANTGLTEGSTPNGNDYDREIVIISTLRLDKLHLLDKGEQVLAWPGTTLYSLEKALKPLGREPHSVIGSSCIGASVIGGICNNSGGSLVQRGPAYTEMSLFAQIDADGKLKLVNHLGIDLGSTPEQILSRLDDERISDSDVLHDGRHAHDHDYVTRVRDVDADTPARYNADPDRLFESSGCAGKLAVFAVRLDTFPAEKRQQVFYIGTNQPQVLTEIRRHILAEFQHLPVAGEYMHRDIYDIAEKYGKDTFLMIDKLGTDKMPFFFTMKGRTDAMLEKVSLFKPHFTDRFMQKLGHVFPAHLPERMKTWRDKYEHHLLLKMAGDGIEEAQRWLTEYFQQAEGDFFACTPEEGSKAFLHRFAAAGAAIRYQAVHADEVEDILALDIALRRNDTEWFEHLPPEIDTQLVHKLYYGHFMCHVFHQDYIVRKGVDAHALKEKMLELLKARGAQYPAEHNVGHLYEAPESLQQFYRQNDPTNSMNPGIGKTSKQKYWGEAAPTPASPADPQ

SEQ ID NO: 10383 - protein, 405 aa, Klebsiella pneumoniae subsp. pneumoniae MGH 78578
MSPIEKSSKLENVCYDIRGPVLKEAKRLEEEGNKVLKLNIGNPAPFGFEAPDEILVDVIRNLPTAQGYCDSKGLYSARKAIMQHYQARGMRDVTVEDIYIGNGVSELIVQAMQALLNSGDEMLVPAPDYPLWTAAVSLSSGKAVHYLCDESSDWFPDLDDIRAKITPRTRGIVIINPNNPTGAVYSKELLQEIVEIARQHNLIIFADEIYDKILYDEAQHHSIAALAPDLLTVTFNGLSKTYRVAGFRQGWMVLNGPKKHAKGYIEGLEMLASMRLCANVPAQHAIQTALGGYQSISEFIIPGGRLYEQRNRAWELINDIPGVSCVKPKGALYMFPKIDAKRFNIHDDQKMVLDFLLQEKVLLVQGTAFNWPWPDHVRIVTLPREDDLEMAISRFGRFLSGYHQL

SEQ ID NO: 10384 - protein, 400 aa, Klebsiella pneumoniae subsp. pneumoniae MGH 78578
MSSKLVLVLNCGSSSLKFAILDAVNGDEYLSGLAECFHLPEARIKWKMDGSKQEAELGAGAAHSEALNFIVNTILAQKPELSAQLTAIGHRIVHGGEKYTSSVVIDESVIQGIKDAASFAPLHNPAHLIGIAEALKSFPHLKDKNVAVFDTAFHQTMPEESYLYALPYSLYKEHGVRRYGAHGTSHFYVTQEAAKILNKPVEELNIITCHLGNGGSVSAIRNGKCVDTSMGLTPLEGLVMGTRSGDIDPAIIFHLHDTLGMSVDAINKMLTKESGLLGLTEVTSDCRYVEDNYQEKADAKRAMDVYCHRLAKYIGSYTALMDGRLDAVIFTGGIGENAAMVRELSLGKLGVLGFEVDHERNLAARFGKSGFINKEGTRPAVVIPTNEELVIAQDASRLTA

SEQ ID NO: 10385 - protein, 710 aa, Klebsiella pneumoniae subsp. pneumoniae MGH 78578
MLIPTGTSVGLTSVSLGVIRAMERKGVRLSVFKPIAQPRSGGDAPDQTTTIVRASSSTTTAAEPLKMSHVESLLSSNQKDVLMEEIIANYHANTQDAEVVLVEGLVPTRKHQFAQALNFEIAKTLNAEIVFVMSQGTDTPEQLNERIELTRNSFGGAKNTSITGVIVNKLNAPVDDQGRTRPDLSEIFDDSSKAKIVKIDPAQLQKGSTLPVLGAVPWSFDLIATRAIDMAHHLNATIINEGDINTRRVKSVTFCARSIPHMLEHFRPGSLLVTSADRPDVLVAACLAAMNGVEIGAILLTGGYEMDARISKLCERAFATGLPVFMVNTNTWQTSLSLQSFNLEVPVDDHERIEKVQEYVANYINADWIESLTATSERSRRLSPPAFRYQLTELARKAGKRVVLPEGDEPRTVKAAAICAERGIATCVLLGNPDEINRVAAAQGVELGAGIEIVDPEVVRESYVGRLVELRKNKGMTEAVAREQLEDNVVLGTLMLEQDEVDGLVSGAVHTTANTIRPPLQLIKTAPGSSLVSSVFFMLLPEQVYVYGDCAINPDPTADQLAEIAIQSAESAIAFGIEPRVAMLSYSTGTSGAGSDVEKVREATRLAQEKRPDLMIDGPLQYDAAVMADVAKSKAPNSPVAGRATVFIFPDLNTGNTTYKAVQRSADLISIGPMLQGMRKPVNDLSRGALVDDIVYTIALTAIQSAQQQK

SEQ ID NO: 10386 - protein, 555 aa, Klebsiella pneumoniae subsp. pneumoniae MGH 78578
MDMQPTYTIGDYLLDRLVDCGIDRLFGVPGDYNLQFLDRVIAHSALGWVGCANELNAAYAADGYARIKGAGALLTTYGVGELSALNGIAGSYAEHIPVLHIVGAPSTGAQQRGELLHHTLGDGDFRHFARMSEQITCSQALLTAGNACHEIDRVLRDMLTHHRPGYLMLPADVARAAAIAPAQRLLVEPAPADENQLAGFCEHASRLLRSSRRISLLADFLAQRYGLQKTLREWVAKTPVAHATMLMGKGLFDEQQSGFVGTYSGIASAPQTREAIENADTIICIGTRFTDTITAGFTQHLAREKTIEIQPFAVRVGDHWFSGVPMDKALAALMTLSAPLAAEWATPQVVAPEAEEGAEGELTQKNFWATVQGALRPGDIILADQGTAAFGIAALKLPSEASLIVQPLWGSIGFTLPAAYGAQTAAAERRVVLIVGDGAAQLTIQEMGSMLRDKQKPLILLLNNEGYTVERAIHGPEQRYNDIALWDWQRLPEAFAPDVASRCRRVTQTSELREAMTESITSDTLTLVEVMLPKMDIPDFLRAVTQALEERNSRV

SEQ ID NO: 10387 - protein, 338 aa, Klebsiella pneumoniae subsp. pneumoniae MGH 78578
MIIDQCRKLALRAPARVVFPDALDVRVLKAAHYLQQQGLAHPILVASPFALRQFALGERLPLTGVQVIDPHSNLAMREAFAAAWQARAGDKAPADAVDKLADPLMFAAAMVSAGQAEVCIAGNLSSTASVLRAGLRLIGLQPGCKTLSSLFLMLPQYTGQPLGFADCSVVPQPTAAQLADIAIASAETWQAIAGEAPRVAMLSFSTHGSARHPCVANVQQATEIVRQRAPQLMVDGELQFDAAFVPDVAAHKAPGSPLQGRANVLVFPSLEAGNIGYKIAQRLGGYRAIGPLIQGLAAPLHDLSRGCSVEEIIELALVASVPRQTDASRIPDSSTLVE

SEQ ID NO: 10388 - protein, 759 aa, Klebsiella pneumoniae subsp. pneumoniae MGH 78578
MDEQLKQSALDFHEFPVPGKIQVSPTKPLATQRDLALAYSPGVAAPCLEIEKDPLAAYKYTARGNLVAVVSNGTAVLGLGNIGALAGKPVMEGKGVLFKKFAGIDVFDIEVDELDPDKFINVVAALEPTFGGINLEDIKAPECFYIEQQLRERMNIPVFHDDQHGTAIISTAAILNGLRVVEKNLSDVRMVVSGAGAAAIACMNLLVALGMQKHNIVVCDSKGVIYKDREPNMAETKAAYAVEDDGKRTLDDVIDGADIFLGCSGPKVLTQEMVKKMARAPLILALANPEPEILPPLAKQVRDDAIICTGRSDYPNQVNNVLCFPFIFRGALDVGATAINEEMKLAAVHAIAELAHAEQSEVVASAYGDQDLSFGPEYIIPKPFDPRLIVKIAPAVAKAAMDSGVATRPIADFDAYIEKLSEFVYKTNLFMKPIFSQARKEPKRVVLAEGEETRVLHATQELVSLGLAKPILVGRPSVIEMRIQKLGLQIKAGVDFEIVNNESDPRFKEYWSEYYQLMKRRGITQEQAQRAVISNTTVIGAIMVHRGEADAMICGTIGEYHDHYRVVQPLFGYRDGVSTAGAMNALLLPSGNTFIADTYVNHDPSPEELAEITLMAAESVRRFGIEPRVALLSHSNFGSADCPSASKMRKTLELVKARAPELMIDGEMHGDAALVESIRNDRMPDSPLKGAANILVMPNMEAARISYNLLRVSSSEGVTVGPVLMGVAKPVHILTPIASVRRIVNMVALAVVEAQTEPL

SEQ ID NO: 10389 - protein, 404 aa, Klebsiella pneumoniae subsp. pneumoniae MGH 78578
MKLPIYLDYSATTPVDPRVAEKMMQFLTMDGTFGNPASRSHRFGWQAEEAVDIARNQIAELVGADPREIVFTSGATESDNLAIKGAANFYQKKGKHIITSKTEHKAVLDTCRQLEREGFEVTYLAPQSNGIIDLKELEAAMRDDTILVSIMHVNNEIGVVQDIATIGEMCRARGIIYHVDATQSVGKLPIDLSQLKVDLMSFSGHKIYGPKGIGALYVRRKPRIRIEAQIHGGGHERGMRSGTLPVHQIVGMGEAYRIAKEEMESEMARLRTLRNRLWNGVKDMEEVYLNGDLEQGAPNILNVSFNYVEGESLIMALKDLAVSSGSACTSASLEPSYVLRALGMTDELAHSSIRFSLGRFTTEEEIDYAIDLIRKSIGRLRELSPLWEMFKQGVDLNSIEWSHH

SEQ ID NO: 10390 - protein, 396 aa, Klebsiella pneumoniae subsp. pneumoniae MGH 78578
MLDAQTIATVKATIPLLVETGPKLTAHFYDRMFAHNPELKEIFNMSNQRNGDQREALFNAIAAYASNIDNLPALLPAVEKIAQKHTSFQIKPEQYNIVGSHLLATLDEMFSPGQEVLDAWGKAYGVLANVFIGREAEIYQQNASKTGGWEGTRAFRIVKKTPRSQLITSFELEPVDGQPVADYQPGQYLAIWLKPEGFEYQEIRQYSLTRKADGKGYRIAVKREEGGQVSSWLHNHASEGDVVYLAAPAGDFFLNVKPQTPVTLLSGGVGQTPMLAMLDALAKSGHQGQVNWFHAAENGDVHAFADEVKALGAALPAFTSHVWYRTPTEADRQAGRFDSEGLMDLAAVADNIRDPQMQYYLCGPVAFMQFAAKQLVELGVNKDNIHYECFGPHKVL

SEQ ID NO: 10391 - protein, 301 aa, Klebsiella pneumoniae subsp. pneumoniae MGH 78578
MSEEKSYCGFVAIVGRPNVGKSTLLNKLLGQKISITSRKAQTTRHRIVGIHTEGPYQAIYVDTPGLHMEEKRAINRLMNKAASSSIGDVELVIFVVEGTRWTQDDEMVLNKLRDAKAPVILAVNKVDNVQEKADLLPHLQFLASQMNFLDIVPISAETGTNVDTIAAIVRKHLPEAIHHFPEDYITDRSQRFMASEIIREKLMRFLGAELPYSVTVEIERFVSNERGGYDINGLILVEREGQKKMVIGNKGAKIKTIGIEARKDMQEMFEAPVHLELWVKVKSGWADDERALRSLGYVDDL

SEQ ID NO: 10392 - protein, 857 aa, Klebsiella pneumoniae subsp. pneumoniae MGH 78578
MRLDRLTNKFQLALADAQSLALGHDNQFIEPLHLMSALLNQEGGSVRPLLTSAGVNAGKLRTDIEQALSRLPQVEGTGGDVQPSQDLVRILNLCDKLAQKKKDNFISSELFVLAALESRGTLTDLLKSAGATTANVTQAIEQMRGGESVNDQGAEDQRQALKKFTVDLTERAEQGKLDPVIGRDEEIRRTIQVLQRRTKNNPVLIGEPGVGKTAIVEGLAQRIVNGEVPEGLKGRRVLALDMGALVAGAKYRGEFEERLKGVLTDLSKQEGNVILFIDELHTMVGAGKADGAMDAGNMLKPALARGELHCVGATTLDEYRQYIEKDAALERRFQKVFVAEPSVEDTIAILRGLKERYELHHHVQITDPAIVAAATLSHRYIADRQLPDKAIDLIDEAASSIRMQIDSKPEELDRLDRRIIQLKLEQQALKKESDEASLKRLDMLNEELADKERQYSVLEEEWKAEKASLSGTQTIKAELEQAKIAIEQARRVGDLARMSELQYGKIPELEKQLAAATQSEGKTMRLLRNKVTDAEIAEVLARWTGIPVSRMMESERDKLLRMEQELHHRVIGQDEAVEAVSNAIRRSRAGLSDPNRPIGSFLFLGPTGVGKTELCKTLANFMFDSDDAMVRIDMSEFMEKHSVSRLVGAPPGYVGYEEGGYLTEAVRRRPYSVILLDEVEKAHPDVFNILLQVLDDGRLTDGQGRTVDFRNTVVIMTSNLGSDLIQERFGELDYGHMKDLVLGVVSQNFRPEFINRIDEVVVFHPLGEKHIASIAQIQLQRLYKRLEERGYEVQMSDEALKLLSANGYDPVYGARPLKRAIQQQIENPLAQQILSGELVPGKTIELVVKDDRIVAVQ

SEQ ID NO: 10393 - protein, 316 aa, Klebsiella pneumoniae subsp. pneumoniae MGH 78578
MDNLFHQPQGGNEMPRFAGRATMMRLPFIEDLQGLDAAFVGIPLDIGTSQRSGTRYGPRYIRAESVMIRPYNMATGAAPFDSLSVADIGDVPINTYSLLKSVQIIEDYYTGLNSYPLIPLTLGGDHTITLPILRALTKKHGPVGLIHVDAHTDTNDEMFGEKIAHGTTFRRAVEEGLLDLKRVVQIGQRAQGYAAGDFQWGVDQGFRLVQAEQCWHTSLAPLMAEVRQQMGNGPVYLSFDIDSLDPIWAPGTGTPEVGGLSSIQALEIVRGCRGLNLIGADLVEVSPPYDVSGNTSQLAANLLYEMLCVLPGVKYA

SEQ ID NO: 10394 - protein, 321 aa, Klebsiella pneumoniae subsp. pneumoniae MGH 78578
MSNFLLEAGRQTLMLELQEASRLPERLGDDFIRAAETIIHCEGKLIVSGIGKSGHIGKKLAATFASTGTPAFFVHPAEALHGDLGMLDSRDVMLFISYSGSAKELDLIVPRLEEKGIPLLAMTGKSTSPLALAAKAVLDIAVEREACPMHLAPTSSTVNTLMLGDALAMAVMQARGFNEEDFARSHPAGALGARLLNKVHHLMRRDEEVPRVNTEANVMDAMLELSRTGLGLVAVCDEANRVQGVFTDGDLRRWLVAGGTLNDGVTRAMTRNGVTLQADSRAVEAKERLMKHKISAAPVVDENGQLVGAINLQNFYQAGIL

SEQ ID NO: 10395 - protein, 404 aa, Klebsiella pneumoniae subsp. pneumoniae MGH 78578
MTYKIMAINAGSSSLKFQLLNMPQGALLCQGLIERIGLPEARFTLKTSAQKWQETLPIADHHEAVTLLLEALTGRGILSSLQEIDGVGHRVAHGGERFKDAALVCDDTLREIERLAELAPLHNPVNALGIRLFRQLLPAVPAVAVFDTAFHQTLAPEAWLYPLPWRYYAELGIRRYGFHGTSHHYVSSALAEKLGVPLSALRVVSCHLGNGCSVCAIKGGQSVNTSMGFTPQSGVMMGTRSGDLDPSILPWLVEKEGKSAQQLSQLLNNESGLLGVSGVSSDYRDVEQAADAGNERAALALSLFAERIRATIGSYIMQMGGLDALIFTGGIGENSARARAAICRNLHFLGLALDDEKNQRSATFIQADNALVKVAVINTNEELMIARDVMRLALPQARELAVSA

SEQ ID NO: 10396 - protein, 387 aa, Klebsiella pneumoniae subsp. pneumoniae MGH 78578
MKDVVIVGALRTPIGCFQGALSRHSAVELGSVVVKALVEKTGIDPHSVDEVILGQVLTAGTGQNPARQSAIRGGLPNTVSAITINDVCGSGLKALHLATQAIQCGEADVVIAGGQENMSRAPHVLTDSRTGAQLIDSLVHDGLWDAFNDYHMGVTAENLAREFGISRELQDAWALSSQHKARKAIDSGRFRDEIVPVVTEHNGAARTVDTDEQPRVDASAEGLASLQPTFDRLGSVTAGNASSINDGAAAVMMMSEAKALELGLPILARIRAFASVGVDPALMGIAPVHATRRCLERAGWRLDDVDLIEANEAFAAQAISVGRVLEWDERRVNVNGGAIALGHPIGASGCRILVSLVHEMIKRDARKGLATLCIGGGQGVALAVERA

SEQ ID NO: 10397 - protein, 306 aa, Klebsiella pneumoniae subsp. pneumoniae MGH 78578
MSTLGHQYDNSLVSNAFGFLRLPMNFMPYESDADWVITGVPFDMATSGRAGGRHGPAAIRQVSTNLAWEHNRFPWNFDMRERLNVVDCGDLVYAFGDAREMSEKLQAHAEKLLAAGKRMLSFGGDHFVTLPLLRAHAKHFGKMALVHFDAHTDTYANGCEFDHGTMFYTAPNEGLIDPNHSVQIGIRTEFDKDNGFTVLDAGQVNDRSVDDVIAQVKQIVGDMPVYLTFDIDCLDPAFAPGTGTPVIGGLTSDRAIKLVRGLKDLNIVGMDVVEVAPAYDQSEITALAAATLALEMLYIQAAKKGE

SEQ ID NO: 10398 - protein, 365 aa, Klebsiella pneumoniae subsp. pneumoniae MGH 78578
MLKVIQSPAKYLQGPDAAVLFGQYAKNLAESFFVIADDFVMKLAGEKVVNGLQSHDIRCHAERFNGECSHAEINRLMAILQKQGCRGVVGIGGGKTLDTAKAIGYYQKLPVVVIPTIASTDAPTSALSVIYTEAGEFEEYLIYPKNPDMVVMDTAIIAKAPVRLLVSGMGDALSTWFEAKACYDARATSMAGGQSTEAALSLARLCYDTLLAEGEKARLAAQAGVVTEALERIIEANTYLSGIGFESSGLAAAHAIHNGFTILEECHHLYHGEKVAFGTLAQLVLQNSPMDEIETVLGFCQRVGLPVTLAQMGVKEGIDEKIAAVAKATCAEGETIHNMPFAVTPESVHAAILTADLLGQQWLAR

SEQ ID NO: 10399 - protein, 447 aa, Klebsiella pneumoniae subsp. pneumoniae MGH 78578
MTTILKHLPVGQRIGIAFSGGLDTSAALLWMRKKGAVPYAYTANLGQPDEDDYDAIPRRAKEYGAEGARLIDCRKQLVAEGIAAIQCGAFHNTTGGLTYFNTTPLGRAVTGTMLVAAMKEDGVNIWGDGSTYKGNDIERFYRYGLLTNAELQIYKPWLDSDFINELGGRHEMSEFMIACGFDYKMSVEKAYSTDSNMLGATHEAKDLEFLNSSVKIVNPIMGVKFWDENVKIPAEEVTVRFEQGHPVALNGKTFADDVEMMLEANRIGGRHGLGMSDQIENRIIEAKSRGIYEAPGMALLHIAYERLLTGIHNEDTIEQYHAHGRQLGRLLYQGRWFDSQALMLRDSLQRWVASQITGEVTLELRRGNDYSILNTVSDNLTYKAERLTMEKGDSMFTAEDRIGQLTMRNLDITDTREKLFGYAQSGLLSASSATGLPQVENLENKGK

SEQ ID NO: 10400 - protein, 392 aa, Klebsiella pneumoniae subsp. pneumoniae MGH 78578
MKFVDEATILVVAGDGGNGCVSFRREKYIPKGGPDGGDGGDGGDVWLEADENLNTLIDYRFEKSFRAERGQNGQSRDCTGKRGKDVTVKVPVGTRVIDQGTGETMGDMTKHGQRLMVAKGGWHGLGNTRFKSSVNRTPRQKTMGTPGDKRDLQLELMLLADVGMLGMPNAGKSTFIRAVSAAKPKVADYPFTTLVPSLGVVRMDNEKSFVVADIPGLIEGAAEGAGLGIRFLKHLERCRVLLHLIDIDPIDGSDPVENARIIIGELEKYSEKLASKPRWLVFNKIDLMDKAEAEAKAKAIAEALGWEEKFYLISAASQQGVKELCWDVMTFIIENPIVQAEEEQKPEKVEFMWDDYHRQQLEEAEAEAEDDEDWDDDWDEDDEEGVEFIYKR

SEQ ID NO: 10401 - protein, 103 aa, Klebsiella pneumoniae subsp. pneumoniae MGH 78578
MYAVFQSGGKQHRVSEGQTVRLEKLDIATGEAVEFAEVLMIANGEEIKIGVPFVEGGVIKAEVVAHGRGEKVKIVKFRRRKHYRKQQGHRQWFTDVKITGISA

SEQ ID NO: 10402 - protein, 334 aa, Klebsiella pneumoniae subsp. pneumoniae MGH 78578
MIRDNIMSQIDLPTDFDFQQAGRQVLEIEREGLAQLDQYINEDFTHACETIFRCGGKVVVMGMGKSGHIGRKMAATFASTGTSAFFVHPGEAAHGDLGMVTPQDVVIALSNSGESNEILALIPVLKRQQVKLICITSRPESSMARAADIHLCVKVPKEACPLGLAPTSSTTAALVMGDALAVALLEARGFTAEDFALSHPGGALGRKLLLRVNDIMHTGDEIPHVGLQATLRDALLEITRKNLGMTAICDDDMNIIGIFTDGDLRRVFDTGVDMRDASIADVMTRGGIRIRPGTLAVDALNLMQSRHITCVLVADGDHLLGVVHMHDLLRAGVV

SEQ ID NO: 10403 - protein, 1448 aa, Klebsiella pneumoniae subsp. pneumoniae MGH 78578
MQHRGAILADGKTGDGCGLLLQKPDRFFRIVAEERGWRLAKNYAVGMLFLNKDPELAKAARRIVEEELQLETLSIVGWRDVPTNEGVLGEIALSSLPRIEQIFVNAPAGWRPRDMERRLFIARRRIEKRLQEDKDFYVCSLSNLVNIYKGLCMPADLPRFYLDLADLRLESAICLFHQRFSTNTVPRWPLAQPFRYLAHNGEINTITGNRQWARARTYKFQTPLIPDLHDAAPFVNETGSDSSSMDNMLELLLAGGMDIVRAMRLLVPPAWQNNPDMDPELRSFFDFNSMHMEPWDGPAGIVMSDGRYAACNLDRNGLRPARYVITKDKLITCASEVGIWDYQPDEVVEKGRVGPGELMVIDTRAGRILHSAETDDDLKSRHPYKEWMEKNVRRLVPFEDLPDEEVGSRQLDDDTLASYQKQFNYSAEELDSVLRVLGENGQEAVGSMGDDTPFAVLSSQPRIIYDYFRQQFAQVTNPPIDPLREAHVMSLATSIGREMNVFCEAEGQAHRLSFKSPILLYSDFKQLTTMEEEHYRADVLDITFNPAEASLSETVKALCDKAEQMVRDGTVLLVLSDRNIAKDRLPVPAPMAVGAIQTRLVDKSLRCDANIIVETASARDPHHFAVLLGFGATAIYPYLAYETLAKLVDSKAIDKPYRAVMLNYRNGINKGLYKIMSKMGISTIASYRCSKLFEAVGLHRDVSDLCFQGVVSRIGGASFDDFQQDLLNLSKRAWLARKPLAQGGLLKYVHGGEYHAYNPDVVRTLQQAVQSGEYSDYQQYAKLVNERPAATLRDLLALNPGEDAISIDEVEPAKELFKRFDTAAMSIGALSPEAHESLAEAMNSIGGFSNSGEGGEDPARYGTNKVSRIKQVASGRFGVTPAYLVNADVIQIKVAQGAKPGEGGQLPGDKVTPYIAKLRYSVPGVTLISPPPHHDIYSIEDLAQLIFDLKQVNPKAMISVKLVSEPGVGTIATGVAKAYADLITIAGYDGGTGASPLSSVKYAGCPWELGLVETQQALVANGLRHKIRLQVDGGLKTGLDIIKAAILGAESFGFGTGPMVALGCKYLRICHLNNCATGVATQDDKLRKNHYHGLPFKVTNYFEFIARETRELMAQLGVKRLVDLIGRTDLLKELDGFTAKQQKLDLGKLLETAEPHPGKALYCTENNPPFDNGVLNAQLLQQAKPYVDEKQSKTFWFDIRNTDRSVGASLSGYIAQTHGDQGLAGDPIVAHFSGTAGQSFGVWNAGGVELHLTGDANDYVGKGMAGGLLAIRPPVGSAFRSHEASIIGNTCLYGATGGRLYAAGRAGERFAVRNSGAITVVEGIGDNGCEYMTGGIVCVLGKTGVNFGAGMTGGFAYVLDEDGDFRKRVNPELVEVLDVDSLAIHEEHLRGLITEHVQLTGSQRGEEILANWPAFSAKFALVKPKSSDVKALLGHRSRSAAELRVQAQ

SEQ ID NO: 10404 - protein, 484 aa, Klebsiella pneumoniae subsp. pneumoniae MGH 78578
MMQFEVIIPLIAYLVVVFGLSLYAMRKRASGSFLNEYFLGSRSMGGFVLAMTLTATYISASSFIGGPGAAYKYGLGWVLLAMIQLPAIWLSLGVLGKKFAILARRYNAVTLNDMLFARYQSRLLVWLASLSLLVAFVGAMTVQFIGGARLLETAAGIPYDTGLLIFGVSIALYTAYGGFRASVLNDTMQGMVMLIGTIVLLVGVIHAAGGVGHAVETLQSIDVKLVSPQGAEDILSPTFMASFWVLVCFGVIGLPHTAVRCISYKDSKAVHRGIIIGTIVVAILMFGMHLAGALGRAVIPDLTVPDLVIPTLMVKVLPPFAAGIFLAAPMAAIMSTINAQLLQSSATIIKDLYLNWRPDQATNEKRLKRMSAGITLLLGVLLLLAAWRPPEMIIWLNLLAFGGLEAVFLWPLVLGLYWERANAAGALSAMIVGGVLYAVLATLKVQFLGFHPIVPALLLSLLAFVAGNRFGRPAPQPPILTTDK

SEQ ID NO: 10405 - protein, 275 aa, Klebsiella pneumoniae subsp. pneumoniae MGH 78578
MKKNRAFLKWAGGKFPLLDDIKKHLPEGECLIEPFVGAGSVFLNTDFSRYILADINSDLIGLYNIVKLRTDEYVAAAREMFTPENNVAERYYLYRDEFNQSQDPLRRAVLFLYLNRHGYNGLCRYNLRGEFNVPFGRYKKPYFPEAELYHFAEKAQNAEFYCESYEECMQRADSRTVVYCDPPYAPLTATANFTAYHTNSFNLEQQVLLAQKAESLMKKRIPVLISNHRTPLTQEWYKNAAETHIVKVRRSISSNGGTRKKVDELLALYRPPKTK

SEQ ID NO: 10406 - protein, 425 aa, Klebsiella pneumoniae subsp. pneumoniae MGH 78578
MKPMQIAMALLSAVMFFILAGVFMGVQLELNGTKLVVDTAADIRWQWIFIGTAVVFFFQLLRPLFQKAVKNVSGPKFIMPAIDGSTVKQKLFLIALLVIAVAWPFMVSRGTVDIATLTMIYIILGLGLNVVVGLSGLLVLGYGGFYAIGAYTFALLNHYYGLGFWTCLPLAGLVSAAAGFLLGFPVLRLRGDYLAIVTLGFGEIVRILLLNNTEITGGPNGISQIPKPTFFGLEFSRSAREGGWDTFSNFFGVKYDPSDRVIFLYLVALLLVVLSLFVINRLLRMPLGRAWEALREDEIACRSLGLSPTRIKLTAFTISAAFAGFAGTLFAARQGFVSPESFTFAESAFVLAIVVLGGMGSQFAVILAAILLVVSRELMRDFNEYSMLMLGGLMVLMMIWRPQGLLPMTRVQLKLKNGQAKGEQA

SEQ ID NO: 10407 - protein, 323 aa, Klebsiella pneumoniae subsp. pneumoniae MGH 78578
MKPSVILYKTLPDDLLQRLEEHFSVTQVKNLRPETVSQHAEAFAQAEGLLGSSEKVDAALLEKMPKLRATSTVSVGYDNFDVEALNARRVLLMHTPTVLTETVADTVMALVLSTARRVVEVAERVKAGEWTKSIGPDWFGTDVHHKTLGIVGMGRIGMALAQRAHFGFGMPILYNARRQHPQAEERFNARYCDLDTLLQEADFVCLILPLSEETHHLFGQAQFAKMKSSAIFINAGRGPVVDEQALIAALQNGEIHAAGLDVFEHEPLAKDSPLLSLPNVVALPHIGSATHETRYNMAACAVDNLIDALNGNVEKNCVNPQVK

SEQ ID NO: 10408 - protein, 400 aa, Klebsiella pneumoniae subsp. pneumoniae MGH 78578
MFHLDTLSTLVAATLVLLLGRKLVQTVPFLKKYTIPEPVAGGLLVALALLALKKSMDIEIDFDMSLKDPLMLAFFATIGLNANLASLRAGGKVLGTFLIVVVGLLLLQNALGIGMATLLGLDPLMGLLAGSITLSGGHGTGAAWSKLFVERYGFANATEVAMACATFGLVLGGLIGGPVARYLVKHSSSPDGTPDDQVAPTAFEKPDVGRVITSLVLIESIALIAICLTLGKVVAQLLAGSVFELPTFVCVLFIGVILSNSLALAGLYRVFDRAVSVLGNVSLSLFLAMALMSLKLWELASLALPMIIILAVQALAMALYAVFVTYRMMGKNYDAAVLAAGHCGFGLGATPTAIANMQAITDRFGPSHMAFLVVPMVGAFFIDIVNALVIKLYLLLPMFG

SEQ ID NO: 10409 - protein, 552 aa, Klebsiella pneumoniae subsp. pneumoniae MGH 78578
MRFTGAQLVVHLLERQGITMVSGIPGGSILPIYDALSQSTQIRHILARHEQGAGFIAQGMARTEGKPAVCMACSGPGATNLVTAIADARLDSIPLVCITGQVPASMIGTDAFQEVDTYGISIPITKHNYLVRDIAELPQVISDAFRIAQSGRPGPVWIDIPKDVQSATIELEALPEPGERAPAPAFAPESVREAAAMINAAKRPVLYLGGGVINAPQAIRELAEKANLPTTMTLMALGMLPKAHPLSLGMLGMHGARSTNFILQEADLLIVLGARFDDRAIGKTEQFCPNAKIIHVDIDRAELGKIKQPHVAIQGDVAEVLAQLNPQIEAQPREEWRQLVADLQREFPCAIPQESDPLSHYGLINAVAACVDDEAIITTDVGQHQMWTAQAYPLNRPRQWLTSGGLGTMGFGLPAAIGAALANPQRKVICFSGDGSLMMNIQEMATAAENQLDVKIILLNNEALGLVHQQQSLFYQQGVFAATYPGMINFMQIAAGFGLQTCDLNNEVDPQAALQAIIDRPGPALIHVRIDAQQKVYPMVPPGAANTEMVGE

SEQ ID NO: 10410 - protein, 548 aa, Klebsiella pneumoniae subsp. pneumoniae MGH 78578
MDSQRNLLIIALLFVSFMIWQAWEQDKNPQPQQQTTQTTTTAAGSAADQGVPASGQGKLITVKTDVLELTINTNGGDIEQALLLAYPKTLKSTEPFQLLETTPQFVYQAQSGLTGRDGPDNPANGPRPLYNVDKEAFVLADGQDELVIPLTYTDKAGNVFTKTFTLKRGGYAVNVGYSVQNASEKPLEVSTFGQLKQTAALPTSRDTQTGGLSTMHTFRGAAFSTADSKYEKYKFDTILDNENLNVSTKNGWVAMLQQYFTTAWVPRNNGTNNFYTANLGNGVVAIGYKSQPVLVQPGQTDKLQSTLWVGPAIQDKMAAVAPHLDLTVDYGWLWFISQPLFKLLKFIHSFLGNWGFSIIVITFIVRGIMYPLTKAQYTSMAKMRMLQPKIQAMRERLGDDKQRQSQEMMALYKAEKVNPLGGCFPLIIQMPIFLALYYMLSASVELRHAPFILWIHDLSAQDPYYILPIIMGATMFFIQKMSPTTVTDPMQQKIMTFMPVIFTVFFLWFPSGLVVYYIVSNLVTIIQQQLIYRGLEKRGLHSREKKKS

SEQ ID NO: 10411 - protein, 330 aa, Klebsiella pneumoniae subsp. pneumoniae MGH 78578
MKTAYIAKQRQISFVKSHFSRQLEEKLGLIEVQAPILSRVGDGTQDNLSGCEKAVQVKVKTLPDAQFEVVHSLAKWKRQTLGQHDFSAGEGLYTHMKALRPDEDRLTPIHSVYVDQWDWERVMGDEERHVGTLKATVEAIYAGIKATELAVSQEFGLTPFLPEQIHFVHSQELLSRYPELDAKGRERAIAKELGAVFLIGIGGKLADGKRHDVRAPDYDDWSTEVSEGFAGLNGDILVWNPVLEDAFEISSMGIRVDAEALKRQLALTGDEDRLKLEWHQALLRGEMPQTIGGGIGQSRLTMLLLQLDHIGQVQCGVWPAQVRESVSALL

SEQ ID NO: 10412 - protein, 232 aa, Klebsiella pneumoniae subsp. pneumoniae MGH 78578
MNKILLVDDDRELTSLLKELLDMEGFNVLVAHDGEQALALLDDSVDLLLLDVMMPKKNGIDTLKELRQTHQTPVIMLTARGSELDRVLGLELGADDYLPKPFNDRELVARIRAILRRSHWSEQQQTTEAGSPTLEVDALSLNPGRQEANFDGQTLELTGTEFTLLYLLAQHLGQVVSREHLSQEVLGKRLTPFDRAIDMHISNLRRKLPERKDGHPWFKTLRGRGYLMVSAS

SEQ ID NO: 10413 - protein, 810 aa, Klebsiella pneumoniae subsp. pneumoniae MGH 78578
MSVIAQAGAKGRQLHKFGGSSLADAKCYLRVAGIMKEYSQAGDMMVVSAAGSTTNQLISWLKLSQSDRLAAHQVQQSLRRYHTELIGGLLEPAAADTLIAAFIHDLERLAGLLDGGVSEAVYAEVVGHGEVWSARLMAAVLNQLGMEAAWLDARAFLRAERAAQPQVDEGLSYPLLQQLMAQHPNKRLVVTGFISRNQAGETVLLGRNGSDYSATQIGALAGASRVTIWSDVAGVYSADPRKVKDACLLPLLRLDEASELARLAAPVLHARTLQPVSASDIDLQLRCSYTPEQGSTRIERVLASGTGARIVTSHDDVCLVEFQVPAGHDFKLAHKELDALLKRAQLRPLAVGVHADRKLLQFCYTSEVADSALKLLDEAGLPGELRLRQKLALVAMVGAGVTRNPLHCHRFWQQLKGQPVEFTWQSEEGISLVAVLRAGPTESLIQGLHQSLFRAEKRIGLMLFGKGNIGSRWLELFAREQTTLSARTGFEFILAGVVDSKRSLLNYDGLDASRALAFFNDEAVEQDEESLFLWMRAHPYDDLVVLDVTASEQLADQYLDFASHGFHVISANKLAGASSSDKYRQIHDAFEKTGRHWLYNATVGAGLPVNHTVRDLIDSGDTILGLSGIFSGTLSWLFLQFDGTVPFTDLVDQAWQQGLTEPDPRVDLSGKDVMRKLVILAREAGYDIEPDQVRVESLVPAHCEEGSVDHFFENGEELNEQMLQRLEAAREMGLVLRYVARFDANGKARVGVEAVREEHPLAALLPCDNVFAIESRWYRDNPLVIRGPGAGRDVTAGAIQSDINRLAQLL

SEQ ID NO: 10414 - protein, 367 aa, Klebsiella pneumoniae subsp. pneumoniae MGH 78578
MDRIIQSPGKYIQGTGAIKRLGDYLKPLAERWLVVGDKFVLGFAEEMLRKSLADAGLAAEIAPFGGECSHNEINRLRDIAGNAKCTAVLGIGGGKTLDTAKALAHFMNVPVAIAPTIASTDAPCSALSVIYTDEGEFDSYLMLPRNPNMVIVDTQIVAGAPARLLAAGIGDALATWFEARACSRSGATTMAGGKCTQAALALAELCYNTLLEEGEKAMLAAEQHVVTPALERVVEANTYLSGVGFESGGLAAAHAIHNGMTAIPDAHHYYHGEKVAFGTLTQLVLENAPVDEIETVAALCHSVGLPITLAQLDIKGDIPTKMRLVAEAACAEGETIHNMPGGVDSDQVYAALLVADQYGQRFLQEWE

SEQ ID NO: 10415 - protein, 220 aa, Klebsiella pneumoniae subsp. pneumoniae MGH 78578
MELYLDTANVAEVERLARIYPLAGVTTNPSIIAAGKVPVWDVLPRLQKAVGPEGTLFAQTMSRDAQGMVEEAKRLSNAVPGIVVKIPVTAEGLAAIKLLKKEGIPTLGTAVYSASQGLLAALAGAKYVAPYVNRVDAQGGDGIRMVQELQSLLEMHAPESKVLAASFKTPRQALDCLLAGCEAITLPLDVAQQMLGTPAVESAIEKFEQDWNNAFGALNL

SEQ ID NO: 10416 - protein, 387 aa, Klebsiella pneumoniae subsp. pneumoniae MGH 78578
MEQVVIVDAIRTPMGRSKGGAFRHVRAEDLSAHLMRSLLSRNPSLEASAIDDIYWGCVQQTLEQGFNIARNAALLAEIPHSVPANTVNRLCGSSMQALHDAARMIMTGDAGVCLIGGVEHMGHVPMSHGVDFHPGLSRNVAKAAGMMGLTAEMLARLHGISREMQDQFAARSHARAWAATQSGAFKAEIIPTGGHDADGVLKSFNYDEVIRPETTVETLSTLKPAFDPVTGTVTAGTSSALSDGAAAMLLMSESRARELGLKPRARVRSMAVVGCDPSIMGYGPVPASKLALKKAGLSTSDIDVFEMNEAFAAQILPCIKDLGLMEQIDEKINLNGGAIALGHPLGCSGARISTTLINQMERKDAQFGLATMCIGLGQGIATVFERV

SEQ ID NO: 10417 - protein, 449 aa, Klebsiella pneumoniae subsp. pneumoniae MGH 78578
MTDLVVAKFGGTSVADFDAMNRSIDVALLDANTRIVVLSASAGVTNILVALAGGLEPTERFSQLDALRQIQFNILERLRYPNVIREEIERLLENITTLAEAAALASSTALTDELVSHGELMSTLLFVEILRERGIQAQWFDARKVLRTNDRFGRAEPDIAAVAELTQQQLAPRLAEGLVVTQGFIGSEAKGRTTTLGRGGSDYTAALLGEALNATRVDIWTDVPGIYTTDPRVAPAAKRIDVIAFEEAAEMATFGAKVLHPATLLPAVRSDIPVFVGSSKEPKAGGTLVCKTTENPPLFRALALRRRQTLLTLHSLNMLHSRGFLAEVFGILARHNISVDLITTSEVSVALTMDTTGSTSAGDTLLTQALLTELSSLCRVEVEENLALVALIGNELSKACGVGKEVFGVLEPFNIRMICYGASSHNLCFLVPGDDAEKVVQKLHHNLFE

SEQ ID NO: 10418 - protein, 551 aa, Klebsiella pneumoniae subsp. pneumoniae MGH 78578
MIKRVLTALAATLLPLGAHAADAITGAVQRQPTNWQAIVMFLIFVALTLYITYWASKRVRSRSDYYTAGGNITGFQNGLAIAGDFMSAASFLGISALVYTSGYDGLIYSLGFLVGWPIILFLIAERLRNLGRYTFADVASYRLKQGPIRTLSACGSLVVVALYLIAQMVGAGKLIQLLFGLNYHVAVVLVGVLMVLYVLFGGMLATTWVQIIKAVLLLCGASFMAFMVMKHVGFSFNNLFTEAMAVHPKGAAIMSPGGLVKDPISALSLGLGLMFGTAGLPHILMRFFTVSDAKEARKSVFYATGFMGYFYILTFIIGFGAIMLVGANPAFKDAAGQLIGGNNMAAVHLADAVGGNLFLGFISAVAFATILAVVAGLTLAGASAVSHDLYANVFRKGATERQELKVSKITVLILGVVAILLGILFENQNIAFMVGLAFSIAASCNFPIILLSMYWSKLTTRGAMVGGWLGLLTAVILMILGPTIWVQILGHEKALFPYEYPALFSIAIAFIGIWVFSATDNSPEGMREREQFRAQFIRSQTGIGIERGQAH

SEQ ID NO: 10419 - protein, 336 aa, Klebsiella pneumoniae subsp. pneumoniae MGH 78578
MLPKLVITHRVHDEILQLLAPHCELVTNQTDSTLTREEILRRCRDAQAMMAFMPDRVDADFLQACPELRVVGCALKGFDNFDVDACTARGVWLTFVPDLLTVPTAELAIGLAVGLGRHLRAADAFVRSGEFQGWQPQFYGTGLDNATVGILGMGAIGLAMAERLQGWGATLQYHEAKALDTQTEQRLGLRQVACSELFASSDFILLALPLNADTQHLVNAELLALVRPGALLVNPCRGSVVDEAAVLAALERGQLGGYAADVFEMEDWARADRPRLIDPALLAHPNTLFTPHIGSAVRAVRLEIERCAAQNIIQVLAGARPINAANRLPKAEPAAC

SEQ ID NO: 10420 - protein, 667 aa, Klebsiella pneumoniae subsp. pneumoniae MGH 78578
MIMSDNDTIPKKSTSQINKAVFFTSALLIFLLVAFAAVFPDVADKNFKLLQQQIFTNASWFYILAVALILLSVTFLGLSRYGDIKLGPDHAQPDFSYHSWFAMLFSAGMGIGLMFFGVAEPVMHYLSPPVGTPETVAAAKEAMRLTFFHWGLHAWAIYAIVALILAFFSYRHGLPLTLRSALYPIIGDRIYGPVGHAVDIFAVIGTVFGVATSLGYGVLQVNAGLNHLFGVPINETVQVILIVVITGLATISVVSGLDKGIRILSELNLGLALLLLALVLCLGPTVLLLKSFVENTGGYLSELVSKTFNLYAYEPKSSKWLGGWTLLYWGWWLSWSPFVGMFIARVSRGRTIREFVTGVLFVPAGFTLMWMTVFGNSAIYLIMNQGATDLANTVQQDVALALFNFLEHFPFSSVLSFIAMAMVIVFFVTSADSGAMVVDTLATGGVANTPVWQRIFWASLMGIVAIALLLAGGLSALQTVTIASALPFSVILLISIYGLLKALRRDLTKRESLSMATIAPTAARNPIPWQRRLRNIAYLPKRSLVKRFMDDVIQPAMTLVQEELNKQGTISHISDAVEDRIRLEVDLGNELNFIYEVRLRGYSSPTFALAAMDNNEQQTEQHRYYRAEVYLKEGGQNYDVMGWNQEQLINDILDQYEKHLHFLHLVR

SEQ ID NO: 10421 - protein, 1486 aa, Klebsiella aerogenes
MLYDKSLERDNCGFGLIAHIEGEPSHKVVRTAIHALARMQHRGAILADGKTGDGCGLLLQKPDRFFRIVAEERGWRLAKNYAVGMLFLNKDPELAKAARRIVEEELQLETLSIVGWRDVPTNEGVLGEIALSSLPRIEQIFVNAPAGWRPRDMERRLFIARRRIEKRLQEDKDFYVCSLSNLVNIYKGLCMPADLPRFYLDLADLRLESAICLFHQRFSTNTVPRWPLAQPFRYLAHNGEINTITGNRQWARARTYKFQTPLIPDLHDAAPFVNETGSDSSSMDNMLELLLAGGMDIVRAMRLLVPPAWQNNPDMDPELRSFFDFNSMHMEPWDGPAGIVMSDGRYAACNLDRNGLRPARYVITKDKLITCASEVGIWDYQPDEVVEKGRVGPGELMVIDTRAGRILHSAETDDDLKSRHPYKEWMEKNVRRLVPFEDLPDEEVGSRQLDDDTLASYQKQFNYSAEELDSVLRVLGENGQEAVGSMGDDTPFAVLSSQPRIIYDYFRQQFAQVTNPPIDPLREAHVMSLATSIGREMNVFCEAEGQAHRLSFKSPILLYSDFKQLTTMEEEHYRADVLDITFNPAEASLSETVKALCDKAEQMVRDGTVLLVLSDRNIAKDRLPVPAPMAVGAIQTRLVDKSLRCDANIIVETASARDPHHFAVLLGFGATAIYPYLAYETLAKLVDSKAIDKPYRAVMLNYRNGINKGLYKIMSKMGISTIASYRCSKLFEAVGLHRDVSDLCFQGVVSRIGGASFDDFQQDLLNLSKRAWLARKPLAQGGLLKYVHGGEYHAYNPDVVRTLQQAVQSGEYSDYQQYAKLVNERPAATLRDLLALNPGEDAISIDEVEPAKELFKRFDTAAMSIGALSPEAHESLAEAMNSIGGFSNSGEGGEDPARYGTNKVSRIKQVASGRFGVTPAYLVNADVIQIKVAQGAKPGEGGQLPGDKVTPYIAKLRYSVPGVTLISPPPHHDIYSIEDLAQLIFDLKQVNPKAMISVKLVSEPGVGTIATGVAKAYADLITIAGYDGGTGASPLSSVKYAGCPWELGLVETQQALVANGLRHKIRLQVDGGLKTGLDIIKAAILGAESFGFGTGPMVALGCKYLRICHLNNCATGVATQDDKLRKNHYHGLPFKVTNYFEFIARETRELMAQLGVKRLVDLIGRTDLLKELDGFTAKQQKLDLGKLLETAEPHPGKALYCTENNPPFDNGVLNAQLLQQAKPYVDEKQSKTFWFDIRNTDRSVGASLSGYIAQTHGDQGLAGDPIVAHFSGTAGQSFGVWNAGGVELHLTGDANDYVGKGMAGGLLAIRPPVGSAFRSHEASIIGNTCLYGATGGRLYAAGRAGERFAVRNSGAITVVEGIGDNGCEYMTGGIVCVLGKTGVNFGAGMTGGFAYVLDEDGDFRKRVNPELVEVLDVDSLAIHEEHLRGLITEHVQLTGSQRGEEILANWPAFSAKFALVKPKSSDVKALLGHRSRSAAELRVQAQ

SEQ ID NO: 10422 - protein, 289 aa, Arabidopsis thaliana
MEVGFLGLGIMGKAMSMNLLKNGFKVTVWNRTLSKCDELVEHGASVCESPAEVIKKCKYTIAMLSDPCAALSVVFDKGGVLEQICEGKGYIDMSTVDAETSLKINEAITGKGGRFVEGPVSGSKKPAEDGQLIILAAGDKALFEESIPAFDVLGKRSFYLGQVGNGAKMKLIVNMIMGSMMNAFSEGLVLADKSGLSSDTLLDILDLGAMTNPMFKGKGPSMTKSSYPPAFPLKHQQKDMRLALALGDENAVSMPVAAAANEAFKKARSLGLGDLDFSAVIEAVKFSRE

SEQ ID NO: 10423 - protein, 511 aa, Leucaena leucocephala
MDSLLLHLQPLAMALLFAIPLLLLLGLLSRFRKRPPYPPGPKGLPIIGNMAMMDQLTHRGLAKLANLYGGILHLRMGFLHMVAISDADSARQVLQVHDNIFSNRPATIAISYLTYVRADMAFAHYGPFWRQMRKICVMKLFSRKRAESWQSVQDEVETVVRTVGANTGKEVNIGELVFSLTKNITYRAAFGSSSREGQDEFIGILQEFSKLFGAFNIADFIPSLSWVDPQGLNARLAKARGSLDSFIDKIIDEHMQNKKKEDEEGDMVDELLAFYSEDHSKVSESDDLHNSIKLTKDNIKAIIMDVMFGGTETVASAIEWAMAELMRSPEDLKRVQRELAEVVGLDRRVQESDMEKLTYLKCALKETLRLHPPIPLLLHETAEDAVVSGYFVPKKSRVMINAWAIGRDRNAWEDPDSFKPARFLGEGVPDFKGSNFEFIPFGSGRRSCPGMQLGLYALEMAVAHLLHCFSWELPDGMKPSEMDMSDVFGLTAPRASRLVAVSRKRLVCPLF

SEQ ID NO: 10424 - protein, 604 aa, Cucumis sativus
MEIESLRVSVDEKVLKDEEKNEKEEMKMKMKMKRKLGGVKTMPFILGNEVCDRFASSGFHSNIITYLTQDLNMPLVPASNILTNFAATSSFTSLIGALIADSFAGRFWTITIASIIYELGMVTITISAILPSLHPPPCPTQINCTQASGTQLMILYLALLLTSLGAGGIRPCVVAFAADQFDMTKVGIAGRTWNFFNWYYFCMGMATLTALTVVVYIQDNVGWGWGFGLPTIAMALSVVAFVVGSPLYNKLKPSGSPLVRLAQVVVAAFKNRKAVLPDDSKLLYRNHELDAAIAIQGRLVHTDQFKWLDKAAVITSPDSTANPPNLWRLATVHRVEELKSIIRMLPIWAAGILLVTASSHQHSFTIQQARTMNRHLTPTFQIPPATLSIFGILSMLTGLVLYDRLLVPFAKKLTHNPSGITCLQRMGVGFAINILATLVSSIVEIKRKKVAANHGLLDNPTATIPFSVFWLVPQFWLHGIAEVFMSVGHLEFMYDQSPESLRSTATALYWLAISVGNYIGTLMVYLVHKYTGEEHNWLPDRNLNRGRLEYYYWLVSGIQVMNLVYYVICAWFYTYKPLEEEKINIENKDGDQEWERCEDTIKIA

SEQ ID NO: 10425 - protein, 269 aa, Salmonella enterica subsp. enterica serovar Typhimurium
MFTDSINKCAAKLRASAPVSANNPLGFWVSSAMAGAYVGLGIILIFTLGNLLDPSVRPLVMGATFGIALTLVIIAGSELFTGHTMFLTLGVKAGTISHGQMWAILPQTWLGNLVGSVFVALLYSWGGGSLLPVDTSIVHSVALAKTTAPATVLFFKGALCNWLVCLAIWMAIRTEGTAKFLAIWWCLLAFIASGYEHSVANMTLFALSWFGHHSDAYTLAGIGHNLLWVTLGNTLSGVVFMGLGYWYATPKSERPAPAKINQPEAAANN

SEQ ID NO: 10426 - protein, 431 aa, Spinacia oleracea
MAQILAPSMQCQMKLSKGLTSSMTPSPWTSILLKQGQKGSIKCSTKFRVCASLQSDHGTVNRVEQLLNLDVTPYTDKIIAEYIWIGGTGIDLRSKSRTLSKPVEHPSELPKWNYDGSSTGQAPGQDSEVILYPQAIFKDPFRGGNNILVICDAYTPAGEPIPTNKRHKAAEIFNNQKVASEVPWFGIEQEYTLLQPNVSWPLGWPVGAYPGPQGPYYCGVGADKSFGRDVSDAHYKACLYAGINISGTNGEVMPGQWEFQVGPSVGIEAGDHVWCARYLLERITEQIGVVMTLDPKPIEGDWNGAGCHTNYSTKTMREEGGFEVIKKAILNLSLRHKDHISAYGEGNERRLTGKHETADINTFSWGVANRGCSIRVGRDTEKEGKGYLEDRRPASNMDPYVVTGLLAETTILWEPTLEAEALAAQKLSLNV

SEQ ID NO: 10427 - protein, 529 aa, Mycosphaerella pini
MKWYSKDNITGIATAASDAGSSYGNHGDDLAQGGLQDGGAHPSKRQIGVISASFLIFNRMIGTGIFATPSGILSLTGSVGLSLVMWVAGMLIAAAGMAVYLEFGTAIPKNGGEKNYLEYVFRRPRFAATGFYTGYVLLLGWAGSNSVVFGEYILNAANVEVGRWNQRGVGLACITAAFLIHGLALKWGLRLQNLLGIIKLIVILIIVVSGWAALGGALKIEKPHNFDNAFEGTTGSAYGVVTALYNVIWSYIGYSNANYALSETRNPVKTLRLAAPLALGSVAVLYMLVNIAYFAAVPKEEILSSGRILAASFFRNVFGGSAERALSVFVALSAFGNVLSVIFSQGRLVQELGREGILPFSRFWASNRPFNAPLAGLFEHWLVSVIIMLAPPPGDAYNFILNVISYPLAIVNSFVASGLLYLYWNKAEWNWSPPFKATWPVALFFFLSNVYLVVAPFVPPTDGNAIYETLPYYLHCVVGWGIIAGGGVYWLMWAIILPKIGKYELVREEHVDELDGWSRYQFVRRPLAN

SEQ ID NO: 10428 - protein, 441 aa, Salmonella enterica subsp. enterica serovar Typhimurium
MIRGKIDILVVDDDVSHCTILQALLRGWGYNVALAYSGHDALAQVREKVFDLVLCDVRMAEMDGIATLKEIKALNPAIPILIMTAFSSVETAVEALKAGALDYLIKPLDFDRLQETLEKALAHTRETGAELPSASAAQFGMIGSSPAMQHLLNEIAMVRPSDATVLIHGDSGTGKELVARALHACSARSDRPLVTLNCAALNESLLESELFGHEKGAFTGADKRREGRFVEADGGTLFLDEIGDISPLMQVRLLRAIQEREVQRVGSNQTISVDVRLIAATHRDLAEEVSAGRFRQDLYYRLNVVAIEMPSLRQRREDIPLLADHFLRRFAERNRKVVKGFTPQAMDLLIHYDWPGNIRELENAIERAVVLLTGEYISERELPLAIAATPIKTEYSGEIQPLVDVEKEVILAALEKTGGNKTEAARQLGITRKTLLAKLSR

SEQ ID NO: 10429 - protein, 547 aa, Acinetobacter calcoaceticus
MYLYTDFDQQLINQRVAQFRDQTERYLAGKLTEDEYRPLRLQNGLYVQRYAPMLRIAVPYGLMNTKQLRKIAEIATEYDRGYAHVSTRQNIQLNWPALENVPDILAELATVQMHAVQTSGNCIRNTTTDQFAGVVAGEIADPRPTCELIRQWSTFHPEFAFLPRKFKIAVSALEEKDRAATAFHDIGVYIVRNDAGEIGYKIMAGGGLGRTPIIGSVIREFLPREDLIAYLEATLRVYNLHGRRDNKYKARIKILVKALTPEVFAQKVEAEFEHTREALKIQPEILKKLDEEFTPFDYQDLEDQDFTTLFAEHPKFKQWFNVNTNAHKVKGYRIVTISLKRAGVAPGDMTTEEMNLIADLADKYTFGEFRTTHEQNISLVDVPQKDLFELWQTLEHHNMARAHIGFITDIICCPGGDFCSLANAKSIPISEAISRRFDDLDTIYNLGELDLNISGCMNACGHHHVGNIGILGVDKKGAEFYQITLGGHADHDASLGDILGPSFAADAVPDVIEEILNTYLDLRTEGERFIDTYRRVGIQPFKERAYA

SEQ ID NO: 10430 - protein, 610 aa, Lactobacillus acidophilus
MSKIIGIDLGTTNSAVAVLEGKEPNIITNPEGNRTTPSVVAFKDGEIQVGEVAKRQAITNPNTIVSIKRHMGEADYKVKVGDKYYTPQEISAFILQYIKKFSEELLGEEVKDAVITVPAYFNDAQRQATKDAGKIAGLNVQRIINEPTASALAYGLDKDDDDQKVLVYDLGGGTFDVSVLQLGDGVFQVLSTNGDTHLGGDDFDEPHMDWLIKNFKDENGVDLSKDKMAMQRLKDASEKAKKDLSGVSSTHISLPFISAGESGPNFTLKLISTRAKFDELTNDLVEKTKIPFDNALKDAGLTVNDIDKVILNGGSTRIPAVQKAVKEWAGKEPDHSINPDEAVALGAAIQGGVISGDVKDIVLLDVTPLSLGIETMGGVFTKLIDRNTTIPTSKSQIFSTAADNQPAVDVHVLQGERPMAADDKTLGRFELTDIPPAPRGVPQIQVTFDIDKNGIVNVSAKDMGTGKEQKITIKSSSGLSDEEIKRMQKDAEEHAEEDKKRKDEANLRNEVDQLIFTTEKTLKETKGKVSDEDTKKVQEALDDLKKAQKDNNLDEMKEKKDALSKAAQDLAVKLYQQNGGAQGALGHARPQGGNPNDGNNGGAQDGNSIR

SEQ ID NO: 10431 - protein, 223 aa, Trichodesmium erythraeum IMS101
MLVTHDRPLASVFRNISGGSYPPVIETFERSKTIFFPGDPAERVYVLIKGAVKLSRVYEAGDEITVALLRENSVFGVLSLITGHKSDRFYHAVAFTPVELISVPIDQVEKALREDPELSVILLRGLSSRILQTEMMIETLAHRDMGSRLVSFLLILCRDFGVPRDDGIMIDLKLSHQAIAEAIGSTRVTVTRLLGDLRQDEMISIHKKKITVHNPVALSQQFT

SEQ ID NO: 10432 - protein, 498 aa, Rhodococcus sp. Q15
MAVKDEQAGSGRSKLFRTKSIEQSIKDTDEPETKLRKELNSWDLTVFGVAVVIGAGIFTLTARTAGNVAGPSVSLAFVIAAIACGLAALCYAEFASTVPVAGSAYTFSYATFGEFVAWIIGWDLILEFALASSVVAKGWSLYLGEVMGSRSPIVELGPISFDWGAVLVIAVITILLATGTKLSSRVSLVITAIKVAVVLLVIVVGLFYIDTDNYSPYIPPSEPGSTGEGIHQSLFSYVTGAGGSTFGWYGLLAAASLVFFAFIGFDVVATTAEEAKEPQKALPRGILGSLLIVTVLYVAVTLVLTGMVKYTELEGDTSNLATAFAFHDITWAKNVISFGALAGLTTVVMVLMLGQTRVLFAMARDGLMPRRLAPTGKHGTPVRITILVGVVVAVLAGVFPIGTLEEMVNIGTLFAFVLVSIGVLVLRRTRPDLPRGFRVPLVPLVPILAVLACLWLMFNLSVETWMRFVVWMALGVVIYFAYSRQHSMIGKRERGEIE

SEQ ID NO: 10433 - protein, 381 aa, Xanthobacter autotrophicus Py2
MKVFGAPRRYVQGKGALDHLGPELARLTDAAALVIDPFIDDLFGARLQASCNAAGVSLARLRFGGESSPAEIDRLLAALGDTPPPLVAAAGGGKCIDAGKALANRIGAKVATIPTIASTDAPTSHNYVLYDDDHRLLAVEKLPANPDLVLVDTQVIAEAPRLLFLAGIGDAVVKLFEVERCVAAKGRNVFGADPAFSALILARGCYDVLRRHAPAALAAVDRKAADDALDLVVEATVLMSGLSFESGGLSIAHSMTRGLSAVPKYARALHGLEVAYGVLVQLVLEGRDADFFDDLLGFYAAIGLPTSLVALAGAAPTPEEAATIARLTLSAPHARHFPRVLEEAEVVRAILAIEEGRFADALVEDAMQGSKSPSTAPGLAV

SEQ ID NO: 10434 - protein, 253 aa, Xanthobacter autotrophicus Py2
MAPLLEIKDLHAEISGGRKIIDGMNLTINPGEVHAIMGPNGAGKSTLSYVLSGKPGYDITAGEVIFRGVNLLELSPDERAAQGLFLCFQYPLEIPGVSNMAFLHTAVNSQRRKRGETELTSPELVRKVRELGQTLGINAEMLKRPVNVGFSGGEKKRNETLQMALLEPYLCVLDEADSGLDIDALKVVSNGVNALRSPERSMLVITHYQRLLDYIVPDVVHVFAAGRIVHTGGKELALELEATGYAQYQNEAA

SEQ ID NO: 10435 - protein, 400 aa, Xanthobacter autotrophicus Py2
MRPVYLDNNATTRTDPAVVEAMLPFFSEHFGNASSTHAFGEHVGEALKKARKQLQALLGAAFDHEIIYTSGGTEADNAAILSALETQEGRDEIVTTTVEHPAILTLVAHLEKTRGIKVHLIGVDRHGRLDLDAYAKALSPKTALVSVMWANNETGTLFPVAELAEQAKAVGALFHTDAVQAVGKVAIDLKSTAIDMLSLSGHKLHGPKGIGALYVKKGVKFRPLIRGGHQERGRRGGTENVPGIIGLGAAADLALQHMEEERTRVKALRDRLEQGILQRVSNTLLNGDGDNRLPNTANIAFEYLDGEAVLHNLNKAGVAASTGSACTSGSTEPSHVLRAMNLPATALHGALRLSLSRENTGEDVDRVLEALPEIVTRLRAMSPAWLAREGADGAAVASHV

SEQ ID NO: 10436 - protein, 110 aa, Xanthobacter autotrophicus Py2
MASSAERIQDIISSADVVLFMKGVPAAPQCGFSSAVVQVLAQVGVPYRAVDVLQDPFVREGIKAFSNWPTIPQLYIKGEFVGGCDIVREMFQAGELTALLAEKGVAAPVA

SEQ ID NO: 10437 - protein, 267 aa, Xanthobacter autotrophicus Py2
MERMTINRRAFLVGATGLAVAGSLALPAFADTLEEIKKRNKILIAVDLGSPPFGMTDGNMQPTGSDVESAKLFAAELGVPLEIVQVTSPNRIPFLLTGKADMVMASFSVTDERKKVIDFSDPYGVIQIVVAGPKNVAIRDIKDLVGKRLGTTRGSSNDKEATTQAQGAEMVRFDDDATLITALVSGQVNLMASSPQVMQAVNARRPNDPLEVKLVLKTNPYAVGLRKGDDALRDAVNKVIAANLKNGKLNEIYTRYNGTSLPEEMLK

SEQ ID NO: 10438 - protein, 241 aa, Xanthobacter autotrophicus Py2
MALSQNWRLTSTEIHMSRNRDFREPRRRGFDDDFAPPRDRGFGGDRPFSSPSSSFSAPAPSGPPIDATVKWFNPEKGFGFVELADGSGDVFLHARALEAAGQESVPPGSKLSVRVGQGQKGRQVTEVLEVDTSTAEAAPARRSFGAGPGAGGGFGGAPRAGGAGPRAATGPTEERVGTVKWYNPDKGFGFIAVEGGGKDVFVHVTVISRSGLTDLAEGQRVVVQVGQGPKGPEARGIELAD

SEQ ID NO: 10439 - protein, 196 aa, Xanthobacter autotrophicus Py2
MTTKIDQAAIDRLFLEARSQNGWTDQPVSEAEIRALYDLVKYGPTSANTQPARFVFVTSPEAKERLRPALSPGNVKALAAPVIVLIGYALDFHDKIPEVFPHNPGFRDMFVNNPAAIEPHAFRNSSLQGAYLILAARALGLDVGPMSGFDAAKVDAEFFPGGTVKTNFIAAIGHGDPSKVMPRLPRLAFADAAQIV

SEQ ID NO: 10440 - protein, 427 aa, Xanthobacter autotrophicus Py2
MNSRAFPAPEDPSATPESSHLPLTPVGAGEDPYLERVRDPIRTLPESGIVEVMNYGRDRPGMIPLWAGEGDVATPPFICEAAATALHAGETFYTWQRGLPELRGAIARYMARTYGIPENPDRYFVTGSGMQAIHIALAMTAGAGDEVIIPSPSWPNAAAAAQKAGARPVYVPFAYGKDGFSLDHERLAQAITPRTRAIFLNTPANPTGFVATHDDLRAVLALARRHGLWIIADEIYGRFYYGDEPRAPSFHDVMDEGDHILFVQTFSKNWAMTGWRVGWIEADPRLGQVIENLIQYSTSGVAAFMQRGAVAALDQGEDFVAQQIARARKGRDRVADALIATGKVDLVKPPGAFYLFFGIAGRSDVRSLGLTLVDEANVGLAPGTAFGPGGEGFMRLCFARGDAQLAEASRRLVAWLTGDGQTGAGAA

SEQ ID NO: 10441 - protein, 631 aa, Xanthobacter autotrophicus Py2
MAKIIGIDLGTTNSCVAVMEGSTPKVIENAEGARTTPSIVAFTEDGERLVGQPAKRQSVTNPERTFFAVKRLIGRRYDDPTVEKDKHLVPYSIVRADNGDAWVEADGKKYSPSQISAFVLQKMKETAESFLGEKVEKAVITVPAYFNDAQRQATKDAGRIAGLEVLRIINEPTAAALAYGLDKKSAGTIAVYDLGGGTFDVSVLEIGDGVFEVKSTNGDTFLGGEDFDMRLVTYLADEFKKEQGIDLRNDKLALQRLKEAAEKAKIELSSATQTEINLPFITADATGPKHLTLKLTRAKFEALVDDLIQRTVEPCRLALKDAGLTAGQIDEVVLVGGMTRMPKVQEVVKQFFGKEPHKGVNPDEVVAIGAAVQAGVLQGDVKDVLLLDVTPLSLGIETLGGVFTRLIDRNTTIPTKKSQTFSTAEDGQTAVTIRVFQGEREMAADNKMLGQFDLMGIPPAPRGVPQVEVTFDIDANGIVQVSAKDKGTGKEQQIRIQASGGLNDADIEKMVKDAEAHAAEDKKRRALVEAKNHAEALVHSTEKAVAEHGDKVGAVEKGAIEAALADLKSTLEGDDVEAITAKTNTLAQASLKLGEAMYAAQQPGAEGAAKPADDVVDAEFTEVDDDKKKSA

SEQ ID NO: 10442 - protein, 395 aa, Xanthobacter autotrophicus Py2
MLITTAPFDRIGEENAFAVLARATALAGQGRSILNLGIGQPDFRTPDHIVEAAVKALRDGQHGYTPSVGILPLREAVAADLNRRYGVEVDPDLVMIMPGGKVTMYAAIRLFGEPGAEILYPDPGFPIYRSMIEHTGATPVPVPIREENGFAFSAEETLALITPKTRLLIINSPANPTGGVTPAAEIDKLVKGLAAHPHVALMSDEIYDRFLFDGEEHRTLLAYPQIRDRLILLNGWSKTYAMTGWRLGYSIWPKDLYDKVRKLAVNCWSCVNAATQYAGIAALEGPQDAVDAMTAEFDARRRIVVDGLNALPGVRCATPKGAFYAFPNVSGTGWSEAKKLASALLEEAGVAVIGGPDFGVYGEGYLRLSYATSRENIAAALARMGDFLAANRKVA

SEQ ID NO: 10443 - protein, 322 aa, Xanthobacter autotrophicus Py2
MTDQATDQARPAVLLTGPVMEEVVERQLASRFDLLPLDALSDATAAAVRAIATRGKERVDEALMARLPALKIVANFGVGYDTVDAAAAARRGVIVTNTPDVLNEEVADLTLGLLLATVRQIPQADRFVRDGKWLKGAYPLGPTLRERTVGIVGMGRIGKAIARRLEAFAVPVAYHSRRQQPDVDLPYFASLLDLARAVSVLVVIVPGGAATRHLVNADVLAALGPDGILINVARGTVVDEAALLKALQSRTILAAGLDVFEKEPHVPEAFLGLDNVVLLPHVGSSTHHTRAAMGQLVVDNIVAFLDGKGPLTPVAETPWPKA

SEQ ID NO: 10444 - protein, 378 aa, Xanthobacter autotrophicus Py2
MAHAFIVDYARSPFAPAYKGALAGIRPDDLAAGVISTVVGRSGLDPATLEDVILGCAFAEGEQGLNIARCASLIAGLPLSVGGSTVNRWCGSSMQAVQMATGAIAMGAGEAFIAGGIESMTKVPMMGFNPMPNPRWDDALRAAFLNMGLTAENLADRYAISREAQDTYAAASQDKAATAQADGRLAAEIAPVATSAGAVDKDGCVRGGTTVDKLGALKAVFKAGGSVTAGNSSPLTDGASATLIVSEDFARRHNLAPLARVAGYAVSGCAPEIMGIGPVEATRKALARADITAADLDVIEMNEAFAVQVLACCADLDIDPARLNRDGGAIALGHPLGATGARLVGKAAQLLKRDGGRYGLATQCIGGGQGIALVLEAA

SEQ ID NO: 10445 - protein, 157 aa, Xanthobacter autotrophicus Py2
MHDDQIGLLETSFAELSTDRDAAAALFYERLFVLDPALKRLFGDTDMAGQGQKLFAALDLVVASLRHLDKVVPVLEQLAVRHVHYGVRDAHYATVGAALIETLSLYFGPRFSMELRRAWSDAYEVVAGVMIAAAHGVTAEADVAGNLLSRPAFAGAL

SEQ ID NO: 10446 - protein, 402 aa, Xanthobacter autotrophicus Py2
MPATFEVSGFLTFTLAIVVYFIGAGLNGVIAPLRRWNIPEAVTGGLLAAVATLVCYRVLGLAISFDLAARDMLLLYFFTGIGLNARLSDLVLGGRPLLILLLLTVVYLGLQNVVAIGGAKALGLPDGIAPLLGSVSLIGGHGTTIAWAPLISERFGLPNALEVGIASATLGLVIASLVGGPVAGILINRFKLRSDEILAPMVGLPDDDVGPDAGKVTYRNILSALLVLNVVILTAYSLEGLVEQTGIKLPLFVVCLLVAIVITNTLPHALPRMTWPARTPALALISDLSLKIFLAMSLMSMQLWTLGGLGPALAVVLGLQTLVAVLYILFAVFPAMGRNYQAAVLAAGFTGISLGATPTAIANMTAVTRTHGPAPIAFIILPLVSAFFIDIANALAIGFMLR

SEQ ID NO: 10447 - protein, 605 aa, Xanthobacter autotrophicus Py2
MHALTQADTSTAPNNDASEGSRRRKANLKPLRGLAPYLSRYRGRVAAALVAILVAALATLALPLAVRRMIDFGFAADHAALVDRYFAVLVAVAAVLAAASAARYYLVTTLGERVVSDLRTAVFARLVTLDGAFYDTARSGELTSRLTADTTQLKSAVGASASTALRNLVLCVGGIAMMVVTSPRLSALVLVAIPVIVLPLVASGRKVRRRTRHAQDTLADASAYAAEALNGMRALQSSSAEGAARARFDGAVEEAFTAAQDATRARAWLTGVAIFLVTASIVAVLWAGAQSVLGGTMSSGALSQFVLYAVLAAASLGNLSETWGEVSAAAGAAERIGELLKVEPQVRTPAQPVALPARLSGAIRFDEVSFAYPTRADDNALHAVSFTVRPGERVALVGPSGAGKSTVFQLLERFYDPQAGRILLDEIDIGTADPVDVRRQIALVPQEVAIFADTVRANIRLGRPDATDAEVEAAGQAAAVDEFVARLPQGWDTLVGERGVTLSGGQRQRIVIARAILRAAPILLLDEATSALDAESETLVQTALERSMEGRTTLVIAHRLATVLEADRILVMEAGRVVDEGTHAELVAKGGLYARLAQLQFNAAA

SEQ ID NO: 10448 - protein, 389 aa, Xanthobacter autotrophicus Py2
MPLTGDAMDNAIDTTAASGIPSTGVGAAPKGAGTPKFHRLAVREVRRETIDAVSITFEVPSALAADFAFAPGQYLTLKATMEGEEIRRSYSICSGPDDGELRIAVKQVEGGLFSTWVNESLKPGDELEVMTPTGRFGLEQAPGNARIHVAFAAGSGITPVLSIARGVLAREPDSRFFLFYGNRSTDNILFRTELEELKDRFLGRLSVFHVLSREQQDLAILNGHLDGEKVRLLLTAMVPAAAVDHAFVCGPTAMIDELEATLADLGLPKDKVHVERFVSALGGKPRPKPVVAPDAAPAHVASLIVDGKRRDVPVAEGEAILDAALRAGMDLPFACKGGMCSTCRAKVVEGAAEMEVNYSLEPWELEAGFILTCQARPTSARVVVDFDQV

SEQ ID NO: 10449 - protein, 402 aa, Xanthobacter autotrophicus Py2
MAHAFICDFARTPIGRYAGALKDVRADDLAAHPIRVLKERNPGVDWEAVDDVILGCANQAGEDNRDVARMAALLAGLPVSAPGTTVNRLCGSGLDAVGIGARAIMTGDADLIVAGGVESMTRAPFVQGKAQEAFSRQAEIYDTTIGWRFVNPLMKAQYGVDSMPETGENVAEDFQVSRADQDLFAYRSQQRVKAAQDAGFFAREIAPIEVKGKKGAVIRVEADEHPRAETTLEQLAGLKAPFRKAGGTVTAGNASGVNDGAGALILASEAAAKKYGLTPRARVVSVVQAGVPPRIMGIGPAPATRKLLEKNGLALADIDLIELNEAFAAQALAVLRQLGLPDDAEHVNPNGGAIALGHPLGMSGARLAMTAVSALEVRGGTRAVATMCIGVGQGIAALIERV

SEQ ID NO: 10450 - protein, 400 aa, Xanthobacter autotrophicus Py2
MTDAFVCDFIRTPIGRYGGALAPVRADDLAALPLGALLARNPGLDPAAVEEVWMGCANQAGEDNRNVARMALLLAGLPQSVPGVTVNRLCGSGLEAVAAAARAIRSGDMELAIAGGVESMTRAPFVMPKGSSAWSRATEIHDTTIGWRFVNPRMAQDYGTDSMPETAQNLADEHAISRADQDAFALRSQEKAAAAQASGRLAAEILPVSVPLGRGKTEEVAKDEHPRATTLADLAKLKPITRPDGSVTAGNASGVNDGAAALIVASQAAAKRFGLTPLARVVAGASAGVAPRIMGIGPVPAVGKLCAKTGVGLEAIDIIELNEAFAAQALAVLRALRLSDDDPRVNPNGGAIALGHPLGMSGARIAGSAALELARGAGRHALATMCVGVGQGAALLLERI

SEQ ID NO: 10451 - protein, 337 aa, Xanthobacter autotrophicus Py2
MPNVTIVFADGERTEIKARPGEMILQAARRNGLALSSDCEVGDCQTCRCTLLAGAIEHDAFATTSLTTAEMESGEVLTCVSAADGDVTLRMPYERTRLLPAKPFTLRIESLEQLGASVIRLKGQTLGLKPLVFLSGQYINLKVPGTEALRSYSMANPPSGERSLELLIRLLDDGAMSTYLRERAAPGDQIACEGPRGTFYLRDGTRPLLMVAGGTGLAPMLAMLRQIASAPTSRAMTLCFGVNTPEDLFCLDDLAELASRLPGLEIRVAVARGDAGPKWQAGYATDLLQPGDVPGRDIYLCGPPPMTDAARAFLTAHGADPAAIFLERFVVSGATAA

SEQ ID NO: 10452 - protein, 467 aa, Xanthobacter autotrophicus Py2
MKIDSVCISVSRRVMLAALAALATMPFAISLAGAAPLKLEKDELKLGFIKLTDMAPLAIAKEKGFFEDEGLYVTLEPQANWKVLLDRVIDGELDGAQMLAGQPLAATIGFGTKAELVTPFSMDLNGNGITVSNEVWEMMKPYVEMKDGKPVHPIKADALKKVIEKFKASGKPFNMGMVFPVSTHNYELRYWLAAGNINPGFYSKNDLSGQIKADALLSVTPPPQMPSTLEAGTINGYSVGEPWNQAAVAKGVGVPVITDYEIWKNNPEKVFGLTKAFTEKYPNTTIALTKALIRAGEWLDANNNANRKEAVKILSKSEYVGADAAVIANSMTGTFEYEKGDKREVPDFNVFFRYNATYPFYSDAVWYLTQMRRWGQIPETKDDAWYADVATKVYRPDLYLKAAKLLVEEGKAKQADFPWDSDGYRAPTSDFIDGVSYDGRKPNSYIDSLPIGLKSKQVMEGSEIVNR

SEQ ID NO: 10453 - protein, 415 aa, Xanthobacter autotrophicus Py2
MTAAYEITAGFIPLLDSALLVAASAKGFAEAENVALTLVRETSWANIRDRIAVGHFQVAHILAPMPIACNLGLTPFASRMIAPMALGLGGNAITASKALWEKMAESGATSDMEPRSAGAALARVIATRRTHSAPPLRFAVVHPHSAHNYELRYWLAACGIDPEEDVEIVIVPPPMMTAALNDGSIDGYCVGEPWNTAAALSGTGHIATTKAAIWKSSPEKVLGADADWAMANPEALAALLRAIYRAAQWCADVKNHAELAALLAGADYVGTPQEWILPALSGVMGSAGDRTIRVEDFFVPLAKAATFPWKSHALWFYSQMVRWGQVPHTPANQAVARDTYRPDLYRSALLPLGASLPGANMKVEGALREETFVGASGANLLLGPDGFFDDKVFDPERIEAYISDQTSCDQHLGAR

SEQ ID NO: 10454 - protein, 401 aa, Xanthobacter autotrophicus Py2
MSDAFICDAVRTPIGRYAGALASVRPDDLAAHVIRALAARSPGLDAAQVEDVIFGCANQAGEDNRNVARMGALLSGLPIEVPGSTINRLCGSGMDAVGTAARAIKAGETDLMIAGGVESMSRAPFVMGKADSAFSRAAKIEDTTIGWRFVNPAMKALHGVDSMPETAENVAEDFQISRARQDAFALESQRRAAEAWAAGRFADEIVAVSIPQRKGDPKLFDRDEHMRPDTKLEDLARLKGVVKPGGTVTAGNASGVNDGAAALLLASAAGVEKHGLTPRGRVIAMATAGVPPRIMGMGPAPATRKVLEKAGLTLADMDVIELNEAFAAQACAVLADLGLPDDAAHVNPNGGAIALGHPLGMSGARLITTALYQLHRTGGRYALATMCIGVGQGIATIIERV

SEQ ID NO: 10455 - protein, 339 aa, Xanthobacter autotrophicus Py2
MSHKIALSFEDGVTRFITCGTGETVADAAYRSGINVPFDCRDGACGTCKSHCESGAYDKGDYIEDALTEDEAAEGYVLTCQMRPKSDCVVKIAATSAMCKAGASTFSARLSRLERLSPTTLGFALKVDAGELSFLPGQYANLSLPGTREVRAYSFSSLPHDGEVEFLVRNIPGGRMSSFLAERAKVGDAMSFTAPMGSFYLRPVTRPLLFLAGGTGLAPFLAMLDLLARDGLNVPAHLVYGVTSDADLVLVDRLEAFAARLKGFTFSTVVADAASSHPRKGYVTHHLAPEHLNGGDVDTYLCGPPAMVDAVRHHFQVAGVTPAAFHYEKFSPGAEAKAA

SEQ ID NO: 10456 - protein, 344 aa, Xanthobacter autotrophicus Py2
MPKFKLEYIWLDGYTPTPNLRGKTQIKEYDVFPTLEQLPLWGFDGSSTQQAEGRSSDCVLKPVAVYPDPARTDGALVMCEVMMPDGVTPHPTNKRATILDDAGAWFGFEQEYFFYKDGRPLGFPEHGYPAPQGPYYTGVGFKNVGNIARQIVEEHLDLCLAAGINHEGINAEVAKGQWEFQIFGKGSKKAADEVWMARYLLLRLTEKYGVDIEFHCKPLGDTDWNGSGMHANFSTTYLREVGGKAYFEALMAAFEANLEDHIAVYGPDNHMRLTGKHETAPWNKFSYGVADRGASIRVPHSFVKNDYKGYLEDRRPNSMGDPYQIASQILKTIASVPTDVSAAA

SEQ ID NO: 10457 - protein, 528 aa, Xanthobacter autotrophicus Py2
MAPRVLISDKLSPAAVQIFKDRGIEVDFQPDLGKDKDKLAEIIGNYDGLAIRSATKVTPKILQKAGRLKVIGRAGIGVDNVDLPAATAKGVIVMNTPFGNSITTAEHAIAMMFALAREIPAADASTQAGKWEKNRFMGVEVTAKTLGIIGCGNIGSIVAERGVGLKMKVIAFDPFLSVERALDLGVEKVELDDLLARADFITLHTPLTEKTKNILSAENIARTKKGVRIINCARGGLVDEAALRAALDSKHVAGAAFDVFAVEPAEQNPLFGHPNVVCTPHLGAATNEAQENVALQVAEQMSDYLLTGAITNAVNFTSITAEEAPKLKPFIALAEKLGSFAGQLTDTDIKTVHIVYEGAVADQKVKALTSAAVAGLLRPMLSEVNVVSAPTVAKERGIVIEETTRAATGDYDSLISITVVTDTYERAISGTVFADGRPRIVNIKGINVDAEFAPSMIYVTNEDKPGFIGRFAGLLGDAGLNIATFALGRDHLGGDAIALVAVDGTVPADVLGKVQALPQVKAAKALAF

SEQ ID NO: 10458 - protein, 551 aa, Xanthobacter autotrophicus Py2
MYVYDEFDRTFLQERVAEFRDQVARRLSGELNEEEFKPLRLMNGVYLQLHAYMLRVCIPYGTLSSQQLRALGAVARKYDRGYGHFTTRQNIQFNWIKLNELPDAMADLAKVGIHGLQTSGNCIRNTTTDPWAGAAADEVEDPRLYAEVIRQWSTLHPEFTYLPRKFKIAITAAKHDRAAIRVHDIGLRLHKRDGETGFEVMVGGGLGRSPFIGKTIKDFLPKEHLLSYLEAVLRTYNLGGRRDNIYKARIKIQVHEMGAEAFAKKVEAEWVEIRDGALKLDEAALDAIRDRFKIPDLEALDDQPAELARALATDAAFARWHANSVAPHKAKGHAIVTLSLKPVGAPPGDATAEQMDAIADLADQYAYGEIRVAHEQNLTFPYVRQKDLPALWAKLKAIGVATPNVGLVTDIISCPGLDYCSLANTRSIPIAQKLTERFADEARIADIGRLHVNISGCINACGHHHVGHIGILGVEKKDEEFFQITLGGKGNSKARIGELIGPAVAESEIVDVVESLVDTYLNLRTSPAETFVAAVERLGIEPFKERAYAPR

SEQ ID NO: 10459 - protein, 601 aa, Xanthobacter autotrophicus Py2
MSPAGPKAPLMELQTMSIQMTGAEMVMRAFADQGVEHFFGYPGGAVLPIYDALFQQNAIEHILVRHEQAAVHAAEGYARSSGKVGVVLVTSGPGATNAVTGLTDALMDSIPLVCITGQVATHLIGNDAFQECDTVGITRPCTKHNYLVRDVNDLARVLHEAFYVAQNGRPGPVVVDIPKDVQFATGTYIGRENIQHKTYRPKLKAEDAQISAAVEMIAGAKKPIFYTGGGVINSGPEASRLLRELARLTGVPVTSTLMGLGAFPAANRQWLGMLGMHGTYEANMAMHDCDVMVCIGARFDDRITGRLDAFAPGSKKIHIDIDPSSINKNVKVDLPIIGDCTRVLADMVEAWNARSLKIDQPALAAWWTQIERWRSRNCLAYRPSDEIIKPQFAIERLYEATKDKDVYISTEVGQHQMWAAQFFRFEEPNRWMTSGGLGTMGYGLPAAIGAQKAHPNALCIDIAGEASILMNMQEMSTAVQFDLPVKIFILNNRYMGMVRQWQELLHGGRYSHSYSEALPDFVKLADAYGGVGIRCEKPGDLDAAIQEMINVKRPVIFDCIVDQQENCFPMIPSGRAHNEMILGDMAIDLDDAITDEGKMLV

SEQ ID NO: 10460 - protein, 329 aa, Xanthobacter autotrophicus Py2
MNAPFPPLGRVPRIVFLDRETLAPAVTLARPAFAHDWVEFDRTAPAELMERARDADILILNKVRLDAEAIAGLPRLALIAVAATGTDCVDKAACAAAGIAVSNVRGYAKASVPEHTFALILALARAIGPYAADVKAGAWQAAGQFCFHTHPIIDLHGRRLGIFGSGDLGQQVAALGRAFGMEPVFAGRKGAGEARPGYMPFTEVIETADVLTLHCPLTLETRGLIGAEEFARMGRRPLLVNTARGGLIDEEALIAALDAGQVAGAGIDVAMPEPPPADSAVMRLAHHPKAIVTPHVAWASMEAQQALADQLIANIEAFAAGRPVNVATP

SEQ ID NO: 10461 - protein, 70 aa, Xanthobacter autotrophicus Py2
MAEGTVKWFNAQKGFGFITPDSGGSDAFVHISAVERAGMSDLREGQKVAFELVTDRKSGKLSADQLKDLS

SEQ ID NO: 10462 - protein, 266 aa, Xanthobacter autotrophicus Py2
MLRTPIIGAMALALGLAAVAPAAAETPAGIKQRGKLIVAIDVSHPPYGMLDDKAKETGSDVETAQLLAKDLGVALEVVPVSGANRVPSLLANKVDVVIASFSITPERKKVVDYSLPYGVIPVVVSAPKAMAIKSPADLAGKSIAVARGTTADIELSRTIKDAKVAANIVRYEDEATAVTALATGQQDLLAAALSTANTVAEQNPGKTLEVKLEMAAYPMAVGLRKTDPELKAYVDEWVKANLANGKLNDIYKKYFHLSLPEHIAAE

SEQ ID NO: 10463 - protein, 362 aa, Xanthobacter autotrophicus Py2
MRELKVFGAPGLYVQGPGALRELGRLIAPVGSRALLVSDRIMSGMLAPRIAPLLEAEGIAFAATGFDGDVTHANVDRMVADGTPLAPDVVIAAGGGKGMDAGKAVCRAFGARLVSLPTAASNDGPTSRNFVFYDDHHKLLSVEKLVRNPDLVLVDTDLIIKAPAALLVSGIGDALVKRFEAEQAVGADGPNMFGARATLASLTLAQRCDEVLRADAVAALAAVRSNRPGPEFERVIEACFLLAGLGFEGSGLSIAHAMTRGLSAIPATAATLHGCQVAYALLVQLMLERRPPEFMAEQFAFYRSVGLPVSLRDLGLASAARADLEVIAELSHRAPHTKNFERALTPADFVDAMEQLEAIGLM

SEQ ID NO: 10464 - protein, 492 aa, Xanthobacter autotrophicus Py2
MSRIVVVSNRVAVPQRSGVTAGGLAVAVNAALKDKGGIWFGWSGRICPEPSEIPEVTRKAGITYAVVDLKAEDHQEYYNGFANRVLWPVLHYRVDLSEFFRSDLSGYIRVNRMFADHLEKIIRPDDILWIHDYHMMPLAKYLRERGHKNRIGFFLHIPMPPSDIVQALPQHGETVGALAYYDLVGFQTEGDRDNFAHYLEIRGGQLTPDGTGVDIGGRRVRLGTFPVGIETAAFARRARHASRAAFVKSFRDSLVGKKLIIGVDRLDYSKGIPNRLEAYEQFLKTQPDWHERVTFVQITPKSRTDVPEYQEMDRYVSHKAGQINGAYSDVSWTPLRYVNRTYSRSALAGFYRAAHVAMVTPLRDGMNLVAKEFVAAQDPADPGVLILSQFAGAAAEMGTGALIVNPHDTEGMANALRRALEMPLAERRERYARMMQVLEARDIDRWAADYLAALAPEAATVERRGLSLPRAAIRSVVRLPGAWRSDFVPRGA

SEQ ID NO: 10465 - protein, 338 aa, Xanthobacter autotrophicus Py2
MMRSPANKVPADDGPHVHPASVVSALATLDAEKAGLAALAEAMAGPLGAAFDVAVATIQNSHGRVIVTGMGKSGHVARKIAATLASTGTPAHYVHPAEASHGDLGMITTDDVIVALSWSGETVELHDIVDYSRRFDVPLIAFTSNTESALASSASVVLSLPVAQEACPHGLAPTTSTLMQLALGDALAVALLQSRGFTALDFRQFHPGGKLGASLKFVRDVMRQGDAVPVVAAGTLMGAALVEMSTKGLGCVGVVGPDGALTGIVTDGDLRRHMANDLPTRTVDEIMTAAPKTVRPDQLASEALNILNSRKITALMVVEGQAPVGVLHIHDLLLTGIA

SEQ ID NO: 10466 - protein, 616 aa, Xanthobacter autotrophicus Py2
MSDNRNMFIAIGLSLAILIGWQFFFGIPQAERQRQAAEQQRIAQQAQQPAPGATPGATPGTTAGAAPGATPGSAGVPQAGSPVPARPLTREEALALTPRAAIETQRLKGSIALKGGRVDDLLLTEYHETVDPKSPNIVLLSPSGAPNPFYAEFGWTAAAGTGVKVPGPDTVWTTSGTLTEKTPLTLSWDNGAGLIFHRTYTIDDHYMFAVKDEVENKTGAAVTLYPYALVSRHGIPHVAGFYILHEGLIGVLGDSGLQEITYAKMDKEKPHTFAATGGWLGITDKYWAATVIPDQSVKVDAKFSTSTFAGTQTFQADYLAAPLTVEPGATVAAKGQLFAGAKVVQVVDGYKTKYGIDRFDLLIDWGWFYFITKPLFLAIDWLYRLVGNFGVAILIITVALKGLFFPLANKSYASMAKMKAVQPEVTAIRERYADDKVKQQQALMELYKKEKINPVAGCLPIVIQIPVFFALYKVLFVTIEMRHAPFFGWIRDLSAPDPTTIFNLFGLIPWDPSSVPVLGGYLMLGAWPIIMGITMWVQMKLNPAPPDPTQQMIFNWMPIIFTFMLAHFAAGLVIYWAWNNTLSVSQQAMIMKRNGVKIELWDNIKSAFKKKQPAKG

SEQ ID NO: 10467 - protein, 387 aa, Xanthobacter autotrophicus Py2
MKIAVPAEVDLGEPRVAATPDTVKRLVALGASVAVETGAGLKSGILDADFEAAGATIAPTAADALYGAEVVLKVRRPTEAELSSYKPGALLLAIVDPYGNDEALATLARYNVNAFAMELMPRITRAQVMDVLSSQANLAGYRAVIDAAAEFNRALPQMMTAAGTVPAARVFVMGAGVAGLQAIATARRLGAIVTATDVRPAAKEQVASLGAKFVAVEDEEFKQAETAAGYAKPMSAEYQAKQAALVAEHIKKQDIVITTALIPGRPAPRLITAQMVASMRPGSIIVDLAVERGGNVEGSVPGEVAWVGNVKIVGHLNVPGRIAASSSPLYAKNLFNFFETMVDKATKSLAVKWDDELVKATLLTRDGAVVHPNFAPKNLATTSEGAA

SEQ ID NO: 10468 - protein, 185 aa, Xanthobacter autotrophicus Py2
MVAPDSTGDDALNAPRTPRPAVFFDRDGVLNVDTGYVHAPEDFRWVDGAREAVRHFNALGHLVFVVTNQSGVARGYYGEAEVAALHGWMADELAAIGAHVDDWRYCPFHPDAAVPAYRAVHPWRKPAPGMILDLMDHWPVARDHSLLIGDQPSDMEAAAAAGIAGHLFPGGDLLAFARGLRSSQV

SEQ ID NO: 10469 - protein, 409 aa, Xanthobacter autotrophicus Py2
MARDVKKVVLAYSGGLDTSVILKWLQTTYKCEVITFTADLGQGEELEPARKKAQLLGIKDENIFIEDVREEFVAEYVFPMFRANAVYEGLYLLGTSIARPLIAKKQIEIARKMGADAVSHGATGKGNDQVRFELGYYALEPEITVIAPWREWDLTSRTRLLEFAEQHQIPIAKDKRGEAPFSVDANLLHSSSEGKVLEDPAEDAPEYVYQRTISPEAAPDEPTIITIAFDKGDAVAINGEALSPATLLTKLNELGKANGIGRLDLVENRFVGMKSRGVYETPGGTILLAAHRGIESITLDRGAAHLKDELMPRYAELIYNGFWFSPEREMLQAAIDHSQAYVTGEVTVKLYKGNTTVIGRKSPYSLYNQELVTFEEGAVAYDHRDAAGFIKLNALRLRTLGSRARKISE

SEQ ID NO: 10470 - protein, 344 aa, Xanthobacter autotrophicus Py2
MKFLDQAKVYVRSGDGGAGCVSFRREKFIEFGGPDGGDGGRGGDVWIECVDGLNTLIDYRYQQHFKAKKGDHGKGANRTGARGSDVVLRVPAGTQILDETEETVLADLTEVGQRIKLLEGGNGGFGNAQFKTSTNQAPRRANPGLEGQERWIWLRLKLIADAGLVGLPNAGKSTFLAATTAAKPKIADYPFTTLHPGLGVVRVDGREFVLADIPGLIEGAHEGVGIGDRFLGHVERCRALLHLVDGTSEHAGKAYKTVRAELAAYGNGLDEKPEIVALSKVDALSPELLKQQKERLKRAAKKTPLLLSAQSGQGVQEALRLLLSVVEEERGAEKAEEPRDAWRP

SEQ ID NO: 10471 - protein, 269 aa, Xanthobacter autotrophicus Py2
MRSDRRNFLRAAFAAGALLGALAPVALSTAARADTLDDIMKAGVIRIAVPQDFPPFGSVGVDLKPLGYDIDVANLIAAKLGVKAELVPVTSANRIPYLQTKKVDLVISSLGKNPEREKVMDFSVAYAPFFNGIFGPADVKVEKVEDIAGMTVGVTRGSVEDLELTKVAPPTADIKRYEDNNSTISAFLSGQVKVVATGNVVAAAILARNPPKKPQVKVLIKNSPCYVGLNKDEPKLLEKVNAIITAAKADGSLEKISQKWLGAPLPADL

SEQ ID NO: 10472 - protein, 258 aa, Xanthobacter autotrophicus Py2
MLNAPPHGPLPVAASSLLAGATPAQALLLTENAALTNGPPLLFQRLTAKEREEVLREGQKRVVYRGKMLFSQGTPHDGIFLIESGRIRVFYIAPSGREITLAYWNSGNFVGGPELFGQGQHVWSGVAATNSVVVHLNGKTLRRLIAQMPAFAIGLIEGLTFKGKCYSALAQMLGTRSVTERLAHLLLHLADSYGVREDGAIVVGTAFTHADLAHMVGATRQWVTISLKRLQEQGVLKAEKAKIVIHDLDALHVMRGDR

SEQ ID NO: 10473 - protein, 124 aa, Xanthobacter autotrophicus Py2
MFAVIKANGKQYRVAAADEITIDHLDAEVGSVFTFPVLMLGGATVAIGAPHVDGATVTGEVVEQTRGDKVIAFKKRRRQNSRRKRGFRADLTVVRITEISGLGETVKAEPKSKRAPAPEAAADA

SEQ ID NO: 10474 - protein, 498 aa, Xanthobacter autotrophicus Py2
MTSKTWSRVGIPALLLATAFALPVLAQTAAPAADATTTAAAAAAAPTVNKGDVAWMLTSSLLVLMMSVPGLFLFYGGLLRAKNMLSMLMQVGYCVAIVGLIWVLYGYSLAFTGGSPFIGGFSKAFLSGVTGESLAATFSVGVAIPELVYIAFQMTFAMITPALIFGAFAERTKFTAVVLFVPLWVTFVYFPVAHMVWYWAGPDAIDAAAKAVAAAADGAAKTAAQAALDSVLADAGYIFSLGAIDFAGGTVVHINAGIAGLVACLMVGKRLGYGKEALSPHSLTLTMVGASLLWVGWFGFNAGSNLEANAVTALAMMNTFIATCAAAISWMFVEWLVKGKPSMLGLASGIVAGLVAVTPPSGFAGIMGSLVLGLIVSPICFIFCTAIKNAFGYDDALDVFGVHGVGGIVGAIATGILVSPALGGTGIFDYTTGAVAPYDMATQVIAQLKAVGVTVVWSGVGTAVILFIISVIVGLRPTTDVEREGLDINEHGERAYHS

SEQ ID NO: 10475 - protein, 150 aa, Xanthobacter autotrophicus Py2
MRKIVAGKLHGLTVTGADLNYHGSITLDPEHCEEAGILPLEFVEIWNRNSGARISTYVILGERGSRCCVLNGAAARTCQPGDEVIICNSVYVPEGEIVALRPRVLTFDKDNRVTSRLTYEVTRDSQGAYHFAVRDERGDEKPIPLRVEAS

SEQ ID NO: 10476 - protein, 292 aa, Xanthobacter autotrophicus Py2
MNVGFIGLGIMGSPMAGHLIDAGHTLFVYDVFRIPAELTAKGATACASSADVAKAADVIITMVPDTPHVEEALFGKGGVAEGLAKGKIVVDMSSISPVATKGFAEKINALGCDYLDAPVSGGEVGAKAASLTIMVGGPEGAFETVKPLFEKMGKNITLVGGNGDGQTTKVANQIIVALTIEAVGEALLFASKAGADPAKVRQALMGGFASSKILEVHGDRMVKRTFDPGFRIELHQKDLNLALQSAKALGVSLPNTATCQELFNACAAHGGSKWDHSAMVKALELLANHEIA

SEQ ID NO: 10477 - protein, 376 aa, Xanthobacter autotrophicus Py2
MPVSCKRILIIGGGFSGMAAAIELRKRGAAIDVVEIDPGWRTYGAGITLGAPTLRALDTLGVLDEFLQHGYASDETELLSSAGHPIARLPTPRLARSDVPGAGAIMRPVLARILAQVTLRSGAEVRLGVTFKTIAQTDAGVDVTFSDGTRGTYDLVVGADGLYSKTRSILYPAAPAPRYTGQCVWRAVLPRPPEVSKAIMWLGAKVKAGVNPVSREEMYLFVTEDRPSNDRVDPADFLKLLKALIVPFTAPVMQMVRESLNEASQIVYRPLEALLLPRPWSQGRVALIGDAAHATTPHLASGACIGIEDAIVLAQELERCDSITDGLAAFEARRWERCRMVVENSVRLGEIEISGGSPEEHGQIMHQSMTALAAPI

SEQ ID NO: 10478 - protein, 311 aa, Xanthobacter autotrophicus Py2
MKPEIIQYCPLMPGLEAALAERFTVHRFFEDKDPEGFLAHHAGTIRGFVTGGHLGLPPDLGAKLPALEIVAINGVGFDKVDLNEAKRRGVRVANTPDVLTEDVADLAIGLSIALLRQIVKGDAYVRAGQWLGGDLALGAKVSRRRFGIFGLGRIGRAIARRLEGFDAQIAYSDRVNLDVPYDFEDTPQALAARSDVFVVAAAASAETRNVIDRSVIDAIGPKGIIVNVARGSLVDEPALLAALKEGRIGGAALDVFADEPRVPDGFFGLPNVVLTPHMASATGETRQAMADLVLANLVAHFAGEPLPTALV

SEQ ID NO: 10479 - protein, 586 aa, Xanthobacter autotrophicus Py2
MGSDFTIDQKRYLEGFVSGAKAVQITRGAAPAGAPAAAAEPTGPDAASLKAMARFEAEGKKLSPEEKGKREELGLDAYPRMRTAAHEGVFPKGPDVLRWKYHGLFHVAPAQDSFMCRLRIPNGILTHWQFRGVADIASAHGGNYTDVTTRANLQIREIPATDGIAVLEKLVDLGLTAKGSGADNIRNVTGTPTAGIDPQELLDTRPLAKEWHHYILNNRDMYGLPRKFNVAFDGAGTIGALEDTNDIGFQAVEVKDGFGVAPGIWLRLALGGITGHKDFARDTGIVVRPDEASDVAAAIVRAFIDTGDRTDRKKARLKYVLDAMGFDGFLTLVEKKLGRPFTRLPAEAVAPRAEADRLAHLGVHAQKQPGLNYIGVGLPVGRMSVEQMHGLADIAARLGDGDIRLTVWQNLLISGVADADVAQACTAITALGLSTQATPLQAGLVACTGSKGCRFAAADTKGTARAILAHCEERLDLDGPVNIHVTGCHNSCAQHYIGDIGLIGARVAINDDGDTVDGYHLFVGGGFGADAAIARELYRDVKAEDAPAVVERLLKSWLAHREEGEAFAHFTRRMDPDALKALAEVA

SEQ ID NO: 10480 - protein, 140 aa, Xanthobacter autotrophicus Py2
MTPTQIDLVQASFAKVAPIADTAAGLFYGRLFEIAPEVKPLFKGDMTTQGQKLMATLGVVVAGLKDLPRIVPAAQNLARKHVGYGVKTEHYAPVGAALLWTLEQGLGADFTPEVKAAWADAYGLLSSVMIAAAEAPEPVA

SEQ ID NO: 10481 - protein, 450 aa, Xanthobacter autotrophicus Py2
MSDASKTKSDAKTQSPAAEGMSRRSLLKGTAATLGTAALFDAVRMAFPGGVPSAYAAAPETTKAILGYIALMDASPLVIAKEKGFFAKHGVPDVEVNKQASWGATRDNLVLGGEKNGIDGAHILSPMPYLISAGKVTQNNVPTPMVILARLNLDAQGISVSNEYKDLKVTADASALKTAFAKKRADGKEVKIAMTFPGGTHDLWIRYWLASAGIDPDKDVSTIVVPPPQMVANMKVGTMDAFCVGEPWNEQLVNQGIGFTACTTGEIWKNHPEKALGMRADFVEKNPNTTRAILMAVMEAQQWCDKMENKQELAEIVGKRQWFNVPVADIIGRLKGDINYGNGRVEKGTDLYMKFWKEHASYPFKSHDAWFITEDIRWGKFEPSTDINALVNKVNREDIWRDAAKALGVAAADIPAGTSRGKETFFDGKVFDPADPQAYLKSLGIKRVEA

SEQ ID NO: 10482 - protein, 317 aa, Xanthobacter autotrophicus Py2
MSAENGPMKLVAGNSNRALAEAIAAYLATPLTKAVVRRFADMEIFVEIQENVRGQDVFVVQSTAFPANDRLMELLIIIDALRRASSKRITAVLPYFGYARQDRKPGPRTPISAKLVANLITHAGADRVMTLDLHAGQIQGFFDIPTDNLYSAPVMVRDIKERFDLSNVMVVSPDVGGVVRARALAKRIDAQLAIVDKRRERPGESEVMNVIGNVEGRSCILVDDIVDSGGTLVNAAEALLARGAKEVHAYITHGVLSGGAVARITASKLKELVITDSIQPTEAVRVARNIRVLSIATLIGEAIARTAHEESVSSLFD

SEQ ID NO: 10483 - protein, 239 aa, Xanthobacter autotrophicus Py2
MSDAAAAPAPMPLADDAPHLLVVDDDNRIRTLLSRFLTEHGYRVTTAANAAEARGRLDGLAFDLLVLDVMMPGESGLDLARDLRRSSAVPILMLTARSETSDRITGLEAGVDDYLAKPFEPRELLLRIGSILKRALPPAQKAIESVRFGEFAFHLERGELTRNTEIVRITERERDMLRALAEAPGETVPRLALAGGGAASERAVDVQVNRLRRKLERDPANPVFLQTVRGIGYRLVVTP

SEQ ID NO: 10484 - protein, 419 aa, Xanthobacter autotrophicus Py2
MARLVMKFGGTSVANIERIRNVARHVKREVEAGYQVAVVVSAMSGKTNELVGWCKDASALYDPREYDAVVASGEQVTSGLLAIVLQEMGLSARSWQGWQLPISTDDAHGSARILDIDSEKLGAAIDGGQVAVIAGFQGIHLPTGRLTTLGRGGSDTSAVAVAAALKAERCDIYTDVDGVYTTDPRVVPKARRLDRIAFEEMLEMASLGAKVLQVRSVELAMVHNVRTFVRSSLVDPDAPETANVEKAGTLICDEEEIVANQMESQVVTGIAFSKDEAQVSIRRVADKPGIAAAVFGPLADAHINVDMIVQNVSADGFTDITFTVPTADFERAKAVIEKARDTIAHQVVEGATDVTKVSVIGIGMRSHAGVAAQAFQALAGKGINIRAITTSEIKISFLIDAAYTELAVRTLHSLYGLDS

SEQ ID NO: 10485 - protein, 842 aa, Xanthobacter autotrophicus Py2
MTLRAVLLHPVLWTAVVLGALSALWLALGAPIQLVTQIAIYALYGAGVNLLIGYTGLVPFGASVFFGCTSYAAAYFILGLGGNEIGALGLSMVFAAVLGLGIGAVILRRKGLYFSLLTLACSQIAFEIAFKWTSVTGGENGIQGVPRPLMESPLTFHVFVVATVVGVMWLLWRLAHAPFGRVLQAVRDNDVRAASLGYDVYRVRLVGFTLCAVVVGYAGALLTFLLQGVYANNLGWQHAGDSLLMTVLGGVHHFLGPLWGAITFIVLENRLSAITENWWLIFAPLLIAFALVSPEGIQGLVQRLFRCERWTLTRNTIPPRPGLIVPYSSALQALDPRKPILETRGLNKSFGSLVTARSIDFTVYPNTLHTIIGPNGAGKTTFFNMLTGVLPPTAGQVLFEGADVTHLPLHARARLGMGRSFQILSIFPHLTVFENVRVAVQAQRRGARGLFVDAHSLDAINARAWSLLDAVGLADKAAARSADLPHGAKRLLEIAVTLSIDSKLLLLDEPLAGLAEADRVVVADLIKRLSRSHAVLLIEHDIDRVLAISDRISVLHQGRIVADGPPLEVAAHPEVIAAYLGAAKDGERAAPPAVERQAHAAAPILLEARGMVAGYNGSSVLAGIDLVVHEGEAVALLGRNGVGKTTTLRALTGSLPLAAGELKLKGEALTGLRPYEINRRGISLVPEGRRLFPNLTVVENLQLAARPGGISLDEVFELFPRLKTRQAARAENLSGGERQMVAIARALVMPSRLILLDEPFEGLAPAVVNEVMEALVKLRGKVAMVIVEHHTETVLPIVDRAYVLVNGQVAFAGDAGRLEADHALQARLLGVVQGEDLIAAAS

SEQ ID NO: 10486 - protein, 400 aa, Xanthobacter autotrophicus Py2
MSLISSALKRIKPSQTIAISNKARELKAAGRDIVALSAGEPDFDTPENIKEAAIAAIRRGETKYTAVDGIPELKAAICRKFKRENDLDYKPSQVTVGTGGKQVLFNALVATVDAGDEVLIPAPYWVSYPDIVEFCGGKPVPVMTTIEDNFKLRPDVLEAAITPKTKWLIFNSPSNPSGAAYSFDELKALTDVLVKYPQVWILTDDMYEHLVYDDFKFVTPAQVEPKLYNRTLTMNGVSKAYCMTGWRIGYAAGPEALIKAMGTLQSQSTSNPSSIAQWAALEALDGPQDFIAANNKVFKERRDLVVSMLNQAKGLHCPKPEGAFYVFPSCAGTIGKTTPGGVTIASDEDFATQLLEAEGVAVVHGSAFGLGPAFRISYATATSDLEEACRRIQRFCGSLS

SEQ ID NO: 10487 - protein, 359 aa, Xanthobacter autotrophicus Py2
MCGLILAGLILAARKERRGGPPPERSAPLPASRPKILITTRLFDDAATRFLEAQGFEVVPSGLPGDALDSNIPDADLNALLEGAAGWIVGQRAVTRDVLAAHPQLKVIARRGVGYDRVDVDAARDLGRVVTIAAGANDPAVADHTIALMLAVLRRLKASQAAIARGDWRVLVGADLTGKTVGLIGFGRIGRQVARRLSGFDVTVLVTSRTPDPEAAGVTFVALDELIARSDVVSLHAPLVPETRHVINAATLKAMKRSAVVVNTSRGGLIDDATLLAALEAGEIAGAGLDVFEAEADEALHPLAEALAARENVVATAHAAGSSEEALARGNLISAQCVAAALAGAPFPPGCLIADGRVK

SEQ ID NO: 10488 - protein, 226 aa, Xanthobacter autotrophicus Py2
MTHHTDAEAPVATGTADGLSDFLARAAARLSSEPPPLYSQAAFLGLNGDHALQPEKASLAPAATPRHAAVLVPVVARPEPTILLTLRSSSLSNHAGQIAFPGGRVDPGDRDELDAALREAREEVGLDSRLVRPLGYLDGYLSGTGFWIAPAVGLVDPAYTLTLNPAEVDEAFEVPLSFLMSPRNHERQSRDWKGTLRHFYVMPYEGRNIWGATAGMLRNLYEKVYA

SEQ ID NO: 10489 - protein, 392 aa, Xanthobacter autotrophicus Py2
MKDEVVIVSAARTPVGSFNGALAPLPAHELGAIAIKAALERAGLPADTVSEVILGQVLTAAQGQNPARQASLKAGLPIGVPAWEVQMVCGSGLRSVALGAQAIVNGDSEIVVAGGQESMSQSTHAAHVRNGTRMGGLEFVDTMIKDGLWDAFNGYHMGNTAENVARQFQITRQEQDEFAVASQNKAEAAQKGGKFKEEIVPVTISTRKGDVVVDQDEYIRHGASIEAMTKLKPAFAKDGTVTAGNASGINDGAAAVVLMSAAKAKAEGRTPLARIVSWAQAGVDPSIMGTGPIPASRLALEKAGWSASDLDLVEANEAFAAQAIAVNKDLGWDTSKVNVNGGAIAIGHPIGASGTRILVTLLHEMQKRDAKKGLATLCIGGGMGIAMCLARD

SEQ ID NO: 10490 - protein, 760 aa, Xanthobacter autotrophicus Py2
MASNISEDLRSGALVYHRLPKPGKLEIQATKPLGNQRDLALAYSPGVAAACEAIAADPLLAAELTIRANLVAVVSNGTAVLGLGDIGPLAGKPVMEGKAVLFKKFSGIDVFDIEIDAKTVERMVDVVSALEPTFGGINLEDIKAPECFEVEAQLRERMKIPVFHDDQHGTAIIVGAAVRNAMEVGKRKIEELKIVASGAGAAALASLNLLLTLGAKKENIWVCDIEGVVYDGRNTLMDPYKEKFAQKTDKRTLDEVIEGAHIFLGLSAGGVLKPEMVKKMADHPLILALANPVPEIMPEVAREARPDAMICTGRSDFPNQVNNVLCFPYIFRGALDVGATDINPEMKMAAVEAIAALARETPSDVVARAYGGETRAFGADSLIPSPFDPRLILRIAPAVAKAAMDTGIATRPIADMDAYIERLDHFVFRSGFIMRPLFAQAKRNIKRVVYAEGEDERVLRAVQAVVEEGIARPIIVARPNVLETRLKRFGLSVRPGHDFDLINPEDDPRYRDYVRDYVEIAGRRGVTPDAARTLVRTHPTVIAALAVKRGEADAMLCGIEGRFTRHLRQVRDIIGLAPGVKELAALSLLITSHGNFFICDTQIQTEPTAADLAEMTVLAAAHVRRFGLEPRVALLSHSNFGSHETLSAKRVRSALSIIREREPNLEVDGEMQADSALLEDIRKRVLPNSTLTGAANVLVMPDLDAADIAFNMLKVLGDALPVGPILMGTAKPAHILGPSVTARGIVNMTAVAVAEAQTEA

SEQ ID NO: 10491 - protein, 68 aa, Xanthobacter autotrophicus Py2
MATGTVKFFNSQKGFGFIQQDEGGPDVFVHISDVERSGLYGLNDGQKVSFDIVADNRGKSKASNLAAL

SEQ ID NO: 10492 - protein, 400 aa, Xanthobacter autotrophicus Py2
MADPIPFAPVPFRPQPVRAARSAVVVGAGIGGLAAAIALARAGLTVQVVEQAKKLKEVGAGLQLTPNATRILRDFGLLKRLEQVAVAPRSLDVRDGRSGATITRAHYGPAVTRYGAPFLVVHRADLQNLLADAAREAGAILTLGSDLTAVEPSFGGVRAVVKQGDTLLAHGADILVGADGVRSAVRAHLGVKDPPVFAQRLAYRATVPVPARHPPDVRLYLGRDAHLVVYPVKGGEVLNLVAIVKQTEPVARWSAPGDSAAVHAAFASWTGEVRALLESASHFLCWGLYDIDPLPRWGSGRVTLLGDAAHAMLPFLAQGAAQAIEDAASLAGALTREGDAAAALRAYESERRGRTARIQGEARRNGMIYHLSGAPRIARDLVLRRQGPALLDRYGWIYGA

SEQ ID NO: 10493 - protein, 569 aa, Xanthobacter autotrophicus Py2
MREALRRWAPGLAALLAYRRADLGPDLRAGLAVAAVAIPVGIAYAELAGFRPEVGLYSCVFPLVAYAIFGSSRQLVLGPDAATCAVIASAVAPLAAGDGAAYAALSAELALLTGIICILARFLRLGVLADFLSKPILIGFLNGIAITIVLGQLAKITRIEAEGDHVLHATFDLVVRLGETHPPTLLIALGAFGLMIASGRLLPAFPAAVLAMAGAALAVFLLGLDLSGVKTLGVVPAGLPGVMLVRLDPDALAALVPAAGGLALVSFTSMMLTSRSFASKNGYEVDPDKDFAALGAANVVSALTHGFAVSGADSRTAMADAAGGRTHAAALVAAVAVALVLMFLTAPLRYVPVAALGAVLVMAGLSLVDLATLRLIARADRTEAVISLLATLGVVVLGATQGILVAVVLALLRFLHISARPRVEILGRVAGMPGFHALSRHESATAPHGLVIFRFNGPLVFFNAGHFRHALMAATSAEQGAPKAVILDLLPVTEVDVTGLFTLKEVSDALRQRGIALVGAGRQTEWRNWMVTHGFNPDGIVMHPTLRHAVKALAAADTDHADADDTKVS

SEQ ID NO: 10494 - protein, 327 aa, Xanthobacter autotrophicus Py2
MPASIALEPSLPHAQAPRHEKYDRLIAAAQALPKLRVAVAHPCDEASLGAALEAAELGLIEPILVGPPGKIAAAAAAARLDISALRQVGAAHSHDAAAKAVELVRCGEADALMKGSLHTDELMSAVVARDTGLRTARRISHCFVMDVPSHPDPLIITDAAINIAPSLEDKSHIVQNAIDLANALKFDEPRVAVLSAMETVNPNVPSTIEAAALCKMADRGQITGGIVDGPLALDNAIDLGSAAIKHITSPVAGRANILVVPDLEAGNMLAKSLTFLAGADAAGIVLGARVPIILTSRADSKTTRLASCAVASLLADAQRAMAKAVEV

SEQ ID NO: 10495 - protein, 403 aa, Xanthobacter autotrophicus Py2
MAKVQLVLNAGSSSLKFQVFVDDGADVPNRLYRGLFEGLGTDPHFKVKDHEGAVVGEERWPHDTAYGFEEALAYLSDWLAAHRGGHQLAAVGHRVVHGGPNYTHAVRLTPEIIAELDTLSPLAPLHQPRSLEPIRIIARRVPGLPQVAAFDTAFHRTQPEIAQAFAIPQSLTDAGVKRYGFHGLSYAYLATQFPHVDERLVHGKVVAAHLGSGASLGAYAASKSIATTMGFSALDGLVMGTRCGTIDAGVVFYLQRELGMSAPEAEHFLYTKCGLLGVSGISNDMRELREKAEAEPSAQRAIDLFVYRINREFGSLVAALGGIDALVFTAGIGENDAATRAEVIEAARWAGFELDPEANRSGATRITRGSGPQAYVIPTDEEWTIVREMRAVLAESRQDAGQI

SEQ ID NO: 10496 - protein, 330 aa, Xanthobacter autotrophicus Py2
MSSTKTDPLHPRPVDRALDPGFRHGQSTEPNYSGVTSFLRRRYARDGGGAEVVVWGVPLDVAVSNRPGTRFGPRAIRAASTILDGDPFYPFGIDPFETLDVVDGGDCVFDYGLPAGIPAAIAAQARAHYARGAHLMTLGGDHFLTYPVLKALTTHLGEPVALVQFDAHQDTWEDGGDRVDHGTMITRAVKDGLIRVDRSIQVGIRTYAPQTCGIEIVHGLTAAEMGPIALADHIADRVGDAPVYVTFDIDALDPAFAPGTGTPVCGGLSTREAISCLRRLGGLDLKGFDVVEVSPPYDHAEITALAGATLASVYLCLLAERKATGRPVAL

SEQ ID NO: 10497 - protein, 393 aa, Xanthobacter autotrophicus Py2
MAAAPLPRSIALSRRSAVEPFIVMDVMEHAARIEAGGGHVIHLEVGQPAAPAPTVARRAAAAALEAGQVGYTAALGIPALRARIARHYGEIHGVAVDPERVVVTHGSSGGFVLAFLALFEPGDRVAIAAPGYPPYRHVLHALGCEPVLIETRAEDRHALTPERLLEAHRKAPLKGVLVASPANPTGTMMDRAALTALHACARDLNLAFISDEIYHGLDYAFPAVSAVEIGEDVTVINSFSKYFCMTGWRVGWMVVPPGVSRTMERLQQNLSISVPTLSQIAADAAFEGRAEMDLVKATYVENRRILTEGLPQAGLKRFLPADGAFYLYADVSEFTDDSAAFARRMLDAAHVATTPGVDFDPFHGHQFLRISYAGSAPDMAEAVARIGAFLKRG

SEQ ID NO: 10498 - protein, 428 aa, Xanthobacter autotrophicus Py2
MSELKVGLAGLGTVGAAVFRMLERRKAELEARTGRTLRVTAVAARDRSRDRGLDLGGVIWFEDPVALARDGDIDVFVELMGGDGDPAKAAVAAALDRGIPVVTANKALLAKCGVELAQRAEASRAGLHFEAAVAGGIPIVKTLRESLAGNTIERVSGILNGTCNYILTRMAEEKLSFHVCLGEAQRLGYAEADPTFDIDGFDTAHKLAILTSLAFGTQVDADSIYVEGIRQLTLADLEAADDLGYRVKLLGVAVRTETGIEQRVHPTMVPKHWPIAQVSGVTNAVAVDGDAVALTLVGPGAGGAATASAVVGDLFDVARGARGYTFGLPVAELTKAERAAMQRHEGGYYIRLAVVNKPGTAATIARRMADEQISLESIMQRRPDGAETARVILITYATTEEAVRRAIAAIEADGVISALPQVIRIEKD

SEQ ID NO: 10499 - protein, 385 aa, Xanthobacter autotrophicus Py2
MAPAGRGPKGPKNSPDKNSPDESGPGNGAPASDVSSAAQGSPQDAEHELPEDELPEGALSDEDFDDEDDDFDEEHDVAPRVLPPLEGPTRCGFVALLGAPNAGKSTLTNQLVGTKVSIVSHKVQTTRAIVRGIALDGAAQLVLVDTPGIFSPKRRLERAMVSSAWTHAADADVIALLVDAKRGLDEDIEALLAPLSQIHKPRALILNKIDIIRRDTLLALAAQINEKLAFDRVFMVSALTGDGVADVRRWFAEQVPLSPWLYPEDQVSDAPMRMLAAEITREKMFLRLHDELPYRSTVETESWKELRNGSVRIEQTIYVERESQRKIVLGKGGSTIKTISSESRAEIAGIIEQPVHLFLFVKVRESWADDPERYREMGLEFPKGG

SEQ ID NO: 10500 - protein, 296 aa, Xanthobacter autotrophicus Py2
MATGTGQSARGSAPLRGLWAPLAALAIFAACAAPAGAQTLDRVAGGEAFRIGYRQFAPPYSYAAANGQPSGYIVDLCREVADGVKRTLKLPAIKVDYVKVTAEDRFEAVRDGRIDILCEPSSMTMSRRALVDFSLPTFLDGAGVVTRGAPVKGLEDLKGKKVGVLRGTTTEETLRSTLGQMRIAADIVTVTDHPDGLKQLADGKLDAYFGDRGILNYLIANSPAGNRLSLSDQYFTFETYALALPRGDQAFRLVVDATLADLYRTERIRDIYAKSFGKFPPDQFLNALFVINGVPK

SEQ ID NO: 10501 - protein, 319 aa, Xanthobacter autotrophicus Py2
MSDEALQSVVVAKKTVEAENMVSFELVPAEGGELAPFTPGAHLDVTIPGGLMRQYSLCNSASERHRYVIGVWKDANSRGGSKALFQQVNEGDRLQVGEPRNRFAVPRDVKRALLFARGIGATPILSIADHLKAKNIPFEFHYLFAGGSPGSFRSIIEASTFAENTSFYFEAAEPRLNPAALLADRPDDTHLFLCGVDWWLDPVIANAQQKGYGVNRIHVERFTAKAPPPLLDKVFDVKIASSGKVIKIPGDRSVTAALEEAGVKVPTSCEQGACGTCKVKVLEGEIDHRDKRLKPEEKEQGYFLACVSRAKGDLLVLDL

SEQ ID NO: 10502 - protein, 128 aa, Xanthobacter autotrophicus Py2
MKHAGPHSADQNGFETMGIREDIDAIVKSGDVVLFMKGTPQFPQCGFSGQVVQILDHVGVPFKGVNVLENDAVRQGIKDYANWPTIPQLYIKGEFVGGCDIVREMFQAGELTTFLEEKGVAIRDRAIG

SEQ ID NO: 10503 - protein, 333 aa, Xanthobacter autotrophicus Py2
MVRRKPLVVVTRKLPDSVETRMRELFDAQLNLDDVPMDQAALVEAVRTADVLVPTLTDRIDSAVLSQAGENLRLIASFSNGVDHIDVASALNRGITVTNTPGVLTEDTADMTMALILAVPRRLAEGAQAVIADKDEWLGWSPTWMLGRRIWGKRLGIIGMGRIGQAVARRAKAFGLQIHYHNRRRLPTGIEEMLDATYWDSLDQMLARMDIVSINCPHTPATYHLLSARRLKLLKPEAYVVNTARGEVIDENALTRQLEAGELAGAGLDVFEHEPAVNPKLIRLAKQGKVVLLPHLGSATLEGRVDMGEKVIVNIKTFMDGHRPPDRVLPAML

SEQ ID NO: 10504 - protein, 192 aa, Xanthobacter autotrophicus Py2
MGSDALGLGPRTAGSSEDGLEEPAGLVEVTGSIKWFDASKGYGFIVPDDGGPDVLVHVTCLRRDGFQTAMEGARVVCEAVQRAKGRQAFRVLSLDLSTAVHTAPPQPRTRTVVEPRSGFEPATVKWFNRLRGFGFLTQGDGTPDIFVHMETLRRHGLTELRPGQTVMVRYGDGDKGLMAAEVKADTGPSGNT

SEQ ID NO: 10505 - protein, 382 aa, Xanthobacter autotrophicus Py2
MQNVVIAGYARSPFALAKKGELARVRPDDLAAQVVAELVARTGVKVEDIEDLIVGCAFPEAEQGFNIARLIGMIAGLPDSVAGATVNRFCGSSMQSVHMAAGQIQLGAGEVFICAGIESMSRVPMTGFNPMPNPALYAKLPQAYMGMGETAENVAAKWQITRADQDAFALKSHAKATAAEAAGKFADEIVSIRINGKDSGKTATQDGCIRRDATAEQLAGLKPAFDEHGTVTAGTSSPLTDGASAVLVCSEDYALKHGLEPLARLKGVAVAGCAPEIMGIGPVAATKKALTRSGIDISQIDVVELNEAFASQALACQRELGVRDETLNIDGGAIALGHPLGATGARIVGKAASLLKREGGKYALATQCIGGGQGIATVLERV

SEQ ID NO: 10506 - protein, 249 aa, Xanthobacter autotrophicus Py2
MLEIKNLHARIGDNEILKGLTLTVPAGEVHAIMGPNGSGKSTLSYVLSGKPDYEVTEGTATFNGQDILSLAPEERAAAGVFLAFQYPIEIPGVANMQFLRAAMNAQKKARGEEEISTPDFLKLVRAKAPDLGITQDMLRRGVNVGFSGGEKKRNEILQMALLEPKLCILDETDSGLDIDALKVVAQGVNALRSPDRAMLVITHYQRLLDHIVPDVVHVMHKGRIVRSGGAELALELEESGYAAYGQDAA

SEQ ID NO: 10507 - protein, 424 aa, Xanthobacter autotrophicus Py2
MSAGGIPGSQDPRSQDPRSQDRSEAGAGVPAANAAARRAYLDHNATSPLKREARDAMLAALECVGNASSVHADGRAARARMEAARAHVARLVGAAPRGVVFTSGATEAAALALHPAVEMAGRPKPCDVLLMSAVEHPAVLRGHRFAAEAVEVLPVDDAGRFQLDALEESLARHAAAGRRALLALMAANNETGVVQPVAQAARLVKARDGVVFCDAVQAAGRLPLDMAALGVDFLSLSAHKMGGPQGTGALVAAGPDDRTPALIAGGGQERGRRAGTENGPAIAGFGAVAGVACADLAEEAARLATLRDALERAVLAGVPDAEVIGSGAERLPNTSMLTFAGLRAETLVIALDLAHVSVSAGSACSSGKVGASHVLSAMGVPEDRAAGAIRLSLGWSSTRQDVDEAVAALQKVVPHLRSRAVRAA

SEQ ID NO: 10508 - protein, 533 aa, Xanthobacter autotrophicus Py2
MGKLKREIGLIGLTFVAVSGIIGSGWLFAPLLAAQHAGPAALIAWVIGGAAMLLFALTFAEISAMLPVAGGIARVPQFSHGNVVAMAMGWSAWVGYNTTAPIEVEAMLRYLGPHLGWLYTAPGSGTLSWAGVAVAGLMMVAFTVINAFGVRFFTRVNTAITWLKIAIPLVVVAALLAARFEPANFTQAGGGFAPFGVAGVLAAVSSGGIAFSFIGFRHAIDMAGEVKNPGVTIPIALVLALAIAFVVYGGIQFAFTGALLQADLAHGWGALALPGDFGPLGALAAALGMLWLVSLLNFGAVVGPFAGGLVSVGSNARLAFALAENGFFPERFASLSARGVPVAALLLNLVFSLATFVLLPFSEVVQLNSSAVILSFVVGPVAVVALRQLLPDATRPLRVPAVKLVAPVAFIIATYIIYWSGWPTVWRLGLCLLAGLALFLVHARNRAAGSLDLAEAVWLAPYLAGLGLVSFLGSFGGRGLIPFGWDLLVLAALGGGAFALAVRERLSQAKFDRYMSEERVLDAATEEEPEVRV

SEQ ID NO: 10509 - protein, 398 aa, Xanthobacter autotrophicus Py2
MSLLSSPSARPARSLNPLYAELPTTIFEVMSQLARTHEAVNLGQGFPDDPGPEDVRRKAADAVVNGWNQYPPMMGLPELRAAAAAHYRHWQELELDPDAEVMVTSGATEALAGALLALIEPGDEVVLFQPLYDAYLPLVKRAGGIPRLVRLEPPSWSITREALTAAFSERTKLVLFNNPQNPTGVVYSRADLALLAEFCVAFDAYAVCDEVWEHVIFDGVAFTSLMALPGMRERTVKISSAGKIFGMTGWKVGLVFAAPPLMKVLSKAHQFLTFTTPPNLQVAVAYGLGKADDYFTGMRADLQRSRDRLAQGLAGLGFSVLPSAGTYFLSIDLAAHTNAADDEAFCLDLVRTHGVATIPVSAFYAQDAVKSVVRFCFAKRDETIDRALERLAKVPLLR

SEQ ID NO: 10510 - protein, 398 aa, Xanthobacter autotrophicus Py2
MTNRTEDPIVIVGAARTPMGGFQGDFKDVAAPVLGSTAIAAALARAGLAPEAVDEVVFGCVLPAGQGQAPARQAALGAGLPLSTGATTVNKMCGSGMKAAMFAHDLLLAGSAEVAVAGGMESMSNAPYLLDRARAGYRMGHGRVLDHMFLDGLEDAYEKGRLMGTFAEDCAEAYQFTREAQDAFAIASLSKAQKAMADGAFDAEITPVTVKAGKAERVVNADEQPPKAKLDKIPTLKPAFRDGGTVTAANSSSISDGAAALVLMRRSQAEARGLTPLATIVGHATHAQAPNLFATAPVGAVRKLSERTGWALTDVDLFEINEAFAVVPMAAIHDLGLPADKVNIHGGACALGHPIGASGARVMVTLLAALQRHGLKRGIASLCIGGGEATAVALELAH

SEQ ID NO: 10511 - protein, 64 aa, Olea europaea
DDSKCYECGEPGHFARECRSRIGSRGLGGGRRRSPSPRRRRSPSYGRRSYSPVGRRSPRRRSIS

SEQ ID NO: 10512 - protein, 830 aa, Hordeum vulgare
RAPHGCHAQYMANMGSIASLVMSVTVNEDDDEDGDTGSDQQPKGRKLWGLVVCHHTSPRFVPFPLRYACEFLLQVFGIQLNKEVELASQAKERHILRTQTLLCDMLLGDAPVGIFTQSPNVMDLVKCDGAALCYQNQIMVLGSAPSEGEIKKIAAWLLECHDGSTGLSTDSLLEAGYPGASALGEVVCGMAAIKISSKGFIFWFRSHTAKEIKWSGAKHEPGDADDNGRRMHPRSSFRAFLEVVKWRSVPWEDVEMDAIHSLQLILRGSLQDEDANDNNVGSIVEAPSDDVRKIQGLLELRVVTNEMVRLIETATAPILAVDIVGSINGWNGKVAEITGLPTTEAIGMLLVDLVEGDSVEVIKQMLNSAMQGTEEQNFEIKLKTFHQQEGNGPVVLMVNACCSRDLSDKVVGVCFVAQDLTGHKMVMDKYTQIQGDYVAIVKNPNELIPPIFMINDLGSCLEWNEAMQKITGIKREDAIDKLLIGEVFTLHDYGCRVKDQATITKLSILMNTVISGQEPEKLAFGFFSTDGKYMESLLTANKRTDAEGKITGALCFLHVPSPELQHALQVQKMSEQAAARSFKELTYIRQELKNPLNGMQFTRKLLEPSDLTEEQRQLFASNVLCQEQLKKILHDNDLEGIEQCYMEMNTVEFNLEEALNTVLMQGMSLSKEKQISLDRDWPVEVSSMYLYGDDLRLQQVLADYLACTLQFTRPAEGPIVLQVIPKKEHIGSGMQIAHLEFRVVHPAPGVPEALIQEMFRHGPGVSREGLGLHISQKLVKTMSGTVQYLREAESSSFIVLVEFPVAQLNSKRSKPSTSKWSKPSTSKSNF

SEQ ID NO: 10513 - protein, 669 aa, Amaranthus hypochondriacus
MASNSSNPPFFYFTKPYKIPNLQSSIYAIPFSNSLKPTSSSSIPRRPLQISSSSSQSPKPKPPSATITQSPSSLTDDKPSSFVSRFSPEEPRKGCDVLVEALEREGVTDVFAYPGGASMEIHQALTRSNIIRNVLPRHEQGGVFAAEGYARATGRVGVCIATSGPGATNLVSGLADALLDSVPLVAITGQVPRRMIGTDAFQETPIVEVTRSITKHNYLVLDVEDIPRIVKEAFFLANSGRPGPVLIDIPKDIQQQLVVPNWEQPIKLGGYLSRLPKPTYSANEEGLLDQIVRLVGESKRPVLYTGGGCLNSSEELRKFVELTGIPVASTLMGLGAFPCTDDLSLHMLGMHGTVYANYAVDKADLLLAFGVRFDDRVTGKLEAFASRAKIVHIDIDSAEIGKNKQPHVSICGDVKVALQGLNKILESRKGKVKLDFSNWREELNEQKKKFPLSFKTFGDAIPPQYAIQVLDELTKGDAVVSTGVGQHQMWAAQFYKYRNPRQWLTSGGLGAMGFGLPAAIGAAVARPDAVVVDIDGDGSFIMNVQELATIRVENLPVKIMLLNNQHLGMVVQWEDRFYKANRAHTYLGNPSNSSEIFPDMLKFAEACDIPAARVTKVSDLRAAIQTMLDTPGPYLLDVIVPHQEHVLPMIPSGAAFKDTITEGDGRRAY

SEQ ID NO: 10514 - protein, 156 aa, Vigna unguiculata
MSLIPSFFGTGRRTNVFDPFSLDVWDPFETALSFPRSEVSSETAAIANTRIDWKETPEAHVFKADLPGLKKEEVKVEIEEGRVLQISGQRTKEKEDKNDKWHRVERSSGSFLRRFRLPENAKVNEVKAAMENGVLTVTVPKEEVKKPDVKPVQITG

SEQ ID NO: 10515 - protein, 406 aa, Raphanus sativus
MAHSADSSDNPRDVCIVGVARTPMGGFLGSLSSLPATKLGSLAITAALKREMLTRLWSKEVVFGNVLSANLGQAPARQAALGAGISNSVICTTVNKVCASGMKAVMIAAQSIQLGINDVVVAGGMESMSNTPKYLAEARKGSRFGHDSLVDGMLKDGLWDVYNDCGMGSCAELCAEKFEITREQQDDYAVQSFERGIAAQESGAFTWEIVPVEVSGGRGRPSTIVDKDEGLGKFDAAKLRKLRPSFKENGGTVTAGNASSISDGAAAIVLVSGEKALQLGLQVLAKVKGYGDAAQEPEFFTTAPALAIPKAIAPNSPYSESYQVDYYEINEAFAVVALANQKLLGISPEKVNVNGGAVSLGHPLGCSGARILITLLGILKKRNGKYGVGGVCNGGGGASALVLEVV

SEQ ID NO: 10516 - protein, 582 aa, Thermoanaerobacterium thermosulfurigenes
MRRVLKYVLRYKLYVIVPSIAMVLAIALDMFNPYLQEIITDKVFIGGDKSLLWPILWAFIAITAVRTVLGYLREYIFDVLSAKISVDIKKDLFDHIQSLPFSFFDNMNTGELMSRIGEDVDNVWRSVSFGIRLFIENMIYFITASTILFFINWKLTLVSLLGMPIIGYLALQFEKKIGISYGKLSDQGVLMNTAAQENIAGVRLVKAFAREKYEIMKFLSLNNENFELSMEQNRIVAKYFPPIDFLTNFSIVILVVFGGMLVIKSSLSIGELVAFSGYIYMLIWPMRMLGFLTNLIAQSDASAKKIMRIMDIVPSIKDSEDSIRIKELKGDVEFKHVFFKYHDDMVLKDINFKVSAGQTVAIMGTTGSGKSSLVNLIGRYYDVFDGAVYIDGHDVRSLNLHDLRSQMAVVQQDTFLFSESIEENVRFGKEDASFEEVKEALRLACADDFVEEFDDKYDTIVGERGIGLSGGQKQRISIARALIRDAKILILDDATSALDMDTEFRLLKNLSERRKNATTFIIAHRISAVKNADMILYMEDGRIVERGTHDELLEKRGRYYEIYLEQFKDFSDEEYGIPDALS

SEQ ID NO: 10517 - protein, 594 aa, Thermoanaerobacterium thermosulfurigenes
MAKNTVKQDEDLRRMSNFVILKRLFSYLGKYKLKVFVVIMFLIFEMAVSLVNPVLMKTAIDKNIRNGDINGLFVIGILMVSLNFLSMMASRTRIVKMASVTNDILLNIRHELYSHIQKLSFSFFDSRPVGKILARVIGDVNSLQDLFNNSVTNFIPQILTVICVGTMMFYLNSKLALASMILLPMLVIGLFSIETLSRRRWQEFRRKRSTFNAYTHEDFSGIKVVQEFANEDKTSSVFFKLVKDMMDSFIKAVRLNDLFWPMVDASYGIGAVILYYFSAKFMGYGVTIGTIIAFTMYIGMFWRPILDISNFYNSLVMSFASAERIFEIMDIEPDIVDMKNAIKMPKIKGNVEFKNVTFGYEDGSVVLDDVSFKVNAGETIALVGPTGAGKTTIVNLISRFYDPSKGAVLIDGKDIKHVELESLRSQMGIMLQDTFLFSATIKENIRYGKLDATDEEIIAAAKAVNAHEFIMKMEKGYDTEVNERGSRLSVGQRQLISFARALLANPRILILDEATSNIDTQTERLVQKGIQRLLSGRTSFVIAHRLSTIRDADRIMVIDGGKIVETGTHDELMNLRGLYYDLYMSQYKFLSEGP

SEQ ID NO: 10518 - protein, 145 aa, Arabidopsis halleri subsp. halleri
SRKAEREKLRRDKLKEQFLELGKALVPNKPKSDKVSVLTDTIQMLKDVMNQVDRLKAEYATLSQESRELIQEKSELREEKATLKSDIEILNAQYQHRIRTMVPWIPHYSYPIPVVAITQGQSRFIPYSASVNTLTEQQASVQQHS

SEQ ID NO: 10519 - protein, 145 aa, Arabidopsis lyrata subsp. petraea
SRKAEREKLHRDKLKEQFLELGKALDPNRPKSDKVSVLTDTIQMLKDVMNQVDRLKAEYATLSQASRELIQEKSELREEKATLKSDIEILNAQYQHRIRNMVPWIPPYTYPIPLVAITQGQSSFSPYSASVNPLIRQQASVQKHS

SEQ ID NO: 10520 - protein, 145 aa, Arabidopsis lyrata subsp. petraea
SRKAEREKLHRDKLKEQFLELGKALDPNRPKSDKVSVLTDTIQMLKDVMNQVDRLKAEYATLSQASRELIQEKSELREEKATLKSDIEILNAQYQHRIRNMVPWIPPYTYPIPLVAITQGQSSFSPYSASVNPLIRQEASVQKHS

SEQ ID NO: 10521 - protein, 145 aa, Arabidopsis lyrata subsp. lyrata
  misc_feature (143)..(143): Xaa can be any naturally occurring amino acid
  unsure (1)..(145): unsure at all Xaa locations
SRKAEREKLHRDKLKEQFLELGKALDPNRPKSDKVSVLTDTIQMLKDVMNQVDRLKAEYATLSQASRELIQEKSELREEKATLKSDIEILNAQYQHRIRNMVPWIPHYTYPIPLVAITQGQSSFSPYSASVNPLIRQQASVQXHS

SEQ ID NO: 10522 - protein, 145 aa, Arabidopsis lyrata subsp. lyrata
SRKAEREKLHRDKLKEQFLELGKALDPNRPKSDKVSVLTDTIQMLKDVMNQVDRLKAEYATLSQASRELIQEKSELREEKATLKSDIEILNAQYQHRIRNMVPWIPHYTYPIPLVAITQGQSSFSPYSASVNPLIRQQASVQQHS

SEQ ID NO: 10523 - protein, 145 aa, Arabidopsis lyrata subsp. lyrata
SRKAEREKLHRDKLKEQFLELGKALDPNRPKSDKVSVLTDTIQMLKDVMNQVDRLKAEYATLSQASRELIQEKSELREEKATLKSDIEILNAQYQHRIRNMVPWIPHYTYPIPLVAITQGQSSFSPYSASLNPLIRQQASVQKHS

SEQ ID NO: 10524 - protein, 145 aa, Arabidopsis lyrata subsp. petraea
  misc_feature (143)..(143): Xaa can be any naturally occurring amino acid
  unsure (1)..(145): unsure at all Xaa locations
SRKAEREKLHRDKLKEQFLELGKALDPNRPKSDKVSVLTDTIQMLKDVMNQVDRLKAEYATLSQASRELIQEKSELREEKATLKSDIEILNAQYQHTIRNMVPWIPPYTYPIPLVAITQGQSSFSPYSASVNPLIRQQASFQXHS

SEQ ID NO: 10525 - protein, 145 aa, Arabidopsis lyrata subsp. petraea
  misc_feature (143)..(143): Xaa can be any naturally occurring amino acid
  unsure (1)..(145): unsure at all Xaa locations
SRKAEREKLHRDKLKEQFLELGKALDPNRPKSDKVSVLTDTIQMLKDVMNQVDRLKAEYATLSQASRELIQEKSELREEKATLKSDIEILNAQYQHRIRNMVPWIPPYTYPIPLVAITQGQSSFSPYSASVNPLIRQQASVQXHS

SEQ ID NO: 10526 - protein, 303 aa, Avicennia marina
MKGGDQQLNLPAGFRFHPTDEELVVHYLCRKCAGQQIGVPVIAEIDLYKFDPWELPDLALYGEKEWYFFSPRDRKYPNGSRPNRAAGTGYWKATGADKPVGKPKTLGIKKALVFYAGKAPRGVKTNWIMHEYRLANVDRSAGKTKNLRLDDWVLCRIYNKKGTLEKHLSVDQKEVQFSDSEEQKPEVDAFPFGDMVMPGPAPPVQAPVTLASQRMNDYMHFDASDSFPKLHTDSSSSEHVLSPEFMCDKEVQSAPKWSELESTLDFPLIYMDGFQDDPFGSQMQYGDQLSLFPDMYAYMQKPF

SEQ ID NO: 10527 - protein, 338 aa, Acinetobacter calcoaceticus
MSNHNIALQFEDGVTRFINVAQGETLSDAAYRQKINIPLDCRDGACGTCRAFCESGSYDMPEETYIEDALTPEEAEQGYILACQCRPTSDAVFQIQASSDVCKTEIHSFQGTLARVENLSDSTITFDIQLDEGQPDIHFLAGQYVNVAIPETGETRSYSFSSKPGNRLTGFVVRNVPNGKMSEFLSKNAKAGDKMTFTGPFGSFYLRNVARPVLMLAGGTGIAPFMSMLQVLEEKGSDQPVRLVFGVTNDFDLVALEKLNELQAKFPWFEYRTVVASPESNHERKGYVTGHIESEWLNGGDVDVYLCGPVPMVEAVRGWLETENIKPANFLFEKFSAN

SEQ ID NO: 10528 - protein, 441 aa, Vigna unguiculata
MSQPKIKRRVGIYEVGRTIGEGTFAKVKFARNSETGEPVALKILDKEKVLKHKMAEQIRREVATMKLIKHPNVVRLYEVMGSKTKIYVVLEFVTGGELFDKIVNHGRMSENEARRYFQQLINAVDYCHSRGVYHRDLKPENLLLDTYGNLKVSDFGLSALSQQVRDDGLLHTTCGTPNYVAPEVLNDRGYDGATADLWSCGVILFVLVAGYLPFDDPNLMNLYKKISAAEFTCPPWLSFSARKLITRILDPDPTTRITIPEILDDEWFKKDYKPPVFEENGEINLDDVEAVFKDSEEHHVTEKKEEQPTSMNAFELISMSKGLNLENLFDTEQGFKRETRFTSKSPADEIINKIEEAAKPLGFDVQKKNYKMRLANVKAGRKGNLNVATEIFQVAPSLHMVEVRKAKGDTLEFHKFYKKLSTSLDDVVWKTEDDMQMRETN

SEQ ID NO: 10529 - protein, 614 aa, Streptomyces tendae
MCGVAGWIDFERDLSEHGSTVRTMAATLANRGPDAEAVWTGRCAALAFRRLAVIDLPGGGQPMVAEEDGRQLAVLVYNGEVYNYRTLRDELAARGHRFRTASDTEVVLRAYLEWGGACVEHLDGMFAFAVWDPRRRELLLARDRLGVKPLYYARVGSGIVFGSEVKALLAHPLVEPVVDAEGLAELLSYIATPGHAIYRGIREVRAGHTLTVRDGAVRERAYWTLPSREHRDDWDTTVETVRHLLTESVASHLVADVPLCTLLSGGIDSSAIAALAARRQDTPPRTFAVDFEGHTERFREDRWHRTPDAPYAAEVARFVGTDHRPVVLRTADLADPVIGTAALTAQDLPRPTPDMDSSLYLLLRAVRQHSTVALMGETADELFGGYRWFGDRELVDSGNFPWVTMGFSVAPHGMSTGLLDPALLEKVDVPGYSAGRYADAVREVTEVPGEPERDALLRRAGYLHMTRWLPLLLTRNDHLGMAVGLEVRVPYCDHRLVEYVFNIPWRFKARGGEEKSPLRAAMAGLLPESVLRRSKSPFPVTQDPGYGAVLRDRLATVAADPASPVRPLLDTAAVDRLLTAGRPVDTTGWGERRDVEMVLQLDAWLHRYAVRLAL

SEQ ID NO: 10530 - protein, 293 aa, Streptomyces tendae
MTGQVAVIGLGGMGSGMALALLRAGFQVTVFNRSPQKAEQAARAGAAVAPSAGAAGAAARVVLLSLADEPAVDEVLFGEVVWQLQPGTVLVDTTTVSPSFARNTAVRLAASGVERLEACVMGNPEMAESGRLRIFTSGSHSAVDAAGDVLSALGQEVRHLGDAGRASALKLALNLLLGIQTAGLAEAVAFAEAAGLGRDLLLEVLLGSGWRSPVLGFRAEFMRRRTYTPAAFRTRLMHKDLELALDQATAYQLPLPLVHRAQERFAGAIDAGRGDEDAAVVVEVQPPKEGTSP

SEQ ID NO: 10531 - protein, 265 aa, Lactobacillus reuteri
MATLEIKDLHVSVKDEESKEEKEILKGVNLKMKTGEIHAIMGPNGTGKSTLSQTIMGHPNYHVTKGDILLDGESIVDMPVDERARKGLFLAMQYPAEIQGVTNAEFLRAAINARRPEDDQISVMDFIKKLDKNLELLDMSQSMTERYLNEGFSGGEKKRNEILQLLMIEPSFAILDEIDSGLDIDALKVVSKGVNSMRGDNFGSLIITHYQRLLNYIVPDTVHVMMGGRIVKTGGPDLAKKLEDEGYAGLRDELGLDIKLVDDED

SEQ ID NO: 10532 - protein, 220 aa, Citrus sinensis
MVRGKTQMRRIENATSRQVTFSKRRNGLLKKAFELSVLCDAEVAVIIFSPRGKLSEFASSSMQETIERYLKHTKDTRNKQQPTEQNMQHLKHEAANMVKKIELLEVSKRKLLGEGLASCTLEELQQIERQLEKSVSNIRARKNQVFNEQIAQLKEKGKVLEAENTRLEEKCGMENWQGSKEQPENLTNDDGASTSDVETELFIGPPPERRARRLAIPPQN

SEQ ID NO: 10533 - protein, 212 aa, Citrus sinensis
MVRGKIQMKKIENDTSRQVTFSKRRNGMLKKAYELSVLCDAEVAVIIFSQKGRLYEFSSSEMQKTLERYYRYTEERQIDRNGMERYMQQLKHEIANMIEKIEHIEVSQRKLLGQDLGSRTNEELQELDDQLERSLRSIRARKAQLFNEQMGQLKEKERLLLEDNARLCIKCGQKPWQQSTQRKEAVNNCSQSGQSSDIETELFIGLPEMRAA

SEQ ID NO: 10534 - protein, 363 aa, Helicobacter cetorum
MFVDSVEIIIASGKGGAGMVSFRREKFVIKGGPDGGDGGDGGDVYFEVDNNTDTLANFRGTKHHKAKNGAMGGTRNCAGKKGEDKVIVVPPGTQVFVDDELWLDLVTPKQKVLALKGGKGGLGNAHFKSATKQHPTYAQKGLPGVEKCVRLELKLIADIGLVGFPNAGKSTLISTLSNAKPKIANYEFTTLVPNLGVVSVDEKSEFLMADIPGIIEGASEGKGLGISFLKHIERTKVLAFVLDTSRLDLNIKEQYKRLRLELEKFSPTLANKPFGVLLNKCDILEDIDATTKEFCQFLNLKAEKLKAFDLEPYLGFLHPILRDEFENKEKSALFVLPLSAVGALNLHALKFVLSKALEIKNSL

SEQ ID NO: 10535 - protein, 982 aa, Solanum lycopersicum
MKHIFKKLHHSNRSNDAQSTSSISSSSSPASSLSSASCTTDHRNSNSVSQSPLSPSTISTASTTTTPAAPVGAGGGGGGGNLSTINRQQDYYTSEEEYQVQLALALSVSSSQSQDPFPSDVNSSNGHGVGRTAVDLARDREDAAADLLSRQYWDYGVMDYEEKVVDGFYDVYNLFTDPASRGKMPSLSELETNPGTSNFEGVIINQRIDPSLEELMQIAHCITLDCPASEISLLVLRLSELVTGHLGGPVKDANIILAKWMEISTELRTSLHTSVLPIGSLKIGLSRHRALLFKVLADHVGIPCRLVKGSHYTGVEDDAVNIVKLPNDSEFLVDLRGAPGTLIPADVLSAKDASFNSPKLNKIPSLPSNSHSGVSYPRRNLLSGQNSVLGDDFSGRSKPEKIESVHSISDAGGSSTAGSSGINKRPSSNQVDWTSPLAIGTSLYKGGRGPNAAGDGLRLNVNVVPYDQNNPEDPKNLFADLNPFQIKGSGNTLLQKNPARNKVSELQQPINTLIPGRPPAPMMWKNRYAPNEVPRKNESDSEGLFPKKNGGSSGYNISSIASTSSNIPQKSSTDTSRLHGNSRPAYRGNDEVASTRNNSSILSAELEFRRLSVQNSQNNNRETSQWEGHSLQSDDLNRTQAYGDDIIVESDHTRNLQAQSIGTNIKLKEPENPTSSGNLGPSQVDPVFDDVGDCEIPWEDLVIGERIGLGSYEKFTHADWNGTEVAVKKFLDQDFSGAALAEFKREVRIMRRLRHPNVVRFMGAITRPPHLSIITEFLPRGSLYRIIHRPHFQIDERQKIKMALDVAKGMDCSHTSNPTIVHRDLKSPNLLVDTDWNVKVCDFGLSRLKHNTFLSSKSTAGTPEWMAPEVLRNEPSNEKCDIYSFGVILWELATLRLPWSGMNPMQVVGAVGFQNKRLEIPKELDPIVARIIWECWQTDPNLRPSFAQLTVALTPLQRLVIPAYVDQLNSRLPQEISVNSTP

SEQ ID NO: 10536 - protein, 709 aa, Lactobacillus sakei
MNNLFTPSAKNVLMLAQEQAKKFNHHALGTEHLLLALVLESEGIAGNALRELGVTPTDVLEEIERLTGYGDSIVAMGVGGYLPYSPKAKQVLDLARVESQQANSVKIGTAHLLLALLRDDDIIAARILLNLGLSLAKTRQLLLQKMGIDAATAKKRAKASAKKVDQEGTPTLNQLARDLTQMARENQIDPVVGRDSEVKRLVQILARRSKNNPVLIGEPGVGKTAIAEGFAQRIINGDVPSDMQQKRLMMLDMGSLVAGTKYRGEFEDRLKKIIEEIHEDGQVILFIDELHTLIGAGGAEGAIDASNILKPALARGELQLIGATTLDEYQKYIEKDAALERRFATVTVDEPTPEDAEQILRGLRPRYEEHHGITISDEALHEAVVLANRYITNRFLPDKAIDLMDEAAAKVRLDAVNQKSPIDRLETELQSLAKEKEVAVGAQDFEKAAAIHEKEIIAKAKMAKRQAAEQENGVRTDIQVQPEDIAQVVAQWTGVPVTQLQRKESERLLQLEKVLHERVVGQEEAISAVARAIRRARSGLKDPKRPIGSFMFLGPTGVGKTELAKALAEAMFGSEDNLIRVDMSEYMERYSTSRLVGAAPGYVGYDEGGQLTEKVRNKPYSVVLFDEVEKAHPDVFNILLQVLDDGYLTDSKGRKVDFRNTIMIMTSNLGATALRDDKSVGFGVKDVTADYKAMQGRILEELKKLFRPE

SEQ ID NO: 10537 - protein, 566 aa, Malus hupehensis
MGNTCVGPSISKNGFFQSVSAVMWPNRSPDDSVHTNGEAVAETSSPKEPESPMPVLDKPPEQVTIPNPETEPKQSAKPKKLPQMKRVPSAGLAGSVLQTKTGKLKEFYSLGRKLGQGQFGITFLCVEKATGKEYACKSIAKRKLITDEDVEDVRREIQIMHHLAGHPNVISIKGAYEDAIAVHVVMELCAGGELFDRIIQRGHYTERKAAELTRTIVGVVEACHSLGVMHRDLKPENFLFVSQDEDALLKTIDFGLSIFLKPGVKFTDVVGSPYYVAPEVLRKRYGPEADVWSAGVILYILLSGVPPFWAEGEHGIFEQVLHGDLDFESDPWPSISDGAKDLVRRMLVRDPKRRLTAHEVLCHPWVQVDGVAPDKALDSAVLSRLKQFSAMNKLKKMALRVIAERLSEEEIAGLKEMFKMIDTDNSGQITFDELKAGLKRFGATLEESEIYDLMQAADVDNSGTIDYGEFVAATLHLNKIEREDHLFSAFSYFDKDGSGYITSDELQVACEEFGIEDVRLEEMIREVDQDNDGRIDYNEFVAMMQKGNFVGPGKKGLQSSFSIAFR

SEQ ID NO: 10538 - protein, 796 aa, Solanum tuberosum
MGWKRSVLGCLNLEILVGILLIFAVQLSDETDPGDVAAINALHASLGSPPLPGWGVSADPCDGQWQGVVCQETNIISIQLNAANLAGELGDNLASFSSLKTIDLSNNHIGGTFPSSLPVTLQNIFLSDNDLAGSIPSSLSSLSQLSAMSLNGNQLTGELPDSFQGLTALVNLDLSSNSFSGALPSSVGNLSSLTTLHVQNNQLSGTLDVLQDLPLADLNVENNLFSGPIPQKLLSIPNFKNTGNPFNSVSPLSPPNSSIAPLSPPTSFTRPPPAPPGPPFFKPPTSTQTPPTSDRKPGQKADGPSVTAESSSNGNKKSVKRVVWISIASVLSFIILVIAILLFLPRCFRERQDTNWSRRHEIAPDVGSRENRRDNGLLVLPGHDVEEAPPLVRPKEEQQPRRPARTPMPQQEQELNVQNLRAVPKKDTSEINLSRINIDSMLPPPPPPLPPSPPPPPPPPPFSQERVIVKPILPADNTAMKFPHRPLPLTSVKSYTIASLQQYTNSFSQDNLIGSGMLGTVYRAELPKGKLLAVKKLDRRVSNQQKDDEFLDLVNHIDGIRHANVVELMGYCAEHGQRLLVYEYCSSGTLQDALHSDEEFKQQLSWDTRIRMALGAARGLEYLHEVCEPPIIHRNFKSVNLLLDEELAVHISDCGLAPLISSGAVSQLSGQLLTTYGYGAPEFESGIYTSQSDVYSFGVVMLELLTGRMSYDRTRSRGEQFLVRWAIPQLHDIDALARMVDPSLKGKYPLKSLSHFADIISRCVLPEPEYRPQMSEVVQDLIQMTRRESPSRSDEE

SEQ ID NO: 10539 - protein, 514 aa, Ipomoea batatas
MGNRTSRHKHGEKHRSEAGSHQTHIEYTKSPGQGAGLPVRPPSIPKSVSKSDAILGKAYEDVRAHYSLGKELGRGQFGVTYLCTEIRTGKQYACKSISKKKLVTKGDKDDMRREVQIMQHLSGQPNIVEFKGAYEDANSVYLVMELCAGGELFDRIIAKGHYSERAAASLCRSIVNVVHTCHFMGVMHRDLKPENFLLSDKTENAALKATDFGLSVFIEEGRVYKDLVGSAYYVAPEVLGRKYGKEADVWSAGVMLYILLSGVPPFWAETERGIFNAILKGELDFQTKPWPSISSIAKDLVRGMLAPDPKRRLTAAQVLEHPWMREDGEASDRPLDSAVLSRMKQFRAMNKLKKLALKFIAENLSEEEIHGLKAMFTNIDTDNSGTITYEELKKGLAQLGANLTEAEVKQLMEAADVDGNGSIDYIEFITATMHKHRLEREENLYKAFQYFDKDSSGFITRDELETAMKEHGIADAATIKEIISEVDADHDGRINYEEFCTMMRSGTKQQAKLF

SEQ ID NO: 10540 - protein, 895 aa, Brassica oleracea
MEGQCRLSLASLLLLLLLLSATTLTSAADYSPTDNFFLNCGGSSDLPDTDNRTWIPDVKSKFLSSSADSKTSPAATQDPSVPDVPYMTARIFRSPFTYSFPVAAGRKFVRLHFYPNSYDGLNATNSLFSVSLGSYTLLKNFSAAQTAQALTFSFIVKEFIVNVEGGALNVTFTPESAPSNAYAYVNGIEVTSMPDLYSSTDGSLTVVGSSGGVTIDNSTALENVYRLNVGGNDISPSDDTGLYRSWYDDQPYIFGAGLGITETADPNMTIEYPSGTPTYVAPVDVYSTARSMGPTPQINLNYNLTWIFSIDSGFSYLVRLHFCEVAPNMTKINQRVFTVYLNNQTAEPEADVAGWTGGHGIPLHKDYVVNPPDGKGQQDLWLALHPNTKNNPEYYDAILNGVEIFKMNNSDGNLAGPNPIPGPQVTADPSKVLRPRTSQSKNHTAVVAGAASGAVVLGLIVGLCAMIAYRRRNRGENQPASDATSGWLPLSLYGNSHSGGSGKTNTTGSYASSLPSNLCRHFSFAEIKAATKNFDESRVLGVGGFGKVYRGEIDGGTTKVAIKRGNPMSEQGVHEFQTEIEMLSKLRHRHLVSLIGYCEENCEMILVYDYMAHGTMREHLYKTQNSPLPWKQRLEICIGAARGLHYLHTGAKHTIIHRDVKTTNILLDEKWVAKVSDFGLSKTGPALDHTHVSTVVKGSFGYLDPEYFRRQQLTDKSDVYSFGVVLFEALCARPALNPTLAKEQVSLAEWAPYCYKKGMLDQIVDPHLKGKITPECFKKFAETAMKCVLDQGIERPSMGDVLWNLEFALQLQESAEESGKGICSEMDMDEIKYDDDNCKGKNNSEKGCDVYEGNVTDSRSSGIDMSIGGRSLASEDSDGLTPSGVFSQIMNPKGR

SEQ ID NO: 10541 - protein, 891 aa, Cardamine flexuosa
MKIITEGRFHVSLLSLLLLLSASHLISAADYSPTDKILLNCGGASDLVDTDNRTWISDVKSKFLSSSGDSKTSPAATQDPSVSQVPYMTARVFRSPFTYPFPVAAGRKFVRLYFYPNTYDGLNATNALFSVSFGPYTLLKNFSAAQTAEALTYAVIVKEFIVNVEGGSLNMTFTPESNAYAFMNGIEVTSMPDIYSSTDGSLIMVGASSDFTIDNSTALENVFRLNVGGNDISPSADTGLYRSWYDDQPYIFAAGLGIPETADPNMTIQYPTGTPTYVAPVDVYSTARSMGPTASININYNLTWVFSIDSGFSYLVRLHFCEVSPRITKINQRVFTIYLNNQTAEEEADVIAWAQGNGIPFHKDYVVNPPEGKGQQDLWLALHPNTRNKPEYYDSILSGVEIFKVNTSDGNLAGSNPIPGPKVTADPFKVLRPRTSQSRNHTTIIVGAAIGAVVLALIIGLCVMVAYCRRNRGDYQPASDATSGWLPLSLYGNSHSAGSTKTNTTGSYASSLPSNLCRHFSFAEIKAATKNFDESRVLGVGGFGKVYRGEIDGGTTKVAIKRGNPMSEQGVHEFQTEIEMLSKLRHRHLVSLIGYCEENCEMILVYDYMAHGTMREHLYKTQNSPLPWKQRLEICIGAARGLHYLHTGAKHTIIHRDVKTTNILLDEKWVAKVSDFGLSKTGPTLDHTHVSTVVKGSFGYLDPEYFRRQQLTDKSDVYSFGVVLFEALCARPALNPTLAKEQVSLAEWAPYCYKKGMLDQIVDPYLKGKITPECFKKFAETAMKCVLDQGIERPSMGDVLWNLEFALQLQESAEENGKGMSGDMDMDEIKYNDGNGKGKNEMSSDVYEGNVTDSRSSGIDMSIGGRSLASEDSEGLTPSAVFSQIMNPKGR

SEQ ID NO: 10542 - protein, 891 aa, Arabidopsis lyrata
MKITEGQFRLSLLLLLSAATLISAADYSPTEKILLNCGGASDLVDTDNRTWISDVKSKFLSSSSSDSKTSPALTQDPSVPEVPYMTARVFRSPFTYTFPVASGRKFVRLYFYPNSYDGLNATNSLFSVSFGPYTLLKNFSAAQTAEALTYAFIIKEFVVNVEGGTLNMTFTPESTPSNAYAFVNGIEVTSMPDIYSSTDGTLTMVGSSTSITIDNSTALENVYRLNVGGNDISPSADTGLYRSWYDDQPYIFGAGLGIPETADPNMTIKYPTGTPTYVAPVDVYSTARSMGPTAQINLNYNLTWIFSIDSGFTYLVRLHFCEVSSNITKINQRVFTIYLNNQTAEPEADIIAWTSSNGVPFHKDYVVNPPEGNGQQDMWLALHPNPINKPEYYDSILNGVEIFKMNTSDGNLAGPNPIPGPQVTADPSKVLSPTSGKSKSNTAIVAGAASGAVVLALIIGFCVFGAYRRRKRGDYQPASDATSGWLPLSLYGNSHSAGSAKTNTTGSYASSLPSNLCRHFSFAEIKAATKNFDESRVLGVGGFGKVYRGEIDGGTTKVAIKRGNPMSEQGVHEFQTEIEMLSKLRHRHLVSLIGYCEENCEMILVYDYMAHGTMREHLYKTQNPSLPWKQRLEICIGAARGLHYLHTGAKHTIIHRDVKTTNILLDEKWVAKVSDFGLSKTGPTLDHTHVSTVVKGSFGYLDPEYFRRQQLTEKSDVYSFGVVLFEALCARPALNPTLAKEQVSLAEWAPYCYKKGMLDQIVDPYLKGKITPECFKKFAETAMKCVLDQGIERPSMGDVLWNLEFALQLQESAEESGKGVCGDMDMDEIKYDDGNCKGKNDKSSDVYEGNVTDSRSSGIDMSIGGRSLASEDSDGLTPSAVFSQIMNPKGR

SEQ ID NO: 10543 - protein, 891 aa, Cardamine flexuosa
MKIITEGRFHVSLLSLLLLLSASHLISAADYSPTDKILLNCGGVSDLVDTDNRTWISDVKSKFLSSSGDSKTSPAATQDPSVSQVPYMTARVFRSPFTYSFPVAAGRKFVRLYFYPNTYDGLNATNALFSVSFGPYTLLKNFSAAQTAEALTYAVIVKEFIVNVEGGSLNMTFTPESNAYAFMNGIEVTSMPDIYSSTDGSLIMVGASSDFTIDNSTALENVFRLNVGGNDISPSADTGLYRSWYDDQPYIFAAGLGIPETADPNMTIQYPTGTPTYVAPVDVYSTARSMGPTASININYNLTWVFSIDSGFSYLVRLHFCEVSPRITKINQRVFTIYLNNQTAEEEADVIAWAQGNGIPFHKDYVVNPPEGKGQQDLWLALHPNTRNKPEYYDSILSGVEIFKVNTSDGNLAGSNPIPGPKVTADPFKVLRPRTSQSRNHTTIIVGAAIGAVVLALIIGLCVMVAYCRRNRGDYQPASDATSGWLPLSLYGNSHSAGSTKTNTTGSYASSLPSNLCRHFSFAEIKAATKNFDESRVLGVGGFGKVYRGEIDGGTTKVAIKRGNPMSEQGVHEFQTEIEMLSKLRHRHLVSLIGYCEENCEMILVYDYMAHGTMREHLYKTQNSPLPWKQRLEICIGAARGLHYLHTGAKHTIIHRDVKTTNILLDEKWVAKVSDFGLSKTGPTLDHTHVSTVVKGSFGYLDPEYFRRQQLTDKSDVYSFGVVLFEALCARPALNPTLAKEQVSLAEWAPYCYKKGMLDQIVDPYLKGKITPECFKKFAETAMKCVLDQGIERPSMGDVLWNLEFALQLQESAEENGKGMSGDMDMDEIKYNDGNGKGKNEMSSDVYEGNVTDSRSSGIDMSIGGRSLASEDSEGLTPSAVFSQIMNPKGR

SEQ ID NO: 10544 - protein, 892 aa, Cardamine flexuosa
MKIITEGRFHVSLLYLLLLLLVSASHLISAADYIPTDKILLNCGASSNSSDADKRAWSADNINKFLSSGDSKTSPAATQDPSVSEIPYMTARVSRSPFTYSFPVATGRKFVRLYFYPNTYDGLNATDALFSVSFGPYTLLKNFSAAQTAEALTYAVIVKEFIVNVEGGSLNMTFTPESNAYAFVNGIEVTSMPDIYSSTDGTLTMVGSSGAFTIDNSTALENVFRLNVGGNDISPSADTGLYRSWYDDEPYVFGAAIGIPYTADANMTIKYPADTPTYVAPEDVYSTARTMGPNATININYNLTWVFSIDSGFSYLVRLHFCEVASNNTKINQRVFTIYLNNQTAEPEADVIGWVGGNGIAFHKDYVVNPPDGKGQQDLWLALTPNPRNKPQLYDSILNGVEIFKMNTSEGNLAGPNPIPGPKVTADPSKVVPARTGKSGNHTAIVAGAASGAVVLALIIGLCVLVTYRRRNRVNYQPASDATSGWLPLSLYGNTHSAGSGKTNTTGSYASSLPANLCRHFSFAEIKVATKNFDESRVLGVGGFGKVYRGEIDGGTTKVAIKRGNPMSEQGVHEFQTEIEMLSKLRHRHLVSLIGYCEENCEMILVYDYMAYGTMREHLYKTQNSPLAWKQRLEICIGAARGLHYLHTGAKHTIIHRDVKTTNILLDDKWVAKVSDFGLSKTGPTVDHTHVSTVVKGSFGYLDPEYFRRQQLTEKSDVYSFGVVLFEALCARPALNPTLAKEQVSLAEWAPYCYKKGMLDQIVDPYLKGKITPECFKKFSETAMKCVLDQGIERPSMGDVLWNLEFALQLQESAEENGKGVGGDVDMDEIKYDDGNCKGKNDMSSDVYEGNVTDSRSSGIDMSIGGRSLASEDSEGLTPSAVFSQIMNPKGR

SEQ ID NO: 10545 - protein, 898 aa, Cardamine flexuosa
MKIITEGRFHVSLLYLLLLLLVSASHLISAANYTPTDQILLNCGASSNSSDADKRAWSADDNNKFLSSSGDSKTSPAATQGSSVSEIPYMTARISQSPFTYSFSVAAGRKIVRLYFYPSTYDGLNATDGLFSFSFGPYTLLKNFSAAQTVEALPYAVIVKEFIVNVEGGSLNMTFTPESTPSNAYAFVNGIEVTSMPDIYSNTDGTLTMVGSSGAFTIDNSTALENVFRLNVGGSDISPSADTGLYRSWYDDQPYLFGAAIGIPYPADPTMNITYPTGTPTYVAPKDVYSTARTMGPNARININYNLTWVFSIDSGFSYLVRLHFCEVSTNTTKSNQRVFAIYLNNQTAEPEADVIAWTGNQGNGIAFHKDYVVNPPDGKGQQDLWLALTPNQRTKPQYYDSILNGVEIFKVNTSDGNLAGPNPIPGPKVTADPSKVLRPRTSQSRNHTAIVAGAASGAIVLALIIGLCVLVAYRRRNRVNYQPASDATSGWLPLSLYGNSHSAGSAKTNTTGSYASSLPSNLCRHFSFAEIKAATKNFDESRVLGVGGFGKVYRGEIDGGTTKVAIKRGNPMSEQGVHEFQTEIEMLSKLRHRHLVSLIGYCEENCEMILVYDYMAYGTMREHLYKTQNSPLPWKQRLEICIGAARGLHYLHTGAKHTIIHRDVKTTNILLDEKWVAKVSDFGLSKTGPTLDHTHVSTVVKGSFGYLDPEYFRRQQLTEKSDVYSFGVVLFEALCARPALNPTLAKEQVSLAEWAPYCYKKGMLDQIVDPYLKGKITPECFKKFSETAMKCVLDQGIERPSMGDVLWNLEFALQLQESAEENGKGVGGDMDMNEIKYDDGNCKGKNDMSSDVYEGNVTDSRSSGIDMSIGGRSLASEDSEGLTPSAVFSQIMNPKGR

SEQ ID NO: 10546 - protein, 160 aa, Medicago sativa
MDFRLMGLMLQCYTALHQMMDLSDENVEKSSSHNAPTRSYVRDAKAMAATPADVKENPNSYVFVIDMPGLKSGDIKVQVEDDNVLVISGERKREEEKEGGAKYLRMERRVGKFMRKFVLPENPNTDAVSPVCQDGVLTVTVQKLPPPRPKKPRTIEVQIA

SEQ ID NO: 10547 - protein, 475 aa, Escherichia coli
MSIRLEGYMQTTQQNAPLKRTMKTRHLIMLSLGGVIGTGLFFNTGYIISTTGAAGTLLAYLIGALVVWLVMQCLGELSVAMPETGAFHVYAARYLGPATGYTVAWLYWLTWTVALGSSFTAAGFCMQYWFPQVPVWVWCVVFCAIIFGLNVISTRFFAEGEFWFSLVKVVTIIAFIILGGAAIFGFIPMQDGSPAPGLSNITAEGWFPHGGLPILMTMVAVNFAFSGTELIGIAAGETENPRKVIPVAIRTTIARLIIFFIGTVFVLAALIPMQQVGVEKSPFVLVFEKVGIPYAADIFNFVILTAILSAANSGLYASGRMLWSLSNERTLPACFARVTKNGVPLTALSVSMLGGVLALFSSVVAPDTVFVALSAISGFAVVAVWLSICASHFVFRRRHLQQGKALSELHYRAPWYPLVPVLGFVLCLVACVGLAFDPAQRIALWCGLPFVALCYGAYFLTQPRNAKQEPEHVAE

SEQ ID NO: 10548 - protein, 303 aa, Arabidopsis thaliana
MVLFGLTQIFMSQIPDFHNMVWLSLVAAIMSFTYSFIGIGLALGKIIENRKIEGSIRGIPAENRGEKVWIVFQALGNIAFSYPFSIILLEIQDTLRSPPAEKQTMKKASTVAVFIQTFFFFCCGCFGYAAFGDSTPGNLLTGFGFYEPFWLVDFANACIVLHLVGGYQVYSQPIFAAAERSLTKKYPENKFIARFYGFKLPLLRGETVRLNPMRMCLRTMYVLITTGVAVMFPYFNEVLGVVGALAFWPLAVYFPVEMCILQKKIRSWTRPWLLLRGFSFVCLLVCLLSLVGSIYGLVGAKFG

SEQ ID NO: 10549 - protein, 296 aa, Daucus carota
MGSSPDHIADEGLALDVIRQHLLLDDFSFMENYVFPNSNSSIDQSATTSSDNTSLVSDLTFNNNVAVDSYVAGSHDATLNHFSFQPNSAIKRTNSSSFSERKPTLNIAVPPASKVGFQPAAKLSDRRVADSGEKRHYRGVRQRPWGKFAAEIRDPNRKGSRVWLGTFDTAIDAAKAYDRAAFRLRGSKAILNFPHEIAQSPETSPPVSNIGRKRVKENKAEQEREIKREKVSADSNCEVVAAGACPLTPSMWTEVWEGGEEKGGIFEIPPLSPLSPYLNFTQLNAGDVKKQQVAQQ

SEQ ID NO: 10550 - protein, 259 aa, Daucus carota
MCGGAIISDFEPPPLTTGSRKVNKHDLWDQPGFASTLPQLSGSWTDHFEAKLPQLPLHGPPLKPKKIITKEEVSEEGDEKLSQEGNKRSRKNKYRGIRQRPWGKWASEIRDPQKGVRVWLGTFNTPEEAARAYDEAAKRIRGDKARLNFPEDQPPEPVPLPPLAKKQCTAKAITEINYPNFSSPLMGMEFSTTFQPPNYCASDELELKDRHQVSNTEPCLLGWEAEIMTQIGVTDSDVYQWMMMDNLDQIANHLMQEFE

SEQ ID NO: 10551 - protein, 568 aa, Zymomonas mobilis
MSYTVGTYLAERLVQIGLKHHFAVAGDYNLVLLDNLLLNKNMEQVYCCNELNCGFSAEGYARAKGAAAAVVTYSVGAHSAFDAIGGAYAENLPVILISGAPNNNDHAAGHVLHHALGKTDYHYQLEMAKNITAAAEAIYTPEEAPAKIDHVIKTALAKKKPVYLEIACNIASMPCAAPGPASALFNDEASDEASLNAAVDETLKFIANRDKVAVLVGSKLRAAGAEEAAVKFTDALGGAVATMAAAKSFFPEENPHYIGTSWGEVSYPGVEKTMKEADAVIALAPVFNDYSTTGWTDIPDPKKLVLAEPRSVVVRRIRFPSVHLKDYLTRLAQKVSKKTGSLDFFKSLNAGELKKAAPADPSAPLVNAEIARQVEALLTPNTTVIAETGDSWFNAQRMKLPNGARVEYEMQWGHIGWSVPAAFGYAVGAPERRNILMVGDGSFQLTAQEVAQMVRLKLPVIIFLINNYGYTIEVMIHDGPYNNIKNWDYAGLMEVFNGNGGYDSGAAKGLKAKTGGELAEAIKVALANTDGPTLIECFIGREDCTEELVKWGKRVAAANSRKPVNKLL

SEQ ID NO: 10552 - protein, 391 aa, Zoogloea ramigera
MSTPSIVIASARTAVGSFNGAFANTPAHELGATVISAVLERAGVAAGEVNEVILGQVLPAGEGQNPARQAAMKAGVPQEATAWGMNQLCGSGLRAVALGMQQIATGDASIIVAGGMESMSMAPHCAHLAGVKMGDFKMIDTMIKDGLTDAFYGYHMGTTAENVAKQWQLSRDEQDAFAVASQNKAEAAQKDGRFKDEIVPFIVKGRKGDITVDADEYIRHGATLDSMAKLRPAFDKEGTVTAGNASGLNDGAAAALLMSEAEASRRGIQPLGRIVSWATVGVDPKVMGTGPIPASRKALERAGWKIGDLDLVEANEAFAAQACAVNKDLGWDPSIVNVNGGAIAIGHPIGASGARILNTLLFEMKRRGARKGLATLCIGGGMGVAMCIESL

SEQ ID NO: 10553 - protein, 398 aa, Borrelia burgdorferi B31
MIKKVAIIDGLRTPNFKFGGSFKGLNIIDESSKVVKALLERNKLYKVDEVIIGNVISAGLGQNIARQIALKSDLGDTVPAFSVNKVCGSGLKALELAFNSIALGDNDIVLAGGVEDLTNSPYLLPRKIRFDGLKFGNFGIEDSIQKDALIDSLNFISMGLTAENLSEKYRITREMQDEFAYNSHVKALKARELGYFEDEIYPLTVFDKKTNSSVTISSDEEIRDNLTLNKLASLNPVFKESGTVTAGNSSSLNDGACFLILASEERVKSLGLSPLAYIGGFKSVGLDPLYMGFGAYMAIEGIISKLSLNPSEIDLIEVNEAFAAQALSIEKALFKKYNITSDIINVNGGAIALGHPFAVSGSRILLTLSRSMKMKNKTKGIASVCIGGGQGISSFLYR

SEQ ID NO: 10554 - protein, 544 aa, Borrelia burgdorferi B31
MNQSRRILRTVYLSLFLIGLFMLINDIFSSNILSSKSSDKEVQFDLNKSFDDNEMSSVKSNSFNLINKSQDIIVETGIYVATFSTFKGNLVSLKLKNHLNLEKNPTDLINIDRKNETFFDISFDYFVDDLFLYKKIDDFNHEFKAYFKNNGKTYEYVKKYTFSKKDEYLMQFKVTVNGLEDYNLFDFDSYKIIFSSEIERLSDKAKLQYNNYLSQIIYYDNKLKYGKDGLRINNPRWIGSSTKYFGVLVSKENMEVEFKKERGTLKSFIINNVRNKKNISDEFFIYAGPKDNRYLDVFDKRDDNTFGLFDIFFGMSVEKSFWYLIQVPMQMVMQVFYDVIPNWGLSIIFLTIVVRILIFPLTFKGFRATAELSKLQPKMKELQAKFKHDPKKLNEEMGRLYKEEGVNPLGGCLPVILQLPIFFALYSLVNNLFLLRGASFIPGWIDDLSIGDSVYHFGYKLYFVSWTDIRILPFIMMFTQLGSTIVSSNMDLKNLGAQQKFLYFGMPIMFFFILYNMPSGLLIYWITTNIFTILQQYYIKMHLS

SEQ ID NO: 10555 - protein, 635 aa, Borrelia burgdorferi B31
MGKIIGIDLGTTNSCVAIMEHGKPVVIQNSEGGRTTPSIVAYTNKGERLVGQVAKNQMVTNPENTIYSIKRFMGRRFEEVASEIKMVPYKIEKGLNGDARVNISNIKKQMSPPEISAATLTKMKETAEAYLGEKVTEAVITVPAYFNDAQRQATKDAGKIAGLEVKRIVNEPTAAALAYGIEKKHEEIVAVYDLGGGTFDISILELGDGVFEVKSTNGDTHLGGDNFDDEIIKHLISEFKKESAIDLSNDKMALQRLKEAAEKAKIELSGAQEASINLPFITADANGPKHLQYTLTRAKFEQMVDHLVQKTKEPCLKAIKDAGLKASDINEVILVGGSTRIPAIQKIVKDIFGQDPNKGVNPDEAVAIGAAIQGGILTGETKDMVLLDVTPLSLGIETLGGVMTKLIERNTTIPTKKSQVFSTAADNQTSVDIKVLQGEREMAAQNRILGNFILDGIPAAPRGVPQIEVSFDIDANGIVHVSAKDMGTGKEQKIRIESSSGLSESEIDRMVKDAEAHAEEDKKLKENIEAKNTANSLIYQTEKSLKEYSEKISSEDKEAIESKIKELKESLEKEDISLIKSRTEELQKASYKIAEMMYKDSSQQNANSQQENGPQSNTSEEGKEADYEVVDEDKK

SEQ ID NO: 10556 - protein, 406 aa, Borrelia burgdorferi B31
MNLLKKKSIGIIACPGGRVFASKIIEELDRIFINIENEIIESICQDSKALKEEIFKIEKVLSPFLEGLSLSTLKSKEPLEIPVKFVKFANGEFKTEILKTIRNKDIFIVQDVANAYEVEINSSEKIIMTVNDHIMNLMTTIDACMQAKANSVSVIIPSYPYSRQDKKHSRECLTASLIGRFLEELGIRHILTLDIHSKAIENVFRKVYFENLNVSYEIFNSLKDLIDIRDSNLVIVSPDTGAVSRNKFFASSLKSPLALLYKERDYSRVSNDVADSNISVTKLLGDVEGKNVFMSDDMLATGGTLIKAMKLLKSMGAKKIICGISLPFFNGDAIKYFDKAYEEGFFYKIIGTNAVCHNDELINKPWYHEANVAPLFAEAIFAIYNKVGLQKILDRKDDIQKLITKG

SEQ ID NO: 10557 - protein, 352 aa, Borrelia burgdorferi B31
MLYSFYKVFCLKDYVFKKARIFVKENKLKANIVFPESSDSRVLKAAIVILQKNLADSIILIGKKDTVINSLKEFSNCNDILGRIEVVDPNSFPDIEMYLDEYWSLQKLKGVTKQSLKTQVLDEITFAMLMVRFGYAKSCVCGAVSTSAKVLSNALRIIPKLEGVKIISSFMIMDTLCTARNVDFCFGHNGILFFADCSVVVNPNSLELAEIALQSAKSFKDILNAKPKVALLSFSTKGSSSAKETEKVKNALNIVRNKESDLLIDGELQLDSAIIKDVAEKKCRESLVAGSANVLIFPNLDAGNIGYKLVERFAFAKAYGPFLQGFSKPISDLSRGCSVDEIVFASALMISI

SEQ ID NO: 10558 - protein, 413 aa, Borrelia burgdorferi B31
MSNTKGKKMKILIINTGSSSLKFAIYQYENSKKIISGIVEKIKSQKSIIKIVNTDGSTTERFEKGIENHQKAIEKMFKILTNSDLKILKTLSEIKIIGHRVVHGGSSLKNSVILNNSILNKLKQISELAPLHNPNAITAIEAVLKILPHAKQVLCFDTSWHQTIKEHAFLYAIPYSWYKNHNIRKYGFHGLSYSYITKRSSEILNKKIDSLNLIILHLGNGASINAVKNGKSYDTSMGITPLEGLAMGTRSGDIDPSIINLMSTILNKTTKQIEEILNKESGILGISEKSNDMRDIWNKIEEGEYQSKLAVEIMTYRIKKYIGSYIAALDFNVDAIVFTGGIGVTDYGIRALALKGFEKIGIELDLEKNEMAQSKYLESEISTINSKLKILAIPTNEESTILEDIYNLIPKNL

SEQ ID NO: 10559 - protein, 290 aa, Borrelia burgdorferi B31
MKSGFAAILGRPSTGKSTLLNSICGHKISIISPIPQTTRNNIKGIFTDDRGQIIFIDTPGFHLSKKKFNIAMMKNIHSSIGEVELILYIIDIQDKPGEEENKMLEIIKNSKIKFLVILNKIDLKNTKIKEITQFLKEKGIEDSNIIKISAEKKINTEELKNKIYENFSEGPLYYPQEYYTDQEINFRISEIIREKAIENLKEELPYSLYVDIDTLENKKGSLFIRANIFVANESQKGIIVGKNGKEIKSIGERARKTIAKIFETKCNLFLQVKLKKNWNKEDKLIKRLIN

SEQ ID NO: 10560 - protein, 536 aa, Borrelia burgdorferi B31
MKEDVLVLENITKKYGDFVANDNVSIKFKAGEVHAILGENGAGKTTLMKTIYGIHQVNSGRIILKGQEINFKDSSEAIRNGIGMVFQHFMLIPQFTAVQNIILGYENSKFGFLDYKQARKKISSLSEKYGLKIDLEKRVEDLSVGMEQKIEILKVLYRNADIIIFDEPTAVLAPSEVDDFINILKVLAQEGHTVILITHKIKEIRSIAKKCTIMRLGKVVKTVNIADIDDKDLTKLMIGKEVALRSSKIKFENHFNILEIKNLSVKDERGVLKVKDVNLDLRNGEILGISGIEGSGQEDLVDAILGLKSIFKGDILKKNSSGNLESLKGLTIKQRIDKKIGNIPSDRQKHGLILEFNVMQNIGLKSFDNPDYLRLKTIHLKSNFDLKFNFFNFIKRQFNKFKKQFVGFDLNILRKLSNQLVSHFDIRPRDILSKVKHLSGGNQQKVIVAREISLEPDILLAIQPTRGLDVGAVENIYKRIIEQRDAGRSVLLVSLELDELVNVCDRIAVMHGGRIVGILEDNFDIDVIGKMMIGLS

SEQ ID NO: 10561 - protein, 328 aa, Borrelia burgdorferi B31
MYNFKDSVNITVVSGNGGSGCVSFLREKFNAKGGPDGGNGGSGGSVIFKVRENLSTLSFYKNGHVLCAENGKPGMGFKRSGANGKDLTLFVPPNTEVYNENDGTLLYRLKNLNDEFVVLKGGRGGLGNWNFKTSVRRVPRFAQPGESGNSLSVRLELFLVADIGLVGLPNAGKSSLLNRITSAKSRVANYPFTTKIPHLGMLRRSYDDLIIADIPGIIKGASFGVGLGTKFLKHIAKTKILALVIDISEANFLESYNILLNELKSYSHKLFNKKKIIIANKLDLDGSEKNFDCLIKALGKEKVVGISIYENRGIDELIKEFFILAKTF

SEQ ID NO: 10562 - protein, 178 aa, Pseudomonas aeruginosa PAO1
MSRSLLILDRDGVINLDSDDYIKTLDEWIPIPSSIEAIARLSQAGWTVAVATNQSGIARGYYDLAVLEAMHARLRELVAEQGGEVGLIVYCPHGPDDGCDCRKPKPGMLRQIGEHYGVDLSGIWFVGDSIGDLEAARAVDCQPVLVKTGKGVRTLGKPLPEGTLIFDDLAAVASALLQ

SEQ ID NO: 10563 - protein, 517 aa, Pseudomonas aeruginosa PAO1
MWTRLLPFLAWLPGLHRGMLGREAWVGLNGAILALPQSMAYALIAGLPAEYGLYAAMLPVAIACLWGSSRYLVSGPTAAISVLLFSSVAPLAPLGSPQYVQAVLLLTFLAGAFQWLLGVLRVGSLVNFVSHSVMLGFTLGAALLIVLGQLPYLLGLAASGEGAAPGNGWRLLARFAEFDGPSLLVGGFSFALSLLVRRLRPRWPALLLGLLGGATLVWALPGTFASVAHVQALSSALPGWSPLVFDSRSILDLLPAAVACGMLGLVTSLSIARALAARQGDAFDANQEVRAQGLSNLLGPWLSASLSAGSFTRSGLNLEAGARSPLAGAFSALWVALLAVLGARLIEHVPLPAMAAGILLIAWGLIDRPALRALYRSGRAECLVAGLTALATLLLPLQNAIYAGVLASLVFYLRRTSTPRVLRQRNDEEEVLRIEGSIFFGACDYLQRLMRQCDRPRLVLDARQVNFIDFAGAVLLQQEARRLHAEGRRLVLRHARPQVREALGRQADEGCRLHYEG

SEQ ID NO: 10564 - protein, 610 aa, Pseudomonas aeruginosa PAO1
MCGLAGWVDYTRKLDDEFPAIFAMTDTLALRGPDAEGIWKHRNALLGHRRLAVIDLSGGVQPMSYRFPTGQEVTLVYTGEVYNHDALRERLRRAGHEFRTRSDTEVVLHAYLQWGERCCEYLTGMFAFAVFDGRDGHLLLVRDRLGIKPLYYARHREGLLFGSEIKSILAHPEFAARLDAVGLVDLLTLSRGTSQTPFREVQELLPGHLLSWRPNSQAKLRRYWEVRRQEHADDLQSTVQRTRELVTRALGAQLHADVPVCSLLSGGLDSTALTGIAQRIAKAEHGGDINSFSVDFVGQAEQFRSDDLRPDQDQPFALLAAQYIGSRHRTVLIDNAELVCERAREEVFRAKDVPFTFGDMDTSLHLMFGEIRRHSTVAISGEGADELFGGYGWFRDPQAVAAARFPWASRVRLPAGFIDAGFNRRCDLLQYQQASYDDGLRQVEHLAGDSPEERRMREFSHLHLKRWMVLLLERKDRLSMCNGLEVRVPYTDHELVEYVYNVPWSIKSRDGEEKWLLKRACADYVPEAVLKRRKSPYPTSANLGYERFLRGSVRRLLEDAVNPVFGIVSREFLAAELEHPEGYFNTQVSRHNLETALALEGWLRLYGLSA

SEQ ID NO: 10565 - protein, 477 aa, Pseudomonas aeruginosa PAO1
MNDTPNVREPALRRVLGLGPLLAVAIGLVVSQGVMVLMLQGAGTAGLGFIVPLGVAYLLALSYAFSFSELALMIPRAGSLSSYTEVAIGHFPAILATFSGYVVVAMFALSAELLLLDLIIGKVYPGALPPMLVAYGVLGLFTLLNLLGIDIFARLQSALALLMMIVLLVLGLGAVSSDHASAQTALASGWNPLGVSALALTAMAVWGFVGAEFVCPLVEETRRPERNIPRSMILGLSIIFLTIALYCFGALLCIPQAELAGDPLPHFLFANRVFGEYGQLFLVIAAITATCSTLNSSLAAIPRMLYGMAQNGQAFPQFKQLSRRARTPWVAVLFVAAITGLPILILGQDPDSINLLLLAAALAWLLAYIIAHVDVLALRRRYPHIARPFRTPFYPLPQLFGIAGMIYAVVHVSPTPEMTGRIFASAGVVLGVVSLVAVVWIKGVMRKPLFVPEPLETAGETAQGKSVALDPLQSPSA

SEQ ID NO: 10566 - protein, 401 aa, Pseudomonas aeruginosa PAO1
MSREVFICDAVRTPIGRFGGSLSAVRADDLAAVPLKALVERNPGVDWSALDEVFLGCANQAGEDNRNVARMALLLAGLPESVPGVTLNRLCASGMDAIGTAFRAIACGEMELAIAGGVESMSRAPYVMGKADSAFGRGQKIEDTTIGWRFVNPLMKEQYGIDPMPQTADNVADDYRVSRADQDAFALRSQQRAGRAQEAGFFAEEIVPVTIRGRKGDTLVEHDEHPRPDTTLEALARLKPVNGPEKTVTAGNASGVNDGAAALVLASAEAVEKHGLTPRARVLGMASAGVAPRIMGIGPVPAVRKLLRRLDLAIDAFDVIELNEAFASQGLACLRELGVADDSEKVNPNGGAIALGHPLGMSGARLVLTALHQLEKSGGRRGLATMCVGVGQGLALAIERV

SEQ ID NO: 10567 - protein, 461 aa, Pseudomonas aeruginosa PAO1
MLLDYLIMLVYALAMLGLGWYGMRKAKSQSDFLVAGRRLGPGLYLGTMAAVVLGGASTIGTVKLGYQFGLSGLWLVFMLGLGIIVLSLVFSRQIARLRVFTVTQVLEQRYQASSRLIGGVVMVAYDLMVAVTATIAIGSVTEVVFGIPRIPAILCGGGIVIVYSVIGGMWSLTLTDIIQFVIKTVGIFLVLLPLSIDGAGGLARMQEVLPAGFFDLGHIGLDTILTYFLLYFFGALIGQDIWQRVFTARSETVVRYAGLGAGVYCMLYGAACALIGAAARVLLPDLAVPENAYAEITREVLAPGLRGLVVAAALSAIMSTASGCLLAAATVLQEDIYARFLRPGTTSDIRLSRCITLLMGVAMLVLACLVNDVIAALSIAYNLLVGGLLVPIVGALLWRRASPQGAIASIVAGCLAVIACMARDGLLANSPIVYGLLASLATFVAVSLATRPAASLRAQPE

SEQ ID NO: 10568 - protein, 318 aa, Pseudomonas aeruginosa PAO1
MSNDHPQPLDAAEIPRFAGIPTFMRLPAFTDPAALQVGLIGVPWDGGTTNRAGARHGPREVRNLSSLMRKVHHVSRIAPYDLVRVGDLGDAPVNPIDLLDSLRRIEGFYRQVHAAGTLPLSVGGDHLVTLPIFRALGRERPLGMVHFDAHSDTNDRYFGDNPYTHGTPFRRAIEEGLLDPLRTVQIGIRGSVYSPDDDAFARECGIRVIHMEEFVELGVEATLAEARRVVGAGPTYVSFDVDVLDPAFAPGTGTPEIGGMTSLQAQQLVRGLRGLDLVGADVVEVSPPFDVGGATALVGATMMFELLCLLAESAARSA

SEQ ID NO: 10569 - protein, 464 aa, Pseudomonas aeruginosa PAO1
MASERNNGILIGGKRPEYVHSAQGTGLRRILGLPALVFFGLVYMVPLTMFTTYGVVTEITGGRTASAYLITLAAMLFTAFSYSFMVKKYPIAGSAYSYTSLSFGPCVGFLAGWSLLLDYLFLPMINYLLIGLFLNIAFPMVPAWVFVLAAIGLVTVLNVIGISSVAGMSNVIVGAQFVFAVVFVAMAVKHLAGIPSLDLSLPFVGDGSQPGFAPLMAGAAVLCLSFLGFDAVSTLAEETRDPQRDIPRAIVITTVGAGLLFTVLAVFSQLVFPGSVFQDAESAANEVMLAAGGKFLASFFTAAYVAGAAGSALASQASVSRILYSMGRDGILPRRVFGSLSERFKTPVIAILVVSVISLLAVVIDLTTLASMISFGALVAFSAVNLAVIRSYLLLDGRRAPRDLLRYGLVPAIGLGLTLWLWTSLSALTLVIGLTWFAAGLAYLALHTGGFRRKAPTVTFSEQN

SEQ ID NO: 10570 - protein, 383 aa, Pseudomonas aeruginosa PAO1
MQPAFLRRHLGAACLMLAAGLASAAHADTGNVQRAIDWAQGQASVRHPASDERSPLVIAHRGASGYVPEHTLGAYALAVMMGADYVEPDLVMTRDGKLVARHDNELGLTTDVAQHPEFADRKRTQKVDGVELTGWFSEDFTLAELKTLRAIERIPTIRPGNARLDGTFEIPTLQEIIDLVKSLQISQQRTIGLYPEIKHGTHFQRLGLAMERPLVKTLHRNGYLGPRAPVFIQSFEVNNLKELKRLTGIRLVQLYGSGQPYDQQAAGGSLTYAEMATAKGLRQVARYAYGVGPDKSYVIPRDANGNLGQPTRFVGDAHAAGLKVHPYTFRAENSFLPAEFRSADGNPQSRGDLAGEIRAYLDAGIDGLFSDQPDVAVRLREQR

SEQ ID NO: 10571 - protein, 639 aa, Pseudomonas aeruginosa PAO1
MSFSSLGLSEALARAVEAAGYSQPTPVQQRAIPAVLQGRDLMVAAQTGTGKTGGFALPVLERLFPAGHPDREHRHGPRQARVLVLTPTRELAAQVHDSFKVYARDLPLNSTCIFGGVGMNPQIQALAKGVDVLVACPGRLLDLAGQNKVDLSHVEILVLDEADRMLDMGFIHDVKKVLAKLPPKRQNLLFSATFSKDIVDLANKLLHNPERIEVTPPNTTVERIEQRVFRLPAPQKRALLAHLVTVGAWEQVLVFTRTKHGANRLAEYLTKHGLPAAAIHGNKSQNARTKALADFKANDVRILVATDIAARGLDIDQLPHVVNYELPNVEEDYVHRIGRTGRAGRSGEAISLVAPDEEKLLKAIEKMTRQRIPDGDAQGFDPEAVLPEVAQPEPREAPQKQPRRDKERRSSRERKPKDAQASNPDSNVAAAQDGTEKPAGKRRRRGGKNKENREAGQAQQPRQSREARPAKPNRPPEVDGNRDPEEFLDDDFDNFGNRADYVSPYQGQENKGRGRRGGQQKPQGGTGQQGRGQGQGQARGKSQGAAQGGARGQGAGQGKAKKPRAGKPRGQGRENASRMSDAPLREPSEYGTGKQPSRQPVVINKRDLVRMDRFPTAEQLDELEPRRKGERPALLTRNR

SEQ ID NO: 10572 - protein, 69 aa, Pseudomonas aeruginosa PAO1
MSRQNGTVKWFNETKGYGFITPESGPDVFVHFRAIEGNGFKTLAEGQKVSFEVVQGQKGMQAERVQVIN

SEQ ID NO: 10573 - protein, 214 aa, Pseudomonas aeruginosa PAO1
MVAITHTPKLKHLDKLLAHCHRRRYTAKSTIIYAGDRCETLFFIIKGSVTILIEDDDGREMIIGYLNSGDFFGELGLFEKEGSEQERSAWVRAKVECEVAEISYAKFRELSQQDSEILYTLGSQMADRLRKTTRKVGDLAFLDVTGRVARTLLDLCQQPDAMTHPDGMQIKITRQEIGRIVGCSREMVGRVLKSLEEQGLVHVKGKTMVVFGTR

SEQ ID NO: 10574 - protein, 305 aa, Pseudomonas aeruginosa PAO1
MTDMHDDIPAGSRCGYVAIVGRPNVGKSTLLNHILGQKLAITSRKPQTTRHNMLGIKTEGEVQAVYVDTPGLHKSGEKALNRYMNRTASAALKDVDVVIFVVDRTRWTEEDQMVLERVQYVSCPVLIAVNKTDRIEEKADLLPHLEWLTQQLPKAEVVPISAQHGTNLDVLEKLVAERLPESEHFFPEDQITDRSSRFLAAELVREKIMRQLGAELPYQITVEIEEFKQEGRILHIHALILVEREGQKKIIIGDKGERIKSIGQNARKDMEVLFDSKVMLNLWVKVKGGWSDDERALRSLGYGDL

SEQ ID NO: 10575 - protein, 471 aa, Pseudomonas aeruginosa PAO1
MSSVGEQKVQDGSLKRELGERHIRLMALGACIGVGLFLGSAKAIQMAGPAIMISYILGGLAILVIMRALGEMAVHNPVAGSFSQYAKDYLGPLAGFITGWNYWFLWLVTCVAEITAVAVYMGIWFPDVPRWIWALAALASMGTINLIAVRAFGEFEFWFALIKIVTILAMVVVGIGMIAFGFGNDGIATGISNLWAHGGFMPNGIQGVLMSLQMVMFAYLGVEMIGLTAGEARNPTKTIPSAINSVFWRILLFYVGSLFVIMSLYPWNEIGTQGSPFVMTFERMGIKTAAGIINFVVITAALSSCNGGIFSTGRMLYSLAQHRQAPAFFGKASRSGVPRRALILSILALLLGVLLNYLVPEKVFVWVTSIATFGAIWTWAMILLAQLRFRKTLSPAECDKLQYRMWLYPVSSYLALAFLVMVVVLMAFFEDTRIALYIGPPFILLLTVLYYAFNLAPKEPAGTGSVSRAAS

SEQ ID NO: 10576 - protein, 704 aa, Pseudomonas aeruginosa PAO1
MHTFFIAPTGFGVGLTSISLGLLRALERAGLKVGFFKPIAQLHPGDLGPERSSELVARTHGLDTPKPLPLAQVERMLGDGQLDELLEEIISLYQRAAADKDVVIVEGMVPTRHASYAARVNFHLAKSLDAEVILVSAPENETLTELTDRIEIQAQLFGGPRDPKVLGVILNKVRGEADAANAEDGVADFARRLTEHSPLLRDDFRLIGCIPWQDELNAARTRDIADLLSARVINAGDYEQRRVQKIVLCARAVPNTVQLLKPGVLVVTPGDRDDIILAASLAAMNGVPLAGLLLCSDFPPDPRIMELCRGALQGGLPVLSVATGSYDTATNLNRMNKEIPVDDRERAERVTEFVAGHIDFEWLKQRCGTPRELRLSPPAFRYQVVQRAQKAGKRIVLPEGSEPRTVQAAAICQARGIARCVLLAKPEEVQAVAQAQGIVLPEGLEIIDPDLVRQRYVEPMVELRKGKGLNAPMAEQQLEDSVVLATMMLALDEVDGLVSGAIHTTASTIRPALQLIKTAPGYNLVSSVFFMLLPDQVLVYGDCAVNPDPSASDLAEIAVQSAASAQAFGIPARVAMISYSTGDSGSGVDVDKVREATRLAREQRPDLLIDGPLQYDAAAIASVGRQKAPNSPVAGQATVFIFPDLNTGNTTYKAVQRSADCVSVGPMLQGLRKPVNDLSRGALVEDIVYTIALTAIQADAQAPA

SEQ ID NO: 10577 - protein, 394 aa, Pseudomonas aeruginosa PAO1
MPSRNILVINCGSSSIKFALVNEAHSLFPLHGLAERLGSRDAVLRWKRGGDSDSLMIPNADHRAALAQLLPMVQNAAGGKLHGIGHRVVHGGELFTHATRIDDRVVEAIRATAPLAPLHNPANLQGIEAAMTLFPKLPHVAVFDTAFHQSLPEHAYRYALPEALYREHGVRRYGFHGTSHRYVSHRAAEMAGLAVGDSSWLSAHLGNGSSTCAIVNGQSLDTSMGLTPLEGLVMGTRSGDVDPNLHSHLARTLGWSLERIDSMLNNESGLLGLSDLSNDMRTLEQEREQGHPGAALAIEVFCYRLAKSLAAMSCALPQLDGVIFTGGIGENSPLVRAKTAAHLRLFDLRLDQEANARCVRGVAGPIQAAGHPRVLVIPTNEERQIALDTLALLD

SEQ ID NO: 10578 - protein, 472 aa, Pseudomonas aeruginosa PAO1
MDGQHPHSGELKRGLKNRHIQLIALGGAIGTGLFLGSAGVLKSAGPSMILGYAIAGFIAFMIMRQLGEMIVEEPVAGSFSHFAHKYWGGFAGFLSGWNCWVLYILVGMSELTAVGKYIHYWWPEVPTWATAALFFVVVNAINLTNVKAFGEAEFWFAIIKVVAIIGMILLGCYLLFSGSGGPQASVSNLWAHGGFFPNGVSGLVMAMAIIMFSFGGLEMLGFTAAEADKPRTVIPKAINQVIYRILIFYIGALVVLLSLTPWDSLLQTLNASGDAYSGSPFVQIFSMIGSGTAAHLLNFVVLTAALSVYNSGTYCNGRMLLGLAEQGDAPRALARVDKRGVPVRALVVSALVTFLAVVVNYVIPHQALELLMSLVVAALVINWAMISMAHLKFRAQMDRQGTRTHFRAFWYPYGNYLCMAFVVFILGVMLLIPGIQVSVYAIPVWLLVMWACYRLKGAPRPMPGLRVKPVTE

SEQ ID NO: 10579 - protein, 412 aa, Pseudomonas aeruginosa PAO1
MALIVQKFGGTSVGTVERIEQVAEKVKKFREAGDDVVVVVSAMSGETNRLIGLANQIMEQPVPRELDVMVSTGEQVTIALLSMALIKRGVPAVSYTGNQVRILTDSAHTKARILHIDDTHIRADLKAGRVVVVAGFQGVDGNGNITTLGRGGSDTTGVALAAALKADECQIYTDVDGVYTTDPRVVPQARRLDKITFEEMLEMASLGSKVLQIRAVEFAGKYNVPLRVLHSFQEGPGTLITIDDEEESMEQPIISGIAFNRDEAKLTIRGVPDTPGVAFKILGPISAANVEVDMIVQNVAHDNTTDFTFTVHRNDYLNALEILKQTAANIGAREAIGDTNIAKVSIVGVGMRSHAGVASRMFEALAKESINIQMISTSEIKVSVVIEEKYLELAVRALHTAFELDAPARQGE

SEQ ID NO: 10580 - protein, 329 aa, Pseudomonas aeruginosa PAO1
MRILFFSSQAYDSESFQASNHRHGFELHFQQAHLQADTAVLAQGFEVVCAFVNDDLSRPVLERLAAGGTRLVALRSAGYNHVDLAAAEALGLPVVHVPAYSPHAVAEHAVGLILTLNRRLHRAYNRTREGDFSLHGLTGFDLHGKRVGVIGTGQIGETFARIMAGFGCELLAYDPYPNPRIQALGGRYLALDALLAESDIVSLHCPLTADTRHLIDAQRLATMKPGAMLINTGRGALVNAAALIEALKSGQLGYLGLDVYEEEADIFFEDRSDQPLQDDVLARLLSFPNVVVTAHQAFLTREALAAIADTTLDNIAAWQDGTPRNRVRA

SEQ ID NO: 10581 - protein, 63 aa, Pseudomonas aeruginosa PAO1
MKWFNTSKGFGFISRDSGEDIFVHFRAIRGEGHRILIEGQRVEFSVVQRDKGLQAEDVIASRR

SEQ ID NO: 10582 - protein, 417 aa, Pseudomonas aeruginosa PAO1
MSQSLKRALFSALLVILVSYPILGLKLRTVGIKLEVLGADAQTLWTIAAAALAMFVWQLFRDRIPLKLGRGVGYKVNGSGLKNFLSLPSTQRWAVLALVVVAFVWPFFASRGAVDIATLILIYVMLGIGLNIVVGLAGLLDLGYVGFYAVGAYTYALLAEYAGFGFWTALPIAGMMAALFGFLLGFPVLRLRGDYLAIVTLGFGEIIRILLRNMTEITGGPNGIGSIPKPTLFGLTFERRAPEGMQTFHEFFGIAYNTNYKVILLYVVALLLVLLALFVINRLMRMPIGRAWEALREDEVACRALGLNPTIVKLSAFTIGASFAGFAGSFFAARQGLVTPESFTFIESAMILAIVVLGGMGSQLGVILAAVVMVLLQEMRGFNEYRMLIFGLTMIVMMIWRPQGLLPMQRPHLELKP

SEQ ID NO: 10583 - protein, 473 aa, Pseudomonas aeruginosa PAO1
MAAKVLLVEDDRALREALSDTLLLGGHEFVAVDSAEAALPVLAREAFSLVISDVNMPGMDGHQLLGLIRTRYPHLPVLLMTAYGAVDRAVEAMRQGAADYLVKPFEARALLDLVARHALGQLPGSEEDGPVALEPASRQLLELAARVARSDSTVLISGESGTGKEVLANYIHQQSPRAGKPFIAINCAAIPDNMLEATLFGHEKGSFTGAIAAQPGKFELADGGTILLDEISEMPLGLQAKLLRVLQEREVERVGARKPINLDIRVLATTNRDLAAEVAAGRFREDLYYRLSVFPLAWRPLRERPADILPLAERLLRKHSRKMNLGAVALGPEAAQCLVRHAWPGNVRELDNAIQRALILQQGGLIQPADLCLTAPIGMPLAAPVPVPMPAMPPATPPSVEIPSPAAGQDASGALGDDLRRREFQVIIDTLRTERGRRKEAAERLGISPRTLRYKLAQMRDAGMDVEAYLYAI

SEQ ID NO: 10584 - protein, 588 aa, Pseudomonas aeruginosa PAO1
MPAILSSRQRIALRLAWRFMAPYRWRMLGALVALLFTAAITLSLGQGIRLLVDQGFLTASPELLNRYILLFFVLVLGLAVGTFVRFYLVSWIGERFVADIRKRVFDHLIELHPGFYETNRSSEIQSRLTADTTLLQTVIGSSLSMALRNALMLVGGVLLMFVTNAKLTSIVVLALPLVIAPILLFGRRVRSLSRESQDRVADVGSYVGETLGQIKTVQAYNHQAQDRQRFAGTVERAFDTARKRIAQRAWLITVVIVLVLGAVGIMLWVGGRDVIAGSISAGELAAFVFYSLIVGMAFGTLSEVIGELQRAAGAAERIAELLRARSEIRPPAQPRKLAARVSGRIELQAVRFAYPTRPEHWAIDDISLAVEPGETLALVGPSGAGKSTLFDLLLRFFDPQQGRLLLDGQPIVELDPADLRRSFALVSQNPALFFGSVEENIRYGRPHASAAEVEAAARAAHAHEFILGLPQGYATHLGEGGIGLSGGQRQRLAIARALLVDAPVLLLDEATSALDAESEHLIQQALPGLMSGRTTLVIAHRLATVQSADRIAVIDQGRLVAIGSHARLIAENPLYARLAELQFAAGGR

SEQ ID NO: 10585 - protein, 69 aa, Pseudomonas aeruginosa PAO1
MADREVGTVKWFNDAKGYGFIQRDSGPDVFVHYRAIRGEGHRSLVEGQKVEFSVIQGQKGLQAEDVSKV

SEQ ID NO: 10586 - protein, 203 aa, Datura metel
MSEEIISVSDRFLLSLIEEHLLSDNSDDSGSELTSTEENWEEIFADFLNWSGSEIQKRGSPSSESCQSNSMAESCQEDSVVGTPPEAAAGGGCSKDWNRYKGVRRRPWGKFAAEIRDPKKKGSRIWLGTYETPEDAALAYDAAAFNMRGAKARLNFPHLIGSNISGPVRVNPRKRFPAEPSTTSSSSSSSSSENSGGRKKRRY

SEQ ID NO: 10587 - protein, 282 aa, Clostridium butyricum
NEELKQFDAIFDQFQFRKDVILKVLSEKNFDIKTLSAVVGRGGMLKPVEGGTYAVNDAMVEDLKVGVQGPHASNLGGILARSIADEIGVPSFIVDPVVTDELADVARLSGTPDIPRKSKFHALNQKAVAKRYGKESGKGYENLNLVVVHMGGGVSVGAHNHGKVVDVNNALDGDGPFSPERAGSVPAGDLIKMCFSGKYSESEVYSKIVGKGGFVGYLNTNDVKGTIDKMEAGDKECENIYKAFLYQITKAIGEMSAALNGKVDQIVLTGGIAYSPTLVPYL

SEQ ID NO: 10588 - protein, 533 aa, Pseudomonas aeruginosa PAO1
MTTCGEFLVKQLEAWGVETVFGIPGVHTVELYRGLPGSRIRHVTPRHEQGAGFMADGYARVTGKPGVCFIITGPGMTNILTAMAQAYADSIPMLVISSVNERARLAHGNGYLHELPNQRNLVGNVCAFSHTLMSAEELPAVLARAFAVFDSERPRPVHIELPLDVITAPAEHLALRPRTVTSRPAPALAPLREAAARLRNAKKPLLLLGGGCVEAAAEARALAAALDAPTALTINAKGLLPADHPLLLGSNQSCVPVRELATEADVVLAIGTELGETDYDVVFDGGFALDGELIRIDIDPQQLMRNYTPSLAIHSDARLAMRVLLAELPGGEASPDSPGARRAAAVRQRLAEDFAGWSHYRQLFAAILAEWPDARFVGDSTQTVYSGNHLVDLDEPRRWFNASTGYGTLGYGLPAAIGAKLGEPGRPVVSLMGDGGLQFTLPELASAVEAKVGIVVLLWNNHGYGEIKRYMERREITPLGVDIYTPDFLAIARGFGCAAERARDLEHLRELLRGAPADRPLIVEVLQAAPFHP

SEQ ID NO: 10589 - protein, 319 aa, Pseudomonas aeruginosa PAO1
MDKNLHQPLGGNEMPRFGGIATMMRLPHVQSPAELDALDAAFVGVPLDIGTSLRSGTRFGPREIRAESVMIRPYNMATGAAPFDSLNVADIGDVAINTFNLLEAVRIIEQEYDRILGHGILPLTLGGDHTITLPILRAIKKKHGKVGLVHVDAHADVNDHMFGEKIAHGTTFRRAVEEDLLDCDRVVQIGLRAQGYTAEDFNWSRKQGFRVVQAEECWHKSLEPLMAEVREKVGGGPVYLSFDIDGIDPAWAPGTGTPEIGGLTTIQAMEIIRGCQGLDLIGCDLVEVSPPYDTTGNTSLLGANLLYEMLCVLPGVVRR

SEQ ID NO: 10590 - protein, 455 aa, Pseudomonas aeruginosa PAO1
MSSSPAPESALKPTLGVFDVVAITVSAVTPASSVFVIAPFAIQQAGTGAFWAFALAGVLALMFAWCYAELGRAHSTAGGEYVYAKRVFGGLAGYATFLTVLAMLLFIPPVLATGAATYLNAALGTHFDAQTVALAIVAFSYLLGILNIRVNAWVTGTCLLLEVAALLVIVGLGFGHAQQPASVLLQPQVVGDGGLLAIAPWALVIGAVGTALFSYNGFGGAVLLAEDMKDGGHSVHRAVLWSLALVVLIEIVPLAALLIGAPSLPAMLASPDPIGYLLNSHGNETLSRLVSAGIFLSVFNAIVAIVIQSARVIFSSGRDALWMPALNRAFTRIHPRWESPWLATLFLAIPSAALSFSSNLAELTSFTVLLIVMVYLIVALCALFSRVLRRDREHPYRMPLWPLPALLAVSGAGYLLLNLFLAASARDVMIIVGLLAVSVILYCTYGKLSPAFQKL

SEQ ID NO: 10591 - protein, 296 aa, Pseudomonas aeruginosa PAO1
MAKIGFIGTGIMGKPMAQNLQKAGHSLFLSTHHDAAPADLLEAGAIALANPKEVAQEAEFIIVMVPDTPQVEDVLFRKDGIAEGAGPNKVVIDMSSISPTATKGFAEKIKATGAQYLDAPVSGGEVGAKAATLSIMVGGCPNTFERALPLFQAMGKNITRVGGNGDGQTAKVANQIIVALNIQAVAEALLFAARNGADPAKVREALMGGFASSRILEVHGERMVKGTFDPGFRISLHQKDLNLALAGARELNLNLPNTANAQQVFSTCAAIGGSNWDHSALIKGLEHMANFSIRDE

SEQ ID NO: 10592 - protein, 243 aa, Prunus mume
MAYENKSMSLDSPQRKLGRGKIEIKRIENTTNRQVTFCKRRNGLLKKAYELSVLCDAEVALIVFSNRGRLYEYANNSVKETIERYKKACAESTNTGSVSEASTQYYQQEAAKLRAQIGNLQNSSRHMMGESLSSMNMKDLKNLESKLEKGINRIRSKKNELLFAEIEYMQKREIDLHNNNQLLRAKIAENERSQQNINVMAGGGSYEIMQSQPYDSRNYFQVNALQPNHQYNSRQDPMALQLV

SEQ ID NO: 10593 - protein, 573 aa, Pseudomonas aeruginosa PAO1
MPLARWVPGLDSLLHYRRAWFRPDVQAGLSVAAIQIPTAIAYAQIAGFPPQVGLYACILPMLIYALIGSSRQLMVGPDAATAAMVAAAITPLAAGDPQRLVDLSMIIAIMVGLFSIVAGLARAGFIASFLSRPILVGYLNGIGLSLLVGQLGKLFGYEAATSGFVAGILALLENLLHIHWPTLILGSLSLLLMVLLPRRFPQLPGALCGVLLASLAAALLGLDRYGVELLGEVPAGLPQLSWPQTSLEELKSLLRDATGITVVSFCSAMLTARSFAARHGYSINANHEFVALGLANIGAGVSQGFAISGADSRTAVNDMVGGKTQLVGVVAALVIAATLLLLNKPLGWVPMPALGAVLLLAGWGLIDVQALKGFWKLSRFEFSLCLLTTVGVLSVGVLPGIFVAVSIAVLRLLYYTYRPSDAVLGWMHGIDGQVELAKYPQATTLPGLVIYRFDAPLLFFNADYFKQRVLAVVDGSERPNAVLLNAEAMTNLDISGLATLHEVQQILKAQGVHLSLARVTGQTLDLLQRSSMLGEIKPPLVFSSVRSGVSAYRYWLRQQERLAAQAAATSGNA

SEQ ID NO: 10594 - protein, 402 aa, Pseudomonas aeruginosa PAO1
MTDRAIRSQAWAGGSDAPEKSALDIGFMALTDSASLIVAATQGFAQPYGLTLNLRRQPSWATLRDKLLSGELDAAQCLYGLVYGVQLGLGGSAASEMAVLMGLCQNGQAINLSEPLKQAGVTSAEALLRHRRQNGARLTLAQTFPTGTHALWLNYWLASLGLHPLHDVHSVVVPPAQMVGHLQAGRIDGFCAGGPWGALAVDQGQGFTIATSQAIWPDHPEKVLGTTRAFVDAYPNTARALVMAVLDASRFIEQNAENRLGTAQLISGRDYVDAPLGAIQPRFFGRYQDGLGNAWQDPHPLRFYADGEVNRPWLSDGMWFMTQFRRWGLLREDPDYLGIARRVQQTALYRDAATALGLCLDGADMRRSTLIDGRTWDGSDPAGYARSFPIHALAETGQGIDL

SEQ ID NO: 10595 - protein, 556 aa, Pseudomonas aeruginosa PAO1
MSKPETTAAPNFLRQIVQADLDAGKHAKIVTRFPPEPNGYLHIGHAKSICLNFGLAQEFAGDCHLRFDDTNPAKEDQEYIDAIEADIKWLGFQWSGEVCYASNYFDQLHAWAVELIKAGKAFVCDLGPEEMREYRGTLTEPGRNSPYRDRSVEENLDLFARMKAGEFPDGARSLRAKIDMGSPNMNLRDPILYRIRHAHHHQTGDKWCIYPSYDFTHGQSDAIEGITHSICTLEFEDHRPLYEWFLANLPVPAQPRQYEFSRLNLNYTVTSKRKLKQLVDEGHVSGWDDPRMSTLSGYRRRGYTPESIRNFCEMIGVNRASGVVDIGMLEFSIRDHLDATAPRAMCVLKPLKVVITNYPEGQVENLELPRHPKEDMGVRVLPFGRELFIDAGDFEEVPPAGYKRLIPGGEVRLRGSYVIRADEAIKDADGNIVELRCSYDPDTLGKNPEGRKVKGVIHWVPAEGSVECEVRLYDRLFRSANPEKAEEGGSFLDNINADSLQVLAGCRAEPSLGQANPEDRFQFEREGYFVADLKDSRPGKPVFNRTVTLRDSWGQG

SEQ ID NO: 10596 - protein, 751 aa, Pseudomonas aeruginosa PAO1
MYKDLKFPVLIVHRDIKADTVAGERVRGIAHELEQDGFSILSTASSAEGRIVASTHHGLACILVAAEGAGENQRLLQDVVELIRVARVRAPQLPIFALGEQVTIENAPAESMADLHQLRGILYLFEDTVPFLARQVARAARNYLAGLLPPFFRALVEHTAQSNYSWHTPGHGGGVAYRKSPVGQAFHQFFGENTLRSDLSVSVPELGSLLDHTGPLAEAEDRAARNFGADHTFFVINGTSTANKIVWHSMVGREDLVLVDRNCHKSILHSIIMTGAIPLYLTPERNELGIIGPIPLSEFSKQSIAAKIAASPLARGREPKVKLAVVTNSTYDGLCYNAELIKQTLGDSVEVLHFDEAWYAYAAFHEFYDGRYGMGTSRSEEGPLVFATHSTHKMLAAFSQASMIHVQDGGTRKLDVARFNEAFMMHISTSPQYGIIASLDVASAMMEGPAGRSLIQETFDEALSFRRALANVRQNLDRNDWWFGVWQPEQVEGTDQVGTHDWVLEPSADWHGFGDIAEDYVLLDPIKVTLTTPGLSAGGKLSEQGIPAAIVSRFLWERGLVVEKTGLYSFLVLFSMGITKGKWSTLVTELLEFKRCYDANLPLLDVLPSVAQAGGKRYNGVGLRDLSDAMHASYRDNATAKAMKRMYTVLPEVAMRPSEAYDKLVRGEVEAVPIARLEGRIAAVMLVPYPPGIPLIMPGERFTEATRSILDYLEFARTFERAFPGFDSDVHGLQHQDGPSGRCYTVECIKE

SEQ ID NO: 10597 - protein, 451 aa, Pseudomonas aeruginosa PAO1
MAGGEKAGKRGMGFWTCSALVIGNMVGSGVFLLPSSLAAFGGLSLFGWLVSSTGAVLLALTFARLARVNPGAGGPYAYTRDGFGSFAGYLCAWTYWKAAWIGNAAIAVTLVGYLRVFIPALADPLLMVSVAIAAIWLCTLINLRGIGTFSVVQNLLTILKLLPLLLVGILGWFHFNPEHLAIPARSELPNMGYAQAIATTAALTLWSFIGLESATVPADDVEDPRRTIPRATLFGTLAAAALYILSITAVQGLMPPEVLARSTSPFADAARILMGDWGYYLVAAGAVIACLGALNGWVLLQGQIPVAPARDGLFPESLGQLNKNGAPAHGLLASGLLVTALVMVDGHGDLVDVFNVIILLGTMTGVVPYAFCTAALLQLLAVRPDEFSPRSRRQLLVIGSLGFAYSLWALYGTGQQAIFWGFLVLMAGIPMYTWRQWRNQVNGVPTLKAND

SEQ ID NO: 10598 - protein, 552 aa, Pseudomonas aeruginosa PAO1
MYVYDEYDQRIVEDRVKQFRDQTRRYLAGELTGEEFRPLRLQNGLYIQRYAPMLRIAVPYGLLSSRQLRKLAQIARDYDKGYAHISTRQNVQFNWPELEDVPEILAELATVQMHAIQTSGNCIRNTTTDQFAGVARDELVDPRPWCEIIRQWSTFHPEFAHLPRKFKIAVNGAVSDRAAIEVHDIGLEAVKNEAGELGFRVSVGGGLGRTPIVGSFINEFLPWQHLLGYLDAILRVYNRYGRRDNKYKARIKILVKALTPEVFAERVEAEWANLKDGPSTLTEAEVQRVAAHFVDPAYKALDDLDESLARLDAEHPGFARWRARNTFAHKKPGYVAVTLSLKPTGTAPGDVTDKQLEAIADLADRYSFGEVRNSHNQNIILADVEQGELFALWGELRELGFATPNVGLLTDIICCPGGDFCSLANAKSIPIAEAIQRRFDNLDYLFDIGDIDLNISGCMNACGHHHVGHIGILGVDKKGAEFYQVSLGGSSARDASLGQILGPSFAQEQMADVIDKIIQVYVERRTEEEPFIDTFRRIGIDPFKERVYAANH

SEQ ID NO: 10599 - protein, 393 aa, Pseudomonas aeruginosa PAO1
MQDVVIVAATRTAVGSFQGSLAGIPAPELGAAVIRRLLEQTGLDAGQVDEVILGQVLTAGSGQNPARQAAIKAGLPVGVPAMTLNKVCGSGLKALHLGAQAIRCGDAEVIVAGGQENMSLAPYVMPGARTGLRMGHAKLVDSMIEDGLWDAFNDYHMGITAENLAEKYGLTREEQDAFAAASQQKAIAAIEGGRFRDEITPIQVPQRKGEPLGFDTDEQPRAGTTVEALAKLKPAFRKDGSVTAGNASSLNDGAAAVLLMSAAKAKALGLPVLARIASYASAGVDPAIMGIGPVSATRRALDKAGWSLEQLDLIEANEAFAAQSLAVGRELGWDAARVNVNGGAIALGHPIGASGCRVLVTLLHEMIRRDAKKGLATLCIGGGQGVALTLARD

SEQ ID NO: 10600 - protein, 456 aa, Pseudomonas aeruginosa PAO1
MSNPPPTAERTQLRKSLKLWQIVMIGLAYLTPMTVFDTFGIVSGISQGHVPTAYLLALAGVLFTAISYGKLVRQFPTAGSAYTYAQRAINPHVGFMVGWSSLLDYLFLPMINALLAKIYLTALFPEVAPWIWVVMFVLIMTLINIKSVNLVANFNTVFVLVQLAIIVVFIGLVIHGLNNGEGTATVLSTQPFFSEHAHLSAMVAGATILCFSFLGFDAVTTLSEETRDAGRVIPRAIFLTALYGGVIFITVSYFLQSYFPTNVRFKEPDAALPEIALYVGGKLFQSIFLCATFINTLASGLASQASVSRLLYVMGRDNVLPERIFGFVHPKWRTPSINVLIVGMVALSAISFDLVTATALINFGALVAFTFVNLSVIVHFYVRGGRNRSLKEHFHYLVLPLLGAAIVAVLWLNLESTSLVMGLIWAGLGFGYLFYLTRSFSRPPPRFQESELSPTQ

SEQ ID NO: 10601 - protein, 393 aa, Pseudomonas aeruginosa PAO1
MSSLPLYFDYAATTPVDERVIRAMVECLGYQACFGNPASNSHAYGRQARRAVERAREQVAALVGASAGQIVWTSGATESNNLALKGVAQALDAPGHLITSRLEHKAVLDTVQQLADDGWSVTWLAPGTDGLIRPEQVEAAWRADTRLVSLMRVNNELGTLTDIAAIGERVRERGALFHVDAAQASGKVAIDLGRLAVDLMSFSAHKTYGPKGIGALYVGPRAERRLKAQIHGGGHEQGLRSGTLATHQIVGMGEAFALAGELFEEEGRRIAGLQRRLLEGLAQIDGWRLNGSADARIAHTLNLTFDNPAFVPQALESSLAVSSTSACNSARPAPSHVLLALGHDAASAGRSVRLSLGRYTREADVDAAVAALKAAADSGAPAWQPFLGVSRAG

SEQ ID NO: 10602 - protein, 468 aa, Pseudomonas aeruginosa PAO1
MNDPQGFEAISRREQGLQRRLSAAQMSMIAIGGAIGTGLFMGSAFAIGFAGPSVLLSYAIGALITLLLMGCLAEMTVAHATPGSFGAFAEHYVGPLAGFLVRYAYWAAIVLAVGTEVTAVAMYMKYWFAGIPEWVWIISFSTLLIGLNASSVKAFGNFEYCFSTLKIAAIVAFILLGAYLVFGSANPAYGVHNYSAHGGFFPHGLKGMWIAVVVSIFSYLSVEMIAVAAAEAEHPEQAVRSAFRSTIVRLVVFYLLTLALMLAIVPWDQAGQSQSPFVTVMQAIGLPGATGVMNFVVLVAALSAMNSQLYITTRMMFSLSRAGHAPKGLGELSRQGVPLNALLLSSVGIALATLLNLVYPEQSFTLMMAVSMFGALFTWLMIFFTHLCFRRHRARHGGAPLAFRMRLAPWSTLLGLALMAAILVTTFFTEAFRMTLVFGVPFLALLSALYLVFVRKPGRDCPIERATP

SEQ ID NO: 10603 - protein, 610 aa, Pseudomonas aeruginosa PAO1
MCGITGWTDWSRDLGEQRSILERMTRTLAPRGPDAEGLWLSRHALLGHRRLAIIDLENGAQPMLAEAGGRVALTYSGEVYNFRELRAELETLGQVFRTRSDTEVVLRAYLQWGEASFVRLRGIYGFALWDEREQSLWLVRDRFGVKPLYYYPTAGGVLFASEPKAIFANPEANPVLDASGIAELFALTTAPTPGHGLYKGLRQVRPGQALRFDRNGVRELVYWALRAERHEEGAEDSAERAGQLLREAVAEQLVADVPLGSLLSGGLDSSAISAFAVAALDGDARRLPTFSVDFPGEGRGFVPTPWQSSWDEPYAQLAANFLGTPHRTVLVAPEEVLEQDEAVLQARDLPGWGELDASLYLLFRQVREHTTVALSGESADEVFGGYPFFHDPSALAHDGFPWLAGKSGPWQLLRREVAERVAAPEYIRARYREALAEVPRLDGEDAAQRRQREVAYLALSRWLPAMLERKDRMSMAVGLEVRVPFCDHRLVEYVWNLPWALKSVAGESKSLLRRALRGHLPQAILERRKSGFPANPDPRYLALLRERVGRLLDDGRSPLFELVDAGRVRQALEQGTPLPSPRASASPTAGLAYLLNLDRWLTRHGVDISL

SEQ ID NO: 10604 - protein, 291 aa, Pseudomonas aeruginosa PAO1
MKVGFLGLGGMGAAMATRLVQAGLEVTVWNRSAAACEPLVALGAARAEEVGELFGLDVVISMLADDQAIRGVLLDSGALERARPGLIHLSMSTLSLDCVEALDQAHQRQGLAFVAAPVFGRTDVAEAGKLNIVVGGPEEAIEQVKALLEIMGQKTWFFGKDPRGAMAVKISGNFMIASAIESMGESVALVKRLGVEPGRFMELMSSTLFDAPVYRNYGPQIVEQRFTPARFRLVLGLKDVDLALSAGKRHNVPLPLASLLHDVLLEAIAHGDGESDWTALAKVALSRSGQI

SEQ ID NO: 10605 - protein, 268 aa, Pseudomonas aeruginosa PAO1
MKKLPAITALALALISGLAQADRLEDIRKAGVLRVASFDSNPPFGFVDAKSKQIEGLDVDYAKALADKLGVRLQVLPTNPANRIPLLTANKVDLVLANFTITPERAQQVDFSIPYFSSGQQFIVKKGTLTSPEVLNKWRVGVDKGTVNEGVLREKFPGAKVIAYDDTPFAFTALRNGQVQAITQDGPKLIGLLANVPDRDKYEVPPFTISNDLIGVGIPKGEKALTEFVDKSLRELEQDGQAQKIYDTWFGPQTKTPLARLYKIGDKS

SEQ ID NO: 10606 - protein, 328 aa, Pseudomonas aeruginosa PAO1
MKKVVLYKRLSAPLMERLRERVEVLLVEEPGRDGLARLRDALPEAHGLLGASLRLDAGLLDLAPRLEAIASVSVGVDNYDIDYLDRRGILLSNTPDVLTETTADTGFALILATARRVVELAGWVRAGEWKKSVGAAQFGTDVHGKTLGIVGMGRIGEALARRGHHGFGMRVLYHSHSPKPHVEERYAASYRPLDALLEESDFVCLTLPLTAATEGLIGAAQFARMRPQAIFINISRGRVVDEAALIEALAQRRIRAAGLDVFEREPLSPDSPLLRLPNVVATPHIGSATEETREAMARCAVDNLLAALAGARPLNLVNPSAWARRRGA

SEQ ID NO: 10607 - protein, 399 aa, Pseudomonas aeruginosa PAO1
MCLDDPTHSRRDILKLAALLSAAGALPLLSSLQARAAAEPDAPVRIGYLPITDATPLLVAHANGLFEAEGIQAERPVLLRSWAQVIEAFISGQVNVIHLLSPMTVWARYGSKVPAKVVAWNHVGGSGLTVAPEIADVRQLGGKSVAIPFWYSIHNVVLQQLLRDNGLRAVSRAVGAALAADEVNLVVLPPSDMPPALASKRIHGYIVAEPFNALAENLKVGRVQRFTGDVWRNHACCVVFMHEHDLERRPQWSQKVVNAIVKAQLWTREHRAEAAQLLSKAGANRYTPHAPEVLGRVLAPGAEEQQAYLASGAIRHADWQERRIDFQPYPYPSYTEELVRRLKDTLIEGNNAFLASLDPRQVASDLVDDRFVRQALAEVGGLQAFGLAEGFQRSEEISP

SEQ ID NO: 10608 - protein, 340 aa, Pseudomonas aeruginosa PAO1
MNHKVALSFADGKTLFLPVGHDDLLLDAALRHGINLPLDCREGVCGTCMGRCEAGSYSLDYADEDTLSAADLEQRKVLACQTRVRSDAAFYFDFASTLCHAAAAQAHSGLVRELRLLSEDTALLRLDAGAAGRQLDFLPGQYARLQVPGSDCRRAYSFANRPNPQNHLQFLIRLLPGGAMSDYLRQGCRVGDEIRFEAPLGTFYLRQVERPLLLVAGGTGLSAFLGMLDELAERGCEWPVHLYYGVRRAADLCELQRIAGYAERLPGFRFVPVLSEADADWDGRRGYLHEHFDAARLRDEAFDLYLCGPPPMVEAVRQWLRERSLEHLRLYLEKFTESGD

SEQ ID NO: 10609 - protein, 337 aa, Pseudomonas aeruginosa PAO1
MNHRIALNFEDGVTRFIHAAPGETVADAAYRQGINIPLDCRDGACGTCKCLAEAGRYALGQDYIDDALSAEEAARGYVLTCQMRAESDCVLRVPASSTLCRTGQARYEARISEVRQLSPSTIGLSLRGEALASLAFLPGQYVNLQVPGSEQRRAYSFSSLAKDGEVSFLIRNVPGGLMSGFLSGTARAGDSLAMDGPLGSFYLREIHRPLLMLAGGTGLAPFTAMLERIAEQGSAHPLHLVYGVTHDVDLVGLERLEAFAERIPGFTWSACVASADSDYPRKGYVTEHIAAQHLHEGDVDIYLCGPPPMVEAVERYLREQGVRPANFYYEKFAASAA

SEQ ID NO: 10610 - protein, 396 aa, Pseudomonas aeruginosa PAO1
MTREDPIVIVSAVRTPMGGFLGDFKDVNAATLGAAAVRAAVERARLQADEVDEAVLGCVLAAGQGQAPARQAVLGAGLARGTPCSTLNKMCGSGMKALMLAHDTLLAGSAGVALAGGMESMSNAPYLLERARSGYRMGHGKVLDHMFLDGLEDAYDKGRLMGTFAEDCAEAYGFTREAQDEFAVASLTRAQQAMRDGRFQAEIVPLTVTAGKTERLVDSDEQPPKARLDKIPTLKPAFREGGTVTAANSSSISDGAAALVLMRLSEAERRGLAPLAAIRGHASFADAPNLFPTAPVGAVKRLMQRTGWSLGEVDLFEVNEAFAVVGMAAMRDLDLSHERLNVHGGACALGHPIGASGARIVVTLLNALQQYDLERGVAAVCIGGGEATAIAVERLR

SEQ ID NO: 10611 - protein, 90 aa, Pseudomonas aeruginosa PAO1
MLSGKVKWFNNAKGYGFILAEGRDEDLFAHYSAIQMDGYKTLKAGQPVNFEIIQGPKGLHAINISPATATTAAPSAPAPQEEPQATPIEA

SEQ ID NO: 10612 - protein, 393 aa, Pseudomonas aeruginosa PAO1
MLSNAQRALIKATVPLLETGGEALITHFYRTMLGEYPEVRPLFNQAHQASGDQPRALANGVLMYARHIDQLQELGPLVAKVVNKHVSLQVLPEHYPIVGTCLLRAIREVLGEQIATDEVLEAWGAAYQQLADLLIEAEESVYAASAQADGGWRGVRRFRVARKQAESEEITSFYLEPVDGQPLLAFQPGQYIGLRLDIDGEEVRRNYSLSAASNGREYRISVKREAGGRVSNYLHDRVAEGDELDLFPPAGDFVLRDSDKPLVLITAGVGITPALAMLQEALPQARPIRFIHCARHGGVHAFRDWIEDVSAQHEQVEHFFCYSEPRAGDSADAEGLLSREKLADWLPQERDLDAYFLGPRPFMAQVKRHLADLGVPSQQCHYEFFGPAAALDA

SEQ ID NO: 10613 - protein, 403 aa, Pseudomonas aeruginosa PAO1
MQVSKSNKLANVCYDIRGPVLKHAKRLEEEGHRILKLNIGNPAPFGFEAPEEILQDVIRNLPTAQGYSDSKGLFSARKAVMQYYQQKQVEGVGIEDIYLGNGVSELIVMSMQALLNNGDEVLIPAPDYPLWTAAVSLAGGKPVHYLCDEQANWWPDLEDIKAKITPNTRAMVIINPNNPTGAVYSREVLEGMVELARQHNLVLFSDEIYDKILYDGAVHVSTASLAPDVLCLTFNGLSKSYRVAGFRSGWVAISGPKQRAQSYIEGLDILANMRLCANVPAQHAIQTALGGYQSINDLVLPPGRLLEQRNRAWELLNDIPGVSCVKPMGALYAFPRIDPKVCPIHNDEKFVLDLLLSEKLLIVQGTAFNWPWPDHFRVVTLPRVDDLEQAILRIGSFLKGYQQ

SEQ ID NO: 10614 - protein, 567 aa, Pseudomonas aeruginosa PAO1
MGLCGCIRGKPMTQETVGFAALGIHPNVLAAIVAVGYEEPSPIQAQSIPLILEGHDMIGQAQTGTGKTAAFALPLLSRIDPSRREPQMLVLVPTRELALQVATACETYSKQLPGVGVVAVYGGAPMGPQLKALRQGAQILVATPGRLCDHLRRDEKLLATVQRLVLDEADEMLKLGFMDDLEVIFEALPESRQTVLFSATLPASIRGIAERHLKQPKHVKIAAKTQTVARIEQVHLMVHADQKAGSIQRLLEVEQFDALIAFVRTKQATLDYAELLERQGYRAAALNGDMPQAQRERVIESLKDGSLDIVIATDVAARGLDVPRITHVLNIDMPYDPESYVHRIGRTGRAGREGRALLLVTPRERRMLQVIERVTGQKVGEVRLPDAETVLEARLARLAASLTPLLDSAVEQRGAVRDELCRRLGCDAETLAAALLARLTAGKALDLESVRREQPLTPSAPRERADRGERGERPERSGERRPMAPPSEGRARCRTALGARDGVAAKNLLGAILNEGGLSREDIGRIQIRDTFSLIELPEANLERLLTKLKDTRVAGKALRLRRYRED

SEQ ID NO: 10615 - protein, 486 aa, Pseudomonas aeruginosa PAO1
MPTSGGVYRCRGLSLGDSGAVAATPIRVAFLNDDQTPAPLPVPRPSPCPGLLRIVQALDGGICRIKLDAGRLDAAQARAVAAAARDCASGVIETTNRSNLQLRGVRRGEEERLVRRLLDAGLGPRHGSLAGADDVRNLMLSPAAGLDPHLSLDVRPLAARLLLRLQADSRYHALSAKFAIQLDGGEDLAMLEHPHDIWLSPMPAAPTATLVFGLAGCPARDRPLAALPAERGESLVLALLDLFLERAQPQQTRMRHLLQELDGEPLLEALQARLDFPLRRDERVAAWRRSPGRPWSHLGVQPQRQPGLVMVGAAAPLGRLDSACLEGLAELVERHGDGSLRLTPWQGVLLPNLAHAEADQALLGLRGLGLLTEPDAPLARLIACSGSSACARGLADTKGDALRLAERLGPRSDLPQLHLCGCERSCAAAHRAPLTLLARSGGFYDLYRHDPCHPGFGQLLASRLTFATAADYLAALPSQPTSGKPA

SEQ ID NO: 10616 - protein, 407 aa, Pseudomonas aeruginosa PAO1
MIGFEIFLAIGMFTAIVLGLVAIILVARAKLVSSGDVTIQINGEHSLTVPAGGKLLQTLAANNVFLSSACGGGGTCAQCKCVVVEGGGEMLPTEESHFTRRQAKEGWRLSCQTPVKQDMQIRVPEEVFGVKKWECTVESNPNVATFIKELTLRLPDGESVDFRAGGYVQLECPPHVVEYKDFDIQPEYRGDWDKFNMWRYVSKVDETVIRAYSMANYPEEKGVVKFNIRIASPPPGSDLPPGQMSSWVFNLKPGDKVTVYGPFGEFFAKDTEAEMVFIGGGAGMAPMRSHIFDQLRRLKSNRKISFWYGARSLREAFYTEEYDQLQAENPNFQWHLALSDPQPEDNWTGLTGFIHNVLFENYLKDHPAPEDCEFYMCGPPMMNAAVIKMLTDLGVERENILLDDFGG

SEQ ID NO: 10617 - protein, 391 aa, Pseudomonas aeruginosa PAO1
MSLNPRDVVIVDFGRTPMGRSKGGMHRNTRAETMSAHLISKLLERNPKVDPAEVEDVIWGCVNQTLEQGWNIARMASLMTQIPHTSAAQTVSRLCGSSMSALHTAAQAIQTGNGDVFVIGGVEHMGHVGMMHGVDPNPHLSLYAAKASGMMGLTAEMLGKMHGISREAQDKFGARSHQLAWKATQEGKFKDEIIPMEGYDENGFLKVFDFDETIRPETTVETLAELKPAFNPKGGTVTAGTSSQITDGASCMIVMSAQRAQDLGIQPMAVIRSMAVAGVDPAIMGYGPVPSTNKALKRAGLTIADIDFVELNEAFAAQALPVLKDLKLLDKMDEKVNLHGGAIALGHPFGCSGARISGTLLNVMKQNGGTLGVSTMCVGLGQGITTVFERI

SEQ ID NO: 10618 - protein, 404 aa, Pseudomonas aeruginosa PAO1
MPTLHLDALSTTALALLLLALGSQLKKRSRWLTRLCVPSPVIAGFGFAFLVWLLRDRGWLDIGLDTSLQTPLMVAFFTTVGLGGSLGLLRKGGKTLLVYLSACWALAILQNLIGVGSAGLLGLDPLLGIMAGAVSLEGGFGAAAAFGPVAEGLGAQGATTVALASATFGMVAGGLLGSPVARWLIERNRLPVQAESDNRLEALGQQERRQHAAATLDGNLLLRLLTCVLLVMVLGFWLGDALEERLGLVLPSYVGAMFIAIVLRNLDDRLGWLRIPDHAVGTLGDVCLGIFLTMAMMSLKFWELENLGLPLLGVLFIQVAVLLLLTIFVLFRLLGRNYDAAVLCAGFLGHGLGATPNAVANMGAVCEHYRVFSHKAFIIVPLCGAVLIDLVAIPAITWFINAFS

SEQ ID NO: 10619 - protein, 69 aa, Pseudomonas aeruginosa PAO1
MSNRQNGTVKWFNDAKGFGFITPESGNDLFVHFRSIQGTGFKSLQEGQKVSFVVVNGQKGLQADEVQVV

SEQ ID NO: 10620 - protein, 388 aa, Pseudomonas aeruginosa PAO1
MSRHPLKIVIAGAGIGGLAAAACLKAAGFEVELYERARELRAVGSALSLMPNALTALERVGVRPDLTRAQAFDSLRFLTRRGRPIRAIDFGGLARQLGQPSLAIHRASLQQALLEQARDCRIELGVSATGYLRHADGEGVTVLCSDGREVHADVLIGADGFNSAIRATMTGPERPTDWHYVIWRATPAFRHPKVTPGYVAHYWGRGQRFGLADIGEGNVYWWGTRNMPAEQAKDWRGGKAGIQRLYAGWADEVQAVIEATPEADISSLPAQDRPFLERWGDGPVTLLGDAAHPMLTSLGQGAAIAIEDAAVLAHCLATIDDPQAALRAYENRRRDRARAMVETSRALSRIEQLEHPLRTVARDLYFRFAPERTFARQNELALTFPGVE

SEQ ID NO: 10621 - protein, 394 aa, Pseudomonas aeruginosa PAO1
MREVVIVDSVRTGLAKSFRGKFNLTRPDDMAAHCVDALLARNDLDPLLVDDCIVGAGSNEGAQGHNIGRNVAVLSGLGIQVPGMTLNRYCSSGLQAIAIAANQIASGCSEVIVAGGVESITLTLKSVNTDHLVNPLLQREVPGIYYPMGQTAEIVARRYGITREAQDAYALQSQQRMARAQADGLFADEIVPMTTRYAVEDKASGEKQVLDGVVDRDDCNRPDTTLEGLASLKPAFAEDGSVTAGNASQLSDGASMTLLMSLEKALALGLEPKAFFRGFTVAGCEPDEMGIGPVFSVPKLLKAKGLKIADVDLWELNEAFASQCLYCRDRLEIDNEKYNVNGGSIAIGHPFGMTGSRQVGHLVRELHRRNLRYGVVTMCVGGGMGASGLFEAVR

SEQ ID NO: 10622 - protein, 589 aa, Pseudomonas aeruginosa PAO1
MCGISGEFRFDNQAADLAAVERITHHLAPRGPDAWGFHAQGPIALGHRRLKIMDLAEASGQPMIDPDLGLAMVFNGAIYNYPELRGELESLGYRFFSGGDTEVLLKGYHAWGADLLPRLNGMFAFAVWERDRQRLFLARDRLGIKPLYYSLDRSRLRFASSLPALLKGGDIASDLDPQALNFYLNFHAVVPAPHTLLEGVKKLPPATWMSVDLDGSCEQRTWWTLDYGPRPDERELTLDDWQERVLDGLREAVAIRQRAAREVGVLLSGGVDSSLLVGLLHEAGVDNLLTFSIGFEDAGGERGDEFQYSDLIAERYHTRHHRLRIGEHEVIEQLPAAFRAMSEPMVSHDCIAFYLLAREVSKHCKVVQSGQGADELFAGYHWYPKVDGADDAFAAYRAAFFDRDHEEYLATVGERFRVEDVAGRFVRDHFASPGAEAAVDKALRLDSTIMLVDDPVKRVDNMTMAWGLEARVPFLDYRLAELSARIPARFKLGDGGKQVLKGAARKVIPSEVIDRPKGYFPVPGLKHLQGRTREWVRELLLDPSQDRGLFQPAIFDRLLSDPDGDLTPLRGSKLWQLAALNLWLSEQGL

SEQ ID NO: 10623 - protein, 318 aa, Pseudomonas aeruginosa PAO1
MTHDNRLAAFVHTLRFEAQGILGVELRPQGDQVFPPFSAGAHIDLHLPNGLVRSYSLLNSPEDCGRYVLGILRDRGSRGGSAFVHDSLRVGMQLQISRPRNLFPLEENAAHSVLVAGGIGVTPIYCMFNRLRALGRSVELLYCARSRQEAAFVEELAASDAAIQLHFDDEKGGPMDLGAFLGARASTAHFYCCGPTPMIDAFETHCERLGHPHVHIERFAAAPQAPAAPQGSYEVRLARSGTSIEVPSGKSLLDALLEAGVAVDCSCREGVCGSCETRVLEGEPEHRDGVLTKAEKIANQTMMVCVSGCKGSRLVLDL

SEQ ID NO: 10624 - protein, 405 aa, Pseudomonas aeruginosa PAO1
MADVKKVVLAYSGGLDTSVILKWLQDTYNCEVVTFTADLGQGEEVEPARAKARAMGVKEIYIDDLREEFVRDFVYPMFRANTVYEGEYLLGTSIARPLIAKRLIEIANETGADAISHGATGKGNDQVRFELGAYALKPGVKVIAPWREWDLLSREKLMDYAEKHGIPIERHGKKKSPYSMDANLLHISYEGGVLEDTWTEHEEDMWKWTASPENAPDTPTYIELTYRKGDIVAIDGKDMTPAEVLTELNRVGGINGIGRLDIVENRYVGMKSRGCYETPGGTIMLKAHRAIESITLDREVAHLKDELMPKYASLIYTGYWWSPERLMLQQMIDASQVNVNGVVRLKLYKGNVVVVGRKSDDSLFDANIATFEEDGGAYNQADAAGFIKLNALRMRIAANKGRTLS

SEQ ID NO: 10625 - protein, 108 aa, Pseudomonas aeruginosa PAO1
MDIIETIKEQIANNPILLYMKGSPNAPQCGFSSRAAQVLMACGEKFAYVDILQNPEIRANLPKYANWPTFPQLWVNGELVGGSDILAEMFEKGELQTLVKDAAAKANA

SEQ ID NO: 10626 - protein, 440 aa, Pseudomonas aeruginosa PAO1
MARLKRTLSLGSVVLFGIAYMTPIIVLGTFGILAETTQGHVPAAYIAASLAMLFTALSYGRMAAAFPVAGSAYTYVRKAIDSRLGFIAGWAVLLDYLFLPMAIWLIGAAYLHSAFPAVPNAVWVLAFIGVTTTINIVGLRLAKNVNGLLMLVQFLVLGAFVALCVHYVLGDPGKPLWSLQPLLGGDLQVPLVMSGAAIACYSFLGFDAVSTLTEETRDPRRNIPRAILLITLLGGLIFIVTSYFVQLAHPSFAFDSADSAAYEIARNIGGDLFVTFFLVGLIVGQFTSGLSAQASASRLLFAMGRDGVLPRPFFGRLGKRFETPANSIILCGVVALLALQMDVTTSTSFINFGAFLAFSLVNLSVVFHYYLGAERRGPRETLLFLVFPGIGLVADLWLMASLDHLAIILGLCWLALGAVYLAAITHGFREPPPEMRFEEG

SEQ ID NO: 10627 - protein, 203 aa, Pseudomonas aeruginosa PAO1
MNCTLDELRQRIEAHRPRQLDTDQRFPQAAVLVPITRSDDPELVLTLRAAGLSTHGGEVAFPGGRRDPEDADLVRTALREAEEEIALPPGLVEVVGPLSTLVSRHGIEVTPYVAFIPDFVEYQPNDGEIAAVFNVPLSFFRDDPREVTHRIDYFGRSWYVPSYRFGEFKIWGLTAIMVVELVNLLYDDPIDLHTPPASFIKLS

SEQ ID NO: 10628 - protein, 382 aa, Pseudomonas aeruginosa PAO1
MIQSKLPNVGTTIFTRMSQLAAECGAINLSQGFPDFDGPPELREAVGRHIAAGHNQYAPMTGLPALREQVAKKIEQFYGRRVSADSEVTITPGATEAIFSAIQALVHPGDEVVVLDPSYDSYEPSVQLAGGRCVHVPLALPDFSIDWQRMAEAIGPRTRLVIINTPHNPSGALISREELDRLAALIRDRDIYLISDEVYEHLVFDGVAHTSVLSHDELYPRSFVVSSFGKTYHVTGWKTGYVVAPPALSAELRKVHQYVNFCGVTPLQWALADYMAGHPEHLRQLPGFYQAKRDLFCDLLLDSRFRFTRAPGTYFQCVDYSAIRPDLDDVAMAEWLTREHGVAAIPVSVFYEKAPDAMRLVRFCYAKREETLRQAAEKLCAI

SEQ ID NO: 10629 - protein, 404 aa, Pseudomonas aeruginosa PAO1
MKLPIYLDYSATTPVDPRVAQKMSECLLMDGNFGNPASRSHVFGWKAEEAVENARRQVAELVNADPREIVWTSGATESDNLAIKGVAHFYSGKGKHIITSKIEHKAVLDTCRQLEREGFEVTYLEPGEDGLITPALVEAALRDDTILVSVMHVNNEIGTVNDIAAIGELTRSRGVLFHVDAAQSTGKVEIDLDKLKVDLMSFSAHKTYGPKGIGALYVRRKPRVRIEGQMHGGGHERGMRSGTLATHQIVGMGEAFRIAKEEMAQENARVLALRDRFFAQIDGLEELYINGSMTSRVPHNLNVSFNYVEGESLIMALKDLAVSSGSACTSASLEPSYVLRALGRNDELAHSSIRFTFGRFTTEEEIDYAAKKVVEAVSKLRELSPLWDMYKEGVDLSQVEWQAH

SEQ ID NO: 10630 - protein, 341 aa, Pseudomonas aeruginosa PAO1
MTIMKGTWLLLAAVCLGASATAEAGATLDAVKRKGYVQCGVSDGLPGFSYADAKGRFKGLDVDICRALAAALFGDAEKVRFTPLSATERFSALQSGTVDLLSRNTSWTSSRDTALGIHFTGVTYFDGQGFLVNRKLGVSSARELKDATVCIQSGTTNELNVADYFRAHGIRYKAVLDDSYEKSARALEAGQCDVLSSDQSQLYAQRLKLAKPEQYVVLPEVISKEPLGPAVRQGDEAWFNIVRWTLYGLLNAEELGVTSSNVERQARDSRNPDVARLLGSEGDAGKDLQLPRDWVVQMVRQVGNYGEIFARNVGDGSPLKMPRGLNAQWNLGGLHYAPPIR

SEQ ID NO: 10631 - protein, 325 aa, Pseudomonas aeruginosa PAO1
MKKNVFVFSRLAPEHLERLQCQFNVRVLEPKQGDIDAQYAAALPDTHGMIGVGRPLGARQLEQAKQLEVISSVSVGYDNYDLDYLNRRGIALTNTPDVLTETTADLGFALLISAARRVAELDAWVKAGNWKRTVDAPQFGTDVHGKKLGILGLGRIGAAIARRGRFGFGMQVLYHGNNRKPELEQELGARFLGFDELLGEADFVCVVVPLGAQTRQLIGARELGLMKPSAILVNVARGQVVDEAALVAALREKRILGAGLDVYEKEPLAESPLFALDNVVTLPHIGSATHETRRAMAERALQNFEAALRGERPLDLVNPQVWRRG

SEQ ID NO: 10632 - protein, 391 aa, Pseudomonas aeruginosa PAO1
MSDIVIVAGARTPMGGFQGSLAGVSAVDLGAVAIREAVQRAGIAAEDVQEVIMGCVLPAGLKQGPARQAALAAGLPAATGCTTINKLCGSGMKAVMLAHDLLKAGTNQVMVAGGMESMSNAPYVLEKARSGLRMGHGEIKDHMFLDGLEDARTGRLMGSFAQETADKYGVTREEMDAYAIESLKRAQAAIADGSLAAEIVPVTVTSRKGESVVKDDEQPLTANLEKIPSLRPAFRKDGTITAANASSISDGASALVLMTAEEAQRRGLKPLARIVGHATQSQDPSEFTLAPIGAMTNLFARTGWSKDDVDLFEINEAFAMVTMLAMREHGLDHAKVNVYGGACAQGHPVGSTGSRIILTLINALRQKGGKRGVASLCIGGGEATAVALELL

SEQ ID NO: 10633 - protein, 653 aa, Pseudomonas aeruginosa PAO1
MNPPVFYGAAILILLFAAVVIGFPQRAGEWLLAAQTWASQTVGWYYLLAMTLYLIFVVVTALSGYGKIKLGADHDEPEFSYLSWAGMLFAAGISITLFFFCVSEPLTHFLQPPQGEAGTQEAARQAMELLFLHWGLHGWGVFALVAMALAYFAYRHNLPLALRSALYPLIGKRINGPIGYTVDCFGIIATVFGLGADMGFGVLQLNSGLDYLYAIPHTHPVQMALIVLMMGAAISVAVSGVDKGIRILSDINMLLACSLLLFVLFAGPTQHLLNTLVQNVGDYLGHLPGKSFDLYAYGGPSDWLGSWTVFYWAWWIAWAPFVGLFIARISRGRTIREFVFGVLFIPLGFTLAWMSIFGNSALEQALGGASELGRVAIEQPSMALYQMLQNYPWSRAVITVTVLVSFVFFVTSADSGTVVLSTLSAHGGSADDDGPKWLRVFWGSVTALVTGGLLFAGSIDALKSAVVLTSLPFSLILLLMMWGLHKAFYMESQRQRARSHSLAPLMSGNGKRSGGWKRRLSQAVHFPSRDEVYRFMNDVVRPAISEVSEVFREKGLAVDAQLDPGNASLSLEIGHGEQHRFLYQVLMRGYFTPSFARAGMGGLHLKNRRYFRAEVHLAEGSQDYDLMGYTKEQIINDMLDQYERHLQFLHLVR

SEQ ID NO: 10634 - protein, 482 aa, Pseudomonas aeruginosa PAO1
MSLEQTGHAPATSGIDFESVDADYFQHRQLKKGAAGWVLLVGLGVAYVISGDYAGWNFGLAQGGWGGMFLATLLMATMYLCMCFSLAELSSMIPTAGGGYGFARSAFGPWGGFLTGTAILIEYAIAPAAIACFIGAYCESLFGVGGWLIYLVFYIVFIGIHILGAGEALKLMFVITAVAAIALGVFIVAMVPHFDSANLFNIPQTAATGASSFLPFGYVGVWAAIPYAIWFFLAVEGVPLAAEETKNPKRDLPRGLIGAMLVLLAFAALILVVGPGAAGAKELMGSGNPLVEALESAYKGSTWMSQFVNLVGLAGLIASFFSIIYAYSRQIFALSRAGYLPRSLSLTNRKKAPVLALVVPGVIGFGLSLTGQGDLLILVAVFGATISYVLMMAAHITLRIRRPDMQRPYRTPGGILTSGVALALACVAVVAGFLVDPRVVVGAVAIYAVLIGYFALYSRHHLVSGTPEEEFAAIQAAEQDLR

SEQ ID NO: 10635 - protein, 557 aa, Pseudomonas aeruginosa PAO1
MYQYDEYDQALVSERVAQFRDQIARRLDGELSEEEFLPLRLQNGLYLQKHAYMLRVAIPYGTLSAPQLRALAHVARHYDRGYGHFTTRQNIQFNWIELEQVGDILEHLAGAQMHAIQTSGNCVRNITTEAFAGVAADEWTDPRPLAEILRQWSTVNPEFLFLPRKFKIALSSAVEDRAAVQMHDIGLYLYRHPDAGELRLRVLVGGGLGRTPMLGQVIRDDLPWQHLLSYVEAILRVYNRYGRRDNKYKARIKILVKALGIEAFAREVEEEWQHLRDGPAQLTAEECQRVAERFVLPRYLPPADGELAYGSARAADPAFARWASRNVQAHKVPGYASVVLSTKPGASAPPGDVTAEQMERVADWAERYGFGEIRVAHEQNLVLPDVRLENLHALWREACAAGLGTPNQGLLSDIIACPGGDYCALANAKSIPIAQGIQQRFEDLDHLHDIGELSLNISGCMNACGHHHIGNIGILGVDKSGSEWYQVTLGGAQGKDSALGKVIGPSFSAAEVPAVIERIVETFTDLRVGPERFIDTFNRVGLEPFKARVYARMEEPA

SEQ ID NO: 10636 - protein, 547 aa, Pseudomonas aeruginosa PAO1
MAKAADVVVQCLENEGVQYVFGIPGEENLDLLESLRKSQIRLVLTRHEQSAGFMAATYGRLTGKTGVSLSTLGPGATNLVTAGAYAYLGGMPMLMITGQKPIKKSKQGRFQILDVVGMMQPLTKYTHQLASADNIPSRVREAFRLAEEEKPGAVHLELPEDIAAEQTDSLPIPPSLSRRPLAEYKAICAAVEKLRAARSPILVIGAGANRKMTAKVLKQLIDKTGIPFVTTQMGKGVVDERHPRFLGNAALSAGDFVHRAVEAADLIVNVGHDVIEKPPFFMVRGGTEVIHVNFRSAEVDPVYFPQIEVVGDIANAIWQIGEALDDTAHWDFTRLLAIREANEAQVAEGADDPRFPLYPQRLVADVRRALPSQGIVALDNGMYKIWFARNYKAHMPNTVLLDNALATMGAGLPSAMAAHLVYPDRPIVAVCGDGGFMMNSQELETAVRLKMNLTVIILRDNGYGMIRWKQSNMGFADFGLDYGNPDFVHYAEAYGAHGHRVDSAEGFLPLLERCLGTPGVHVIDCPVDYSENDRILNVELRERALAV

SEQ ID NO: 10637 - protein, 276 aa, Pseudomonas aeruginosa PAO1
MKIRLLGAALAAVFTLIGSAAHADDLADIRKKGEIVIGTLGTDEPNSFIDPKTRQIIGYEVDLGTEIAKAIGVKPVFKQISVAARIPELQQGHVDLLAASLTHNKEREALVDFSYSIIVTGQKALVKKNAGFASLHDLDGKKVLTVKGGTQEPNIRKALPNAQVVTFETSQQALLALQQGKGQAFVDDESALVNDFGKLGAAAGGYAILPENLSTEALAIAFRKGNPQLKQLVDSTLAGLERSGAAEQLYLKWYGPGTKSNLSERHFKIDSDRIPE

SEQ ID NO: 10638 - protein, 326 aa, Pseudomonas aeruginosa PAO1
MNMSQNLDFIHSAQRTIGLERDAVDSLLARIGDDFVKACELLLAGKGRVVVVGMGKSGHVGKKIAATLASTGTPSFFVHPAEASHGDMGMITKDDVVLALSNSGSTAEIVTLLPLIKRLGITLISMTGNPESPLAKAAEVNLDASVGQEACPLNLAPTSSTTVTLVLGDALAIALLEARGFTAEDFAFSHPGGALGRRLLLKVEDVMHVGEGLPQVLLGTSLTGALMEMTRKGLGMTVVLDEHGKLAGIFTDGDLRRALDRGIDVRQVTIDQVMTVHGKTVRAEILAAEALKIMEDNKIGALVVVDADDRPVGALNMHDLLRAGVM

SEQ ID NO: 10639 - protein, 854 aa, Pseudomonas aeruginosa PAO1
MRIDRLTSKLQLALSDAQSLAVGHDHPAIEPVHLLSALLEQQGGSIKPLLMQVGFDIAALRSGLNKELDALPKIQSPTGDVNLSQDLARLLNQADRLAQQKGDQFISSELVLLAAMDENTRLGKLLLGQGVSRKALENAVANLRGGEAVNDPNVEESRQALDKYTVDMTKRAEEGKLDPVIGRDDEIRRTIQVLQRRTKNNPVLIGEPGVGKTAIVEGLAQRIINGEVPDGLKDKRLLALDMGALIAGAKFRGEFEERLKAVLNELGKQEGRVILFIDELHTMVGAGKAEGAMDAGNMLKPALARGELHCVGATTLDEYRQYIEKDAALERRFQKVLVDEPSEEDTIAILRGLKERYEVHHGVSITDGAIIAAAKLSHRYITDRQLPDKAIDLIDEAASRIRMEIDSKPEELDRLDRRLIQLKIEREALKKEDDEATRKRLAKLEEDIVKLEREYADLEEIWKSEKAEVQGSAQIQQKIEQAKQEMEAARRKGDLESMARIQYQTIPDLERSLQMVDQHGKTENQLLRNKVTDEEIAEVVSKWTGIPVSKMLEGEREKLLRMEQELHRRVIGQDEAVVAVSNAVRRSRAGLADPNRPSGSFLFLGPTGVGKTELCKALAEFLFDTEEALVRIDMSEFMEKHSVARLIGAPPGYVGFEEGGYLTEAIRRKPYSVVLLDEVEKAHPDVFNILLQVLEDGRLTDSHGRTVDFRNTVVVMTSNLGSAQIQELAGDREAQRAAVMDAVNAHFRPEFINRIDEVVVFEPLAREQIAGIAEIQLGRLRKRLAERELSLELSQEALDKLIAVGFDPVYGARPLKRAIQRWIENPLAQLILAGKFAPGASISAKVEGDEIVFA

SEQ ID NO: 10640 - protein, 406 aa, Pseudomonas aeruginosa PAO1
MKFVDEVSIHVKAGDGGNGLMSFRREKFIEKGGPNGGDGGDGGSIYLEADVNLNTLVDYRYTRRFDAQRGENGGSKDCTGAKGDDLILPVPVGTTVIDANTQEIIGDLTEPGQRLMVAQGGWHGLGNTRFKSSTNRAPRQTTPGKPGEARDLKLELKVLADVGLLGLPNAGKSTFIRAVSAAKPKVADYPFTTLVPNLGVVSVGRYKSFVVADIPGLIEGAAEGAGLGIRFLKHLARTRILLHLVDMAPLDESDPADAAEVIVRELGRFSPALTERERWLVLNKMDQILDPAEREARKQAVIERLGWEGPVYVISALERDGTEALSQDIMRYLDERTLRLEEDPQYAEELAELDRRIEDEARARLQALDDARALRRSGLKNAGAVDDDDFDDEEDDGDGPEIFYVP

SEQ ID NO: 10641 - protein, 103 aa, Pseudomonas aeruginosa PAO1
MYAVIVTGGKQHKVTEGEFLKVEKLDVATGEAIDFDRVLLVANGEDVKIGLPVVEGAKVTAEVVSHGRHDKVRIIKFRRRKHHMKRQGHRQWFTEIKITGIQA

SEQ ID NO: 10642 - protein, 323 aa, Pseudomonas aeruginosa PAO1
MSHALRAVFLDHASLDLGDLDMRPLRAAFDELQLHAASQPQEVAARLHDARVAISNKVPIDAQCIAACPELELILISATGTNNIDLAAARERGIVVANCHGYGTPSVAQHTLALLLALATRLPDYQQAVRSGRWQQSSQFCLLDFPIVELEGKTLGLLGHGELGGAVARLAEAFGMRVLLGQLPGRPARADRLPLGELLPRVDALTLHCPLTEDTRGMLGSAELALMKPGAFLVNTARGGLVDEQALADALRGGHLGGAATDVLSVEPPRNGNPLLAPDIPRLIVTPHNAWGSREARQRIVGQLAENAEAWKAGRALRVVNAG

SEQ ID NO: 10643 - protein, 487 aa, Pseudomonas aeruginosa PAO1
MTDLNTSQGQQLRRVLKPRHLNMIAIGGSIGTGLFVASGATVATAGPGGALLSYALIGLMVYFLMTSLGEMAAYMPVSGSFCTYGSRFVEDGFGFALGWNYWYNWAVTIAAELVAAQLVMSFWFPEVPGIYWSAIFLGIMFGLNVISARGFGESEFWFALIKVVTVVIFIGVGLATIFGIMHGVESPGFSNFTMGDAPFVGGFQAMVGVAMIAGFSFQGTELIGIAAGESENPRKNIPIAIRQVFWRILMFYILAIFVIGMLIPYTDPNLLKNDASDISVSPFTLLFERAGFAAAAGVMNAVILSAILSAGNSGMYASTRMLYNLALEGKAPRLFSRVSRSGVPRNALYATTLVGALCFLTSAFGDSTVYTWLLNTSGMCGFIAWLGIAISHYRFRKGYLAQGGRLEDLPYRAKLFPFGPLFAFALCMVITLGQNYQALVGERIDWIGLLATYISLPLFLAIWLGYRWKKRARFVRYHEMDVSPTNT

SEQ ID NO: 10644 - protein, 313 aa, Pseudomonas aeruginosa PAO1
MSKMMVFTGNANPDLARRVVRQLHIPLGDVSVGKFSDGEISVEINENVRGKDVFLIQPTCAPTNDNLMELVVMADAFRRSSATRITAVIPYFGYARQDRRPRSARVAISAKVVADMLTVVGVNRVLTVDLHADQIQGFFDIPVDNIYGSPVLVDDIEDQRFENLMIVSPDIGGVVRARAVAKSLGVDLAIIDKRRPKANQSEVMHIIGDVEGRTCVLVDDMVDTAGTLGHAAKALKEHGAAKVIAYCTHPVLSGRAIENIEKSVLDELVVTNTIPLSAAAQACGRIRQLDIAPVVAEAMRRISNEESISAMFR

SEQ ID NO: 10645 - protein, 574 aa, Pseudomonas aeruginosa PAO1
MELLSGAEMVVRSLRDEGVKYIYGYPGGALLHIYDALFKEHDVTHILVRHEQAATHMADGYARATGKPGVVLVTSGPGATNAITGIATAYMDSIPMVILSGQVPSNMVGTDAFQETDMVGISRPIVKHSFIIKHPSEIPEVIKKAFYLAQSGRPGPVVVDIPKDMGDPTQKFEYSYPKKVKLRSYSPAVRGHSGQIRKAAEMLLAAKRPVVYSGGGVIMGNAAAPLTELAQMLNLPVTNTLMGLGGYPGADRQFLGMLGMHGSFTANLAMHHSDVILAVGARFDDRVINGAAKFCPNAKIIHIDIDPASISKTIKADIPIVGPVDSVLTEMVAIVREIGETPNQDAQAAWWKQIDEWRGNRGLFPYDKGDGSIIKPQTVIETLYEVTHGDAFITSDVGQHQMFASQYYKFNKPNRWINSGGLGTMGFGFPAAMGIKLNFPDDDVACVTGEGSIQMNIQELSTCLQYDLPVKIVNLNNGALGMVRQWQDMQYNSRYSHSYMESLPDFVKLAEAYGHVGMRITDLKDLKPKMEEAFAMKNRLVFLDIQVDASEHVYPMQIRDGAMRDMWLSKTERT

SEQ ID NO: 10646 - protein, 390 aa, Pseudomonas aeruginosa PAO1
MATSYSARSRAIEPFHVMALLARANELQAAGHDVIHLEIGEPDFTTAEPIVEAGRAALAAGHTRYTAARGLPALREAIAKFYGERYGVDLDPQRVLVTPGGSGALLLASSLLVDPGRHWLLADPGYPCNRHFLRLVEGAAQLVPVGPDSRYQLTPDLIERHWDSDSVGALVATPANPTGTLLDRDELAGLSGALKARGGHLVVDEIYHGLTYGVDAASVLEVDDDAFVLNSFSKYFGMTGWRLGWLVAPTAAVPELEKLAQNLYISAPSMAQQAALACFEPTTIAILEERREEFARRRDFLLPALRELGFGIAVEPEGAFYLYADISAFGGDAYAFCKHFIETEHVAFTPGLDFGRHQAGHHVRFAYTQNLPRLQEAVERIARGLKNWRP

SEQ ID NO: 10647 - protein, 126 aa, Pseudomonas aeruginosa PAO1
MHAIMLKAKLHRAEVTHAVLDYEGSCAIDGDWLDLSGIREYEQIQIYNIDNGERFTTYAIRAENGSKMISVNGAAAHKAKVGDRVIICAYAHYSEAELASHKPRMLYMAPGNQLSHTSEAIPIQVA

SEQ ID NO: 10648 - protein, 639 aa, Pseudomonas aeruginosa PAO1
MAKNLILWLIIAAVLVTVMNNFSSPSEPQTLNYSDFIQQVKDGKVERVTVDGYVITGKRSDGDTFKTIRPAIQDNGLIGDLVNNNVVVEGKQPEQQSIWTQLLVASFPILVIIAVFMFFMRQMQGGGGGRGGPMSFGKSKARLLSEDQVKTTFADVAGCDEAKEEVSELVEFLRDPGKFQRLGGRIPRGVLMVGPPGTGKTLLAKAIAGEAKVPFFTISGSDFVEMFVGVGASRVRDMFDQAKKHAPCIIFIDEIDAVGRHRGAGLGGGHDEREQTLNQLLVEMDGFEMNDGIIVIAATNRPDVLDPALLRPGRFDRQVVVGLPDIRGREQILKVHMRKVPLGDHVDPAVIARGTPGFSGADLANLVNEASLFAARSNKRIVDMREFELAKDKIMMGAERKTMVMSEKEKRNTAYHEAGHAIVGRLVPEHDPVYKVSIIPRGRALGVTMFLPEEDRYSLSKRALESQICSLFGGRIAEEMTLGFEGVTTGASNDIMRATQLARNMVTKWGLSEKLGPLMYAEEEGEVFLGRSAGSQHANVSGETAKMIDQEVRRIIDDCYGTAKRLLDENRDKLEMMADALMKYETIDSDQIDDIMAGRVPREPRDWQGGSGTGTPPANLEESGRRENTPPIGGPAGEH

SEQ ID NO: 10649 - protein, 637 aa, Pseudomonas aeruginosa PAO1
MGKIIGIDLGTTNSCVAILENGNVKVIENAEGARTTPSIIAYTNDGETLVGQPAKRQAVTNPQNTLYAVKRLIGRRFEENVVQKDIQMVPYSIVKADNGDAWVEVKGQKMAPPQISAEVLKKMKKTAEDYLGEPVTEAVITVPAYFNDSQRQATKDAGRIAGLDVKRIINEPTAAALAYGLDKAKGDHTVIVYDLGGGTFDVSVIEIAEVDGEHQFEVLATNGDTFLGGEDFDIRLIDYLVDEFKKESGINLKGDPLAMQRLKEAAEKAKIELSSTQQTDVNLPYVTADASGPKHLNVKVSRAKLESLVEDLVQRTIEPCRTALKDAGLDVSDIHEVILVGGQTRMPLVQKTVAEFFGKEARKDVNPDEAVAVGAAIQGAVLAGDVKDVLLLDVTPLTLGIETLGGVMTGLIEKNTTIPTKKSQVFSTADDNQGAVTIHVLQGERKQAAQNKSLGKFDLADIPPAPRGVPQIEVTFDIDANGILHVSAKDKATGKQQSIVIKASSGLSEDEIQQMVRDAEANAEEDRKFEELAAARNQGDALVHATRKMITEAGDKATAEDKATIEKALGELEAAVKGDDKAEIEAKMNALSQASTPLAQKMYAEQAQQGEDAPQGEQAKAADDVVDAEFEEVKDNK

SEQ ID NO: 10650 - protein, 366 aa, Pseudomonas aeruginosa PAO1
MALLPLALLTPLLAPLRRLAARGWLREADVDGLLRHAHPLASLNRHYARVEARYWVADDMLALALRTAPGWPPVRPGQHIQLLAERDGVRVGRSYSLTRVVGERLEIAVKRHPDGLLSPWLCEHLAVGQRVELQPAQGDLRWPMQAEAVCLLAAGSGLTPLLGLLREALENGYRGPVLWLHYVRHPGQRAWLGELEALAARHPNLELRWSLTRGARADGCLEGHFQPRHLDGWAADLARSQALACGPAAFVEAVGEQLGARFAGLQTESFSVPRWRSGEAPREVRLRFARSQREVSGDSAASLLEQAEAHGLRPAHGCRQGICASCTCVLLSGCVRDLRSGALCSEPGQPIRLCVSAAHGDLALDL

SEQ ID NO: 10651 - protein, 528 aa, Pseudomonas aeruginosa PAO1
MKTVHSASYEILRRHGLTTVFGNPGSNELPFLKDFPEDFRYILGLHEGAVVGMADGFALASGRPAFVNLHAAAGTGNGMGALTNAWYSHSPLVITAGQQVRSMIGVEAMLANVDAGQLPKPLVKWSHEPACAQDVPRALSQAIQTASLPPRAPVYLSIPYDDWAQPAPAGVEHLAARQVSGAALPAPALLAELGERLSRSRNPVLVLGPDVDGANANGLAVELAEKLRMPAWVAPSASRCPFPTRHACFRGVLPAAIAGISRLLDGHDLILVVGAPVFRYHQFAPGDYLPAGAELVQVTCDPGEAARAPMGDALVGDIALTLEALLEQVRPSARPLPEALPRPPALAEEGGPLRPETVFDVIDALAPRDAIFVKESTSTVTAFWQRVEMREPGSYFFPAAGGLGFGLPAAVGAQLAQPRRQVIGIIGDGSANYGITALWSAAQYRVPAVFIILKNGTYGALRWFAGVLEVPDAPGLDVPGLDFCAIARGYGVEALHAATREELEGALKHALAADRPVLIEVPTQTIEP

SEQ ID NO: 10652 - protein, 317 aa, Pseudomonas aeruginosa PAO1
MIEVIVGAIRLEAQDIHSFELFRADGAALPSFEPGAHIDLHLPNGLVRQYSLCGPAERPRHYRIAVLRCRDSRGGSATLHAELRVGQRLHIGEPRNLFPLSPEPGPHLLFAGGIGITPLLAMAERLARDGADFQLHYCAHSGERAAFVDYLGRCAFADRVHCHFDHGESSRRADLRALLATSPRDAQLYLCGPAGFMQWIEESARELGWEASRLHREHFAAAPRDASADGTFEVQLASNGALIRVAAGQTVLAALREAGVDLPASCEQGICGTCLTRVLDGEPEHRDLYLSEEEQAANDCFTPCCSRSRSPRLVLDL

SEQ ID NO: 10653 - protein, 425 aa, Pseudomonas aeruginosa PAO1
MSNETSIDLKQCVLDAVLSGLIALVVFGPIVGVVLDGYGFNLHYERVGWIIAIVMAGRFLLSLYLQTRGGRAVLERFEGAGSGVHVLPPGYKTRLRWIVPLILVAAVIFPFFASKYLLAVVILGLIYVLLGLGLNIVVGLAGLLDLGYVAFYAIGAYGLALGYQYLGLGFWTVLPLAALTAAVAGAILGFPVLRMHGDYLAIVTLGFGEIIRLVLNNWLSFTGGPNGMPAPAPTFLGLEFGRRAKDGGVPIHEFLGIAYNPNMKFLFIYVVLFLVVLLVLYIKHRLTRMPVGRAWEALREDEIACRAMGLNHVLVKLSAFMLGASTAGLAGVFFASYQGFVNPSSFNFFESALILAIVVLGGMGSTVGVVIAAFVLTVAPELLRSFADIRVLLLGILMVVMMIWRPRGLIRISRVGFAPRKGVAP

SEQ ID NO: 10654 - protein, 393 aa, Pseudomonas aeruginosa PAO1
MRYSDFTQRIAGDGAAAWDIHYRALARVEQGEEILLLSVGDPDFDTPAPIVQAAIDSLLAGNTHYADVRGKRALRQRIAERHRRRSGQAVDAEQVVVLAGAQCALYAVVQCLLNPGDEVIVAEPMYVTYEAVFGACGARVVPVPVRSENGFRVQAEEVAALITPRTRAMALNSPHNPSGASLPRATWEALAELCMAHDLWMISDEVYSELLFDGEHVSPASLPGMADRTATLNSLSKSHAMTGWRVGWVVGPAALCAHLENLALCMLYGSPEFIQDAACTALEAPLPELEAMREAYRRRRDLVIECLADSPGLRPLRPDGGMFVMVDIRPTGLSAQAFADRLLDRHGVSVLAGEAFGPSAAGHIRLGLVLGAEPLREACRRIALCAAELLGQA

SEQ ID NO: 10655 - protein, 559 aa, Pseudomonas aeruginosa PAO1
MGARALRRERRLRWSPNWTRILPMQPQKTLTAGQALVRLLANYGVDTVFGIPGVHTLELYRGLPGSGIRHVLTRHEQGAGFMADGYARVSGKPGVCFVITGPGVTNVATAIGQAYADSVPLLVISSVNHSASLGKGWGCLHETQDQRAMTAPITAFSALALSPEQLPELIARAYAVFDSERPRPVHISIPLDVLAAPVAHDWSAAVARRPGRGVPCSEALRAAAERLAAARRPMLIAGGGALAAGEALAALSERLAAPLFTSVAGKGLLPPDAPLNAGASLCVAPGWEMIAEADLVLAVGTEMADTDFWRERLPLSGELIRVDIDPRKFNDFYPSAVALRGDARQTLEALLVRLPQEARDSAPAAARVARLRAEIRAAHAPLQALHQAILDRIAAALPADAFVSTDMTQLAYTGNYAFASRAPRSWLHPTGYGTLGYGLPAGIGAKLGAPQRPGLVLVGDGGFLYTAQELATASEELDSPLVVLLWNNDALGQIRDDMLGLDIEPVGVLPRNPDFALLGRAYGCAVRQPQDLDELERDLRAGFGQSGVTLIELRHACAR

SEQ ID NO: 10656 - protein, 603 aa, Pseudomonas aeruginosa PAO1
MSDSPQNPGPSSLKIYFRLLGYVKPYIGMFLLSIVGFLIFASTQPMLAGILKYFVDGLSNPDAALFPNVQWPWLRDLHLVYAVPLLIILIAAWQGLGSFLGNFFLAKVSLGLVHDLRVALFNKLLVLPNRYFDTHSSGHLISRITFNVTMVTGAATDAIKVVIREGLTVVFLFLYLLWMNWKLTLVMLAILPVIAVMVTTASRKFRKQSKKIQVAMGDVTHVASETIQGYRVVRSFGGEAYEEKRFLDASQSNTDKQLRMTKTGAVYTPMLQLVIYVAMAILMFLVLWLRGDASAGDLVAYITAAGLLPKPIRQLSEVSSTVQRGVAGAESIFEQLDEAAEEDQGTVEKERVSGRLEVRNLSFRYPGTDKQVLDDISFIAEPGQMIALVGRSGSGKSTLANLVPRFYQHNDGKILLDGVEVEDYRLRNLRRHIALVTQQVTLFNDSVANNIAYGDLAGAPREEIERAAKAANAKEFIDNLPQGFDTEVGENGVLLSGGQRQRLAIARALLKDAPLLILDEATSALDTESERHIQAALDEVMKGRTTLVIAHRLSTIEKADLILVMDQGQIVERGSHAELLAQNGHYARLHAMGLDEQAPAPVG

SEQ ID NO: 10657 - protein, 1481 aa, Pseudomonas aeruginosa PAO1
MKAGLYHPETFKDNCGFGLIAHMQGEPSHQLLQTAIEALTCMTHRGGINADGKTGDGCGLLIQKPDLFLRAVAREAFSVDLPEQYAVGMVFFNQDPVKAEAARENMNREIVAAGLELVGWRKVPIDTSVLGRLALERLPQIEQVFIGGAGLSDQDFAIKLFSARRRSSVANAADSDHYICSFSHKTIIYKGLMMPADLAAFYPDLGDERLQTAICVFHQRFSTNTLPKWPLAQPFRFLAHNGEINTITGNRNWAQARRTKFTNELIPDLEELGPLVNRVGSDSSSMDNMLELMVTGGMDLFRGLRMIIPPAWQNVETMDADLRAFYEYNSLHMEPWDGPAGVVLTDGRYAVCLLDRNGLRPSRWVTTKNGYITLASEIGVWDYKPEDVIAKGRVGPGQILAVDTETGQVLHSDDIDNRLKSRHPYKQWLRQNALRIQATLDDDHGVASYDADQLKQFMKMFQVTFEERDQVLRPLGEQGQEAVGSMGDDTPMAILSRRIRSPYDYFRQQFAQVTNPPIDPLREAIVMSLETCLGVEQNIFEEAPHHANQAILTTPVISPAKWRTIMTLDRPGFDRHFIDLNYDESMGLEAAVRNIADQAEEAVRGGKVLLILSDRHIAPGKLPVHAALAVGAVHHRLVQTGLRCDSNILVETATARDPHHFAVLIGFGASAVYPFLAYEVLADLIRTGEVLGDLYEVFKYYRKGISKGLMKILSKMGISTVASYRGAQLFEAVGLSDEVTDLCFTGVASRIQGARFVDIENEQKLLAAEAWSNRKPIQQGGLLKFVYGGEYHAYNPDVVNTLQAAVQQGDYEKFKEYTALVDQRPVSMIRDLLQVKTAAQPLALDEVEPLEAIFKRFDAAGISLGALSPEAHEALAEAMNTLGGRSNSGEGGEDPARYGTLKSSKIKQVATGRFGVTPEYLVNAEVLQIKVAQGAKPGEGGQLPGGKVNGLIARLRYAVPGVTLISPPPHHDIYSIEDLAQLIFDLKQVNPQALVSVKLVSEPGVGTIAAGVAKAYADLITISGYDGGTGASPITSIKYAGSPWELGLAETHQTLRGNDLRGKVRVQTDGGLKTGLDVIKAAILGAESFGFGTAPMIALGCKYLRICHLNNCATGVATQNDKLRKDHFIGTTAMVINFFTFIATETREWLARLGVRSLGELIGRTDLLEILPGETAKQQNLDLAPLLGSELIPADKPQFCEVEKNPPFDQGLLAEKMVELSKAAIEGLSGGEYELDICNCDRSIGARVSGEIARLHGNQGMAKAPVVFRFKGTAGQSFGVWNAGGLHLYLEGDANDYVGKGMTGGKLVITPPKGSPFKTQESAIVGNTCLYGATGGKLFAAGTAGERFAVRNSGSHAVVEGTGDHCCEYMTGGFVCVLGKTGYNFGSGMTGGFAYVLDMDNTFVDRVNHELVEIQRISGEAMEAYRSHLRKVLVEYVNETASEWGANILENLDDYLRRFWLVKPKAASLGSLLTSTRANPQ

SEQ ID NO: 10658 - protein, 266 aa, Pseudomonas aeruginosa PAO1
MKKYLASLVLGVCALVGVASVQAAGAVEDAVKRGTLRVGMDPTYMPFEMTNKRGQIIGFEVDLLKAMAKSMGVKLELVSTSYDGIIPALLTDKFDMIGSGMTLTQERNLRLNFSEPFIVVGQTLLVRKELEGKIKSYKDLNDPQYSITSKIGTTGEIVARKLISKAKYHGFDNEPEAVMDVVNGKADAFIYDSPYNVVAVSKFGAGKLVYLDQPFTYEPLAFGLKKGDYDSINFINNFLHQIREDGTYQRIHDKWFKNTEWLKEME

SEQ ID NO: 10659 - protein, 467 aa, Pseudomonas aeruginosa PAO1
MTHDTGLRRGLNARHIRFMALGSAIGTGLFYGSASAIQMAGPAVLLAYLVAGAAVYMVMRALGEMAVHEPVSGSFGHYASSYLGPLAGFVTGWTYAFEMIIVCLADVTAFGIYMGFWFPDVPRWIWVLSIVLFIGGLNLCHVKVFGELEFWLSLVKVGAIVAMILAGLGIMFFGFSLGGAATSATGVHNLWQHGGFLPNGWAGLVASLSVVVFAFGGIEIIGITAGEAQDPQRVIPRAINAVPLRILLFYVLTLFVLMAIFPWQQIGSNGSPFVQIFDGLGIESAAAILNVVVITAAISAINSDIFGAGRMLYGMARQGQAPVGFSRVSRHGVPWMTVLLMAVALLLGVALNYLIPQSVFLLIASIATFATVWVWLMILLAQVGMRRRMGPRQVAALKFPVPLWPFAPAAAIVFMLFIFVVLGYFPDTRPALWVGAIWIALLVIAYRRWVRPKGDAAHGVLQAQGGL

SEQ ID NO: 10660 - protein, 482 aa, Pseudomonas aeruginosa PAO1
MSQESSQKLRLGALTALVVGSMIGGGIFSLPQNMAASADVGAVLIGWAITAVGMLTLAFVFQTLANRKPELDGGVYAYAKAGFGDYMGFSSAWGYWISAWLGNVGYFVLLFSTLGYFFPIFGKGDTVAAIVCASVLLWALHFLVLRGIKEAAFINTVTTVAKVVPLFLFILICLFAFKLDIFTADIWGKSNPDLGSVMNQVRNMMLVTVWVFIGIEGASIFSSRAEKRSDVGKATVIGFITVLLLLVLVNVLSMGVMTQPELAKLQNPSMALVLEHVVGHWGAVLISVGLLISLLGALLSWVLLCAEIMFAAAKDHTMPEFLRRENANQVPANALWLTNICVQVFLVVVFFTSGDPDGMDPYTKMLLLATSMILIPYFWSAAYGLLLTLKGETYENDARERSKDLVIAGIAVAYAVWLLYAGGLKYLLLSALLYAPGAILFAKAKHEVGQPIFTGIEKLIFAAVVIGALVAAYGLYDGFLTL

SEQ ID NO: 10661 - protein, 661 aa, Pseudomonas aeruginosa PAO1
METPTTPRSTLNPPVFYTSAALILALVLFTVLLQEEAQSLFNHVQQWIITNASWFYVLAVALILISVVFLAVSRYGDIKLGPDHSRPDYRNTTWFAMLFSAGMGIGLMFFGVAEPVMHFTTPPVGEPNTVQAAKEAMKLTFFHWGLHAWAIYAIVALILAFFSYRHGLPLTLRSALYPLIGERIYGPIGHAVDIFAIIGTVFGVATSLGYGVLQINSGLHHLFGWPVNQTVQIALIAATCGLATLSVASGLDRGIRILSELNLSLAVILLLFVLVLGPTVFLLQTYVQNTGAYLSDIVNKTFNLYAYEPTDWIGGWTLLYWGWWLSWSPFVGLFIARISRGRTIREFVCGVLFVPAGFTLLWMTVFGDTAIHMVLQEGFTQLAEVVNQDSSVALFAFLEHFPLGSVISLVAVLMVVVFFVTSADSGALVVDMLASSGKDHSPLWQRIFWSVLMGVVAIALLLADGLKALQTATIASALPFSIVLLASIWGLFKALHLDATKRGIRYQALTFSRPTTRSGASEGDGWQRRLRNIAMFPRRSHVNRFITDVARPACEDVAAELRKQGYEVQVQDGEDGRVRLEVSHGGEVDFIYEVRPRAFTTPSFVMRDTEDSSESRKYFRAEVHLQEGGQDYDIMGWSRDGVIGDILDQYERHMHFLHVVR

SEQ ID NO: 10662 - protein, 442 aa, Pseudomonas aeruginosa PAO1
MVGNPALAELLRAPRLIPWRNWSGAQSCLPLAREAPKDLDELVRIIRQASGRIRPVGSGHSFSALVPTDGTLLSLAYFSGLLSHDSVTLQAEFGGGTPMSQMGAPLKEIGQALVNMADIDYQTLAGAIATSTHGTGVGFGSYSAQVRGLQLVTASGEVLECDAKRNVEVFDAARVSLGALGVVTRVRLQNRAAYRLRERQWIARTEELLEDVEKNTRENQHWEMLVVTHSDYALSIALNETDEPKTPPLDPAKEGGNEFVGLIEGLDKYLSDFPETRRTLLNSLRHFARFDERVDDSYAVYANVRNVRFNEMEYSVPAEHGPACLREILALIRDKDLRTWFPIEYRYVKADDIPLSMFEGRDSCSISVHQHYSMDHHNFFAAVEPIFWKYAGRPHWGKLHGLNAHQLQGLYPRWKAFAEVRQALDPRGRFLNAHLSSILGVT

SEQ ID NO: 10663 - protein, 516 aa, Pseudomonas aeruginosa PAO1
MFFGSTALILVLTAALILYPDSAGALLGRIQEWLSHSFGWYYMLAIGAYLFFVAWVAFSRFGTLKLGEEHEKPDFSYGAWAGMLFSSGIGISLLYFAASEPIDHLYHPPEGVPGSPQAARQALQLTFLHWGLHGWAIYALVGLAVGYFAYRHRQPLALRSALYPILGERWVKGAAGHAVDCFGIFVTLLGLVTNLGIGALQVSSGLEYLTGMPHSKGTLLAVILAMSLVATLAAVSGVEKGIRRLSNLNIVLFSSLLLFVLVCGSTLELLNGFVQNLGDYLDGLVLKTFDLYVYTGAGAGKSEEWLGLWTLFYWAWWISWAPFVGMFIARISRGRSVRELVCGVLLIPLGFTLAWLSVFGNSALDLVMNHGATDLGKAALEQPSMSIYLLLEHYPLSKIVIGLSIFVGFVLFLTPADSGSVMLANLSRSGGELDEDAPNWLRILWSAVVTLVTIGLLFAGNFTAMQTVVVLAGLPFSAVLILFMFGLHKAMRADYEAQVGDRRTYQPVPAPTQPQT

SEQ ID NO: 10664 - protein, 366 aa, Pseudomonas aeruginosa PAO1
MSSNFLNPVTTQTWANGRHLVRCVKVIQETWDVRTFCFMADQPILFFFKPGQFVTLELEIDGEPVMRSYTISSSPSVPYSFSITIKRVPGGRVSNWLHDNLKEGQELPVHGPVGLFNAIDFPADKVLFLSGGVGITPVMSMARWFFDTNANVDMVFVHSARSPKDIIYHRELEHMASRIDNFSLHIICERHGLGEAWAGYRGYLNLRMLELIAPDFLEREIFCCGPTPYMSAVKHLLQGHGYDMSRYHEEAFGPTPPEVRADVRELAAEAAEAPEVPVADQHQVEFTATGKSIRVSPGETVHAAAAKLGLHIPKACGMGICGTCKVMKTAGEVEMEHNGGITDEDVAEGYILSCCSVPKGDVVIDY

SEQ ID NO: 10665 - protein, 449 aa, Pseudomonas aeruginosa PAO1
MAIEQFGYRQQLRRSLSLSDLIIYGMIFMIPIAPFGVYGWVHADAHGMVPMAYLVGMLAMLFTALSYGAMAKAFPIAGSVYSYAQRGIHPHVGFIAGWVLLLDYLLIPPLLYVFSALALNHLFPAIPKLAWMLLFLVSATLVNLRGITFAARANLLFLIGELVVLAIFLVVGYQALEGGLGNGRLTLEPLYRPEAFDLGLVMKAASIAVLSFLGFDAISTLAEEVKGDPARQIGRAALIALFIMGGIFIAQTWLATDLAAGMNFKSADTAFYEIAEAAGGQWLSMLTAVATALAWGVTVSITSQAAVSRLLYSMARDGRLPRALARVHPRYQTPHVSLYLVAVLSLGIGWAFLDAPDVLTSLVNFGALTGFCLLHLSVINHYYRRQRSGQWLRHLLFPLVGLAIIAYVLYSMSLDAQLLGLAWIAVGLVYLALLQRGGRQAPTELAKDL

SEQ ID NO: 10666 - protein, 447 aa, Pseudomonas aeruginosa PAO1
MSDQVIFVDDEATIREAVQQWLELSGFEVRLCLRAEECLGALDKSFAGVVISDVRMPGMDGLQLLANLQAVDRDLPVIMVTGHGDVPMAVEAMRQGAYDFIEKPFTPERLLGSLRRALEKRRLVLENRRLKEQASLKDQVDARLLGVSKPMEALRRQVLALAPTPVNVLIRGETGSGKELVARCLHDFGPRADKPFVALNCAAIPEQLFESELFGHESGAFTGAQGKRIGKLEHAHGGTLFLDEIESMPLAQQVKLLRVLQEQQLERLGSNQSIHVDLRVIAATKPDLLAEARAGRFREDLVYRLNVAELRLPPIRERREDIPLLFEHFASVASQRLGREPQPAAPAELARLMAHDWPGNVRELANAAERHVLGLERGDAEEGGGLTSGLAERMEAFEAECLRQALGQCRGDIKAVMELLQLPRRTLNEKMLRHGLSRSDFVGEEPA

SEQ ID NO: 10667 - protein, 372 aa, Pseudomonas aeruginosa PAO1
MQIGVPLETHAGETRVSATPETVKKLIGQGHQVIVQSGAGVSASQPDSAYEAAGATIGSAAEAFGADLVLKVVAPSAAELAQMKSGAVLVGMLNPFDNENIARMAERGITAFALEAAPRTSRAQSLDVLSSQANIAGYKAVMLAANHYPRFMPMLMTAAGTVKAARVLILGAGVAGLQAIATAKRLGAVIEASDVRPAVKEQIESLGAKFVDVPYETDEERECAEGVGGYARPMPASWMERQAKAVHERAKQSDIVITTALIPGRKAPTLLHEATVAEMKPGSVVIDLAAAQGGNCPLTEADQVVVRHGVTIVGHSNLAALVPADASALYARNILDFLKLTLNAEGFSVNLEDDIVAACLMCRDGQAVRKNG

SEQ ID NO: 10668 - protein, 315 aa, Vibrio cholerae O1 biovar eltor str. N16961
MGYQHPTFSAKSFGYKNKNHKENKMRVSFIGLGVMGYPMAGHLQKAGFDVTVFNRTQAKAVAWAKQFGGQYAETVAECVKNADVVLTCVGNDDDVRSMTTAATGAIPAMKPGAVLIDHTTTSALLAEELSAAAQQAGLHFMDAPVSGGQAGAENGVLTIMCGGDEALFAKMQPIFAAYGRSSVLMGTAGQGQRAKMVNQICIAGVLNGLSEGLMLAEQAGLDIPNLVACLKNGAAGSWQMENRALTMSQEKFDFGFAIDWMIKDLGFCLDEAAQLGLRLPMTENTMTAYQRLSAQGLGRMDTSVLIQAVKEAAKK

SEQ ID NO: 10669 - protein, 408 aa, Vibrio cholerae O1 biovar eltor str. N16961
MNQIISIGALESFLIAISVLFLGHFINAKLPILTKFNIPEPIVGGLIVACVITALHFHGIDMEFSLPLQNVFMLMFFSTVGLAANYTQLIKGGAKVFLFLAVASVFIIIQNGVGVSLAAGLGLDPLLGLIAGSITLSGGHGTGAAWANTFAENYGLANTLEIAMASATFGLIIGGIIGSPVAQKLVDKHGIESEYGRGTQTHSRFPELVTYNEYEEDKVTAKKVIEILFILLICVTGAKYLEAWVKTFEIRWLMIPDFVYALFIGVFITNLLEVTKLRKVDAETVDILGTVSLSLFLAMALMSLKLWNIFDLALPFLVILAIQSVVLGVFCYFVTFKVMGANYDAAVISAGHCGFGLGATPTAVMNMGSVVKRFGPSPQAFMVVPIVGAFFIDIVNLIILQGYISFLG

SEQ ID NO: 10670 - protein, 592 aa, Vibrio cholerae O1 biovar eltor str. N16961
MNEVKAVWIRQWFPGLYQFKDYQRGWLTDDVRAAFSVVAVALPVAIAYAQLTGVPAIVGLYSCVLPMLVYALMGTSRQLIVGPDAATCAVIAAVVTPLAAGDTTKHWQLVMTMTAMTGFWCILASRLKLGIFADFLSRPILLGLLNGVALTIIVGQFAKVLGLKYEKRYLLERIVEAPELLYSLHWQTLGLSALTLAIYLVIKRWQPRWPAAMFAIMVAALLVWALNLESVGVQVVGVIQGGLPEFQAPAFDLGISRELVMPALNLAMVSFVSMMLTARSFAAKNGYDIDADKEFRALGVANVAAAFSQGFAISGADSRTAVNDANGGKSQLVSVIAALFIALVAVFAYQPLQFIPVAALGVVLIIASLSLLDLKGVWNLRKRDKDAFYLALITFIAVLVIGVIPGITLAVLLGLFQFLKLVMRPTDQMMGLDEEGTLRTLDGSEKAKPIPGMVIFRFNSPLTYFNAPYFKRRILDQTEREGAQVGCVIIDAVASFTHLDLSVMAMLADLHGILKKRGIRLILAGRKRSLRHWCDLTGINTAEGGIVLRADMYLAIKLSGCYLSAMEEGHVPVVQKEPDISVLLKPTTTEVA

SEQ ID NO: 10671 - protein, 869 aa, Vibrio cholerae O1 biovar eltor str. N16961
MIRIELPTLIAKLNAQSKLALEQAASLCIERQHPEVTLEYYLDVLLDNPLSDVRLVLKQAGLEVDQVKQAIASTYSREQVLDTYPAFSPLLVELLQEAWLLSSTELEQAELRSGAIFLAALTRADRYLSFKLISLFEGINRENLKKHFAMILSDSAETAVAKTDKNAANPLQAAAETPLGRFCTNVTEQARNGELDPVLSRENELNLMVDILCRRRKNNPIVVGEAGVGKSAMIEGLALRVVAGKVPTQLQNVELYSLDLGRLQAGASVKGEFEKRLKGVIDAIKQSPKPIILFIDEAHTLIGSGNQEGGSDAANLLKPALARGELSTVAATTWKEYKKYFEKDPALTRRFQLVKLDEPTIDQAVDILRGLNSVYEKAHNVLITDDALKAAAELSARYISGRQLPDKAIDVLDTACARIAINMTTPPKRLALLETLCHQRQLEIDMLERAQFLGQEVDSERLDVLRNQELADEAEKAALTQSWQQQKSLVESIIALRAELMELSQAQEQDPDHLLVVRTALQEQYQALDAIDHAERLMHPQVDADQIAEVIADWTGVPVDQMNTDELHKITHLTSILGQAIKGQETAIERIHRHLLTARADLRRPGRPKGAFLLVGPSGVGKTETVVQLAEQLYGGKQFLTTINMSEYQEKHTVSRLIGSPPGYVGYGEGGVLTEAIRKMPYSVVLLDEVEKAHPEVLNIFYQGFDKGEIADGEGRVIDCQNIVFFLTSNLGYQTIVDYADEPAKLDEALYPELAAFFKPALLARMEVIPYLPLGKEVLAQIVRGKLARLEKLFKTRYNAEVVIEESLIDEILSRATRSENGARMLEAIIEGQLLPPVSLALLNKLAERAPVERIRLAAEAGEFIGEVA

SEQ ID NO: 10672 - protein, 70 aa, Vibrio cholerae O1 biovar eltor str. N16961
MSQKMTGSVKWFNETKGFGFISQDNGGQDVFVHFKSIVSEGFKTLAEGQRVSFTVEQGKKGPQAAQVTAL

SEQ ID NO: 10673 - protein, 394 aa, Vibrio cholerae O1 biovar eltor str. N16961
MLTQEHINIIKSTIPLLESAGPALTQHFYQRMFSHNPELKHIFNMTHQKTGRQSVALFEAIAAYAKHIDNLAALTSAVERIAHKHTSFNIQPEHYQIVGHHLLETLRELAPDAFTQPVEEAWTAAYFFLAQVFIDREGALYLERKQALGGWRDGRTFVVREKQVESAYVTSFVLVPADGGAVLDYQPGQYIGIEVTPEGSDYREIRQYSLSHASNGREYRISVKREGVGSDNPGLVSHYLHNNVKVGDSVKLYAPAGDFFYVERERPVVLISAGVGATPMQAILHTLAKQNKSGVTYLYACNSAKEHTFAQETAQLIAQQGWMQQVWYRDESADDVLQGEMQLAELILPIEDGDFYLCGPIGFMQYVVKQLLALGVDKARIHYEVFGPHAQLAA

SEQ ID NO: 10674 - protein, 69 aa, Vibrio cholerae O1 biovar eltor str. N16961
MSTPVTGTVKWFNETKGFGFIKQENGPDVFAHFSAIQGDGFRTLAEGQKVEFVITQGQKGPQAESIKVL

SEQ ID NO: 10675 - protein, 397 aa, Vibrio cholerae O1 biovar eltor str. N16961
MSNSYVLVINSGSSSLKFAVIDSQTGEALISGLGECFGMPEAVISWKYQGEKTEEAITAADHHHQHAINRIVGLMESLGFAQDLVAVGHRIVHGGEKFTSTVRIDEEVLAEIESLSDLAPLHNPAGAIGIQAAMAAFPSLPQFAVFDTAFHQTMPKKAFTGAISHELYKQYGIRRYGFHGTSHYYVSREAAKMLNKPIEQASFISVHLGNGASVCAISNGQSVDTSMGFTPLAGLMMGTRSGDLDPGIIEFLMKKGWSQEKVFETLNKKSGFLGVSGLTSDARGILEAMENGHEGAKLAFEVFTYRVAKYIGSYLIPLDHLDAIIFTGGIGENSLPIRREILGNLKLLGFVEDEKGNEAARFGKAGIIAKSELLNAVAMVIPTNEEFVIAQQSVELL

SEQ ID NO: 10676 - protein, 483 aa, Vibrio cholerae O1 biovar eltor str. N16961
MSAAYSKNQNCFSPTEMMAEAEKFALSKAKKTSGMILGLSVMAGAFIGLAFLFYITVTTGSASAGWGLSRLAGGVAFSMGLILIVICGGELFTSSVLSSISWANREISFGKMLSIWGKVYVGNFIGAIFLLLLVTAAGLYQLDEGQWGLNALNIAQHKLHHTTVQAFALGILCNLLVCLAIWLTFSSANAMTKAAMTIMPVAMFVSSGFEHCVANMFMVPLGIVIQNFAPDSFWQQVGVTASQYSDLNVTQFITANLIPVTLGNIVGGAVLVGLANWSIYRRPQLKAANVVTITETQALTSVKETLMKSTITVKDMMNSQPVTLSVDMTTPAAIDTLLDHHLSAAPVVDMQGRLVGVLSSHDVMVDLWCQDYLPSQDQKVVDLMTRDVIAIDVNDKLVDVAEFFCIDKEQLFPTTSMGIATRFSALSLEERAKSMKVNKPHMLPVLHNGQLVGVLERNDVLEALRPIYGERVRIVKDKALARA

SEQ ID NO: 10677 - protein, 512 aa, Vibrio cholerae O1 biovar eltor str. N16961
MQIGVPREQLAGETRVAASPSSVEQLIKLGFEVCIESKAGALASFDDAAYTAAGATIGSREEIWACPLILKVNAPSDDEIALLKEGATLVSFIWPAQNPALMEKLSSKNINVLAMDAVPRISRAQALDALSSMANIAGYRAVVEAAHEFGRFFTGQITAAGKVSPAKVFVAGAGVAGLAAIGAAGSLGAIVRAFDVRPEVKEQVQSMGAEFLEVNFQETAGSGDGYAKEMSDEFNRKAAELYAAQAKDVDIIITTALIPGKPAPKLITKEMVDSMKAGSVIVDLAAANGGNCEYTVKDQVITTDNGVKVIGYTDMVGRLPTQSSQLYATNLVNLLKLLCKEKDGNIDINFEDVVLRGVTVVKAGEITWPAPPIQVSAQPQQKAKVQPTKAQKKEPEPTSPVKKLVGLAVGVGLFAWVASVAPAAFLGHFTVFVLACVVGYYVVWNVTHALHTPLMSVTNAISGIIVVGALLQIGQGSGIVTFLAFIAVLIASINIFGGFTVTKRMLEMFRKN

SEQ ID NO: 10678 - protein, 401 aa, Vibrio cholerae O1 biovar eltor str. N16961
MEKIYIVGAKRSAIGAFGGSLKECSAGALAGQVIQAALEAAQLKPEAVDEVIVGNVVSAGQGMGVGRQAALAAGVPQSVPAYSINMVCGSGMKSVMDAVAHIKAGDASVVVAAGVEVMSQIPFVTPASLRDGQKMGAFEVKDLLIHDGLTDVFNQYHMGVTAENIAKQYDIARQTQDEFALASQMKATAAIEAGHFKREIVPISVKKRRETVVFDTDEYPKPTTTLAALQGLRAAFDAQGTVTAGNASGINDGASAVIIASESAVKKLGLTPIAEIMSYAQTGLDPKVMGLGPVSAVTQALAKAELSITQVDLFELNEAFAAQALGVVYGLAEQHAIQPEAILEKANVNGGAIALGHPLGASGNRILVTLLHELQRRQKHYGVASLCVGGGMGTAIVIKTV

SEQ ID NO: 10679 - protein, 663 aa, Vibrio cholerae O1 biovar eltor str. N16961
MVGNGKARGTLVISSFSGIPMQDTAIQFSDLALNSAILSALTEMGFVSPTPIQAAAIPVLLEGRDALGKAQTGTGKTAAFSLPLLNKLNLSQYKPQAIVMAPTRELAIQVAAEIKNLGQNIKGLKVLEIYGGASILDQMRALKSGAHIVVGTPGRVKDLITRDRLHLDECHTFILDEADEMLKMGFVDDVTWIMEQAPESAQRVLFSATMPPMVKEIVERFLRNPECVDVAGSNQTVAKVEQQYWVVKGVEKDEAMARLLETEETDASIVFVRTRQDTERLADWLCARGFKAAALHGDIPQSLRERTVDHIKQGVIDILVATDVVARGLDVPRITHVYNYDIPFDVESYIHRIGRTGRAGRKGKAILLVRTNQIRMLRTIERVTRSSMEEIQLPHRDKVAESRLTKLGQELAADKEFSSLERFADLVEKLQASLEIDATTLAAILLKRQQGKRPLFYVGADPMIEAMEREKSRRRERRDDRRDGDRPARREFGGRDQENHDWDTYQLQVGRDQGVQVKDIVGALANELGLTKGSIGAIKLAQGHTFVQLPKAMSNDVSSKLRKLRIRQKEVGAVVCDFDDFRESRGGARREGGPRREGGRRPEGNREGGFRGGREGGREGGRGRGGEGRPFREGERRFERNRSGESSGSYRGERGHSRRREEA

SEQ ID NO: 10680 - protein, 309 aa, Vibrio cholerae O1 biovar eltor str. N16961
MNDLFTKTDYSLYSNAMTFVRRPYVRNPVDTNADVVVLGVPLDMATSGRPGARMGPDAIRRASVNLAWEGKKFPWDFNLFKKINVIDAGDLVFDCGDAEDFTYRLEAATSEILKSGKTMLALGGDHFITLPILRAYAKHFGEMALIHFDAHTDTYANGSAYDHGTMFYHAPKEGLISAKHSVQVGIRTEYKQEGHGFNVINAMQANDMSVEEIVAQIRHIVGDKPVYLTFDIDCLDPAFAPGTGTPVCGGLSSDKILKIIRALKGINLIGMDVVEVSPPYDQSDLTSLAGATIALELLYVWASNKKDEE

SEQ ID NO: 10681 - protein, 662 aa, Vibrio cholerae O1 biovar eltor str. N16961
MFYDVAQITPSYSKLQQFWLDSSIPIIAFVYAHEDALCGRLAANPRNVGMTTTKGSTMSSGLLSQINVFPVKSLGGLALSSAWVEKQGLTFDRRFMLALSDGSMVTARKFPQMVLIKTALRHDGVLFSAQGHPSLTIRYADFKFQPVPAQVWSDNFTAYTTTDEADDWFSQVLGIRVELLYSGEQSNRVREKVGHNVSFADGYPLLVISQASLDELNRRSPEFHSMDQFRTNLVVSGTEPFAEDSWKRIRIGEVEFEAVKPCERCILTTVEVKKGAFRPTKEPLRTLSQFRANERGGVFFGQNLVAKNEGMIRAGDPIEVLEYKEKEVYPDQGISHFTLTCVEREEIARDFVTFWLEPTQEIATQYFPGQYLPIEMVIEGEPVQRYYTLSSSPSRPGRLAISVKRIDGGRVSNWLQENLQIGTTLTAQHPTGHFHLDTTALQPLLLLSAGSGVTPMLSMLRYLADHNQLDDVVFYHQCRSEQDIPCQAELDALAKQHAGLTLIYALTQPSPQWQGEQGRLSLSHIKRIPNLVSRQVFVCGPDGFMQKAKNLLLKQGVAESAYHQEAFGTLQVAPREKKAVTLSFNGIQVSADNQKTLLEHAEDAGVRIPNSCRAGICGACKVKVKSGLVEQPKVPALMDHERSMGMALACCSVANTDLDVEF

SEQ ID NO: 10682 - protein, 70 aa, Vibrio cholerae O1 biovar eltor str. N16961
MSTKMTGSVKWFNETKGFGFLTQDNGGNDVFVHFNSIQSEGFKTLAEGQRVSFIVEQGKKGPQASNVVAL

SEQ ID NO: 10683 - protein, 278 aa, Vibrio cholerae O1 biovar eltor str. N16961
MQLFGQRLGRFSVKTLLTGLLGLAFTLPAVASDTPNLDAIKERGTLRVGMSTFVPWAMRDKQGELIGFEIDVAKRLAADSGWQVEFVPTAWDGIIPALLAKKFDVIIGGMSVTPERSKSVLFTAPYSHSGVQLAANKKLAEGFTQLEDFNKRNVKIAARRGAFTVQVARETFPKASVLQFDDDAQAFQEVINGNAHAVIASSPKPEHESIKHSDSLFLPFSERLSKGNEAFAVRLGEEDKKAFFDQWIADRTADGWLQARYEYWFSTLDWQDQIASGQ

SEQ ID NO: 10684 - protein, 496 aa, Vibrio cholerae O1 biovar eltor str. N16961
MENSFAITTTFIVYLILMLAIGVYAYQRTKNSADYFLGGRSLGPWPAALSAGASDMSGWLLLGLPGYAYAAGIESFWLAGGLLVGTWANWLVNAKRLRTYSITTDSLTLPEFLSRRFNDNSKLIQTISAFFILLFFLFYTSSGLVAGGKLFETVFGLDYSTAVIIGTVCVVSYTLFGGFLAVSWTDLVQGLLMAAALMIVPIAAMNGGFTQLNHDLAAINPELLTLWNDAKGEPLSAIAIISLVAWGLGYFGQPHILARFKASRSNKDLITARRIAVVWTGLSMAGAILVGLTGLIFVTQSGTIGLDDGEKIFMLLVNSLFHPVIAGILLAAILAAIMSTADSQLLVSSSALAEDFYKQVFKTDASSEDIVRVGRIAVILISLIALFLAMTPDSSVLGLVSYAWAGFGAAFGPALVLSLYWPRMNRHGALSGIIVGGVTIVVWKQLSGGWFDVYEIVPGIILSTLSIVVVSLLTGEPDEKVKAQHATFKKQLIELE

SEQ ID NO: 10685 - protein, 758 aa, Pasteurella multocida subsp. multocida str. Pm70
MDAQLRQAALDFHEFPTPGKIEVTPTKSLATQRDLALAYSPGVAVPCLEIQADPAASYRYTSRGNLVAVISNGTAVLGLGNIGALAGKPVMEGKGVLFKKFAGVNVFDIEIDERDPDKLVDIIASLEPTFGGINLEDIKAPECFYIEQKLRERMKIPVFHDDQHGTAIISAAAILNGLRIVKKDIAKVKLIASGAGAASIACLNLLVSLGLPRENIIVCDSKGVIFHGRDERMDETKKLYAIEDNGKRTLAEVINDADIFLGCSAAGTLTQDMVKTMAANPLILALANPDPEILPPLAKAVRPDAIVCTGRSDYPNQVNNVLCFPFIFRGALDVSATAINEEMKLAAVHAIADLALAEQSEVVTSAYGETELSFGPEYLIPKPFDPRLIVKIAPAVAKAAMDSGVATRPIKDFDAYIEKLTQFVYKTNLFMKPVFAQAKQNKKRVLLTDGEESRVLHAVQEIATLGIATPILLGRPSVIAQKIKQLGLHIQEGRDFELVDIENNPYFEECYKTYHNLLKRKGITPAGAQRKMLHNPTVIGATLLQLGKADAMLCGLVGPYASHLSNIKEVIGVQPCVPTPATVNGLVLPTGNLFITDTFVNHNPTAQELAEITIMAANEVSRFGIEPKVALVSHSNFGTFDDPSAVKMREVLHLVKEKAPDLIIDGEMHCDVALNEKLRQDIMPDSPLKGAANLLVMPNMEAARISLNLLQGTATPITVGPILMGMNKPVHILTSASSVRRIINMVAIAAANVEPTCK

SEQ ID NO: 10686 - protein, 306 aa, Pasteurella multocida subsp. multocida str. Pm70
MNEIKTADNAKTYCGFIAIVGRPNVGKSTLLNKILGQKISITSRKAQTTRHRIVGIHTDGPYQAVYVDTPGLHIEEKRAINRLMNRAASSAIGDVDLIIFVVDGTHWNEDDEMVLNKLRAAKAPVVLAINKIDNIKNKEEMLPFITELTSKFDFAHVVPISAQGGKNIAELEKIVRESLHEGTHHFPEEYVTDRSQRFMASEIIREKLMRFTGDELPYSVTVEIEQFKLNERGTYEINGLILVEREGQKKMVIGNKGQKIKQIGIEARADMERLFDNKVHLELWVKVKSGWADDERALRSLGYMDE

SEQ ID NO: 10687 - protein, 283 aa, Pasteurella multocida subsp. multocida str. Pm70
MKSEESTSTCMVSPTKMAQIGEDVGVYKATKKQIYSFFSAIPAGAFIAIAFVFYATTQTGNGDAPWGLTKLVGGIVFSLGVIMVVVCGSELFTSSTMTAVARVSGRISTFQMLRNWLVVYGGNFVGALFIVLLTWFAGQIMAANGQWGLTILKTAQHKIHHTWTEAFALGIFCNIMVCIAVWMTYAGKTLLDKAVIMILPISMFVASGFEHSVANMFMIPMGMMIAHFASPEFWQAVSLNPAQFADLDMYHFVVKNLIPVTLGNIVGGALCVALTQWYINRPH

SEQ ID NO: 10688 - protein, 815 aa, Pasteurella multocida subsp. multocida str. Pm70
MRVLKFGGTSLANPERFSQAAQLIEKAHFEEQAAGVLSAPAKITNHLVALSEKASLNQPTDANFNEAIEIFYHIIHGLHAENNRFDLEGTKALIDTEFAQISQLLEEIRQQGFVSDAVKATIDCRGEKLSIAMMKAWFEARGYDVTVIDPVEKLLAHGSYLESSVDIEESTKRVDAKSIPTKNVVLMAGFTAGNEKGELVLLGRNGSDYSAACLAACLGASACEIWTDVDGVFTCDPRLVPDARLLPSLSYREAMELSYFGAKVIHPRTIGPLVQTNIPCLIKNTGNPSAPGSIIDGNIQSEQLQVKGITNLDNVAMFNVSGPGMQGMVGMASRVFSAMSNAGVSVILITQSSSEYSISFCVPAKSVEVAKQALEKEFEQELKANDLEPIDVIRDLSIISVVGDGMKQAKGIAARFFSALAQANISIVAIAQGSSERSISAVVALNKAIEAVKATHQALFNNKKVVDVFLVGVGGVGGELIEQIKHQKSYLAKKDIEIRVCAIANSNKMLLKADGLNLENWQADLETATQPSDFDVLLSFIKLHHVVNPVFVDCTSADSVAGLYVRALGEGFHVVTPNKKANTRELAYYNALRESARNNQRKFLYDTNVGAGLPVIENLQNLLAAGDEVVKFSGVLSGSLSFIFGELENGLTLSEATALAREKGFTEPDPRDDLSGQDVARKLLILARETGAQLELTDIEVESVLPAGFAEGKTTQEFMAMLPQLDAEFSQRVANAKAEGKVLRYVGQIENNSCKVSVLEVDADDPLYKVKNGENALAFYTRYYQPIPLLLRGYGAGNSVTAAGIFADILRTLQH

SEQ ID NO: 10689 - protein, 315 aa, Pasteurella multocida subsp. multocida str. Pm70
MPDIKLFTGNATPELAKRISERLYLSLGDATVGRFSDGEIQVQINENVRGSDVFIIQSTCAPTNDNLMELIVMVDALRRASAGRITAVIPYFGYARQDRRVRSARVPITAKVVADFLSSVGVDRVLTCDLHAEQIQGFFDVPVDNVFGSPVLVHDMLKKIDMQNPIVVSPDIGGVVRARAIAKLLNDTDMAIIDKRRPRANVAQVMHIIGDVAGRDCILVDDMIDTGGTLCKAAEALKERGAKRVFAYATHAVFSGSAAKNLASDALDEVVVTDTIPLSPEIKALNKVRVLTLSGMLAEAIRRISNEESISAMFT

SEQ ID NO: 10690 - protein, 404 aa, Pasteurella multocida subsp. multocida str. Pm70
MKLPIYLDYAATCPVDERVAKKMMEYLTVEGNFGNPASRSHKFGWQAEEAVDVARNYIADLIGADSREIVFTSGATESDNLAIKGAAHFYQSKGKHIITCKTEHKAVLDTCRQLEREGFEVTYLNPKSDGLIDLEELKNAMRDDTILVSIMHVNNEIGVIQDIAAIGELCRARKILFHVDATQSVGKLPINLAELKVDLMSMSSHKLYGPKGIGALYVSRKPRVRLEAIIHGGGHERGMRSGTLPVHQIVGMGEAYRICKEEMASEMPRLKALRDRLYNGLKDIEETYVNGSMEHRLDSNLNISFNYVEGESLMMALRDIAVSSGSACTSASLEPSYVLRALGLNDELAHSSIRFTLGRYTTEEEIDYTIELVKNAVAKLRELSPLWDMFKEGIDLNTIEWTHH

SEQ ID NO: 10691 - protein, 390 aa, Pasteurella multocida subsp. multocida str. Pm70
MKFIDEALIRVEAGDGGNGCVSFRREKYIPKGGPDGGDGGDGGDVYLVADENLNTLIDYRFEKRFAAGRGENGRSAGCTGHRGNDITLRVPVGTRAIDNDTKEVLGDLTKHGAKMLVAKGGYHGLGNTRFKSSVNRAPRQKTNGTPGEKRDLQLELMLLADVGMLGLPNAGKSTFIRAVSAAKPKVADYPFTTLVPSLGVVRVDENHSFVVADIPGLIEGAAEGAGLGVRFLKHLERCRVLIHLVDIAPIDESDPAENISIIESELFQYSEALADKPRWLVFNKIDTMSDEEAHERAQAITERLGWDDDYYLISAVTGKNVQPLCRDIMDFIEANPRHEVEQTADEAEVKFKWDDYHQAQLADHQFEDEDEDWDDWSEEDEEGVETIYKP

SEQ ID NO: 10692 - protein, 69 aa, Pasteurella multocida subsp. multocida str. Pm70
MEVGVVKWFNNAKGFGFISAEGTDADIFAHYSVIEMEGYRSLKAGQKVQFEVVHGDKGSHATKIIPIVE

SEQ ID NO: 10693 - protein, 346 aa, Pasteurella multocida subsp. multocida str. Pm70
MIQNILLLQINGKLKIKRKSYVIIPPVFMSIKDSEMNYLQIARETLAVEEQALARLGQRLDTHFNEIVELILQCQGRLVIGGIGKSGLVGKKMVATFASTGTPSFFLHPTEAFHGDLGMLKPIDIVMLISYSGETDDVNKLIPSLKNFGNKIIALTGNPNSTLAKHSDYVLDISVEREVCPNNLAPTTSVLVTMALGDALAVALIKARDFKPADFARFHPGGSLGRRLLCRVKDEMQTRLPVTRLETSFTDCLSIMNEGRMGVALVMEQNQLKGIITDGDIRRALTANGAETLRKTAQDLMTSNPKTIHQDAYLAEAEAFMKEKKIHSLVVINDQQNVVGLVEFTS

SEQ ID NO: 10694 - protein, 559 aa, Pasteurella multocida subsp. multocida str. Pm70
MSHPVENVVAAENTEKRPTNFIRQIIDEDLASGKHTGVQTRFPPEPNGYLHIGHAKSICLNFGIAEDYQGLCNLRFDDTNPVKEDVEYVDSIKQDVEWLGFKWEGEPRYASDYFDQLYGYAIELIEKGLAYVDELSPEEMREYRGTLTEPGKNSPYRDRSIEENLALFEKMKNGEIAEGKACLRAKIDMASPFIVMRDPVIYRIKFATHHQTGDKWCIYPMYDFTHCISDAIERITHSLCTLEFQDNRRLYDWVLENISIARPLPHQYEFSRLNLESTLTSKRKLLQLVNEGIVDGWNDPRMPTISGLRRRGYTPASLREFCRRIGVTKQDNMVEFSALEACIREDLNENAPRAMAVINPLKIVIENFSGKEMLTAPNHPNRDELGVRELPFTRELYIDQADFREEANKQYKRLVLGKEVRLRNAYVIKAERVEKDAEENITTVYCTYDPDTLGKNPADGRKVKGVIQWVSAEDYLPAEFRQYGRLFTVANPGAAEDIHQVLNPDSLVIKQGVVEKSLANAQPEKAYQFEREGYYCADSKDSRPDHLVFNLTVSLKEGF

SEQ ID NO: 10695 - protein, 500 aa, Pasteurella multocida subsp. multocida str. Pm70
MFGYNATIITFTIYILGMILIGFIAYRYTNNLSDYILGGRRLGSFVTGLSAGASDMSGWLLMGLPGAVYAAGLVEGWIAIGLTIGAYLNWLFVAGRLRVYTEFNQNALTLPEYFQHRFHDQSKILKIVSATIILFFFAIYCASGVVAGARLFENLFEVPYATALWYGALATILYTFIGGFLAVSWTDTIQASLMLFALFLTPIFVLIHLGGFEATHTVIVNAGVAAQRDFTDLFTGTSFIGLLSLSAWGLGYFGQPHILARFMSAKDAKSLVNARRISIMWMIICLFGAVGIGFFGQAYFFANPQVADTVNANHEQVFIELAKLLFNPWIAGILLSAILAAVMSTLSCQLLICSSAITEDFYKGMIRPNASQKELVWLGRIMVLVIALLAIYLAQDPNSKVLGLVSYAWAGFGCAFGPVVIFSLFWKRMNMAGAMAGMLTGALVVVFWNDVVPQSGIYEMIPGFILAAVAIVVVSLITPAPSQQTVSNFEQAELAYQQQK

SEQ ID NO: 10696 - protein, 69 aa, Pasteurella multocida subsp. multocida str. Pm70
MSKLNGTVKWFNSDKGFGFITPADGGKDLFVHFSGIIGSNYRTLNEGDRVEYSVQDSQRGPSAIDVKAI

SEQ ID NO: 10697 - protein, 401 aa, Pasteurella multocida subsp. multocida str. Pm70
MSQKLVLILNCGSSSLKFSILDPQTGEEKLSGLAEAFHLDDARIKWKLHGEKGNADLGAGAAHSEALNFIVNSIFPLDPSLKEDIVAIGHRIVHGGEKFTSSVVITDEVVQGIKDAVQFAPLHNPAHLIGIEEAFKMFPHLKDKNVAVFDTAFHQTMPEEAYLYALPYSLYREHGVRRYGAHGTSHFFVSQQAAERLNVPAEQVNVITCHLGNGASIAAVRHGQCIDTSMGLTPLEGLVMGTRSGDIDPAIVFYLHDNLGLSVEEINTLLTKKSGLLGLTEVTSDCRYAEDNYDKEASAKRALDVFSYRLAKYIGSYMAVIGERLDAIVFTGGIGENSSLVRELTLNHLKLFGYQVDSDKNKAARFGHEGVITADNTPVAMVIPTNEELVIAQDTARLCIA

SEQ ID NO: 10698 - protein, 712 aa, Pasteurella multocida subsp. multocida str. Pm70
MSRTIILIPISAGVGLTSVSLGLTHALEQKGAKVGFMKPISQPNSGEDMIDRTTSIIRTSTTIETSEPFMLSVAESLIGQNQSDVVLEKIVENHQQLAKNNEIVVVEGLIPTRKHSYANSINYEIAQALDAEIILVAAPATETPAELKERIKAAASLFGSKNNPNLLGVVINKFNAPIDESGRTRPDLAEIFDSFQHTQNQVSEIYHLFEKSPIKILACIPWSAELIATRAIDLAKHLGAAIIHEGAINERRIRGITFCARNLTNMVEHFRVGSLLVTSADRPDVIVAAALSAMNGVEIAGVLLTGGYKIDAQIKKLCQHAIESTGLPVFRVEGNTWQTALALQSFNLEVPVDDKERIEKIKHYISDLLDSNFIDSLAAASSRLRRLSPPAFRFQLTELARQAQKRIVLPEGDEPRTVKAAALCAERGIAECVLLATPESVMRVAEAQGIQLGKGITIIDPATVRENYVARLVELRKNKGMTEDSAREQLEDNVVLGTMMLEANEVDGLVSGAVHTTANTIRPPMQIIKTAPGNSIVSSIFFMLLPDQVLVYGDCAVNPDPTAEQLAEIAIQSADSAKAFGIDPKVAMISYSTGTSGSGADVEKVKEATRLAQEKRPDLIIDGPLQYDAAVMEDVARSKAPNSPVAGKATVFIFPDLNTGNTTYKAVQRSADLVSIGPMLQGMRKPVNDLSRGALVDDIVYTIALTAIQATQ

SEQ ID NO: 10699 - protein, 634 aa, Pasteurella multocida subsp. multocida str. Pm70
MGKIIGIDLGTTNSCVAVMDGDKPRVIENAEGDRTTPSIIAYTQDNETLVGQPAKRQAVTNPKNTLFAIKRLIGRRFQDEEVQRDVSIMPFEIVAADNGDAWVGVKGEKMAPPQISAEVLKKMKKTAEDFLGEPVTEAVITVPAYFNDAQRQATKDAGRIAGLEVKRIINEPTAAALAYGLDKGQGNKTIAVYDLGGGTFDLSIIEIDEVGGEKTFEVLSTNGDTHLGGEDFDNRVINYLVDEFKKEQGVDLRNDPLAMQRLKEAGEKAKIELSSAQQTDVNLPYITADATGPKHLNIKLTRAKLESLVEDLVSRSLEPVKIALADAGLSVSQIDDVILVGGQTRMPLVQQKVEAFFGKAPRKDVNPDEAVAIGAAVQGGVLAGDVKDVLLLDVTPLSLGIETMGGVMTTLIEKNTTIPTKKSQVFSTAEDNQSAVTIHVLQGERKRAADNKSLGQFNLEGINPAPRGMPQIEVTFDIDADGIIHVSAKDKGTNKEQKITIKASSGLTDEEIQQMVRDAEANAEADRKFEELVQARNQADHLVHGTRKQLSEVGDKLSAEDKAPIEKAVADLEAAAKGEDKAEIETKVQALIQVSEKLMQAAQPQPEAQAQQAQSGKSNDDVVDAEFEEVKDNK

SEQ ID NO: 10700 - protein, 509 aa, Pasteurella multocida subsp. multocida str. Pm70
MLIGVPRELLDNESRVAATPKTVQQILKLGFEVIVEHHAGFKASFEDQAFAETGAKIGSAQEVWQSDIIFKVNAPTDSEIALIKEGATLVSFIWPAQNPDLMEKLSAKKINVLAMDAVPRISRAQSLDALSSMANIAGYRAVVEAAHEFGSFFTGQITAAGKVPPAKVLVIGAGVAGLAAIGAANSLGAIVRAFDSRPEVKEQVESMGASFLEIDFQEEGGSGDGYAKVMSEEFNRRALALYAEQAKEVDIIITTALIPGKPAPRLISKEMVASMKPGSVIVDLAAATGGNCELSKAGEVVVTDNQVKIIGYTDLPSRLPTQSSQLYGTNLVNLLKLLCKEKDGKISIDFDDVVLRGVTVIRDGEVTWPAPPIQVSAQPQKVKATLVEKKEVKAVDPRKKYGAMAVAALLFMALASVAPAAFLSHFTVFVLACVVGYYVVWNVSHALHTPLMSVTNAISGIIIVGALLQIAQGNFFISILAFIAILVASINIFGGFKVTQRMLAMFRKD

SEQ ID NO: 10701 - protein, 109 aa, Pasteurella multocida subsp. multocida str. Pm70
METLDKIKKQISENPILIYMKGSPKFPSCGFSARAVEALMHCKVPFGYVDILQHPDIRAELPAYANWPTFPQLWVDGELVGGCDIILEMFQQGELQTLLADVAAKYPQE

SEQ ID NO: 10702 - protein, 445 aa, Pasteurella multocida subsp. multocida str. Pm70
MSNTILQQLPKGQKVGIAFSGGLDTSAALLWMRQKGAVPYAYTANLGQPDEEDYNAIPRKAMEYGAENARLIDCRAQLAHEGIAAIQSGAFHISTGGVTYFNTTPLGRAVTGTMLVSAMREDDVNIWGDGSTFKGNDIERFYRYGLLTNPNLKIYKPWLDNQFIEELGGRHEMSEFLIANGFEYKMSVEKAYSTDSNMLGATHEAKDLEFLNTGIRIVKPIMGVAFWRDDVEVKAEEVTVRFEEGIPVALNGKTFSDHVELFLEANRIGGRHGLGMSDQIENRIIEAKSRGIYEAPGMALLHIAYERLVSGIHNEDTIEQYRINGLRLGRLLYQGRWFDPQALMLRETAQRWVARAITGEVTFELRRGNDYSILNTESPNLTYMPERLSMEKVENAPFDPVDRIGQLTMRNLDIVDTRDKLGIYTQTGLLSISKDSFLPQLNKKG

SEQ ID NO: 10703 - protein, 582 aa, Pasteurella multocida subsp. multocida str. Pm70
MQDKDLSTVQTFKRLWPIISPFKLGLVVSGIALVINALADAGLISLLKPLLDEGFGKADVSFLRTMSYVVVLVIFLRGISNFISSYCLSWVSGKVVMIMRRRIFKHLMFMPVPFFDQNSSGRLLSRITYDSELVANSSSGALITIVREGAYIISLLAVMLYTSWQLSIVLFLIGPIIAVLIRFVSKRFRELSKNMQNSMGELTSTAEQMLKGHKVVLSFGGQIVEEERFNHVSNDMRRKGMKMAVADAISNPVVQIIASFALAAVLYLATVPTIMDQNLTAGSFTVVFSSMLAMMRPLKSLTNVNAQFQKGMAACQTLFALLDLETEKDLGTHKGENVQGYLSFKNVTFTYQSRDEPALRNLSFDVEKGKTVALVGRSGSGKSTIANLVTRFYDVDQGEITLDGINIQDYRLSSLRKNCAVVSQQVHLFNDTIANNIAYAAKDKYSREEIIKAAKDAYAMEFIEKLEHGLDTVIGENGVNLSGGQRQRLAIARALLRNSPVLILDEATSALDTESERSIQLALEKLQKERTVIVIAHRLSTIENADEILVIEHGEIKERGSHSELLALNGAYKQLHHIQVNH

SEQ ID NO: 10704 - protein, 574 aa, Pasteurella multocida subsp. multocida str. Pm70
MKKLSGAEMVVQSLRDEGVEFLFGYPGGSVLDIYDAIHTLGGIEHILVRHEQAAVHMADGYARATGKVGCVLVTSGPGATNTITGIATAYMDSVPLIILSGQVMSGLIGSDAFQECDMVGISRPVVKHSFLVKSAAEIPETIKKAFYIASTGRPGPVVIDLPKDVVNPAHKFTYHYPERVELRSYNPTIQGHKGQIKKALKALLVAKKPVLFVGGGVITANCSDKLTQFAQTLNLPVTSSLMGLGAYPSSDKQFLGMLGMHGTYEANNAMHHSDLILGIGVRFDDRTTNNLAKYCPHAKVIHIDIDPTSISKNVLASIPIVGSAEKVINEFLALLEDDNLLKSQTALDEWWQQIDEWKAVKCLSFTRDDSVIKPQQVMEVVYRLTQGEAYVASDVGQHQMFAALHYPFNQPRRWINSGGLGTMGFGLPAALGVKLAYPDSTVVCVTGDGSIQMNIQELSTAQQYDIPIVIISLNNRFLGMVKQWQDLIYSGRHSQSYMNSLPDFVKLAEAYGHVGIQINTPDELEEKLTQAFSMKDKLVFVDINVDATEHVYPMQVRGGAMNEMILTKPEKANA

SEQ ID NO: 10705 - protein, 450 aa, Pasteurella multocida subsp. multocida str. Pm70
MSHLSIAKFGGTSVANYAAMSASAKIVVNDPNTRVVVLSASAGVTNLLVALANGCDNEERTKLINEVRQIQENILSELKDDSLVRNKVEKLLANIESLAEAASLATSPALTDELISHGEMMSSLIFVEILREFNTPSTWIDVRNIIATDSHFGKAVPNDHKTQENSTHILKPLIDRGELIITQGFIGRDEQGKTTTLGRGGSDYSAALLAEVLNAEDVLIWTDVAGIYTTDPRIVPNAKRIDTMSFSEAAEMATFGAKVLHPATLLPAVRSNIPVYVGSSKAPEAGGTWVTRDPQHRPIFRAIALRRDQTLLTLSSLNMLHAQGFLANVFTILAKHKISVDVVTTSEVSIALTLDKTGSASSGLSLLSSALIDELSQLCSVKVDSDLALVALIGNDLHITSGIAKRIFDTLAPYNIRSISYGASTNNVCLLVTNAHADAVVSALHKNLFE

SEQ ID NO: 10706 - protein, 477 aa, Pasteurella multocida subsp. multocida str. Pm70
MNYSILIPLFLYLCFVFAVAYYAYAKRQKGSFLSEYYVGNRSMSGFVLAMTTAATYVGASSFIGGPGAAYKFGLGWVLLAMIQVPVVLFTLGVLGKKFAMWAREHKSLTINDILFSRYKSPTIVLLASLSLLFSFFIMMAVQFIGVGRLLETTLNIDYRLSVLIFATTVGIYTFIGGFRAVVLTDTIQGLIMMIGTFLLLFGVIYAGGGVSQIIDTLETIDPRLITPYGIEARPLDFTFMASFWVLVCFGLLGLPHTVIRAMSYKNSKALHSGIVIGTVVIALLMLGMHLAGALGRAVVPELSVTDKIIPTLMIQVLPPVVAGIFLAAPMAAIMSSIDSMLIQASSTLIKDLYLRFKPEQIRNERRVKILSTVATLFMTILVTVATLNPPDMLIWLNLFALGGLETTFLWVMLLGLYWQKANAYGAVCSMIVGLGSYVTLTAASIKLLDFHAIVPALLFGLIAFLIGNQYGERKIQH

SEQ ID NO: 10707 - protein, 541 aa, Pasteurella multocida subsp. multocida str. Pm70
MDSRRSLLVIALLFISFLVYQQWQLDYHTPKPVATEQVKVSSDVPASSASSSSDIATTAQAQGRIITLENDVFRLEVDTLGGDVVHSELLKYDAELNSNTPFTLLTNKANHVYIAQSGLVGKDGIDTKAGRANYQVDGDTFKLADGQNELAVPFVFEKDGVTFRKIFVLKRGAYDIAVNFEIDNQSDKTIEVEPYGQLRHTLVEDTGNVAMPTYTGGAYSSSETNYKKYSFADMEKANLSISTKAGWVAVLQHYFVSAWIPNQDADNQLYSLTDKANNLASIGYRGPVTAIPAGAKETIRSSLWTGPKLQDQMATVANHLDLSVDYGWAWFIAKPLFWLLTFIQSIVQNWGLAIIGVTLVVKAILYPLTKAQYTSMAKMRMLQPKLQEMRERFGEDRQRMSQEMMKLYKEEKVNPLGGCLPILLQMPIFIALYWTFLEAVELRHAPFFGWIQDLSAQDPYYILPILMGASMFLLQKMSPTPVADPTQQKIMNFMPLIFMVFFLWFPSGLVLYWLVSNLITIAQQQLIYRGLEKKGLHSRHK

SEQ ID NO: 10708 - protein, 363 aa, Pasteurella multocida subsp. multocida str. Pm70
MTQQSILFIDRDGTLIDEPKTDFQIDSLEKLQFEPNVIPALLKLKPYYRFVMVSNQDGLGTASFPQENFDKPHNAMMALFKSQGIEFDEVLICPHKPEDECDCRKPKIKLLKKYIDKKLFDPTTSFVIGDRATDVQLAENLGIRALQYDREKLNWDLIVEKLLPKQTALLDRKPRYAEVVRTTKETDIKVQVWLDETGMNDIKTGVGFFDHMLDQIATHGGFRMNVYCKGDLWIDEHHTVEDTALALGTALKQALGDKRGIQRFGFVLPMDECKAECTMDLSGRPYFKFKAKFKRDKVGDFSTEMTEHFFQSLAYTLMATLHLKTKGDNDHHKIESLFKVFGRTLRQCIKVEGNELPSSKGVL

SEQ ID NO: 10709 - protein, 301 aa, Pasteurella multocida subsp. multocida str. Pm70
MPPRRKCPVKRPAIVGKKKAKLIPIKHRPFLKWAGGKFRLSDEINKLLPKTNQCLIEPFVGAGAVFLNTNFERYILADINPDLINLFNFVKNDVEHYINASKPLFFHPEANTSTFYYAKRTQFNLSKDPFERSVIFLYLNRFGFNGLCRYNSKNEFNVPFGTYKRHYFPENELRYFAEKAQNAEFICADFQQTFSLADEKSIIYCDPPYAPLIQDSNFTSYAGNEFSSLHQQMLAELARKTAEERQISVVISNHDTPFTRQIYQNAKIKALKVQRSISHQSARRIKVAELIAVFKGTPLAK

SEQ ID NO: 10710 - protein, 503 aa, Pasteurella multocida subsp. multocida str. Pm70
MWIDVMTQRDCILKLKNIGKSFFDVPVLKNVDLDIYAGEVHCLVGENGAGKSTLCKIIAGIYPFEQGEMFYEGKSYFPKTVKEAQSLGIGFIHQELMLVPQLSVLENIFLGNEKTVFCGKMDWQTMRHKTQQIISELELDIDPDAKVADLSIAQQQMVEIAKAVFSEYKVIIFDEPTSSISRKNTQTLFKIIHQLKEKNVAMIYISHRLDEFQYIADQVTVLRDGIRTGTMAYRDTSPDEIVKLMVGREINFAEYHRHYLPTREVLRVESLTNKHIKSSSFSLYEGEILGFAGLVGAGRTELLRAIFGADEASGAIYLNAQRVEIRSPEDAVKQKIGFITEDRKQQGLILGLSIRENITLPILKRFWNGLFLNKKQERLVAEENRQKLRIVSHSQDQISQTLSGGNQQKVIIARWLESGVKILFFDEPTRGIDVGAKSEIYDLMRQFTDNGGAIVMVSSDLPELITMSDRVIVMRQGGIVREVKDKAEMTEENLMRLMIGVDE

SEQ ID NO: 10711 - protein, 301 aa, Pasteurella multocida subsp. multocida str. Pm70
MNQNISVAVIGLGAMGMGAAQSCIRAGLTTYGADLNPLALEKLKAEGAKGVSQSAVDFAQELDAVLLLVVNASQVNTVLFGEKGLASHLKPGTAVMVSSTISAQDAQQISQKLTGLGLVMLDAPVSGGAAKAAAGEMTVMASGSQQAFTKLQPVLDAVAGKVYNIGEEIGLGATVKIIHQLLAGVHIAAGAEAMALAARAGIPLDLMYDVVTHAAGNSWMFENRMKHVVEGDYTPLSMVDIFVKDLGLVTDTAKALKFPLPLASTAFNMFTSASNAGYGKEDDSAVIKIFSGIELPQKKGA

SEQ ID NO: 10712 - protein, 306 aa, Pasteurella multocida subsp. multocida str. Pm70
MYNTLNNKEDISLVSNNFGFLRLPVHFNPVETDAEWVITGVPFDASVSGRAGTRFGAEAIRRASVNLAWEHCRFPWDFDVRERLKIVDCGDLVYSFGDNQNFVEELEAHATALLKAGKRCLTFGGDHFITLPLLRAHAKHFGKLAMIHFDAHTDTYENGSRYDHGTMFYHAPNEGLIDAAHSVQIGIRTEFDRNLPFTVLSAPQVNEESVAQTVAKIKEVIGDLPVYLTFDIDCLDPAYAPGTGTPVCGGLSTDRALKILRALKDVNIVGMDLVEVSPAYDQSDITALAGATLALEMLYMQGAKKG

SEQ ID NO: 10713 - protein, 330 aa, Pasteurella multocida subsp. multocida str. Pm70
MKKSFILQQQEISFAKNTFTEKLAEHLGIVEVQGPILSQVGNGIQDNLSGAEKAVQVNVKQITDATFEVVHSLAKWKRHTLARFNFAQGEGLFVHMTALRPDEDSLDQTHSVYVDQWDWEKVISAEQRNLAYLKETVRAIYAAILETEEAVSKKFGLATFLPKDIQFVHSEELVQRFPNMNDKERENAICKEYGAVFLIGIGGKLSDGKPHDVRAPDYDDWTTPSEGEYKGLNGDILVWNPILERAFELSSMGIRVDETALRKQLALTNNEDRLKFDWHQDLVNGRLPLSIGGGIGRSRLVMLLLQKKHIGEVQSSVWPKWVMEQFDNIL

SEQ ID NO: 10714 - protein, 319 aa, Pasteurella multocida subsp. multocida str. Pm70
MIEQKSKPFPLPINYFGIILGLSALSLAWRYATPLCEGATLVSESLFAVSAMIWLAFIGAYAYKWFKSHQQLKADLQHPLLGNFVSLIPITTILIGIGLVPYNMLFGTVLISLGIAIQLAFATYYIPAMWRGIHQAEMTLPAIYLPTVATNFVSATALGVLGYSELGMVFLGAGFFSWLVLEPIVLQRLRTLQPVPEPLRPMIGIQLAPAFVGCSAYLTLNGGKLDLFALMLLGYGVLQLLFLIRLLPWIFVNGFTPAMWAFSFGLASMAKVALLFYQNTSDNLLATLSLALFIFANFSIGLMLLNTGYLVLKGRFFIK

SEQ ID NO: 10715 - protein, 549 aa, Pasteurella multocida subsp. multocida str. Pm70
MNGARLVTESLKTHGVTTVFGYPGGAIMPVYDALYDAGIEHLLCRNEQGAAMAAIGYARSSGKVGVCIATSGPGAANLITGLGDALMDSIPVVAITGQVASPLIGTDAFQEADVLGLSLACTKHSFLVQSIEELPDVIAKAFEIAASGRPGPVLIDIPKDIQIAPTDVTPFTYSVAKPTALSQAHLTDALTLLKQAKRPVLYVGGGVGMAQAVPALREFLAVTQMPSVSTLKGLGSVHPDNPYYMGMIGMHGTKAANYAVQECDLLLAFGARFDDRVTGKLDTFAPHAKVIHADIDMAEIGKLRRPDVALCGDIVQAFNALSIPLNIAEWQAHIKQLKQTHDFCYSTNQGDTFINPLWLLNSLSKKKPQSAVITTDVGQHQMWSAQHMQHYAPENYITSAGYGTMGFGLPAAIGAKKARPDDEVILISGDGSIMMNIQELGTFKRGKTPVKIVLLDNQRLGMVRQWQELFFNARFSNTILDDNPDFVMLAAAFGIQGERITKGEEVEGALDRLLASKEAYFLHVCISSNENVWPLVPPNACNLDMVEQM

SEQ ID NO: 10716 - protein, 410 aa, Pasteurella multocida subsp. multocida str. Pm70
MTTKVSLDKSKIKFLLLEGVHQTALEVLQNAGYTNIEYHKKALDDDELKEAIKDAHFVGIRSRTFLTEEVLAHAQKLIAIGCFCIGTNQVNLQAAKLRGIPVFNAPFSNTRSVAELVLGEILLLMRNVPQANAEVHRGIWNKSANGSHEVRGKKLGIIGYGHIGSQLSIIAESLGMRVFFYDIENKLPLGNAQQLRTLEELLSSCDVVSLHVPENASTKNLISAERIAQLKEGAILINAARGTVVDIDALAQALEAGKIRGAALDVFPEEPASIQEEFVSPLRAFDNVILTPHIGGSTSEAQENIGAEVSGKFVKYSDNGSTLSAVNFPEVSLPEHVGTKRLLHIHHNKQGVLNKINQVFVDANVNIAAQYLQTDPAIGYVVIDVETEDTHSLLTQLKEIEGTIRARVLY

SEQ ID NO: 10717 - protein, 184 aa, Pasteurella multocida subsp. multocida str. Pm70
MKKAIFLDRDGTLNIDHGYVHEIDQFQFIDGSIEALQQLKAMGYLLVLVTNQSGIARGYFSEDQFLQLTEWMDWSLADRGVDLDGIYYCPHHTEGKGEYCQDCDCRKPKPGMLLQAIKELNIDPNTSFMVGDKVEDMLAGKGAKIKNTVLVKTGKPITEDGKKQANYVLESIADLPKLIKGLKS

SEQ ID NO: 10718 - protein, 668 aa, Pasteurella multocida subsp. multocida str. Pm70
MTFFKQLQQRSTLKAPIFFPSLFFIIFVTLYCSFFPQHAQGTLNVVKQQIFSHFSWFYVLAVSIFIVFLVLLCTSRLGDIRLGSDNEEPEYPFLSWIAMLFAAGMGIGLMYFGVAEPMLHYANPLHQGMTAAEKTKEAMLMTFYHWGIHAWAIYAVIGLALAYFGFRYKLPLTIRSGFYPLLKQRISGFWGHVIDVCALCSTIFGITTTLGYGAMQLDAGLNSLGWIDSRSFSTLSLLIILVMCFATISAITGVAKGVRRLSEINLFFALILMLFVIVLGPTLLLLTSFTENLGYYLSNLVSLSFRTFAYEPENQGWFSGWTVLYWAWWVSWAPFVGLFIAKISKGRTIREFILGVLFIPSLFNALWMTTFGNSAIWLDGETAGNLTALAGNTEALLFGFFDLLPFGNIASFIAIVIIALFFITSADSGIYVINSIASQGEENSVKWQSVFWAILLAVLAIALLRSDGLSALQTMTLVIALPFTMIMLLLCFGLWKGLMVDNQYFSKTFSQGSSNWTGKHWKLRLEKILSQSKRADVRNFIDEIAQPAFYELVAEFEKHGLTAQVDMIAGKKPKIEFVVMKENLRNFLYGIECQFRELSTLVVEDEAMPNIDSKRSYEPITYFIDGREGYDVQYMTKDELIADVLKQYERYMNLAMDKTNALMTYDVA

SEQ ID NO: 10719 - protein, 858 aa, Rickettsia prowazekii str. Madrid E
MNIDKFTAHAKSVIANHQSLAIKNDHQQILPLHLLSSLLSEETGIIQALINNIGGNINLLKDQVQLELNKIPKIQVDGGGQIYYSAEDLKVLEKSSSIAKDSGDSFVTIERIFEALTYDNTIAGKILTNNGINSKKLATAILHLRKGKKADTESAENNYDALKRYGRDVTELAENGKLDPIIGRDEEIRRAVQVLSRRMKNNPVLIGAPGVGKTAIIEGLAQRIFSKDVPETLINCRIIELDIGALIAGAQYRGEFEKRLKAVLSEIKESSGEIILFIDELHLLVGTGKVDGAMDASNLLKPMLARGELHCIGATTLDEYRKYIEKDAALARRFQPVYVGEPSVEDTISILRGIKEKYELHHAVRISDSAIVAAATLSNRYITDRYLPDKAIDLIDEACSRMKIELSSKPEELDELDRRIIQIKIELAALKKENDEHSKKKITSLTEELKKLESKSYDMNTKWQAEKSKLQQAQKLKEELEQARIDLERAERDANLAKASELKYGIIPEIMNKLQEAENMDNKGLLKEIVSESDIASIISRITGIPIDTMLSSERERLLVIEQKLCESVIGQDEAIKGVSDAVRRSRSGIQDINRPLGSFLFLGPTGVGKTELTKALAGFLFDDRNALLRIDMSEYMEKHSISRLIGAPPGYIGYDQGGVLTESVRRRPYQVILFDEVEKAHLDIFNIMLQILDEGRLTDSQGITVDFKNTIIVLTSNLGAEILVNQKEGEDTYKVRDEVMQYVRAVFKPEFLNRLDEIILFHRLNRNNIHDIVKIQLGSLKKILLQQNIILEFDESALNYLAEKGYDPSFGARPLKRLIQREIQNNLAKMILAGEISSGNTVKIRREKEELSINIID

SEQ ID NO: 10720 - protein, 560 aa, Rickettsia prowazekii str. Madrid E
MNNNIINLIAAVVLSLSIIFGWQYFFVKPEQKKQQQRIAMHKSENLNKQKLKALAEPASDIAVQEASQVQRIKIESESLTGSIALKGLRFDDLILKKYKQDLSQNSPAVRLFSPANTENAYFAEIGLVSNLNSVKLPNSNTVWNSDSEVLSPEKPVNLFWINEDGIKFLVTITVDKNYLFTIEQTIINNSDKELPVQSYGLINRKYISLEKAVNILHQGPIGCIDENLKEYSYDDIKDKKSTKFALSKVDWIGITDKYWLSSLIPDKSSRYSSNFNYALKQGTERYQVDFISPVQVIKPGENLSIKSRIFAGAKKVDLLDEYEKSYDIKLFDRAIDFGWFYIITKPVFYAMNFFYGYVGNFGISILIVTVIIKLLMFTLANKSYRSMKKMKNLQPEIDRIKNLYNNDKARLNQEIMALYKKEKVNPVAGCLPILVQIPVFFSIYKVLYVTIEMRQAPFFGWIKDLSSPDPTTIFNLFGLLPFAPPSFLMIGAWPILMAITMFLHQKMSPELADPIQAQVMKFMPLIFLFMFSSFPVGLLIYWSWNNILSIIQQYYINKFN

SEQ ID NO: 10721 - protein, 412 aa, Rickettsia prowazekii str. Madrid E
MNNIKNLLIRAQIMSIISTRLNSIKPSPTLAVVKKTLELKKAGVNIIALGAGEPDFDTPDNIKEVAITSIKDGFTKYTNVDGIPLLKQAIKNKFKRENNIDYELDEIIVSTGGKQVIYNLFMASLDKGDEVIIPVPYWVSYPDMVALSTGTPVFVNCGIENNFKLSVEALEHSITDKTKWLIINSPSNPTGAGYNCKELENIAKTLRKYPNVNIMSDDIYEHITFDDFKFYTLAQIAPDLKERIFTVNGVSKAYSMTGWRIGYGAGSKALIKAMTIIQSQSTSNPCSISQMAAIEALNGTQDYIKSNALNFQKKRDLALSILEEVTYFECYKPEGAFYLFVKCDKIFGTKTKSGRIIANSNNFSEYLLEEAKVAVVPGIAFGLDGYFRISYATSMQELEEACIRIKHACNAL

SEQ ID NO: 10722 - protein, 385 aa, Rickettsia prowazekii str. Madrid E
MKDVILIANAGSSSLKISIFAIQNKRVNDKIYNIFLEKNNNKILFYINQQKESTTSIKDDPIEMMINLFEEWWKKQSALNLIATGHRIVHGGKNFNKPVVVNKKVIKELRVLIPLSPLHQPYNLQVLDLFFQKYKAISHIICFDTSFHCTNSPITKAFGLPKQYYDKGIMRYGFHGLSYQYVSSHFKEITMEDLPPKAIIAHLGSGSSLCAIKNGLSLTSSMGFSVLDGVMMATRPGNLDPGVVLYLINNEKMTINEITELLYKKSGLLGMSGESSDMRTLIASNSHDSKFAVDLFVYRIVLEIGKLIAALEGIDCLIFTAGVGQNSPVIREMISKKLSWLGIKIDYEKNQKNEHRISTKGSKIKVFVVPTNEELIIAEEVMKFL

SEQ ID NO: 10723 - protein, 295 aa, Rickettsia prowazekii str. Madrid E
MTNQIQKTISVCIIGRPNSGKSTLLNRIIGEKLSIVTPKVQTTRSIITGIVTLKDTQIILYDTPGIFEPKGMLEKAMVRCAWSSVYSADLVLSIIDSLKPLDNIAHNILNQFCLLNIVPIFLLNKIDIESKYLNDIKAFLKITHPKSLLFPISALLGKNVDVLLEYIKSKAKVSPWLYADDDITNLPMRFIAAEITREQLFLNLQQELPYKLTVQTEKFEELKDKSIKINQVIVISRENYKAIILGKNGAKIKDIGVKSRVQLEQFFCVPVHLFLFVKVHAFWENNQEFYQYMKI

SEQ ID NO: 10724 - protein, 627 aa, Rickettsia prowazekii str. Madrid E
MGKVIGIDLGTTNSCVAVMEGKEPKVIDNAEGERTTPSIIAFANSERLVGQPAKRQAVTNPRNTIYAVKRLIGRNFTDPMVRKDQGLVPYNIVKADNGDAWVEADNHKYSPSQISAFILQKMKETAENYLGEKVTQAVITVPAYFNDAQRQATKDAGKIAGLEVLRIINEPTAAALAYGFEKSSSKTIAVYDLGGGTFDVSILEISDGVFEVKSTNGDTFLGGEDFDTRILNHLIEVFKKESGIDLSKDPLALQRLKEAAEKAKKELSSTSTTDINLPYITADSTGPKHLNIKFTRAELEKLVDDLIEKTIEPCRQALKDAGFKPNDIQEVVLVGGMTRMPKVQEAVKKFFGREPHKGVNPDEVVALGAAIQGGVLNKEVTDILLLDVTPLSLGIETLGGVFTRLIDRNTTIPSKKSQVFSTADDNQHAVTIRVFQGEREMAKDNKLLGQFNLEGIPPAPRGVPQIEVTFDIDANGIVHVSAKDKASGKEQKVTIQASGGLSDAEIEQMVKDAEHNADEDKKRKELIETKNAADSLVYSTEKTLREYGDKLSSEEKGTVEEALTSLKAALESEDASLIKEKTGNLTAANMKIGEAMYKTQTENQHSEANTVNNEKVVDADFQDVDKK

SEQ ID NO: 10725 - protein, 470 aa, Rickettsia prowazekii str. Madrid E
MSFLRKKSFESVKEIGSSSGLSKTLGAFDLILLGLGAMIGTGVFVVTGIIAAKFSGPAVMISYMIAGITCIFVALVYTELAAMLPTSGSIYTYSYVAFGEVFAWMIGSVIILELGVSAGIVAAGWSGYVQGILEAGGIYLPKVLTTVPSNGGVINLPAFLISAFIGFILFLGTKDSKKINAILVFIKMVAIFAFVLAAAPHFDATNWSNFMPFGFGSVVMGSSILFLAFTGFGTIATAAEECKNPKRDIVIGIIGSLILTTLVYVIMSGLVTGIAPFDQLNNDRPLAYALTINNSKIGSAIVSTGAVCGMMTVLMMNIYGTSRIFYAIARDGLLPKSFAKLHPKYDSPYITIIIFSALAAFLGGFCPTEIITQLTSMGALIDYIAVAIIVMMFRIKLPTAQRAFKCPIVFIIAPFILFACIYLLLTQMYGDEIYKGNFNLLTSGRVLIYWFITIFILYLVRSFFMGKEQH

SEQ ID NO: 10726 - protein, 767 aa, Rickettsia prowazekii str. Madrid E
MDEMNKINYTEALEYHEKDKPGKIAITTTKSLVTQQDLSLAYSPGVAAPCLEISKNLEAVYKYTSRSNLVAVISNGTAVLGLGNLGAAASKPVMEGKAVLFKKFADIDAIDLEVNTEDPIEFINAVKYLGYSFGGINLEDIKAPECFLIEEKLKSLMDIPVFHDDQHGTAIITAAGLINAAYLTNRTLKDLKIVINGAGAAAIACIDLLIALGVDKSKIILCDTKGVIYKGRTSGMNKWKERYASDTKIRTLTESLNNADVFIGLSVKGAVTKDMISKMAHKPIIFAMANPDPEITPEDIKFVRDDAIIATGRSDYNNQVNNVMGFPYIFRGALDVRASTINTEMKIAAARAIADLARRPVPEEVYKAYSGRKMVFGNEYIIPVPFDPRLITVVATAVAVAAIESGVARVKDFSIDKYKQQLGSRLNPTANYMNFLAEKIHNVPLKRIVFAEGEEEEVISAALMMRDEKYGNPIIIGRVERIEVTLKKIGKDISLAGIQIMNAALSDRLEQYTDYLYKRLQRKGYLYRDCAKLVKTDKNIFAACMVACGDGDALLTGVTKSYIDSLEDIIKVISPKQNRRILGYSIMIAKDHNIIIADNCITEYPNSLELAQIATQTAEIAKNMGITPRVALIAFSTFGNSSQEKTVRIREAVNILDNFSKDKKKLNGIKVDFEYDGEMSVKVALDHDLRKLYQFCRLSGSANVLIMPGLNSAAISTELLQKFSSNSFIGPITNGFAKPVQILPTTATANEILKIATFACVEAIKEV

SEQ ID NO: 10727 - protein, 429 aa, Rickettsia prowazekii str. Madrid E
MSQKLSFWAVFALVTGSQIGTSVFILPLSLAPFGVYSIWGWILSLFGAMSIALVFSCLCTKFPKTGGPHVYVRASFGDTIAFFTGWTYWIISFVSTSIVVISAIGYLTPFFKSQTILDLILQLILLAAIAILNLKGPKIAGKVEFYLTLLKFVPLLVVGLAALFHFNIDNIVIAKEVENFTIPTIMGRVALLTFWGFIGIECATTTAGTVKDPAKTIPRAIIIGTCCVAFLYIINSIGIIGLIPASELINSKAPYADAATLLFGGTWSKVITVIASVICIGTLNAWVLTSGQIALGLAEDGLLPKFFAKKNSNNAPTYGIIISCLGITPLLLFTSNNNFAKQITQIIDFSVIAFLFVYLICSLAFLKVIFSSKENFSYYYLFVAIISIIFCTWVIYKTPFETLIIACSFTILGIPVYYGWYRLMNRIKL

SEQ ID NO: 10728 - protein, 410 aa, Rickettsia prowazekii str. Madrid E
MNQQLKNLTLPIYMDYQSTTPIDPRVMEAMLPYFTTKFGNPHSRSHSFGWEAENAVENARSMVAKVIGADSKEIIFTSGATESNNLVIKGIAKFYGNKKKHIITLVSEHKCVLNACRHLEQEGIKITYLPIKSNGIIDLETLKNAITDQTLLVSVMAVNNEIGVIQPLKEIGKICRERNVFFHSDIAQGFGKIPINVNECNIDLASISGHKIYGPKGIGALYIRKKPRVRVTPLINGGGQERGMRSGTLPTPLIVGLGIASEIAYNEMEKDTQHVNYLFDRFLNNIHSKISEVYLNGDKDQRYKGNLNLSFAGVEGESIILAIKDLAVSSGSACTSASLEPSYVLRSIGISEELAHTSIRFGIGRFTTEQEIDYAVNLVCSKIDKLRRLSPLWEMMQEGVDLKKIRWTAH

SEQ ID NO: 10729 - protein, 376 aa, Rickettsia prowazekii str. Madrid E
MIYLDHNATTFIDPRVKEYIISLMDKELNPSSAHTSGRFAKNIIETARSQIATSLGITMSREYNITFTSSGTESNNLIMKNFYDGDIFISAIEHLSIYNHINYAPNIKIIRVNKQGLVDLEHLEDLLSQSNASKKLVSVMIANNENGVLQDIAAISKITKKYNAKFHSDLVQSFGKISLNIKELGLDFATISGHKIGGGHGCGALISNSNFQLIPIIIGGGQEKSVRSGTENVLAIAGFGLAAEFRRKDISKNYIKIRYLQERLEQKLKEYSNVNIISNNVARLANTTLITVDNTDAQVKLIGFDLRNICVSSGSACSSGKISKSHVLTNMGIREEEARSSIRISLSHTNTISDIKAFIKAFEEIYEYKSSCNHCI

SEQ ID NO: 10730 - protein, 319 aa, Rickettsia prowazekii str. Madrid E
MINTNNYRIIAKRVISSATSALETLSNNIPSDFNRIIEFLLSFKGRIILTGIGKSGYIARKIAASFSSTGMPSFYLHPAEASHGDLGMITRNDLVMMLSNSGETKELFNIIEYCNNSSIKIAAMTMNKNSTLAKRSDFLLKIPECQEASLIGTPTISSLIMLSLGDAIMTVIHEERGFTRDDFKIYHPGGTIGANLTKIKNIMRSGDEIPLVYEDTSFTETIIIMNKKRLGCTLVTDKEQNLIGIITDGDLRRNIHDQIHLKTASSIMTKNPHYISSEIFAQEALNLMKAKNITNIPIVDDNIIIGIIHIHDLLSMGVS

SEQ ID NO: 10731 - protein, 70 aa, Rickettsia prowazekii str. Madrid E
MATNIVGKVKWYNSTKNFGFIEQDNGGKDVFVHKSAIDAAGLHSLEEGQEVIFDIEEKQGKAYAVNLRVK

SEQ ID NO: 10732 - protein, 576 aa, Rickettsia prowazekii str. Madrid E
MDIKLLYRLAKYLRFYKKDLIIVMISLLSVSASLLLIGSIFRDLIDRGLAEDNILSVNKSILYICLLIVILSVASFFRSYFINNVAEKIVNQIRKEAYSNLINYEIEEYEELKIGDIISRLTNDIDQIATLIVNFLSFFIRNSVMLIGSITLMFFESFKLASIVIITIPILLVPLIKFGKHVKALSKKALESKSLLVSDIDETFNNIRVIYAFNHQINKIADFDTKLQSYLIYCKTRLKIRALFFAISIAVIFLTITLIVWIGASDIVQGDLSAGQIISFIYYAIIAGVSSGGIFELLSEMHLPTTALERIITIIDKTSIVHNNYYALNNSDAISIEFKNVDFTYNSRPNLKVINNMSLKINSNKFVGIVGRSGAGKSTLIQLLLRFYRQENGTILINNQDISFVKPTDIRKFIAYVPQEASIFSDTIKSNIIFGNNKASDYEINEIIKITGIEEFSTKLHDGINTKIGEKGVRLSGGQKQRIAIARALLRKPKILLLDEAMSALDTMSEQKLLNAIKKIMKGNIIISIAHRISSIESADYILVIDKGGVVTEGSHYDLSKNSEIYRNICREQLTI

SEQ ID NO: 10733 - protein, 392 aa, Rickettsia prowazekii str. Madrid E
MTKQVYITHAKRTAFGSFMGSLSTIPAPMLAAYLIKDILQNSKIEPALVNEVILGQVITGGSGQNPARQTLIYADIPQEVPGYTINKVCGSGLKSIALAANSIITCDNEIVIAGGQENMSLGMHGSYIRAGSKFGDIKMVDLMQYDGLIDVFSGVFMGITAENIAKQFNISRQEQDAFALSSHKKAAKAQLSGILQDEILPIEVTVKKNTSLFDHDETVRHNTSIEILSKLRPAFDKNGVVTAGNSSSINDGAACVLLVSEKALKKHNLTPLARIVSWASAGVDPRIMGTAPVPASKKALSKAGWSVNDLEVIEVNEAFAAQSIYVNREMKWDIEKVNINGGAIAIGHPIGASGGRLLITLIHNLRRAKAKKGLVTLCIGGGIGISMCVEAV

SEQ ID NO: 10734 - protein, 107 aa, Rickettsia prowazekii str. Madrid E
MTKNKNLEFIQNAIKKNKVVLFMKGTKEMPACGFSGTVVAILNKLGVEFSDINVLFDTALREDLKKFSDWPTFPQLYINGVLVGGCDIAKELYQNGELEKMLKDVVV

SEQ ID NO: 10735 - protein, 105 aa, Rickettsia prowazekii str. Madrid E
MFAVIKAGGKQYKVDRNSVIKVEKIDGELGSKIQFDQILMIGEYSKPSFIGTPIVKGAIVTAEITNQLKDNKIIAFKKKRRKNYRRKAGHRQELTELKILDITKQ

SEQ ID NO: 10736 - protein, 446 aa, Rickettsia prowazekii str. Madrid E
MALIIQKFGGTSVANVERIKKLVPIIKAEIAKNNQVIVVVSAMAGVTNQLVTLCNEVSSLNKRSQFAEYDVALSSGEIVTASLLALALQEEEIKAQSLLAWQLPIRTNNNYSKALVEFITTDLLEKYLQLKIIPIIAGFQGINKSNRVTTLGRGGSDTTAALIAAAMKADRCDIYTDVDGIFTADPRIIPNAKRIKEIDFLEMLELASSGAKVLHPRAVELVMRYKIDMRVLSTFSPNTEGTLITSKDTIPLVKSTYMEESALNTKHSTKIDIPEDASGSTYKLPIELALQNRYNMENCVVRCITSNKNLLKVSVNSISLSFLQVANMITYNNNCIEFMQEIENNIEYNFITNLTDKNNLQTLLTKCKNNKQIQDFTFDTEIATISLIGYGIKNDCKLLTMILSQLTQDNINVHMMQLSEVKITLLINDKDVEKTIFNLYNLFKIS

SEQ ID NO: 10737 - protein, 331 aa, Rickettsia prowazekii str. Madrid E
MHFIDEVKIYIKGGNGGNGCISFHREKFIDRGGPDGGDGGFGGSVIFRSNHHINTLVNYRYQQHFTAENGENGKGSNRSGKSGKSLILDVPVGTQIFSQDGDILLYDFTEDEKSFEIIKGGCGGLGNSHFKTSVNQAPRKSTEGEIAEEMWIHLRLKLLSDVGLIGLPNAGKSTFLSVVTAAKPKIADYPFTTLVPNLGVVYIDDEEFVIADIPGLIAGAHQGYGLGDKFLKHIERCNVLIHLIDGASNNVIADYNTVRFELESYSDYLKNKIEIICLNKCDVLVDEEIQKKIKKLQKVTNKVVHPISTYNNQGVNKIVKLALEIIKNQKY

SEQ ID NO: 10738 - protein, 383 aa, Rickettsia prowazekii str. Madrid E
MKIVALKEKVKNETRTAITPEVAGLLIKKGYAVTVEKDIGLYAGFLDEEYVAVGTKISSVPLEIISDADIILKVQPSSVTDKYSELEFAKQGAIVVGLLSPYLNHEYIKAAAKKNLTTFAMEFVPRITKAQNMDALSSQSNLVGYRAVIEASYHYTKAFPMMITAAGTISACKTLVLGVGVAGLQAIATAKRLGSIVAGYDVRIATKEQVESLGAKFVSPELQEDLEEESGYASESSADYKAKQEKFLAKIIKGYNIVITTAQIPGKKAPMLVTDKMIESMMYGSVIVDISTSTGGNVEGSEPDKIVTRHGVTIIGLLNLASKIASDSSKLYSKNLYNFLTYALQDGQFNMDDELVRDMLITKDGKIVNYIIREKYESITDNG

SEQ ID NO: 10739 - protein, 867 aa, Chlamydia trachomatis D/UW-3/CX
MEKFSDAVSEALEKAFELAKNSKHSYVTENHLLKSLLQNPGSLFCLVIKDVHGNLGLLTSAVDDALRREPTVVEGTAVASPSPSLQQLLLNAHQEARSMGDEYLSGDHLLLAFWRSTKEPFASWRKTVKTTSEALKELITKLRQGSRMDSPSAEENLKGLEKYCKNLTVLAREGKLDPVIGRDEEIRRTIQVLSRRTKNNPMLIGEPGVGKTAIAEGLALRIVQGDVPESLKEKHLYVLDMGALIAGAKYRGEFEERLKSVLKGVEASEGECILFIDEVHTLVGAGATDGAMDAANLLKPALARGTLHCIGATTLNEYQKYIEKDAALERRFQPIFVTEPSLEDAVFILRGLREKYEIFHGVRITEGALNAAVVLSYRYITDRFLPDKAIDLIDEAASLIRMQIGSLPLPIDEKERELSALIVKQEAIKREQAPAYQEEAEDMQKAIDRVKEELAALRLRWDEEKGLITGLKEKKNALENLKFAEEEAERTADYNRVAELRYSLIPSLEEEIHLAEEALNQRDGRLLQEEVDERLIAQVVANWTGIPVQKMLEGESEKLLVLEESLEERVVGQPFAIAAVSDSIRAARVGLSDPQRPLGVFLFLGPTGVGKTELAKALAELLFNKEEAMIRFDMTEYMEKHSVSKLIGSPPGYVGYEEGGSLSEALRRRPYSVVLFDEIEKADKEVFNILLQIFDDGILTDSKKRKVNCKNALFIMTSNIGSQELADYCTKKGTIVDKEAVLSVVAPALKNYFSPEFINRIDDILPFVPLTTEDIVKIVGIQMNRVALRLLERKISLTWDDSLVLFLSEQGYDSAFGARPLKRLIQQKVVTMLSKALLKGDIKPGMAVELTMAKDVVVFKIKTNPAV

SEQ ID NO: 10740 - protein, 787 aa, Chlamydia trachomatis D/UW-3/CX
MRMNKRTLLFVSLVSAAFLGCQIFFGYRDLKSCQDLAEKQRAISEQILASTEQLSVVPWTASLEESESVNQYAIRLGNRLLLLTKGGSHPEVYSRGTYWSLIEQTSTFGGILVSLYGETGQEVLSKGSSVYLPNQRDAFPVLVAEFRSNQEPLVFLGEYKDGKIANKAGAIYGTSLVFLNTGNGFVPLGIYNSKEECVESLDLPMARAVVFADKENPTASGSYYMLSNEYMQIVVSQESGAIEGINLPFASDQEENKSIVNEIGFDRELAINSPSEASFPGVETIDSQRQNIANVVGGYYPLLRRGTLSDVKKRVPAQYQALNIVSGRELASPVATGFRVVSFDNKTLILESGDGGIRRTYSLGEQPYAFELEIQTTQGREDLWITSGVPEVEIMSNAFVPAVKYHAVKKNKSDLFNVKLPKAKDSLLVRNNATPQWILNSNGYFGVILTPRIPIPAGYASSFIPGNVVPTRLSQLPPKDQAYPASKYPGYTAMLPLPKEAGRYQFMVYAGPLADPTLKALDRANANSKGETPEYVDAIAFRGFFSFITEPFAALLFVIMKFFKFLTGSWGISIILLTIVLKLLLYPLNAWSIRSMRRMQKLSPYIQEIQQKYKREPKRAQMEIMALYKMNKVNPITGCLPLLIQIPFLIAMFDLLKSSFLLRGASFIPGWIDNLTAPDVLFSWETPIWFIGKEFHLLPILLGVVMFAQQKISAVKRSGPASDQQRQQEAMGTMMALLFTFMFYNFPSGLNIYWFSSMLLGVIQQWVTNKILDEKHLQHEVIINKKR

SEQ ID NO: 10741 - protein, 431 aa, Chlamydia trachomatis D/UW-3/CX
MLRQETAPLVCKFGGTSVGTAQSIRRVCEIIQEERPSFVVVSAVAGVTDWLEEFCRLPKGKRAALTEKIRERHESIAKELGIEVSLAIFWEILEHFEDVEELFSEDQARILAIGEDLSSTLICSYCCTYVLPLKRLEARQVILTDSQFLRAVPDLALMQTAWGELALQEDTIYLMQGFLGATSSGKTTVLGRGGSDFSASLIGELCKARELRIYTDVCGVHTADPKILKDTQLIDSLTFEEMQELASSGAKVLHQDMLKPCVRAKVPIFVTSTFNVTKEGTWICASLNESTEGPVIKALSLKSNQALWFVEYNSPLVRLEDVLGCVRSLGFVPGVVMAQSLGVYFTIDWEEYPQTITKALEAFGTVSCEGPLSLVALVGAKLASWSMSRVFEALHRTPVLCWSQTDTVINLIINKDFGVAVTELLHDCLFK

SEQ ID NO: 10742 - protein, 660 aa, Chlamydia trachomatis D/UW-3/CX
MSEKRKSNKIIGIDLGTTNSCVSVMEGGQPKVIASSEGTRTTPSIVAFKGGETLVGIPAKRQAVTNPEKTLASTKRFIGRKFSEVESEIKTVPYKVAPNSKGDAVFDVEQKLYTPEEIGAQILMKMKETAEAYLGETVTEAVITVPAYFNDSQRASTKDAGRIAGLDVKRIIPEPTAAALAYGIDKEGDKKIAVFDLGGGTFDISILEIGDGVFEVLSTNGDTHLGGDDFDGVIINWMLDEFKKQEGIDLSKDNMALQRLKDAAEKAKIELSGVSSTEINQPFITIDANGPKHLALTLTRAQFEHLASSLIERTKQPCAQALKDAKLSASDIDDVLLVGGMSRMPAVQAVVKEIFGKEPNKGVNPDEVVAIGAAIQGGVLGGEVKDVLLLDVIPLSLGIETLGGVMTPLVERNTTIPTQKKQIFSTAADNQPAVTIVVLQGERPMAKDNKEIGRFDLTDIPPAPRGHPQIEVTFDIDANGILHVSAKDAASGREQKIRIEASSGLKEDEIQQMIRDAELHKEEDKQRKEASDVKNEADGMIFRAEKAVKDYHDKIPAELVKEIEEHIEKVRQAIKEDASTTAIKAASDELSTHMQKIGEAMQAQSASAAASSAANAQGGPNINSEDLKKHSFSTRPPAGGSASSTDNIEDADVEIVDKPE

SEQ ID NO: 10743 - protein, 328 aa, Chlamydia trachomatis D/UW-3/CX
MYVPGIAENLCLDIFHKQKQVISQYFASFHYDCVHQLTEKLLCHQGSLFFSGIGKSGCIARKLVATMQSFGEKAFFLSGDLLHGDLGVVSPGDIVCLFSNSGETREILEWIPHLKNRPVFLVGITAAPCSSLAAFSDFVIVLPKLEELDPFNLMPTTSTTCQLLFSDLLAMTLLRCRKISLSDYGSNHPSGQIGLKANGKVKDYLYPRTEVPFCSPLTTVAESLPTLSSYGYGCVCVVNELFELLGIFTDGDLRRGLSEYGGDILAYPLQQIMTRNPKVISEDSDVLLSLEMMESGNPVTVLPVVDAQQQRFIVGLLHMHALARAGLL

SEQ ID NO: 10744 - protein, 335 aa, Chlamydia trachomatis D/UW-3/CX
MFVDQITLELRAGKGGNGVVAWRKEKYLPKGGPYGGNGGNGGSILIEAVTNMYSFEEYRNLRFLKADDGQAGASNNRTGRNGKDLVLKVPEGTLLRDAATGELIHDFTKDGERIVVCQGGRGGKGNVFFKTSTNRAPTKATPGKPGEIRLVELELKLIADIGLVGFPNAGKSTLFNTLARTEVKVGAYPFTTLHPSLGLVHQEGMLYQKPWIMADIPGIIEGASQNRGLGLDFLRHIERTRLLLFVIDISGIERHSPEQDLKILMGELLAYKEELKDKDMVIALNKIDQLLPDEREERVALLKQQFPDQEFILLSGLTGEGVDALYDLFKSKLSE

SEQ ID NO: 10745 - protein, 255 aa, Chlamydia trachomatis D/UW-3/CX
MLHLCDVHVCCEEKKILEGLSLSIHPGELHIIMGPNGAGKSTLAKVLSGDESVEVSSGTMTLAGQDLLELSPEERAHAGMFISFQHPLEIPGVNNRIFLKEACNACRKARNQAVLDDAAFEELLTDLEEVYGFPGFHFFSNRNVNEGFSGGEKKKNELWQMLALEPKMVVLDEPDSGLDVDALKGICSVLQRYRQQHPETAFCIITHNPRLGDLLQPDHVHILLNGRVVFSGDMHLMEELERKSYQELLDVVTQE

SEQ ID NO: 10746 - protein, 490 aa, Chlamydia trachomatis D/UW-3/CX
MRIAILGRPNVGKSSLFNRLCKRSLAIVNSQEGTTRDRLYGEIRAWDSIIHVIDTGGVDQESTDRFQKQIHQQALAAAEEASVLLLVVDIRCGITKQDEELAKRLLPLKKPLILVMNKADSQQDLQRIHEFYGLGISDMIATSASHDKHIDLLLERIRQIAQIPVPSVEEQDAVQEDELPSEEAAISLHAFADETLFENESLSQEEASFLEELVAQTATPAPVDRPLKVALIGHPNVGKSSIINALLKEERCITDNSPGTTRDNIDVAYTHNNKEYVFIDTAGLRKTKSIKNSVEWMSSSRTEKAISRTDICLLVIDATQQLSYQDKRILSMIARYKKPHVILVNKWDLMFGVRMEHYVQDLRKMDPYIGQARILCISAKQRRNLLQIFSAIDDIYTIATTKLSTSLVNKVLASAMQRHHPQVINGKRLRIYYAIHKTTTPFTFLLFINSNSLLTKPYELYLKNTLKAAFNLYRVPFDLEYKAKPARKSN

SEQ ID NO: 10747 - protein, 567 aa, Chlamydia trachomatis D/UW-3/CX
MVKVSLSFKHLVPKLVTCLKEGYSFNTLKKDFTAGITAGILAFPLAIAIAIGIGVSPLQGLLASIIGGFLASALGGSRVLISGPTSSFISILYCIGVKYGEDGLFTITLMAGIFLIIFGLAGLGTFIKYMPYPVVTGLTTGIAVIIFSSQIRDFLGLQMGDGVPLDFIGKWAAYWDYLWTWDSKTFAVGLFTLLLMIYFRNYKPRYPGVMISIIIASTLVWILKIDIPTIGSRYGTLPSSLPGPVFPHISITKMLQLMPDALTISVLSGIETLLAAVVADGMTGWRHQSNCQLIGQGIANIGTSLFAGMPVTGSLSRTTASIKCGASTPIAGIIHAICLSFILLLLAPLTIKIPLTCLAAVLILIAWNMSEIHHFIHLFTAPKKDVVVLLTVFILTVMTTITSAVQVGMMLAAFLFMKQMSDLSDVISTAKYFDESEQPQNDLLFSKNEVPPFTEIYEINGPFFFGIADRLKNLLNEIEKPPKIFILCMTRVPTIDASAMHALEEFFLECDRQGTLLLLAGVKKTPLSDLRRYHVDELIGVDHIFPNIKGALLFAKALIKLESKSSQ

SEQ ID NO: 10748 - protein, 288 aa, Aquifex aeolicus VF5
MKVGFIGLGHLGRAIAKRLIEQGVELIVWNRTLSKAHEFAKETGAEVTSSPADLINKVDRVFVIVFDSQASEEVIFGEKGLVKGDIKGKTVIDMTTNHYLYAQKAYEELKKLGAFYLDAPVLGSVIPALKGELTIVVGGDKEKFEENKPLFEKFCRAIYYLGEAGMGSKMKLVNNIVLGGIMEVLAEAIAIGEKAGIDKETLINVLNDGAGKSYILDVKKKKLLEEDFSTHFSVNLIYKDLHYAQDLIKDLGLFSFTTAAVKETYGLARKEGFGNLDFSAVYKLFKED

SEQ ID NO: 10749 - protein, 423 aa, Aquifex aeolicus VF5
MRALGFIGIILSIFSSFAYASEAKLDTGNTAWMLVASALVVFMTVPGLALFYGGLDKSKSILNTIAMSFSAFAVVTLTWIFVGYSVAYGDDIFGFIGNPFQYVLGKGISGINSDTGYPALLDLMFQLTFATITTALISGSFVGRMKFSAWILFAILWSVFVYPPVAHWVWGGGFLANDGALDFAGGTVVHINAGIAGLVGALILGRRKDTSLIPNNVPLVALGAGILWFGWFGFNAGSALGANESAAWAMINTTVATSTAALAWMFTEWLHVGKPTVVGISSGIVAGLVAITPAAGFVNLIGSIFIGAIASVCAYFMVALVKPKFGYDDALDVFGIHGVRGIVGAVLTGVFADPNVGGTPGLLYGNPKQVLIQIEGVIATILYSAILTAVILLVLKAVVGLRVSEEEELELDSSLHGEKAYNL

SEQ ID NO: 10750 - protein, 217 aa, Aquifex aeolicus VF5
MKFFLDTANVEEIKKAMEWGILDGVTTNPTLISKTGRPFKEVVKEILELVDGPVSLETVSLDAEGMIREGRMLAELGENVVVKIPMTPEGLKAVIALESEGIPTNVTLVFSPTQALLAAKAGASYVSPFVGRLDDISGEGMKLIEEIKTIFSNYEFDTEIIVASVRHPMHVLESALIGADICTMPFKVMEQLFKHPLTDIGLERFLKDWEKVPEKPF

SEQ ID NO: 10751 - protein, 502 aa, Aquifex aeolicus VF5
MMDNDNQFWKRFLIFTILMFLFITAYELFYIYYVKPSQPQKTEKKEVVKKEEFKNVNLPQLMLGTFREKQEYKNTKTVKLGIYSLELSEKGGKILRFIDQKYGFDLISKAERELKIFPLEIFTGNPDLDQKLNFGEYEIKEGKNSVELIHKELKVKKILSYKNGAIHLSVEGLKPPFWVFVGSPPDDEAFYTHVGPVLKINGEVVRLDVDDLKGINEFEGNIEFGGEESRYFFKGAKDYQKHIVYKVKLGDKFVSLSTFLYDGEKTIYLGAKDYARLRELGLVDTLDWGTLKIIVKPLFLFLYWIYEHTGSWVLSILVLTFIVRIFLFPLGYKSVVSMQKLQELAPKMEKIKQKYKDDPVKMQEEMMKLYAETGFNPMAGCLPILLQIPIFFALYKVLIITVDLKVSSFLWIPSLADKDPYYILPVIMGLTMILQQKMTPSPDPKQALVGYITSVAFTLLFINFPAGLVLYWTLNNVFNIIQNYLIKEVLLKDKSKGGSKKK

SEQ ID NO: 10752 - protein, 1002 aa, Aquifex aeolicus VF5
MKVVIVGNGIAGTALVEEILRLSSGKDIRIQVFGDEKFIGYNRVLITEVLAGRKTLSEIYIKRWQWYEEKGVRLEIGKKVERLFPNKKILVTKDGEFYRYDKAIIATGSKPFIPPSIKGVNKKGVFTYRTAKDVFEILDYARVSKRAVVIGGGLLGIEVTKALRDIGLEVFLVHILDTLMEQQLDKTASELLRKDLEDMGIKVLLKKVTEEILGEKKAEGVRFSDGDELLADFVIIATGIRPNVEVGVNSGLKVNKGIVVNDYLETSASDIYAVGECIEHRGKTYGLVAPIMEQVKVCAHNVVHGNEKKYTGSLTYAMLKVAGVNLFSAGEINEKDGDEVVAFLDNGRSLYRKAVIRNNKIVGTILYGDVRGNNYLLDLIKSGKDISEERPYFLIKHILPKGTTGVEELKDNDIVCNCNAVTKGEIVKCIKEGCKTLEEIQERTKASTSCGSCIELVEEILKHYVKEKPKRVNKIEVIKKELHPFDLEFKKRLEKYFSEGELENIPEEDRDVRLKWYGIFYRKATPGYFMVRIRVPNGRLSYEQAKVVSHISEKFCRGEVEITSRQQLQIRWIKLKDLPEILEALNRVGLSTLQTGMDNVRNVTGDPLTGLAEDSLIDTLRLSQEITNIFLGKKKYADLPRKLNVAVLGSQTDCINALFNDVCFYLSEKDGKLGFNLYLGGKIGSGGPKKAIDMDMFVEPYEVPEVFKATLDIYSTFGNRENRSKNRLYFLLQEWGVERFREELEKRLYKAIPSKGKDLVNKTGEREGIINLRNGTYAVCVVVPAGKIKAKDFRQIAELARKYGSRELRLSVYQNIYIPNIPEENLNPLLGEEIFEKFSTVSSPFTMHLIACAGSDTCSFGVIPNKSDAVRVAKYLSERLKLDIPVRMHWSACAKGCGQHGSGDIGFVGTKTKLNGKAVLAVDVFVGGSPTKEGFKVIQGLPLDKVEEASYLLLNYYLENRLEGESFADFAHRVGVDKLKVVLTSLLQEGECKLLKPESISK

SEQ ID NO: 10753 - protein, 139 aa, Aquifex aeolicus VF5
MLSEETIRVIKSTVPLLKEHGTEITARMYELLFSKYPKTKELFAGASEEQPKKLANAIIAYATYIDRLEELDNAISTIARSHVRRNVKPEHYPLVKECLLQAIEEVLNPGEEVLKAWEEAYDFLAKTLITLEKKLYSQP

SEQ ID NO: 10754 - protein, 373 aa, Aquifex aeolicus VF5
MDRLEKVSPFIVMDILAQAQKYEDVVHMEIGEPDLEPSPKVMEALERAVKEKTFFYTPALGLWELRERISEFYRKKYSVEVSPERVIVTTGTSGAFLVAYAVTLNAGEKIILPDPSYPCYKNFAYLLDAQPVFVNVDKETNYEVRKEMIEDIDAKALHISSPQNPTGTLYSPETLKELAEYCEEKGMYFISDEIYHGLVYEGREHTALEFSDRAIVINGFSKYFCMPGFRIGWMIVPEELVRKAEIVIQNVFISAPTLSQYAALEAFDYEYLEKVRKTFEERRNFLYGELKKLFKIDAKPQGAFYVWANISDYSTDSYEFALKLLREARVAVTPGVDFGKNKTKEYIRFAYTRKIEELKEGVERIKKFLEKLS

SEQ ID NO: 10755 - protein, 124 aa, Aquifex aeolicus VF5
MLREMLKSKIHRLTVTDADLHYEGSLSLDEYLMELADLKPFEKIDVYNINNGARFQTYVIPAPRYSGEVKLNGAAARLGHKGDLIIIASYAQYTEEELENYAPKLIFVNEKNQPVEVKESTEVK

SEQ ID NO: 10756 - protein, 334 aa, Aquifex aeolicus VF5
MNVLFTSVPQEDVPFYQEALKDLSLKIYTTDVSKVPENELKKAELISVFVYDKLTEELLSKMPRLKLIHTRSVGFDHIDLDYCKKKGILVTHIPAYSPESVAEHTFAMILTLVKRLKRIEDRVKKLNFSQDSEILARELNRLTLGVIGTGRIGSRVAMYGLAFGMKVLCYDVVKREDLKEKGCVYTSLDELLKESDVISLHVPYTKETHHMINEERISLMKDGVYLINTARGKVVDTDALYRAYQRGKFSGLGLDVFEDEEILILKKYTEGKATDKNLKILELACKDNVIITPHIAYYTDKSLERIREETVKVVKAFVKGDLEQIKGNFVVGPS

SEQ ID NO: 10757 - protein, 406 aa, Aquifex aeolicus VF5
MFRTKAGKKVVYVDHIATTPVAEEVLEAMLPYFREKFGNPTSLHSFGQEAKKAVEKAREQVAQLINANIPEEIIFTSGGIEANNLAIKGIAKAYQRRGKHIVTTEIEHHSILHPCKTLEREGWEVTYLKPDKYGLIDPEQVREAVREDTVLVSIGHSNREIGTIQNIKELVKAAKEKNPKVIFHTDAAPSLGHYPVDVQDWGVDAASFTAHLMYGPKGVGALWTRKGVKVKPLIEGGTQERGVRAGTENVPGIVGFGAAAELAMKELDDRMKRLSHYRDKLRKGLEEKVDYIEFTGHPTQRLPHHLSIIVHFVEGEAMLLRLDLMGIETASGSACVSLALKQSHVLTAIGIPKEVSNGSVVFSFGRENTEEDVDYILEEFPKVINWLREVSPFNPENWEKYVKSRG

SEQ ID NO: 10758 - protein, 634 aa, Aquifex aeolicus VF5
MNALKNFFIWAIIIGAAIVAFNLFEGKREFTTKVSLNEVVKLVEEGKVSYAEVRGNTAIIQTKDGQKLEVTLPPNTNLVDKMVEKGVRVEVANPEPPGGWLVNVFLSWLPILFFIGIWIFLLRQMSGGGNVNRAFNFGKSRAKVYIEEKPKVTFKDVAGIEEVKEEVKEIIEYLKDPVKFQKLGGRPPKGVLLYGEPGVGKTLLAKAIAGEAHVPFISVSGSDFVEMFVGVGAARVRDLFETAKKHAPCIIFIDEIDAVGRARGAIPVGGGHDEREQTLNQLLVEMDGFDTSDGIIVIAATNRPDILDPALLRPGRFDRQIFIPKPDVRGRYEILKVHARNKKLAKDVDLEFVARATPGFTGADLENLLNEAALLAARKGKEEITMEEIEEALDRITMGLERKGMTISPKEKEKIAIHEAGHALMGLVSDDDDKVHKISIIPRGMALGVTQQLPIEDKHIYDKKDLYNKILVLLGGRAAEEVFFGKDGITTGAENDLQRATDLAYRMVSMWGMSDKVGPIAIRRVANPFLGGMTTAVDTSPDLLREIDEEVKRIITEQYEKAKAIVEEYKEPLKAVVKKLLEKETITCEEFVEVFKLYGIELKDKCKKEELFDKDRKSEENKELKSEEVKEEVV

SEQ ID NO: 10759 - protein, 632 aa, Aquifex aeolicus VF5
MAEKKEKIIGIDLGTTNSVVSVMMGDEAVVIQNQEGSRLTPSVVSWTKEKEILVGEPAKRRAILDPENTVYESKRFIGRKFEEVKEEAKRVSYKVVPDEKGDAAFDIPNAGKLVRPEEVGAHVLRKLKEAAEAFLGEPVKKAVITVPAYFNERQRQATKDAGKIAGLEVVRILNEPTAAAMAYGLHKKDNVRILVYDFGGGTFDVSILEGGEGVIEVKVTAGDTHLGGANIDERIMDWLIEEFKKETGIDLRKDRTALQRLKEASEQAKKELSFKMETEINLPFITIDPNTNQPLHLQKKLTRARLEEMIKDIVDRTIDIVKQALEDAKLKPSDIDEVVLVGGSTRIPLVQQRIKEFFGKEPHKGLNPDEVVAMGAAIQAGVLAGEVKEIVLVDVTPLSLGVETYGGVMTVLIPRNTPIPVRKCEIFTTAHDYQTEVEIHVLQGERPLAKDNKSLAKFYLTGIPPAPRGVPKIEVCFDIDADGILHVTAKDLGTGKEQSVRVEISSGLTPEEIERIIKEAEEHAEEDRKKKELIEAKNQLDHLVYQLEKALKEAGDKVPADVKSEAEKVIEEAKKTIETATEIEQVKQVTEKVLQVSSKMGTTLYGEAGKQAGGGEKKDEGGEGEVEAKPVD

SEQ ID NO: 10760 - protein, 370 aa, Aquifex aeolicus VF5
MIYFDNAATTPVLPEVKNFLCKALDIYGNPSSVHTLGKFARSEIETARKTIANYLKVKPENIIFNSCATEGNNTIIRTILNNKDRGNVVLSAIEHKSVKEAIKFWANKSIEIREIKVNKNGVIDLEHLYHLIDSNTILVCVMYVSNEFGTIQPIQEIAKICSDKGVPLLTDAVQAIGKIPIELKNISYATFSGHKFHAIKGSGFLYISDEANYEPLIVGGGQENGKRSGTENVVGILSLAKALEIIVSNFSRYQEQLKKLRDLFENLLLEALPDAQIVGKDAERSPSISSVIMPKFFGAEIVNKLSEKGIYCSTGSACLSGEYEPNKHMLKMGFSQEKALRMVRFSFGLLNKEEEVIECIERIKEIYRLN

SEQ ID NO: 10761 - protein, 401 aa, Aquifex aeolicus VF5
MKKKRVILAYSGGLDTSIIVRWLTEKGYEVITYTADVGQGEELSEIPEKARRAGAIEAIVEDLKETFAENYCLPTLRALALYEGKYPLTAALSRPLIAERLVYYAEKFNADYVAHGSTGKGNDQVRFELSVWALNPDIEVLAPVREWEFKSREEQVEYAQRFNIPVKATKEKPYSIDRNLWGVSIECGPLEDPWQEPPQDAYQITQSPEEAPDEPEYVTVGFEKGKPVYLNGERYEEQWKLIANLNEIAGRHGVGRIDMVENRLVGIKSREIYEAPGAMVLYEAYRDLLSLVLDRFTFHYFLTHIPHEYAKLVYEGLWFTPLREALDAFTNKIAEFATGEVRLKLYKGSVSVVGRRSPNSLYVEELATYSEKDQFDQIAGKHFTKVWGLPLKVLGRVRKGK

SEQ ID NO: 10762 - protein, 415 aa, Aquifex aeolicus VF5
MKILVQKFGGTSVGTLERIELCAKRVIKALEKGYKPVVVSSAMAGETDSLIELAKKVHPRPPEREMDTLLAVGEQKAIALFAMTLNKLGYPAVSLCGWQVPIITDNVHTKARIRKIGISRLLSLIEEGYIPVVAGFQGVTEDWEITTLGRGGSDTTAVALAAALKADCEINTDVPGVFTADPRIVPNAKKIKKISYEEMLELASLGAKVMQIRSVEFAAKYNVRIHVRSTFSEEEGTWIVPEDEVMEKVAVRGITVDTKETRFTVVRVPDKPGIAAEIFKALGDAHIVVDMIVQNVSHEGYTDMSFTVNKTDADKAEEIVKKIAQKIGAKEVVRDDKVAKISIVGIGMKSAYGVAGRMFDILARNGINIKAISTSEIKISCLIDEKYAELAVRALHEEFIEEMEEFETINGKNKE

SEQ ID NO: 10763 - protein, 605 aa, Aquifex aeolicus VF5
MKRAEEVPGITVSFSIKFPFLMWFKNYSKEGFIRDLIAGITVAAVYVPQSMAYAMLAGMPPIHGLYVAFIATIVAAIFGSSRYLNTGPVAMTCLLSASVLYGIGFEPQTPEWIKYMALLALMVGLIRLTVGLFKLGFIVDLISNSVVVGFTAAGALVIALSQFKHFFGYEVKSSTHIFEVVMDLVSKIEMTNPYTLAIGVLAYFLIWGSRRISVYLPGALIAVVVTSLLVYWYKLYDKGVAIVGEVPQGLPSPEPPPLDFAMMSKMWGGAFVVAFFGLIEAVAIAKTLAIRVGDKWDPNQELIGQGLANVAVSFFKGFPAGGSFSRSSLNFALGAVSPLASVISGALVGLTLFLFAPAFYYLPKATLAAIVLSAVVNLIRPQDILKLYRINKIDGVVAGLTFLSVFFMDLWVAITLGVLLSLGSFVYKTMYPRIVTLTRDPVTRTFVNAEKRGLPECPQIMFIRPNMSIYFGNAQYVYDYIMNKVEDALFNGRPLKFVLIDMEAVNYVDATGAETIVRLVKDIKQKGVEVAFANIGCDVYPILENAGFDEVVNQDLVFNAKGEAIGKLFEKLDHDYCREKCPYAVFDECLEVKPPEKVQELKKAS

SEQ ID NO: 10764 - protein, 70 aa, Aquifex aeolicus VF5
MSFRGTVKWFSKDKGYGFITREDTNADVFVHFTDIQMEGFKTLQKGQKVEFDVVEDTKGPRAKNVRVLGE

SEQ ID NO: 10765 - protein, 322 aa, Aquifex aeolicus VF5
MEEKDLLEFAREVIREEIKGLERLLSSLDENFSKAVEILRNCEGKVILTGIGKSGHIARKISSTLSSTGTPSVFLHPAEALHGDMGLLDSKDALIAISNSGESTEVLYVLQYAKALNIPVIGITGNEKSSLAKYSDVVLKIPVDREACPFNLAPTVSSTVTLALGDAIAMTLMKLKGFSQEDFAKRHPAGALGRKLRLVKDLYHTGEEVPIVKEDTSMKEAIIEMTAKGFGATAVVNEEGKLVGIITDGDLRRFVNRGGSFENTRAKDVMTKNPKTIKPDELALKALRKMEDHNITVLIVVNEENEPIGILHMHDILKAELS

SEQ ID NO: 10766 - protein, 1493 aa, Aquifex aeolicus VF5
MWQEYDSCGVGFVCDIYGRKSHDILKKGIQAVKNLTHRGAIGGDGKTGDGAGILTEIPVKFFMKEFKKLGYEVSSPENLAVGMFFLYEPVEDKVEEAFISEGIKVIGWREVPVNTDAVGKVALKVMPQIKQLFLDMKNIPEEERELRLFFARRKIEKKYEDKVYIPSLSTRTIVYKGMLVAPQLDNFYQDLLDEDYETSFVLFHQRYSTNTLPNWRLAQPLRYLAHNGEINTIQGNRNWMLTLQHELEHEILKGREDLIKPLVSHEESDSASLDRVFELLCLVGYKPEHAMYMLIPPAWEAIPDLPEEVRAFLEYESLLMKPWDGPAAIAFTDGKVIGAHLDRNGLRPARYVITEEGFMVLGSEVGMVDLDDQRVKEKGRLGPGDTILIELGKGVIKKSEEILKELANSKPYKEWLDKHLLRLSEIENDYKLEKPKEDPDRIRKLVAFGWSEEEIKNPIKYMAETGNEMTWAMGDDTPLPPLSEKPQLLYRYFKQRFAQVTNPPIDPIRERAVMSLRMNLGYKRNFLKETEEHAKRLQIDSPILLDYQLKAIENQKEFKVVRIPIAYPKERSYNIVELQDMAGERRISELIMDALYEEIPINDMRLGIETLQRRVEEAVREGADIIILSDRYISKYRVAIPALLALSACVKHLAKQGLAHKVSFIVETGEARDSHQIACLIGYGASAVYPYLAYEVIYELCEKGEIELPYEEAVFKYKEALEKGLLKIMSKMGISTLNSYQGAQIFDSVCLNKDFVEEFFTGTPVTLEADGLEEIEASTLARHNAAYEVEEPKLDIGGHMKARKGGEFHAWSPEVVRALHKFLKTKDYKDYKEFSRLANSQHPTFIRHLLTYKKGNPIPIEEVEPVESILRRFVTGGMSLGALSPEAHETIAEACNRLGMKSNSGEGGEDPERYWTIKNSAIKQVASGRFGVTPTYLASAKDLEIKIAQGAKPGEGGQLPGHKVNEYIAKLRHSQPGVTLISPPPHHDIYSIEDLAQLIHDLKQANPFARVCVKLVAERGVGTIAAGVAKAYADVVQISGAEGGTGASPYSSIKNAGNYWEIGLTETQRVLMENHLRDKIRVRVDGGFRTGKDVVIAALMGAEEFGFGTAAMIAEGCVMARICHTNRCPTGVATQDPNYRKKFKGKVENVMAYFKAVAQEVREILAEMGYRSLDEIIGRTDLLEVVRYDEFPGSKRIKVEALLEKYPENEPRRCMVEKNDNPAPNFNDKILEDLLPYIEEGIPVEKEYTIRNVDRTIPTKINYFISLFYGDRGLPEDTIKLTFRGTAGQSFGAFNHRGVSLTLIGDANDYVGKGMYGGRIVIIPDGVKETDKNVIMGNTCLYGATGGELFAAGVAGERFAVRNSGATAVIEGAGLHCCEYMTGGVVVVLGKVGFNLGAGMTGGHAYVLDDELDKKLNYAYVYARRLVGEEEIKELRELIEKHYEYTKSPKAKEILENWEEYVKKFWKVIPLEQCSRDPYGDSDACEVEFLGRK

SEQ ID NO: 10767 - protein, 311 aa, Aquifex aeolicus VF5
MNGVKIIAGTSNKTLSEEIAGYLGLRLTDALITTFSDGEIRVQINESIRGYHVYVITSLSNPVNHNLMELLLTLDAVKRSSPKEITAVVPYYAYGRQDRQDKPRTPISAKLVADLIQKAGANRVIVVDLHSPQIQGFFDIPVEHLTAIPVLYDYIRKNVVLENPIVVSPDAGGVKRARDLANKLGCGIGVILKRRPEPNKAEVMDVVGDIEGKEAIIVDDIIDTAGTLVAAANLLVNKGVKRVIACATHGIFSGPAVERLTNSPIEKVIVTNTLPVYEKKFGKLEVVSIAPLIGEAIRRIQEGTSVSSLFT

SEQ ID NO: 10768 - protein, 1006 aa, Aquifex aeolicus VF5
MISENLFSAKSLEYLEKAKEIARENKDTKVDTDHLLIALLLDEKSPLSKYIEKRGIDRKEFLKRVSEYLENLNKQLEKAIEAEAQNLINLRTQIMEVKSNIGNVQTELSKIRKAKERILRELEYARRYGDWWTAETLELELRQLEATEQSIRRQLEQVEKSLSTVFAPEDVKAFLENKLSIDGLIRKALEKSPLIEQVKELGISPDRIIDKVAEKVFGKKPTFDYSQYLTQVLEKAQDKAVSEGEAQVQPSHISAALIEAKDTIGGKLINQVLGGEKEMKKDVTQELKEEEKSPLERFGVNLNELARQGKLDPVIGREREINQVIEILLRRTKNNPVLVGDPGVGKTAIVEGLAQRIVNKEVPPELQDKEIWSIDMASLLAGSKYRGEFEERLKALLDEVKEKGNVILFIDEIHTVVGAGAAEGAVDAANIMKPALARGEIRVIGATTVDEYRKYIEKDPALERRFQPVFVDEPTEEQTIEILKGLRPRLEQFHKVKISDEAIEAAVKLTKRYVTFRRLPDKAIDALDQAAARKKLKVIGTPPEIQEIERKIKALEEQIIEANLKGDYEKEAQLKIEKAKLEKEKQELLGKVGGVEAKIAELKKKIEELDEKIKEAAEKGDYEKEAELKIEKAKLEKELKKLEQEKSKELVVTWDDVAEVVSEWTGIPVSRLKEEEMQKLLKLEDELHKRVVDQEHAVKAVAEAIRRARAGLKDPKRPIASFLFLGPTGVGKTELSKALAELLFGDEDALIRLDMSEFKEEHSVAKLIGAPPGYVGYEEGGKLTEAVRRKPYSVILLDEIEKAHPRVLDLFLQVLDDGRLTDSHGRTVDFRNTVIIMTSNIGSQYLLNIPVDADEETLNREFEKAKEKVLEELKLYMRPEFINRIDEIIVFKPLTMRELSKIIDLLIANVNKRLAERNIKIELTEEAKKELVRRGYDPAFGARPLKRTIQKYVETPLADKIIRGEIKDGMTVVVDYKDGEFVFIPKEEYEKQKAEVSASSEEKKES

SEQ ID NO: 10769 - protein, 435 aa, Aquifex aeolicus VF5
MGFVRVGIIGCGTVGTGTAKLLIQNADLIKKKTGIEFKLVKVADIDWERKREFEVPKELRTTDYKEVIDNSDVVVELVGGKTFAKKVILEALEAGKCVVTANKHLLAEEGKEIFEEAKKRNLFIGFEASVGGGIPVIKALREGLAGNKILNILGILNGTTNYILTRMFEENLDFETALKEAKEKGYAEADPSLDIDGWDAAHKIAILAMLAYGGYLDFNDVYVEGIRNVDKLDVELGKELGYTLKLLAIAKKVDSEVEVRVHPTFIHSEEALAKVSGVYNAVMIEGDFVGKTMFYGQGAGSHPTASAVVADVIDAGRFLLCSSKVLPPVNWEEGELKVRKNFYSRYYLRFDVPDKPGVLAKIANVLADYNISIASVLQKEMVCKIAGREGETIVPLVILTHKAFEEDIQNALKEIQKLPVVVDKPVLIRVEEEAY

SEQ ID NO: 10770 - protein, 495 aa, Saccharomyces cerevisiae
MTTDNAKAQLTSSSGGNIIVVSNRLPVTITKNSSTGQYEYAMSSGGLVTALEGLKKTYTFKWFGWPGLEIPDDEKDQVRKDLLEKFNAVPIFLSDEIADLHYNGFSNSILWPLFHYHPGEINFDENAWLAYNEANQTFTNEIAKTMNHNDLIWVHDYHMMLVPEMLRVKIHEKQLQNVKVGWFLHTPFPSSEIYRILPVRQEILKGVLSCDLVGFHTYDYARHFLSSVQRVLNVNTLPNGVEYQGRFVNVGAFPIGIDVDKFTDGLKKESVQKRIQQLKETFKGCKIIVGVDRLDYIKGVPQKLHAMEVFLNEHPEWRGKVVLVQVAVPSRGDVEEYQYLRSVVNELVGRINGQFGTVEFVPIHFMHKSIPFEELISLYAVSDVCLVSSTRDGMNLVSYEYIACQEEKKGSLILSEFTGAAQSLNGAIIVNPWNTDDLSDAINEALTLPDVKKEVNWEKLYKYISKYTSAFWGENFVHELYSTSSSSTSSSATKN

SEQ ID NO: 10771 - protein, 533 aa, Aquifex aeolicus VF5
MYKVLITDPIAPEGIELLQKDPEVEVYNEPDISYEELLEIIKDFDAIITRSRTPVTKELLERAEKLKVVGRAGVGVDNVDIEEATKRGILVVNTPGANTIGATELTMMHMLTIMRNGHKAHESMLNYKWDRKKFMGEELYGRILGIIGLGNIGSQVAIRAKAFGMKVMAYDPYIPREKAEKLGVKLVDNLHDMLREIDVLTIHAPLTHETKNMIDEKEFEIMKDGVYIVNCARGGIINEKALIKYMESGKIKGVALDVYSKEPPPPEFIDELKRLADKVNISLSPHIGANTYESQRNVAVIVAQQVLKALKGQTVEYAVNAPFPDLSVLTLIKPYLDLAEKLGKFLVQWTEEGIREVHIEVRGDIAEYFQPISSAVLKGILEEVVDFPVNIINAFYVAKDRGIKVEELSSEETPDFKHYIKVVVKADGKEKVVAGTVLEGQIPRITEIDRYKVDIEPEGILLVFENKDVPGVIGKIGSILGEANINIAGFRLGREKKGGIAIGILNLDEPASEEVLSRIKEIPEILFVKHIVL

SEQ ID NO: 10772 - protein, 143 aa, Vibrio parahaemolyticus
SDDFNKKAAELYAEQAKEVDIIITTALIPGRPAPKLITKEMVDSMKAGSVIVDLAAANGGNCEYTVKDQVIMTDNGVKIVGYTDMVGRLPTQSSQLYATNLVNLLKLLCKEKDGNINIDFEDVVLRGVTVIKEGEITWPAPPI

SEQ ID NO: 10773 - protein, 394 aa, Aquifex aeolicus VF5
MRKGLASRVSHLKPSPTLTITAKAKELRAKGVDVIGFGAGEPDFDTPDFIKEACIRALREGKTKYAPSAGIPELREAIAEKLLKENKVEYKPSEIVVSAGAKMVLFLIFMAILDEGDEVLLPSPYWVTYPEQIRFFGGVPVEVPLKKEKGFQLSLEDVKEKVTERTKAIVINSPNNPTGAVYEEEELKKIAEFCVERGIFIISDECYEYFVYGDAKFVSPASFSDEVKNITFTVNAFSKSYSMTGWRIGYVACPEEYAKVIASLNSQSVSNVTTFAQYGALEALKNPKSKDFVNEMRNAFERRRDTAVEELSKIPGMDVVKPEGAFYIFPDFSAYAEKLGGDVKLSEFLLEKAKVAVVPGSAFGAPGFLRLSYALSEERLVEGIRRIKKALEEI

SEQ ID NO: 10774 - protein, 301 aa, Aquifex aeolicus VF5
MKVGYVAIVGKPNVGKSTLLNNLLGTKVSIISPKAGTTRMRVLGVKNIPNEAQIIFLDTPGIYEPKKSDVLGHSMVEIAKQSLEEADVILFMIDATEGWRPRDEEIYQNFIKPLNKPVIVVINKIDKIGPAKNVLPLIDEIHKKHPELTEIVPISALKGANLDELVKTILKYLPEGEPLFPEDMITDLPLRLLAAEIVREKAMMLTREEVPTSIAVKINEIKPGDANPNMLVIKGEIIVDRENLKPIIIGKKGQRLKEIGKRARQELELILGRPVYLELWVKVVPDWRRRPEYVRLFGYAL

SEQ ID NO: 10775 - protein, 343 aa, Aquifex aeolicus VF5
MEKFVDRVKIFVKGGKGGDGAVAFLREKYRPKGGPAGGDGGKGGDVILVATSSKHTLLDFKYKKHYIAQNGEPGKGKKMHGKDGEDLIIYVPVGTVVKDAQTGEVICDLVKEGQKCIVAKGGKGGRGNARFATPTNQAPTYAEKGQKGEERWIILELKLIADVGLVGFPNAGKSTLLSRLTRAKPKIADYPFTTLSPNLGVMELDWERRLVIADIPGLIEDAHKGAGLGHEFLRHIERTKFLAHVIDVSDFREREPVQAFEAINRELELYSPKLAQKPQIVVANKIDALSDRSLLSELEKYFKEKGYEFYAVSALTGEGIEELKEGLWKKYEEIRDKESAQVT

SEQ ID NO: 10776 - protein, 414 aa, Aquifex aeolicus VF5
MIEDPMDWAFPRIKRLPQYVFSLVNELKYKLRREGEDVVDLGMGNPNMPPAKHIIDKLCEVAQKPNVHGYSASRGIPRLRKAICNFYEERYGVKLDPEREAILTIGAKEGYSHLMLAMISPGDTVIVPNPTYPIHYYAPIIAGGEVHSIPLNFSDDQDHQEEFLRRLYEIVKTAMPKPKAVVISFPHNPTTITVEKDFFKEIVKFAKEHGLWIIHDFAYADIAFDGYKPPSILEIEGAKDVAVELYSMSKGFSMAGWRVAFVVGNEILIKNLAHLKSYLDYGIFTPIQVASIIALESPYEIVEKTAKVYQKRRDVLVEGLNRLGWKVKKPKATMFVWAKIPEWINMNSLDFSLFLLKEAKVAVSPGVGFGQYGEGYVRFALVENEHRIRQAIRGIRKAFRKLQKERKLEPERSA

SEQ ID NO: 10777 - protein, 487 aa, Aquifex aeolicus VF5
MPLPSSVWRSTLRPRVRRLAYIMGWTGGYVLLALLIAPYLRKFGKFTVPDFIAERYESNFARLVALIIAIIISFTYMVGQVAGVGIIMGRLFGVPFEIGIAIGMIVIIATTVLGGMKSITWTQVAQYIVLITAYLLPVSLLAMQWFGIPLPQFLYGNVLQWIVDLEKQHGISPHYIEPYVKFNMIQFLALMFVLMAGTAALPHVLMRFFTTPSVKDARWSAGWALFFIAILYLTAPAYAAFARYVVLKDVVGKPIDQLPAWAQKWAETGLFKVIDQNGDGIIQWAELQLHRDIVVLATPEIAGLSLLVGYFVMAGGLAAALSTADGLLLVIAAAVSNDLYAKMINPNAPEKKIVMLGKIAVAVAGVIGGFVAAMKIGFIVQIVAWAFSLATASFFPALVLGIFWKRLNKEGAIAGMVAGLLVTIIYIYLNKTQGFSILGIQHTASGVFGLLVNLIVSYIVTMMTPPPSERVQKLVEDIRYPKKIHEV

SEQ ID NO: 10778 - protein, 212 aa, Bradyrhizobium betae
DGYAPTPNLRGKTQIKEFASFPTLEQLPLWGFDGSSTQQAEGRSSDCVLKPVAVFPDAARTNGVLVMCEVMMPDGKTPHATNKRATILDDAGAWFGFEQEYFFYKDGRPLGFPVSGYPAPQGPYYTGVGFSNVGDVARKIVEEHLDLCLAAGINHEGINAEVAKGQWEFQIFGKGSKKAADEMWMARYLMLRLTEKYGIDIEFHCKPLGDTD

SEQ ID NO: 10779 - protein, 356 aa, Spinacia oleracea
MSLLSDLVNLNLSDSTEKIIAEYIWIGGSGMDMRSKARTLNGPVSDPKELPKWNYDGSSTGQAPGEDSEVILYPQAIFKDPFRRGNNILVMCDAYTPQGEPIPTNKRCNAEKIFSHPDVVAEVPWYGIEQEYTLLQKDVNWPVGWPVGGYPGPQGPYYCGIGADKAFGRDIVDSHYKACIYAGINISGINGEVMPGQWEFQVGPAVGISAADEVWVARYILERITEIAGVALSFDPKPIPGDWNGAGAHTNYSTKSMREDGGYEIIKQAIEKLGLRHNEHIAAYGEGNERRLTGKHETASISTFLWGVANRGASVRVGRDTEKEGKGYFEDRRPASNMDPYVVTSMIAETTLLWKP

SEQ ID NO: 10780 - protein, 593 aa, Phalaenopsis amabilis
MGNTCVGPSFSKNGILQTFSASLWRTQPHGDDELAPAKTGEAGKEISPPPPAISDGDAPNPLQHNPPEPVKIHESDLKPAKPQGAEVKPTYEQSPQNPPKKPRHVWRVPSAGLLAGSVLKRKTSNLKDIYSLGRKLGQGQFGTTYLCVEKATGKEYACKSIAKRKLVSEEDVEDVRREIQIMHHLSGNPNVISIKGAYEDAVAVHVVMELCAGGELFDRIIQKGHFTERKAAELTRVIVSVVEACHSLGVMHRDLKPENFLFVSQSEDSLLKTIDFGLSVFFKPGEVFTDVVGSPYYVAPEVLRKRYGPEVDVWSAGVIIYILLSGVPPFWAETEQGIFDEVLHGELDFESDPWPSISDGAKDLVQKMLVRDPKKRLKAHEVLCHPWVQVEGVAPDKPLASAVLSRLKQFSAMNKLKKMALRVIAENLSEDEIAGLKQMFKMIDTDNSGQITFDELKVGLERVGANLMESEIYALMEAADVDNSGTIDYGEFIAATMHLNKIEREDHLFAAFSYFDKDGSGYITRDELQLACEEFGIEAIRLEEIIQEVDQDNDGRIDYNEFVEMMQKGNAGFGRKGLQNNFSIGLREALKLG

SEQ ID NO: 10781 - protein, 190 aa, Mycobacterium tuberculosis H37Rv
MVAERAGHQWCLFLDRDGVINRQVVGDYVRNWRQFEWLPGAARALKKLRAWAPYIVVVTNQQGVGAGLMSAVDVMVIHRHLQMQLASDGVLIDGFQVCPHHRSQRCGCRKPRPGLVLDWLGRHPDSEPLLSIVVGDSLSDLELAHNVAAAAGACASVQIGGASSGGVADASFDSLWEFAVAVGHARGERG

SEQ ID NO: 10782 - protein, 366 aa, Mycobacterium tuberculosis H37Rv
MTDPQTQSTRVGVVAESGPDERRVALVPKAVASLVNRGVAVVVEAGAGERALLPDELYTAVGASIGDAWAADVVVKVAPPTAAEVGRLRGGQTLIGFLAPRNADNSIGALTQAGVQAFALEAIPRISRAQVMDALSSQANVSGYKAVLLAASESTRFFPMLTTAAGTVKPATVLVLGVGVAGLQALATAKRLGARTTGYDVRPEVADQVRSVGAQWLDLGISASGEGGYARELTDDERAQQQKALEEAISGFDVVITTALVPGRPAPTLVTAAAVEAMKPGSVVVDLAGETGGNCELTEPGRTVVKHDVTIAAPLNLPATMPEHASELYSKNITALLDLLIKDGRLAPDFDDEVIAQSCVTRGKDS

SEQ ID NO: 10783 - protein, 429 aa, Mycobacterium tuberculosis H37Rv
MDNDGTIVDVTTHQLPWHTASHQRQRAFAQSAKLQDVLYEIRGPVHQHAARLEAEGHRILKLNIGNPAPFGFEAPDVIMRDIIQALPYAQGYSDSQGILSARRAVVTRYELVPGFPRFDVDDVYLGNGVSELITMTLQALLDNGDQVLIPSPDYPLWTASTSLAGGTPVHYLCDETQGWQPDIADLESKITERTKALVVINPNNPTGAVYSCEILTQMVDLARKHQLLLLADEIYDKILYDDAKHISLASIAPDMLCLTFNGLSKAYRVAGYRAGWLAITGPKEHASSFIEGIGLLANMRLCPNVPAQHAIQVALGGHQSIEDLVLPGGRLLEQRDIAWTKLNEIPGVSCVKPAGALYAFPRLDPEVYDIDDDEQLVLDLLLSEKILVTQGTGFNWPAPDHLRLVTLPWSRDLAAAIERLGNFLVSYRQ

SEQ ID NO: 10784 - protein, 625 aa, Mycobacterium tuberculosis H37Rv
MARAVGIDLGTTNSVVSVLEGGDPVVVANSEGSRTTPSIVAFARNGEVLVGQPAKNQAVTNVDRTVRSVKRHMGSDWSIEIDGKKYTAPEISARILMKLKRDAEAYLGEDITDAVITTPAYFNDAQRQATKDAGQIAGLNVLRIVNEPTAAALAYGLDKGEKEQRILVFDLGGGTFDVSLLEIGEGVVEVRATSGDNHLGGDDWDQRVVDWLVDKFKGTSGIDLTKDKMAMQRLREAAEKAKIELSSSQSTSINLPYITVDADKNPLFLDEQLTRAEFQRITQDLLDRTRKPFQSVIADTGISVSEIDHVVLVGGSTRMPAVTDLVKELTGGKEPNKGVNPDEVVAVGAALQAGVLKGEVKDVLLLDVTPLSLGIETKGGVMTRLIERNTTIPTKRSETFTTADDNQPSVQIQVYQGEREIAAHNKLLGSFELTGIPPAPRGIPQIEVTFDIDANGIVHVTAKDKGTGKENTIRIQEGSGLSKEDIDRMIKDAEAHAEEDRKRREEADVRNQAETLVYQTEKFVKEQREAEGGSKVPEDTLNKVDAAVAEAKAALGGSDISAIKSAMEKLGQESQALGQAIYEAAQAASQATGAAHPGGEPGGAHPGSADDVVDAEVVDDGREAK

SEQ ID NO: 10785 - protein, 848 aa, Mycobacterium tuberculosis H37Rv
MDSFNPTTKTQAALTAALQAASTAGNPEIRPAHLLMALLTQNDGIAAPLLEAVGVEPATVRAETQRLLDRLPQATGASTQPQLSRESLAAITTAQQLATELDDEYVSTEHVMVGLATGDSDVAKLLTGHGASPQALREAFVKVRGSARVTSPEPEATYQALQKYSTDLTARAREGKLDPVIGRDNEIRRVVQVLSRRTKNNPVLIGEPGVGKTAIVEGLAQRIVAGDVPESLRDKTIVALDLGSMVAGSKYRGEFEERLKAVLDDIKNSAGQIITFIDELHTIVGAGATGEGAMDAGNMIKPMLARGELRLVGATTLDEYRKHIEKDAALERRFQQVYVGEPSVEDTIGILRGLKDRYEVHHGVRITDSALVAAATLSDRYITARFLPDKAIDLVDEAASRLRMEIDSRPVEIDEVERLVRRLEIEEMALSKEEDEASAERLAKLRSELADQKEKLAELTTRWQNEKNAIEIVRDLKEQLEALRGESERAERDGDLAKAAELRYGRIPEVEKKLDAALPQAQAREQVMLKEEVGPDDIADVVSAWTGIPAGRLLEGETAKLLRMEDELGKRVIGQKAAVTAVSDAVRRSRAGVSDPNRPTGAFMFLGPTGVGKTELAKALADFLFDDERAMVRIDMSEYGEKHTVARLIGAPPGYVGYEAGGQLTEAVRRRPYTVVLFDEIEKAHPDVFDVLLQVLDEGRLTDGHGRTVDFRNTILILTSNLGSGGSAEQVLAAVRATFKPEFINRLDDVLIFEGLNPEELVRIVDIQLAQLGKRLAQRRLQLQVSLPAKRWLAQRGFDPVYGARPLRRLVQQAIGDQLAKMLLAGQVHDGDTVPVNVSPDADSLILG

SEQ ID NO: 10786 - protein, 390 aa, Mycobacterium tuberculosis H37Rv
MGLEDRDALRVLQNAFKLDDPELVRRFYAHWFALDASVRDLFPPDMGAQRAAFGQALHWVYGELVAQRAEEPVAFLAQLGRDHRKYGVLPTQYDTLRRALYTTLRDYLGHPSRGAWTDAVDEAAGQSLNLIIGVMSGAADADDAPAWWDGTVVEHIRVSRDLAVARLQLDRPLHYYPGQYVNVHVPQCPRRWRYLSPAIPADPNGRIEFHVRVVPGGLVSNAIVGETRPGDRWRLSGPHGAFRVDRDGGDVLMVAGSTGLAPLRALIIDLSRFAVNPRVHLFFGARYACELYDLPTLWQIAAHNPWLSVSPVSEYNGDPAWAADYPDVSAPRGLHVRQTGRLPDVVSRYGGWGDRQILICGGPAMVRATKAALIAKGAPPERIQHDPLSR

SEQ ID NO: 10787 - protein, 690 aa, Mycobacterium tuberculosis H37Rv
MADSSAIYLAAPESQTGKSTIALGLLHRLTAMVAKVGVFRPITRLSAERDYILELLLAHTSAGLPYERCVGVTYQQLHADRDDAIAEIVDSYHAMADECDAVVVVGSDYTDVTSPTELSVNGRIAVNLGAPVLLTVRAKDRTPDQVASVVEVCLAELDTQRAHTAAVVANRCELSAIPAVTDALRRFTPPSYVVPEEPLLSAPTVAELTQAVNGAVVSGDVALREREVMGVLAAGMTADHVLERLTDGMAVITPGDRSDVVLAVASAHAAEGFPSLSCIVLNGGFQLHPAIAALVSGLRLRLPVIATALGTYDTASAAASARGLVTATSQRKIDTALELMDRHVDVAGLLAQLTIPIPTVTTPQMFTYRLLQQARSDLMRIVLPEGDDDRILKSAGRLLQRGIVDLTILGDEAKVRLRAAELGVDLDGATVIEPCASELHDQFADQYAQLRKAKGITVEHAREIMNDATYFGTMLVHNCHADGMVSGAAHTTAHTVRPALEIIKTVPGISTVSSIFLMCLPDRVLAYGDCAIIPNPTVEQLADIAICSARTAAQFGIEPRVAMLSYSTGDSGKGADVDKVRAATELVRAREPQLPVEGPIQYDAAVEPSVAATKLRDSPVAGRATVLIFPDLNTGNNTYKAVQRSAGAIAIGPVLQGLRKPVNDLSRGALVDDIVNTVAITAIQAQGVHE

SEQ ID NO: 10788 - protein, 385 aa, Mycobacterium tuberculosis H37Rv
MSSTVLVINSGSSSLKFQLVEPVAGMSRAAGIVERIGERSSPVADHAQALHRAFKMLAEDGIDLQTCGLVAVGHRVVHGGTEFHQPTLLDDTVIGKLEELSALAPLHNPPAVLGIKVARRLLANVAHVAVFDTAFFHDLPPAAATYAIDRDVADRWHIRRYGFHGTSHQYVSERAAAFLGRPLDGLNQIVLHLGNGASASAIARGRPVETSMGLTPLEGLVMGTRSGDLDPGVISYLWRTARMGVEDIESMLNHRSGMLGLAGERDFRRLRLVIETGDRSAQLAYEVFIHRLRKYLGAYLAVLGHTDVVSFTAGIGENDAAVRRDALAGLQGLGIALDQDRNLGPGHGARRISSDDSPIAVLVVPTNEELAIARDCLRVLGGRRA

SEQ ID NO: 10789 - protein, 328 aa, Mycobacterium tuberculosis H37Rv
MTRRALLARAAAPLAPLALAMVLASCGHSETLGVEATPTLPLPTPVGMEIMPPQPPLPPDSSSQDCDPTASLRPFATKAEADAAVADIRARGRLIVGLDIGSNLFSFRDPITGEITGFDVDIAGEVARDIFGVPSHVEYRILSAAERVTALQKSQVDIVVKTMSITCERRKLVNFSTVYLDANQRILAPRDSPITKVSDLSGKRVCVARGTTSLRRIREIAPPPVIVSVVNWADCLVALQQREIDAVSTDDTILAGLVEEDPYLHIVGPDMADQPYGVGINLDNTGLVRFVNGTLERIRNDGTWNTLYRKWLTVLGPAPAPPTPRYVD

SEQ ID NO: 10790 - protein, 294 aa, Mycobacterium tuberculosis H37Rv
MTTIAFLGLGNMGAPMSANLVGAGHVVRGFDPAPTAASGAAAHGVAVFRSAPEAVAEADVVITMLPTGEVVRRCYTDVLAAARPATLFIDSSTISVTDAREVHALAESHGMLQLDAPVSGGVKGAAAATLAFMVGGDESTLRRARPVLEPMAGKIIHCGAAGAGQAAKVCNNMVLAVQQIAIAEAFVLAEKLGLSAQSLFDVITGATGNCWAVHTNCPVPGPVPTSPANNDFKPGFSTALMNKDLGLAMDAVAATGATAPLGSHAADIYAKFAADHADLDFSAVIHTLRARADA

SEQ ID NO: 10791 - protein, 295 aa, Mycobacterium tuberculosis H37Rv
MTAHPETPRLGYIGLGNQGAPMAKRLLDWPGGLTVFDVRVEAMAPFVEGGATAAASVSDVAEADIISITVFDDAQVSSVITADNGLATHAKPGTIVAIHSTIADTTAVDLAEKLKPQGIHIVDAPVSGGAAAAAKGELAVMVGADDEAFQRIKEPFSRWASLLIHAGEPGAGTRMKLARNMLTFVSYAAAAEAQRLAEACGLDLVALGKVVRHSDSFTGGAGAIMFRNTTAPMEPADPLRPLLEHTRGLGEKDLSLALALGEVVSVDLPLAQLALQRLAAGLGVPHPDTEPAKET

SEQ ID NO: 10792 - protein, 560 aa, Mycobacterium tuberculosis H37Rv
MTPQKSDACSDPVYTVGDYLLDRLAELGVSEIFGVPGDYNLQFLDHIVAHPTIRWVGSANELNAGYAADGYGRLRGMSAVVTTFGVGELSVTNAIAGSYAEHVPVVHIVGGPTKDAQGTRRALHHSLGDGDFEHFLRISREITCAQANLMPATAGREIDRVLSEVREQKRPGYILLSSDVARFPTEPPAAPLPRYPGGTSPRALSLFTKAAIELIADHQLTVLADLLVHRLQAVKELEALLAADVVPHATLMWGKSLLDESSPNFLGIYAGAASAERVRAAIEGAPVLVTAGVVFTDMVSGFFSQRIDPARTIDIGQYQSSVADQVFAPLEMSAALQALATILTGRGISSPPVVPPPAEPPPAMPARDEPLTQQMVWDRVCSALTPGNVVLADQGTSFYGMADHRLPQGVTFIGQPLWGSIGYTLPAAVGAAVAHPDRRTVLLIGDGAAQLTVQELGTFSREGLSPVIVVVNNDGYTVERAIHGETAPYNDIVSWNWTELPSALGVTNHLAFRAQTYGQLDDALTVAAARRDRMVLVEVVLPRLEIPRLLGQLVGSMAPQ

SEQ ID NO: 10793 - protein, 593 aa, Mycobacterium tuberculosis H37Rv
MSAKERGDQNAVVDALRSIQPAVFIPASVVIVAMIVVSVVYSSVAENAFVRLNSAITGGVGWWYILVATGFVVFALYCGISRIGTIRLGRDDELPEFSFWAWLAMLFSAGMGIGLVFYGVAEPLSHYLRPPRSRGVPALTDAAANQAMALTVFHWGLHAWAIYVVVGLGMAYMTYRRGRPLSVRWLLEPVVGRGRVEGALGHAVDVIAIVGTLFGVATSLGFGITQIASGLEYLGWIRVDNWWMVGMIAAITATATASVVSGVSKGLKWLSNINMALAAALALFVLLLGPTLFLLQSWVQNLGGYVQSLPQFMLRTAPFSHDGWLGDWTIFYWGWWISWAPFVGMFIARISRGRTIREFIGAVLLVPTVIASLWFTIFGDSALLRQRNNGDMLVNGAVDTNTSLFRLLDGLPIGAITSVLAVLVIVFFFVTSSDSGSLVIDILSAGGELDPPKLTRVYWAVLEGVAAAVLLLIGGAGSLTALRTAAIATALPFSIVMVVACYAMTKAFHFDLAATPRLLHVTVPDVVAAGNRRRHDISATLSGLIAVRDVDSGTYIVHPDTGALTVTAPPDPLDDHVFESDRHVTRRNTTSSR

SEQ ID NO: 10794 - protein, 180 aa, Pteris vittata
TAGGVWASGRAADLHSSSTSTNNFQSLLSFSPTFLLSKRATVLSSTQHRPSWTTAQPPNRLVCRSSYGGAPTGLSPELKEAVDKFVTSNKVVLFMKGTKLFPQCGFSNTVVQILNSLNVPYETVNILENEQMRYAMKIYSSWPTFPQLYVDGEFFGGCDITLEAFKNGELQEAIEKAMCS

SEQ ID NO: 10795 - protein, 179 aa, Pteris vittata
GRGSVGLLGGSDLHSSSTSTNNFQSLLSFSPTFLLSKRATVLSSTQHRPSWTTAQPPNRLVCRSSYGGAPTGLSPELKEAVDKFVTSNKVVLFMKGTKLFPQCGFSNTVVQILNSLNVPYETVNILENEQMRYAMKIYSSWPTFPQLYVDGEFFGGCDITREAFKNGELQEAIEKAMCS

SEQ ID NO: 10796 - protein, 184 aa, Pteris vittata
MASRAVQASVGLLGGSDLHSSSTSTSNSQSLLSFSSTFLLSRRATVLSSTRHRRSWTTGQPPNRFVCRSSYGGVPNGLSPELKEAVDKFVTSNKVVLFMKGNKLFPQCGFSNTVVQILNSLNVPYETVNILENEQMRYAMKIYSSWPTFPQLYVDGEFFGGCDITLEAFKNGELQEAIEKAMCS

SEQ ID NO: 10797 - protein, 326 aa, Mycobacterium tuberculosis H37Rv
MSHDWTDNRKNLMLFAGRAHPELAEQVAKELDVHVTSQDAREFANGEIFVRFHESVRGCDAFVLQSCPAPVNRWLMEQLIMIDALKRGSAKRITAVMPFYPYARQDKKHRGREPISARLIADLLKTAGADRIVTVDLHTDQIQGFFDGPVDHMRGQNLLTGYIRDNYPDGNMVVVSPDSGRVRIAEKWADALGGVPLAFIHKTRDPRVPNQVVSNRVVGDVAGRTCVLIDDMIDTGGTIAGAVALLHNDGAGDVIIAATHGVLSDPAAQRLASCGAREVIVTNTLPIGEDKRFPQLTVLSIAPLLASTIRAVFENGSVTGLFDGDA

SEQ ID NO: 10798 - protein, 563 aa, Mycobacterium tuberculosis H37Rv
MAFPEYSPAASAATFADLQIHPRVLRAIGDVGYESPTAIQAATIPALMAGSDVVGLAQTGTGKTAAFAIPMLSKIDITSKVPQALVLVPTRELALQVAEAFGRYGAYLSQLNVLPIYGGSSYAVQLAGLRRGAQVVVGTPGRMIDHLERATLDLSRVDFLVLDEADEMLTMGFADDVERILSETPEYKQVALFSATMPPAIRKLSAKYLHDPFEVTCKAKTAVAENISQSYIQVARKMDALTRVLEVEPFEAMIVFVRTKQATEEIAEKLRARGFSAAAISGDVPQAQRERTITALRDGDIDILVATDVAARGLDVERISHVLNYDIPHDTESYVHRIGRTGRAGRSGAALIFVSPRELHLLKAIEKATRQTLTEAQLPTVEDVNTQRVAKFADSITNALGGPGIELFRRLVEEYEREHDVPMADIAAALAVQCRGGEAFLMAPDPPLSRRNRDQRRDRPQRPKRRPDLTTYRVAVGKRHKIGPGAIVGAIANEGGLHRSDFGQIRIGPDFSLVELPAKLPRATLKKLAQTRISGVLIDLRPYRPPDAARRHNGGKPRRKHVG

SEQ ID NO: 10799 - protein, 389 aa, Mycobacterium tuberculosis H37Rv
MIVAGARTPIGKLMGSLKDFSASELGAIAIKGALEKANVPASLVEYVIMGQVLTAGAGQMPARQAAVAAGIGWDVPALTINKMCLSGIDAIALADQLIRAREFDVVVAGGQESMTKAPHLLMNSRSGYKYGDVTVLDHMAYDGLHDVFTDQPMGALTEQRNDVDMFTRSEQDEYAAASHQKAAAAWKDGVFADEVIPVNIPQRTGDPLQFTEDEGIRANTTAAALAGLKPAFRGDGTITAGSASQISDGAAAVVVMNQEKAQELGLTWLAEIGAHGVVAGPDSTLQSQPANAINKALDREGISVDQLDVVEINEAFAAVALASIRELGLNPQIVNVNGGAIAVGHPLGMSGTRITLHAALQLARRGSGVGVAALCGAGGQGDALILRAG

SEQ ID NO: 10800 - protein, 266 aa, Mycobacterium tuberculosis H37Rv
MTILEIKDLHVSVENPAEADHEIPILRGVDLTVKSGETHALMGPNGSGKSTLSYAIAGHPKYHVTSGTITLDGADVLAMSIDERARAGLFLAMQYPVEVPGVSMSNFLRSAATAIRGEPPKLRHWVKEVKAAMAALDIDPAFAERSVNEGFSGGEKKRHEILQLELLKPKIAILDETDSGLDVDALRVVSEGVNRYAESQHGGILLITHYTRILRYIHPEYVHVFVGGRIVESGGSELADELDQNGYVRFSPASGRYPHQPAPTGA

SEQ ID NO: 10801 - protein, 398 aa, Mycobacterium tuberculosis H37Rv
MSERVILAYSGGLDTSVAISWIGKETGREVVAVAIDLGQGGEHMDVIRQRALDCGAVEAVVVDARDEFAEGYCLPTVLNNALYMDRYPLVSAISRPLIVKHLVAAAREHGGGIVAHGCTGKGNDQVRFEVGFASLAPDLEVLAPVRDYAWTREKAIAFAEENAIPINVTKRSPFSIDQNVWGRAVETGFLEHLWNAPTKDIYAYTEDPTINWGVPDEVIVGFERGVPVSVDGKPVSMLAAIEELNRRAGAQGVGRLDVVEDRLVGIKSREIYEAPGAMVLITAHTELEHVTLERELGRFKRQTDQRWAELVYDGLWYSPLKAALEAFVAKTQEHVSGEVRLVLHGGHIAVNGRRSAESLYDFNLATYDEGDSFDQSAARGFVYVHGLSSKLAARRDLR

SEQ ID NO: 10802 - protein, 463 aa, Mycobacterium tuberculosis H37Rv
MTQDGTWVDESDWQLDDSEIAESGAAPVVAVVGRPNVGKSTLVNRILGRREAVVQDIPGVTRDRVCYDALWTGRRFVVQDTGGWEPNAKGLQRLVAEQASVAMRTADAVILVVDAGVGATAADEAAARILLRSGKPVFLAANKVDSEKGESDAAALWSLGLGEPHAISAMHGRGVADLLDGVLAALPEVGESASASGGPRRVALVGKPNVGKSSLLNKLAGDQRSVVHEAAGTTVDPVDSLIELGGDVWRFVDTAGLRRKVGQASGHEFYASVRTHAAIDSAEVAIVLIDASQPLTEQDLRVISMVIEAGRALVLAYNKWDLVDEDRRELLQREIDRELVQVRWAQRVNISAKTGRAVHKLVPAMEDALASWDTRIATGPLNTWLTEVTAATPPPVRGGKQPRILFATQATARPPTFVLFTTGFLEAGYRRFLERRLRETFGFDGSPIRVNVRVREKRAGKRR

SEQ ID NO: 10803 - protein, 560 aa, Mycobacterium tuberculosis H37Rv
MIPTMTSAGWAPGVVQFREYQRRWLRGDVLAGLTVAAYLIPQAMAYATVAGLPPAAGLWASIAPLAIYALLGSSRQLSIGPESATALMTAAVLAPMAAGDLRRYAVLAATLGLLVGLICLLAGTARLGFLASLRSRPVLVGYMAGIALVMISSQLGTITGTSVEGNEFFSEVHSFATSVTRVHWPTFVLAMSVLALLTMLTRWAPRAPGPIIAVLAATMLVAVMSLDAKGIAIVGRIPSGLPTPGVPPVSVEDLRALIIPAAGIAIVTFTDGVLTARAFAARRGQEVNANAELRAVGACNIAAGLTHGFPVSSSSSRTALADVVGGRTQLYSLIALGLVVIVMVFASGLLAMFPIAALGALVVYAALRLIDLSEFRRLARFRRSELMLALATTAAVLGLGVFYGVLAAVALSILELLRRVAHPHDSVLGFVPGIAGMHDIDDYPQAKRVPGLVVYRYDAPLCFANAEDFRRRALTVVDQDPGQVEWFVLNAESNVEVDLTALDALDQLRTELLRRGIVFAMARVKQDLRESLRAASLLDKIGEDHIFMTLPTAVQAFRRR

SEQ ID NO: 10804 - protein, 428 aa, Mycobacterium tuberculosis H37Rv
MSPIWSNWPGEQVCAPSAIVRPTSEAELADVIAQAAKRGERVRAVGSGHSFTDIACTDGVMIDMTGLQRVLDVDQPTGLVTVEGGAKLRALGPQLAQRRLGLENQGDVDPQSITGATATATHGTGVRFQNLSARIVSLRLVTAGGEVLSLSEGDDYLAARVSLGALGVISQVTLQTVPLFTLHRHDQRRSLAQTLERLDEFVDGNDHFEFFVFPYADKALTRTMHRSDEQPKPTPGWQRMVGENFENGGLSLICQTGRRFPSVAPRLNRLMTNMMSSSTVQDRAYKVFATQRKVRFTEMEYAIPRENGREALQRVIDLVRRRSLPIMFPIEVRFSAPDDSFLSTAYGRDTCYIAVHQYAGMEFESYFRAVEEIMDDYAGRPHWGKRHYQTAATLRERYPQWDRFAAVRDRLDPDRVFLNDYTRRVLGP

SEQ ID NO: 10805 - protein, 839 aa, Mycobacterium tuberculosis H37Rv
MAVRQVTVGYSDGTHKTMPVRCDQTVLDAAEEHGVAIVNECQSGICGTCVATCTAGRYQMGRTEGLSDVERAARKILTCQTFVTSDCRIELQYPVDDNAALLVTGDGVVTAVELVSPSTAILRVDTSGMAGALRYRAGQFAQLQVPGTNVWRNYSYAHPADGRGECEFIIRLLPDGVMSNYLRDRAQPGDHIALRCSKGSFYLRPIVRPVILVAGGTGLSAILAMAQSLDADVAHPVYLLYGVERTEDLCKLDELTELRRRVGRLEVHVVVARPDPDWDGRTGLVTDLLDERMLASGDADVYLCGPVAMVDAARTWLDHNGFHRVGLYYEKFVASGAARRRTPARLDYAGVDIAEVCRRGRGTAVVIGGSIAGIAAAKMLSETFDRVIVLEKDGPHRRREGRPGAAQGWHLHHLLTAGQIELERIFPGIVDDMVREGAFKVDMAAQYRIRLGGTWKKPGTSDIEIVCAGRPLLEWCVRRRLDDEPRIDFRYESEVADLAFDRANNAIVGVAVDNGDADGGDGLQVVPAEFVVDASGKNTRVPEFLERLGVGAPEAEQDIINCFYSTMQHRVPPERRWQDKVMVICYAYRPFEDTYAAQYYTDSSRTILSTSLVAYNCYSPPRTAREFRAFADLMPSPVIGENIDGLEPASPIYNFRYPNMLRLRYEKKRNLPRALLAVGDAYTSADPVSGLGMSLALKEVREMQALLAKYGAGHRDLPRRYYRAIAKMADTAWFVIREQNLRFDWMKDVDKKRPFYFGVLTWYMDRVLELVHDDLDAYREFLAVVHLVKPPSALMRPRIASRVLGKWARTRLSGQKTLIARNYENHPIPAEPADQLVNA

SEQ ID NO: 10806 - protein, 481 aa, Mycobacterium tuberculosis H37Rv
MVGPRTRGYAIHKLGFCSVVMLGINSIIGAGIFLTPGEVIGLAGPFAPMAYVLAGIFAGVVAIVFATAARYVRTNGASYAYTTAAFGRRIGIYVGVTHAITASIAWGVLASFFVSTLLRVAFPDKAWADAEQLFSVKTLTFLGFIGVLLAINLFGNRAIKWANGTSTVGKAFALSAFIVGGLWIITTQHVNNYATAWSAYSATPYSLLGVAEIGKGTFSSMALATIVALYAFTGFESIANAAEEMDAPDRNLPRAIPIAIFSVGAIYLLTLTVAMLLGSNKIAASDDTVKLAAAIGNATFRTIIVVGALISMFGINVAASFGAPRLWTALADSGVLPTRLSRKNQYDVPMVSFAITASLALAFPLALRFDNLHLTGLAVIARFVQFIIVPIALIALARSQAVEHAAVRRNAFTDKVLPLVAIVVSVGLAVSYDYRCIFLVRGGPNYFSIALIVITFVVVPAMAYLHYYRIIRRVGDRPSTR

SEQ ID NO: 10807 - protein, 440 aa, Mycobacterium tuberculosis H37Rv
MRRPLDPRDIPDELRRRLGLLDAVVIGLGSMIGAGIFAALAPAAYAAGSGLLLGLAVAAVVAYCNAISSARLAARYPASGGTYVYGRMRLGDFWGYLAGWGFVVGKTASCAAMALTVGFYVWPAQAHAVAVAVVVALTAVNYAGIQKSAWLTRSIVAVVLVVLTAVVVAAYGSGAADPARLDIGVDAHVWGMLQAAGLLFFAFAGYARIATLGEEVRDPARTIPRAIPLALGITLAVYALVAVAVIAVLGPQRLARAAAPLSEAMRVAGVNWLIPVVQIGAAVAALGSLLALILGVSRTTLAMARDRHLPRWLAAVHPRFKVPFRAELVVGAVVAALAATADIRGAIGFSSFGVLVYYAIANASALTLGLDEGRPRRLIPLVGLIGCVVLAFALPLSSVAAGAAVLGVGVAAYGVRRIITRRARQTDSGDTQRSGHPSAT

SEQ ID NO: 10808 - protein, 652 aa, Mycobacterium tuberculosis H37Rv
MCGLLAFVAAPAGAAGPEGADAASAIARASHLMRHRGPDESGTWHAVDGASGGVVFGFNRLSIIDIAHSHQPLRWGPPEAPDRYVLVFNGEIYNYLELRDELRTQHGAVFATDGDGEAILAGYHHWGTEVLQRLRGMFAFALWDTVTRELFCARDPFGIKPLFIATGAGGTAVASEKKCLLDLVELVGFDTEIDHRALQHYTVLQYVPEPETLHRGVRRLESGCFARIRADQLAPVITRYFVPRFAASPITNDNDQARYDEITAVLEDSVAKHMRADVTVGAFLSGGIDSTAIAALAIRHNPRLITFTTGFEREGFSEIDVAVASAEAIGARHIAKVVSADEFVAALPEIVWYLDEPVADPALVPLFFVAREARKHVKVVLSGEGADELFGGYTIYREPLSLRPFDYLPKPLRRSMGKVSKPLPEGMRGKSLLHRGSLTLEERYYGNARSFSGAQLREVLPGFRPDWTHTDVTAPVYAESAGWDPVARMQHIDLFTWLRGDILVKADKITMANSLELRVPFLDPEVFAVASRLPAGAKITRTTTKYALRRALEPIVPAHVLHRPKLGFPVPIRHWLRAGELLEWAYATVGSSQAGHLVDIAAVYRMLDEHRCGSSDHSRRLWTMLIFMLWHAIFVEHSVVPQISEPQYPVQL

SEQ ID NO: 10809 - protein, 476 aa, Mycobacterium tuberculosis H37Rv
MPTTSMSLRELMLRRRPVSGAPVASGASGNLKRSFGTFQLTMFGVGATIGTGIFFVLAQAVPEAGPGVIVSFIIAGIAAGLAAICYAELASAVPISGSAYSYAYTTLGEAVAMVVAACLLLEYGVATAAVAVGWSGYVNKLLSNLFGFQMPHVLSAAPWDTHPGWVNLPAVILIGLCALLLIRGASESARVNAIMVLIKLGVLGMFMIIAFSAYSADHLKDFVPFGVAGIGSAAGTIFFSYIGLDAVSTAGDEVKDPQKTMPRALIAALVVVTGVYVLVALAALGTQPWQDFAEQETAGLAIILDNVTHGEWASTILAAGAVVSIFTVTLVTMYGQTRILFAMGRDGLLPARFAKVNPRTMTPVHNTVIVAIFASTLAAFIPLDSLADMVSIGTLTAFSVVAVGVIVLRVREPDLPRGFKVPGYPVTPVLSVLACGYILASLHWYTWLAFSGWVAVAVIFYLMWGRHHSALNEEVP

SEQ ID NO: 10810 - protein, 563 aa, Mycobacterium tuberculosis H37Rv
MSAKENPQMTTARPAKARNEGQWALGHREPLNANEELKKAGNPLDVRERIENIYAKQGFDSIDKTDLRGRFRWWGLYTQREQGYDGTWTGDDNIDKLEAKYFMMRVRCDGGALSAAALRTLGQISTEFARDTADISDRQNVQYHWIEVENVPEIWRRLDDVGLQTTEACGDCPRVVLGSPLAGESLDEVLDPTWAIEEIVRRYIGKPDFADLPRKYKTAISGLQDVAHEINDVAFIGVNHPEHGPGLDLWVGGGLSTNPMLAQRVGAWVPLGEVPEVWAAVTSVFRDYGYRRLRAKARLKFLIKDWGIAKFREVLETEYLKRPLIDGPAPEPVKHPIDHVGVQRLKNGLNAVGVAPIAGRVSGTILTAVADLMARAGSDRIRFTPYQKLVILDIPDALLDDLIAGLDALGLQSRPSHWRRNLMACSGIEFCKLSFAETRVRAQHLVPELERRLEDINSQLDVPITVNINGCPNSCARIQIADIGFKGQMIDDGHGGSVEGFQVHLGGHLGLDAGFGRKLRQHKVTSDELGDYIDRVVRNFVKHRSEGERFAQWVIRAEEDDLR

SEQ ID NO: 10811 - protein, 479 aa, Mycobacterium tuberculosis H37Rv
MPRFVDRVVIHTRAGSGGNGCASVHREKFKPLGGPDGGNGGRGGSIVFVVDPQVHTLLDFHFRPHLTAASGKHGMGNNRDGAAGADLEVKVPEGTVVLDENGRLLADLVGAGTRFEAAAGGRGGLGNAALASRVRKAPGFALLGEKGQSRDLTLELKTVADVGLVGFPSAGKSSLVSAISAAKPKIADYPFTTLVPNLGVVSAGEHAFTVADVPGLIPGASRGRGLGLDFLRHIERCAVLVHVVDCATAEPGRDPISDIDALETELACYTPTLQGDAALGDLAARPRAVVLNKIDVPEARELAEFVRDDIAQRGWPVFCVSTATRENLQPLIFGLSQMISDYNAARPVAVPRRPVIRPIPVDDSGFTVEPDGHGGFVVSGARPERWIDQTNFDNDEAVGYLADRLARLGVEEELLRLGARSGCAVTIGEMTFDWEPQTPAGEPVAMSGRGTDPRLDSNKRVGAAERKAARSRRREHGDG

SEQ ID NO: 10812 - protein, 309 aa, Mycobacterium tuberculosis H37Rv
MRRTNPAVVTKRELVAPDVVALTLADPGGGLLPAWSPGGHIDVQLPSGRRRQYSLCGVPGRRTDYRIAIRRIADGGGGSIEMHEAFDVGDTCEFEGPRNAFHLGLAERDVLFVIGGIGVTPILPMIRAAEQRGIDWRAIYAGRGREYMPFLDEVVAVAPGRVTVWADDEHGRFASVDELLAGAGPTTAVYVCGPPGMLEAVRVARNQHADAPLHYERFSPPPVVDGVPFELELARSRRVLRVPANRSALDVMLDWDPTTAYSCQQGFCGTCKVRVLAGQVDRRGRIIEGDNEMLVCVSRAVSGRVVIDA

SEQ ID NO: 10813 - protein, 371 aa, Mycobacterium tuberculosis H37Rv
MRVGIPTETKNNEFRVAITPAGVAELTRRGHEVLIQAGAGEGSAITDADFKAAGAQLVGTADQVWADADLLLKVKEPIAAEYGRLRHGQILFTFLHLAASRACTDALLDSGTTSIAYETVQTADGALPLLAPMSEVAGRLAAQVGAYHLMRTQGGRGVLMGGVPGVEPADVVVIGAGTAGYNAARIANGMGATVTVLDINIDKLRQLDAEFCGRIHTRYSSAYELEGAVKRADLVIGAVLVPGAKAPKLVSNSLVAHMKPGAVLVDIAIDQGGCFEGSRPTTYDHPTFAVHDTLFYCVANMPASVPKTSTYALTNATMPYVLELADHGWRAACRSNPALAKGLSTHEGALLSERVATDLGVPFTEPASVLA

SEQ ID NO: 10814 - protein, 393 aa, Mycobacterium tuberculosis H37Rv
MAYLDHAATTPMHPAAIEAMAAVQRTIGNASSLHTSGRSARRRIEEARELIADKLGARPSEVIFTAGGTESDNLAVKGIYWARRDAEPHRRRIVTTEVEHHAVLDSVNWLVEHEGAHVTWLPTAADGSVSATALREALQSHDDVALVSVMWANNEVGTILPIAEMSVVAMEFGVPMHSDAIQAVGQLPLDFGASGLSAMSVAGHKFGGPPGVGALLLRRDVTCVPLMHGGGQERDIRSGTPDVASAVGMATAAQIAVDGLEENSARLRLLRDRLVEGVLAEIDDVCLNGADDPMRLAGNAHFTFRGCEGDALLMLLDANGIECSTGSACTAGVAQPSHVLIAMGVDAASARGSLRLSLGHTSVEADVDAALEVLPGAVARARRAALAAAGASR

SEQ ID NO: 10815 - protein, 527 aa, Mycobacterium tuberculosis H37Rv
MTAVKHTTESTFAKLGVRDEIVRALGEEGIKRPFAIQELTLPLALDGEDVIGQARTGMGKTFAFGVPLLQRITSGDGTRPLTGAPRALVVVPTRELCLQVTDDLATAGKYLTAGPDTDDAAAVRRRLSVVSIYGGRPYEPQIEALRAGADVVVGTPGRLLDLCQQGHLQLGGLSVLVLDEADEMLDLGFLPDIERILRQIPADRQSMLFSATMPDPIITLARTFMVRPTHIRAEAPHSSAVHDATEQFVYRAHALDKVELVSRVLQARDRGATMIFTRTKRTAQKVADELTERGFAVGAVHGDLGQLAREKALKAFRTGGIDVLVATDVAARGIDIDDVTHVINYQCPEDEKMYVHRIGRTGRAGRTGVAVTLVDWDELPRWSMIDQALGLGSPDPAETYSNSPHLYAELAIPATAGGTVGPARKSQGRRRDTDCDGQKTAQHARNTPRRRRTRGGKPVTGHPGTNPISSPIVGGDATSEPGSGTASDSGSDVVSGSRSGNGEAARRRRRRRRRPTHAQDGFAARAN

SEQ ID NO: 10816 - protein, 380 aa, Mycobacterium tuberculosis H37Rv
MSKKHTTLNASIIDTRRPTVAGADRHPGWHALRKIAARITTPLLPDDYLHLANPLWSARELRGRILGVRRETEDSATLFIKPGWGFSFDYQPGQYIGIGLLVDGRWRWRSYSLTSSPAASGSARMVTVTVKAMPEGFLSTHLVAGVKPGTIVRLAAPQGNFVLPDPAPPLILFLTAGSGITPVMSMLRTLVRRNQITDVVHLHSAPTAADVMFGAELAALAADHPGYRLSVRETRAQGRLDLTRIGQQVPDWRERQTWACGPEGVLNQADKVWSSAGASDRLHLERFAVSKTAPAGAGGTVTFARSGKSVAADAATSLMDAGEGAGVQLPFGCRMGICQSCVVDLVEGHVRDLRTGQRHEPGTRVQTCVSAASGDCVLDI

SEQ ID NO: 10817 - protein, 495 aa, Mycobacterium tuberculosis H37Rv
MAGRRRMKSVEQSIADTDEPTTRLRKDLTWWDLVVFGVSVVIGAGIFTVTASTAGDITGPAIWISFLIAAATCALAALCYAEFASTLPVAGSAYTFSYATFGEFLAWVIGWNLVLELAMGAAVVAKGWSSYLGTVFGFGNGTGHLGSLQLDWGALVIVTLVATLIALGTKLSSRFSAVVTAIKVSVVVLVVVVGAFYIRAANYSPFIPEPEVQHHGGGLDQSVFSLLTGAQGSHYGWYGVLAGASIVFFAFIGFDIVATMAEETKRPQRDVPRGILASLGVVTLLYVAVSVVLSGMVPYTQLRTVPGRGPANLATAFQANGVYWASGIISVGALAGLTTVVMVLMLGQCRVLFAMARDGLVPRQLAKTGSRGTPVRVTVLVAVLVATTASVFPITKLEEMVNVGTLFAFILVSAGVVVLRRTRPDLQRGFTAPWVPLLPIAAVCACLWLMLNLTALTWIRFGIWLVAGTAIYVGYGRRHSAQGLRQARESATRRC

SEQ ID NO: 10818 - protein, 290 aa, Agrobacterium tumefaciens
EFPTLEQLPLWGFDGSSTQQAEGHSSDCVLKPVAIYPDPARTNGVLVMCEVMMPDGVTPHASNSRATILDDEDAWFGFEQEYFFYQDGRPLGFPEQGYPAPQGPYYTGVGFKNVGSVAREIVEEHLDFCLEAGINHEGINAEVAKGQWVFQVFGKGSKRAADQIWIARYLLVRLCEQYGIDVEFHCKPLGDTDWNGSGMHCNFSTKFLREVGGKEYFEALMAAFAKNWKEHIDVYGPDNHLRLTGKHETAPWNKFSYGVADRGASIRVPHSFVNNGYRGYLEDRRPNSQG

SEQ ID NO: 10819 - protein, 290 aa, Mesorhizobium plurifarium
EFPTLEQLPLWGFDGSSTNQAEGHSSDCVLKPVAVYPDPARTNGVLVLCEVMMPDGVTPHVSNKRATILDDEGAWFGFEQEYFFYKDGRPLGFPETGYPAPQGPYYTGVGYKNVGSVARQIVEEHLDQCLAAGINHEGINAEVAKGQWEFQIFGKGSKKAADQMWMARYLLQRLTEKYGIDIEFHCKPLGDTDWNGSGMHCNFSTAYMREVGGKAYFEALMAQFDKNLMDHIAVYGPDNDKRLTGKHETAPWNKFSYGVADRGASIRVPHSFVKNDYKGYLEDRRPNSQG

SEQ ID NO: 10820 - protein, 128 aa, Mesorhizobium plurifarium
KGSKKAADQMWMARYLLLRLTEKYGIDIEFHCKPLGDTDWNGSGMHCNFSTAYMREVGGKAYFEALMAQFDKNLMDHIAVYGPDNDKRLTGKHETAPWNKFSYGVADRGASIRVPHSFVKNDYKGYLK

SEQ ID NO: 10821 - protein, 276 aa, Mesorhizobium plurifarium
FDGSSTNQAEGHSSDCVLKPVAVYPDPARTNGVLVMCEVMMPDGVTPHVSNKRATILDDEGAWFGFEQEYFFYKDGRPLGFPESGYPAPQGPYYTGVGYKNVGDIARTIVEEHLDLCLAAGINHEGINAEVAKGQWEFQIFGKGSKKAADQMWMARYLLLRLTEKYGIDIEFHCKPLGDTDWNGSGMHCNFSTAYMREVGGKAYFEALMAQFDKNLMDHIAVYGPDNDKRLTGKHETAPWNKFSYGVADRGASIRVPHSFVKNDYKGYLEDRRPIS

SEQ ID NO: 10822 - protein, 500 aa, Mycobacterium tuberculosis H37Rv
MAPSGGQEAQICDSETFGDSDFVVVANRLPVDLERLPDGSTTWKRSPGGLVTALEPVLRRRRGAWVGWPGVNDDGAEPDLHVLDGPIIQDELELHPVRLSTTDIAQYYEGFSNATLWPLYHDVIVKPLYHREWWDRYVDVNQRFAEAASRAAAHGATVWVQDYQLQLVPKMLRMLRPDLTIGFFLHIPFPPVELFMQMPWRTEIIQGLLGADLVGFHLPGGAQNFLILSRRLVGTDTSRGTVGVRSRFGAAVLGSRTIRVGAFPISVDSGALDHAARDRNIRRRAREIRTELGNPRKILLGVDRLDYTKGIDVRLKAFSELLAEGRVKRDDTVVVQLATPSRERVESYQTLRNDIERQVGHINGEYGEVGHPVVHYLHRPAPRDELIAFFVASDVMLVTPLRDGMNLVAKEYVACRSDLGGALVLSEFTGAAAELRHAYLVNPHDLEGVKDGIEEALNQTEEAGRRRMRSLRRQVLAHDVDRWAQSFLDALAGAHPRGQG

SEQ ID NO: 10823 - protein, 685 aa, Mycobacterium tuberculosis H37Rv
MTDACQAEYAIAAMSTVEMDQAAPESAAHHPLPDPGESVPRLALPTIGIFLATLTAFVGSTTAYISGWIPFWVTIPVNAAVTFVMFTVVHDASHYAISSIRWVNGLFGRLAWLFVGPVVAFPAFGYIHIQHHRHSNDDEQDPDTFASHGSLWVLPLRWSMVEYFYIKYYLPRGRSRPVIEVAETLVMMTLFLTGLIVAIVTGNFWTLAIVFLIPQRIGLTVLAWWFDWLPHHGLEDTQRSNRYRATRNRVGAEWLFTPVLLSQNYHLVHHLHPSVPFYRYLRTWRRNEEAYLERNAAISTVFGQQLNPDEYRQWKELNGRLARLLPVRMPARSSSPHAVLHRIPVASVDPITADATLVTFAVPEALRDAFRFEPGQHVTVRTDLGGQGIRRNYSICAPATRAQLRIAVKHIPGGAFSTFVANELKAGDVLELMTPTGRFGTPLDPLHRKHYVGLVAGSGITPVLSILATTLEIETESRFTLIYGNRTKESTMFRAELDRLESRYADRLEILHVLSSEPLHTPELRGRIDRDKLTRWLTSTLRPAGVDEWFICGPLAMATAVRETLIEHGVDSERIHLELFYGFDTPPATRPSYAGATVTFTLSGQRAIFDLVPGDSILEGALGLRSDAPYACMGGACGTCRAKLIEGNVEMDHNFALRKAELDAGYILTCQSHPTTPFVAVDYDA

SEQ ID NO: 10824 - protein, 386 aa, Mycobacterium tuberculosis H37Rv
MTEAYVIDAVRTAVGKRGGALAGIHPVDLGALAWRGLLDRTDIDPAAVDDVIAGCVDAIGGQAGNIARLSWLAAGYPEEVPGVTVDRQCGSSQQAISFGAQAIMSGTADVIVAGGVQNMSQIPISSAMTVGEQFGFTSPTNESKQWLHRYGDQEISQFRGSELIAEKWNLSREEMERYSLTSHERAFAAIRAGHFENEIITVETESGPFRVDEGPRESSLEKMAGLQPLVEGGRLTAAMASQISDGASAVLLASERAVKDHGLRPRARIHHISARAADPVFMLTGPIPATRYALDKTGLAIDDIDTVEINEAFAPVVMAWLKEIKADPAKVNPNGGAIALGHPLGATGAKLFTTMLGELERIGGRYGLQTMCEGGGTANVTIIERL

SEQ ID NO: 10825 - protein, 358 aa, Mycobacterium tuberculosis H37Rv
MTEAIGDEPLGDHVLELQIAEVVDETDEARSLVFAVPDGSDDPEIPPRRLRYAPGQFLTLRVPSERTGSVARCYSLCSSPYTDDALAVTVKRTADGYASNWLCDHAQVGMRIHVLAPSGNFVPTTLDADFLLLAAGSGITPIMSICKSALAEGGGQVTLLYANRDDRSVIFGDALRELAAKYPDRLTVLHWLESLQGLPSASALAKLVAPYTDRPVFICGPGPFMQAARDALAALKVPAQQVHIEVFKSLESDPFAAVKVDDSGDEAPATAVVELDGQTHTVSWPRTAKLLDVLLAAGLDAPFSCREGHCGACACTLRAGKVNMGVNDVLEQQDLDEGLILACQSRPESDSVEVTYDE

SEQ ID NO: 10826 - protein, 139 aa, Mycobacterium tuberculosis H37Rv
MLRTMLKSKIHRATVTCADLHYVGSVTIDADLMDAADLLEGEQVTIVDIDNGARLVTYAITGERGSGVIGINGAAAHLVHPGDLVILIAYATMDDARARTYQPRIVFVDAYNKPIDMGHDPAFVPENAGELLDPRLGVG

SEQ ID NO: 10827 - protein, 67 aa, Mycobacterium tuberculosis H37Rv
MPQGTVKWFNAEKGFGFIAPEDGSADVFVHYTEIQGTGFRTLEENQKVEFEIGHSPKGPQATGVRSL

SEQ ID NO: 10828 - protein, 273 aa, Mycobacterium tuberculosis H37Rv
MSAGGTPLQAGATPTGSRGTVALRPDAGPSWLRPLVDNVGQIPDAYRRRLPADVLAMVTAAGAVSAMTSSRRDHREAAVLVLFSGPEAGPGDGGVPDDADLLLTVRASTLRHHAGQAAFPGGVVDPADDGPVATALREANEETGIDPSRLHPLATMERTFIAPSRFHVVPVLAYSPDPGPVAVVNEAETAIVARVPVRAFINPANRLMVYRRPHTRRWAGPAFLLNQMLVWGFTGQVISAVLDVAGWAQPWDTGDIRELDAAMVLIDDESDPR

SEQ ID NO: 10829 - protein, 224 aa, Mycobacterium tuberculosis H37Rv
MDEILARAGIFQGVEPSAIAALTKQLQPVDFPRGHTVFAEGEPGDRLYIIISGKVKIGRRAPDGRENLLTIMGPSDMFGELSIFDPGPRTSSATTITEVRAVSMDRDALRSWIADRPEISEQLLRVLARRLRRTNNNLADLIFTDVPGRVAKQLLQLAQRFGTQEGGALRVTHDLTQEEIAQLVGASRETVNKALADFAHRGWIRLEGKSVLISDSERLARRAR

SEQ ID NO: 10830 - protein, 421 aa, Mycobacterium tuberculosis H37Rv
MALVVQKYGGSSVADAERIRRVAERIVATKKQGNDVVVVVSAMGDTTDDLLDLAQQVCPAPPPRELDMLLTAGERISNALVAMAIESLGAHARSFTGSQAGVITTGTHGNAKIIDVTPGRLQTALEEGRVVLVAGFQGVSQDTKDVTTLGRGGSDTTAVAMAAALGADVCEIYTDVDGIFSADPRIVRNARKLDTVTFEEMLEMAACGAKVLMLRCVEYARRHNIPVHVRSSYSDRPGTVVVGSIKDVPMEDPILTGVAHDRSEAKVTIVGLPDIPGYAAKVFRAVADADVNIDMVLQNVSKVEDGKTDITFTCSRDVGPAAVEKLDSLRNEIGFSQLLYDDHIGKVSLIGAGMRSHPGVTATFCEALAAVGVNIELISTSEIRISVLCRDTELDKAVVALHEAFGLGGDEEATVYAGTGR

SEQ ID NO: 10831 - protein, 1527 aa, Mycobacterium tuberculosis H37Rv
MTPKRVGLYNPAFEHDSCGVAMVVDMHGRRSRDIVDKAITALLNLEHRGAQGAEPRSGDGAGILIQVPDEFLREAVDFELPAPGSYATGIAFLPQSSKDAAAACAAVQKIAEAEGLQVLGWRSVPTDDSSLGALSRDAMPTFRQVFLAGASGMALERRCYVVRKRAEHELGTKGPGQDGPGRETVYFPSLSGQTLVYKGMLTTPQLKAFYLDLQDERLTSALGIVHSRFSTNTFPSWPLAHPFRRIAHNGEINTVTGNENWMRAREALIKTDIFGSAADVEKLFPICTPGASDTARFDEVLELLHLGGRSLAHAVLMMIPEAWERHESMDPARRAFYQYHASLMEPWDGPASMTFTDGTVVGAVLDRNGLRPSRIWVTDDGLVVMASEAGVLDLHPSTVVRRMRLQPGRMFLVDTAQGRIVSDEEIKADLAAEHPYQEWLDNGLVPLDELPEGKDVRMPHHRIVMRQLAFGYTYEELNLLVAPMARLGAEPIGSMGTDTPVAVLSQRPRMLYDYFHQLFAQVTNPPLDAIREEVVTSLQGTTGGERDLLNPDQNSCHQIVLPQPILRNHELAKLVSLDPNDKVNGRPHGLRSKVIRCLYRVSEGGAGLAAALEEVRGAAAAAIADGARIIILSDRESDEEMAPIPSLLAVAGVHHHLVRERTRTQVGLVVESGDAREVHHMAALVGFGAAAINPYLVFESIEDMLDRGVIEGIDRTAALNNYIKAAGKGVLKVMSKMGISTLASYTGAQLFQAVGISEQVLDEYFTGLTCPTGGITLDDIAADVAARHRLAYLDRPDERAHRELEVGGEYQWRREGEYHLFNPETVFKLQHSTRTGQYKIFKEYTRLVDDQSERMASLRGLLKFRTGVRPPVPLDEVEPASEIVKRFSTGAMSYGSISAEAHETLAIAMNRLGARSNCGEGGEDVKRFDRDPNGDWRRSAIKQVASARFGVTSHYLTNCTDLQIKMAQGAKPGEGGQLPGHKVYPWVAEVRHSTPGVGLISPPPHHDIYSIEDLAQLIHDLKNANPSARVHVKLVSENGVGTVAAGVSKAHADVVLISGHDGGTGATPLTSMKHAGAPWELGLAETQQTLLLNGLRDRIVVQVDGQLKTGRDVMIATLLGAEEFGFATAPLVVAGCIMMRVCHLDTCPVGVATQNPLLRERFTGKPEFVENFFMFIAEEVREYLAQLGFRTVNEAVGQAGALDTTLARAHWKAHKLDLAPVLHEPESAFMNQDLYCSSRQDHGLDKALDQQLIVMSREALDSGKPVRFSTTIGNVNRTVGTMLGHELTKAYGGQGLPDGTIDITFDGSAGNSFGAFVPKGITLRVYGDANDYVGKGLSGGRIVVRPSDDAPQDYVAEDNIIGGNVILFGATSGEVYLRGVVGERFAVRNSGAHAVVEGVGDHGCEYMTGGRVVILGRTGRNFAAGMSGGVAYVYDPDGELPANLNSEMVELETLDEDDADWLHGTIQVHVDATDSAVGQRILSDWSGQQRHFVKVMPRDYKRVLQAIALAERDGVDVDKAIMAAAHG

SEQ ID NO: 10832 - protein, 366 aa, Mycobacterium tuberculosis H37Rv
MSLLFDFFSLDFIYYPVSWIMWVWYRLFAFVLGPSNFFAWALSVMFLVFTLRALLYKPFVRQIRTTRQMQELQPQIKALQKKYGKDRQRMALEMQKLQREHGFNPILGCLPMLAQIPVFLGLYHVLRSFNRTTGGFGQPHLSVIENRLTGNYVFSPVDVGHFLDANLFGAPIGAYMTQRSGLDAFVDFSRPALIAVGVPVMILAGIATYFNSRASIARQSAEAAANPQTAMMNKLALYVFPLGVVVGGPFLPLAIILYWFSNNIWTFGQQHYVFGMIEKEEEAKKQEAVRRRAANAPAPGAKPKRSPKTAPATNAAAPTEAGDTDDGAESDASTERPADTSNPARRNSGPSARTPRPGVRPKKRKR

SEQ ID NO: 10833 - protein, 117 aa, Helicobacter pylori J99
MTFEMLYSKIHRATITDANLNYIGSITIDEDLAKLAKLREGMKVEIVDVNNGERFSTYVILGKKRGKICVNGAAARKVAIGDVVIILAYASMNEDEINTHKPSIVLVDEKNEILEKG

SEQ ID NO: 10834 - protein, 620 aa, Helicobacter pylori J99
MGKVIGIDLGTTNSAMAVYEGNEAKIIANKEGKNTTPSIVAFTDKGEILVGESAKRQAVTNPEKTIYSIKRIMGLMFNEDKAKEAEKRLPYKIVDRNGACAIEISGKIYTPQEISAKILMKLKEDAESYLGESVTEAVITVPAYFNDSQRKATKEAGTIAGLNVLRIINEPTSAALAYGLDKKESEKIMVYDLGGGTFDVTVLETGDNVVEVLATGGDAFLGGDDFDNRVIDFLAAEFKNETGIEIKNDVMALQRLKEAAENAKKELSSAMETEINLPFITADATGPKHLVKKLTRAKFESLTEDLVEETISKIESVIKDAGLTKNEISEVVMVGGSTRIPKVQERVKAFINKELNKSVNPDEVVAVGASIQGGVLKGDVKDVLLLDVTPLSLGIETLGGVMTKVIDRGTTIPAKKSQVFSTAEDNQPAVSIMVLQGERELARDNKSLGKFDLQGIAPAPRGMPQIEVTFDIDANGILTVSAQDKNTGKSQEIKISGSSGLSDSEIEKMVKDAELHKEEDARKKEVIEARNHADSLAHQTQKSLDEHKTNLNENDANEIQNAINALKDCIKNDNATKAELEDKTKALTQAAQKLGEAMANKNNAEQPKKKDDDVIDAEVE

SEQ ID NO: 10835 - protein, 387 aa, Helicobacter pylori J99
MLQRIYLDNNATTRIDPKVKEIMDPFLRDHYGNPSSLHQFGTETHPAIAEALDKLYKGINARDIDDVIITSCATESNNWVLKGVYFDECLKKGKNHIITTVAEHPAVRSTCNFLESLGVEVTYLPINEHGSITADQVKEAITEKTALVSVMWANNETGLIFPIEEIGAICKEKGVLFHTDAVQAIGKIPVDVLKANVDFLSFSAHKFHGPKGIGGLYIRSGVGLTPLFHGGEHMNGRRSGTLNVPYIVGMGEAMKLAVEHLDYEKEVVGKLRDKLEEALLKIPDVMVVGDRVHRVPNTTLISVRGIEGEAMLWDLNRSNIAASTGSACASEDLEANPVMVAIGASKELAHTAIRLSLSRFNTEAEIDKTIEVFSQAAVRLRNISSSY

SEQ ID NO: 10836 - protein, 856 aa, Helicobacter pylori J99
MNLFEKMTDQLHETLDSAIALALHHKNAEVTPMHMLFAMLNNSQGILIQALQKMPVDIEALKLSVQSELNKFAKVSQISKQNIQLNQALIQSLENAQGLMAKRGDSFIATDAYLLANMNLFESVLKPYLDTKELQKTLESLRKGRTIQDKNDDSNLESLEKFGIDLTQKALENKLDPVIGRDEEIIRMMQILIRKTKNNPILLGEPGVGKTAVVEGLAQRIVNKEVPKTLLNKRVVALDLSLLVAGAKYRGEFEERLKKVIEEVKKSANVILFIDEIHTIVGAGASEGGMDAANILKPALARGELHTIGATTLKEYRKYFEKDMALQRRFQPILLNEPSINEALQILRGLKETLETHHNITINDSALIASAKLSSRYITDRFLPDKAIDLIDEGAAQLKMQMESEPAKLSSVKRSIQRLEMEKQALEMENKESNHKRMQEILKELSDLKEEKIQLEAQFENEKEVFKEISRLKMEMEGLKKEAERFKRNGDYQQAAEIEYSKIPEKEKKEKELQHKWETMQQNGALLQNALTENNIAEIVSQWTHIPVQKMLQSEKNRVLNIESELQKRVVGQEKALKAIAKAIKRNKAGLSDSNKPIGSFLFLGPTGVGKTESAKALAQFLFDSDKNLIRIDMSEYMEKHAISRLIGAAPGYVGYEEGGQLTEAVRRKPYSVVLLDEVEKAHPDVFNLLLQVLDEGHLTDSKGVRVDFKNTILILTSNVASGALLEEDLSEADKQKAIKESLRQFFKPEFLNRLDEIISFNALDSHAIINIVGILFENVQKKALERGINITLDEKAKELIAEAGFDRFYGARPLKRALYEMVEDKLAELILEDKIKENDSVAFVVENNEIVPKIK

SEQ ID NO: 10837 - protein, 360 aa, Helicobacter pylori J99
MFVDSVEIIIASGKGGPGMVSFRREKFVIKGGPDGGDGGDGGDVYFEVDNNTDTLASFRGTKHHKAKNGAPGGTRNCAGKKGEDKIIVVPPGTQVFVGDELWLDLVEPKERVLALKGGKGGLGNAHFKSATKQQPTYAQKGLEGVEKCVRLELKLIADIGLVGFPNAGKSTLISTISNAKPKIANYEFTTLVPNLGVVSVDEKSEFLMADIPGIIEGASEGKGLGISFLKHIERTKVLAFVLDASRLDLGIKEQYKRLRLELEKFSPTLANKPFGVLLNKCDVVENINEMTKDFCAFLNLEAQKLNAFDLEPYLGFLHPNLTSDFENNPNEQSALFVLPLSAVSALNTHALKFVLLKALQ

SEQ ID NO: 10838 - protein, 301 aa, Helicobacter pylori J99
MKTKAGFVALIGKPNAGKSTLLNTLLNAHLALVSHKANATRKLMKCIVPFKDKEGYESQIIFLDTPGLHHQEKLLNQCMLSQALKAMGDAELRVFLASVHDDLKGYEEFLSLCQKPHILALSKIDTATHKQVLQKLQEYQKYSSQFLALVPLSAKKSQNLNALLECISKHLSPSAWLFEKDLMSDEKMRDIYKEIIRESLFDFLSDEIPYESDVMIDKFIEEERIDKVYARIIVEKESQKKIVIGKNGVNIKRIGTNARLKMQEVGEKKVFLNLQVIAQKSWSKEEKSLQKLGYIYQRNRD

SEQ ID NO: 10839 - protein, 285 aa, Helicobacter pylori J99
MKIGWIGLGAMGTPMATRLRDAGLEVSVYNRTESKAAPLKEKGVAVYTSPIDLAAKVDLVFTMLSDKAAIDAVLAPKFWEQMSKKIVVNMSTIAPLESLSLEKIAQKHQATYLEAPVSGSVGAAKAGALLILAAGDEEVISKLKPVLAHLGSQTFYLGKVGQGTGAKLSINSLLAQMGVAYSEALLLAKRLGVDAESFLQIIGQSGMNSPLFQAKKGMWLQDNYPAAFSLKLMAKDIRLAKNEAGEAMKLPFLFQAEELYSQAEKSGLGGLDMAAVYHYLEKGEH

SEQ ID NO: 10840 - protein, 390 aa, Helicobacter pylori J99
MPYSSKVQSLSESATIAISTLAKELKSQGKDILSFSAGEPDFDTPQAIKDAAIKALNDGFTKYTPVAGIPELLKAIAFKLKKENNLDYEPSEILVSNGAKQSLFNAIQALIGEGDEVVIPVPFWVTYPELVKYSGGVSQFIQTDEKSHFKITPKQLKDALSPKTKMLILTTPSNPTGMLYSKAELEALGEVLKDTKVWVLSDEIYEKLVYKGEFVSCAAVSEEMKKRTITINGLSKSVAMTGWRMGYAASKDKKLVKLMSNLQSQCTSNINSITQMASIVALEGLVDKEIETMRQAFEKRCHLAHAKINAIEGLNALKPDGAFYLFINIGSLCGGDSMRFCHELLEKEGVALVPGKAFGLEGYVRLSFACSEEQIEKGIERIARFVKSKG

SEQ ID NO: 10841 - protein, 391 aa, Helicobacter pylori J99
MNEVVVVAAKRSAVGSFLGSLKNVGARQMGVSVLKDALNASSLKPSDVDSVILGNVLGAGLGQNIARQIQLDAGIPNDRNAFSVNMVCGSSMKAIQLAHDSIVLGCDEVVVCGGVENMSAAPYLSFDMREGKRMGNANMIDSMIHDGLWDAFNDYHMGITADNVAQAYHISREDQDAFALQSQLKARAAINAGKFQEEITPIEIANKKGVVVFKEDEYPRDTTLESLAKLKPAFKKDGSVTAGNSSGINDGASIIILCSAKKAQKLGLKTMATIKGFGLGGCSPDIMGICPSIAIKNNLKNIKMNLNDINLFELNEAFAAQSIAVLKELELNPNIVNVNGGAIAIGHPIGASGARILVTLLHEMKRSGHGVGCASLCVGGGQGLSVVVEQK

SEQ ID NO: 10842 - protein, 318 aa, Helicobacter pylori J99
MKARGFKTKMRGFKIFSGSAHPAFGKEVSKHLGFPLSKAVIGKFSDGEINIQISESVRGKDIFIIQPTCVPVNDNLMELLVMVDALRRSSANSITAVLPYFGYARQDRKAAPRVPITAKMVANLMQEVGIERIITMDLHAGQIQGFFDVPVDNLYGSIVFRDYIRSKALKNPIIASPDVGGVTRARYFANQMGLDLIIVDKRREKANESEVMNIIGSAKERDVILVDDMIDTAGTICKAALALKEQGATSVMALGTHAVLSGNAIKRIKESALDEVVVTNSIPLVQKCDKITTLSVASLFAEVIRRIYHNESVQSLFT

SEQ ID NO: 10843 - protein, 174 aa, Helicobacter pylori J99
MITTNKALFLDRDGIINIDRGYVSQKEDFEFQKGIFELLKHTKTLGYKLLLITNQSGINRGYYTLKDFEQLTEYLQESLLKELGFNLDGIYFCRHAPEENCACRKPKPSLILQAAKEHQICLERSFMIGDKESDMLAGLNAKVKNNLLLTQNPLKTPHSWIQCKNLKEMIDWIK

SEQ ID NO: 10844 - protein, 403 aa, Helicobacter pylori J99
MEILVLNLGSSSIKFKLFDMKENKPLASGLAEKIGEEIGQLKIKSHLHHNDQELKEKLVIKDHAIGLLMIRENLTKMGIIKDFNQIDAIGHRVVQGGDKFHAPVLVDEKVMREIGNLSILAPLHNPANLAGIEFVQKAHPHIPQIAVFDTAFHASMPSYAYMYALPYELYEKYQIRRYGFHGTSHHYVAKEAAKFLNIPYEEFNAISLHLGNGSSAAAIQNGKSVDTSMGLTPLEGLIMGTRCGDIDPTVVEYIAQCANKSLEEVMKILNHESGLKGICGDNDARNIEVRKEKGDKQAKLAFEMCVYRIKKYIGAYMVVLKKVDAIIFTGGLGENYSALRESVCEGLENLGIALHKPTNDNPGSALVNLSQPNTKIQILRIPTDEELEIALQAKEMVEKIKVV

SEQ ID NO: 10845 - protein, 519 aa, Helicobacter pylori J99
MQSLWIYPEDTEVLGAACKSLLKALKPRYQKIALFSPISGGCEGFGECESLSSLEVHSAIDKQKALELVSTAQEELLFETILKRYDELQSTHDFVINLGYAPKFFLNALLDLNTILAKHLNAPVVAVAQTSLDHLKAMHSHILKKEAPFAIGLFVGETLEKPHFLSASLCKQQCELEASAIENLLQTKSEIITPLAFQRSLEKKAKKQIKKVVLPESEDERILKAAHRLNLMGAVGLILLGDKEAINSQAKNLNLNLENVEIINPNTSHYREEFAKSLYELRKSKGLSEQEAERLALDKTYFATMLVHLGYAHAMVSGVNHTTAETIRPALQIIKTKPGVSLVSSVFLMCLDTQVFVFGDCAIIPNPSPKELAEIATTSAQTAKQFNIAPKVALLSYATGNSAQGEMIDKINEALTIVQKLDPQLEIDGPLQFDASIDKGVAKKKMPNSQVAGQASVFIFPDLNAGNIAYKAVQRSAKAVAIGPILQGLNKPINDLSRGALVEDIVNTVLISAIQAQDY

SEQ ID NO: 10846 - protein, 277 aa, Helicobacter pylori J99
MKTNGLFKMWGLFLVLIALVFNACSDSHKEKKDALEVIKQRGVLKVGVFSDKPPFGSVDSKGNYQGYDVVIAKRMALDLLGDENKIEFIPVEASARVEFLKANKVDIIMANFTRTKEREKVVDFANPYMKVALGVISKDGVIKNIEELKDKELIVNKGTTADFYFTKNYPNIKLLKFEQNTETFLALLNNKAIALAHDNTLLLAWVKQHPEFKLGITSLGDKDVIAPAIKKGNPKLLEWLNNEIDSLISSDFLKEAYQETLEPIYGDGIKPEEIIFE

SEQ ID NO: 10847 - protein, 405 aa, Helicobacter pylori J99
MLIVQKYGGTSMGSIERIHNVAQRVLESVKLGHQVVVVVSAMSGETDRLLEFGKNFSHNPNKREMDRIVSAGEWISSAALSMALERYGHRAISLSGKEAGILTSSHFQNAVIQSIDTQRITELLEKNYIVVIAGFQGADIQGETTTLGRGGSDLSAVALAGALKAHLCEIYTDVDGVYTTDPRIEEKAQKIAQISYDEMLELASMGAKVLLNRSVELAKKLSVKLVTRNSFNHSEGTLIVAEKDFKGERMETPIVSGIALDKNQARVSMEGVEDRPGIAAEIFGALAEYRINVDMIVQTIGRDGKTDLDFTIVKTQIEETKQALKPFLAQMDSIDYDENIAKVSIVGVGMKSHSGVASIAFKALAKDNINIMMISTSEIKISVLIDIKYAELAVRTLHAVYQLDQ

SEQ ID NO: 10848 - protein, 329 aa, Helicobacter pylori J99
MPILFDCNATAIQVLRDEASALLESVKQFQEPNDLEAIVKLILKSQEKGGKLVIVGVGKSALVAQKIVASMLSTGNRSAFLHPTEAMHGDLGMVEKNDVILMISYGGESLELLNLVSHLKRLSHKIITFTKSPTSSLSKLGDYYLSLKIKKEACPINTAPTTSTTLTLALGDVLMACLMRAKNFSQEDFASFHPGGLLGKKLFVKVKDLLQTTNLPLIAPSTSFKDALIEMSEKRLGSAILVNDNNELVGVLSDGDVRRALLKGLSLESEVKHFATLKPKSFKNLDALLLEALEFLERHKIQLLVCVDDRNKVLGVLHLHQLLELGLKA

SEQ ID NO: 10849 - protein, 408 aa, Helicobacter pylori J99
MQEIKLDIYATLVCMVLVLLLGRYVISKVKFLRDYDIPEPVVGGVLVAFFIMLARQFYHFGLQFDSSLKDPLMLTFFITIGLSADFKSLQKGGKMLAVFLLAVAGFVVCQNAVGISIASLLGVNPLMGLLGGSIALVGGHGTSAAWANFFTQPPYHFSSSLEVGMACATFGLVSGGIIGGPVAKYLISKYKLEPKDTKEKDTLEGVVSKGFETPKEQRLITASSFVETLALIAIALLVGTFLSHLMPKSFTLPTFVWCLFVGVILRNALSFFKIHSVFDREVSVIGNVSLSLFLAYALMSVNLLELLKLAVPLAVILSVQVAVMILYVVLVTFRVCGKDYDAAVLCAGHCGFGLGATPTAMVNMQTITNHYGPSHVAFIVVPLVGAFFVDIINALAIKGFLLLPFFPS

SEQ ID NO: 10850 - protein, 380 aa, Helicobacter pylori J99
MTIGLVKESMDLESRVALVPDDVALIAQKGVEVLVQNSAGANSGYSNEAYESVGAKIVDSKTAWGQDLVVKCKEPLEHEYPLLKEKATLFSYLDLAYQKSLCEMFINKKITSICTETIAGPKNDYPILAPMSVVAGRLAAHLVQHYLLALEHVKGFMGKGVMLGGLSGAQRAKIVVIGGGVVGMESAKVLSQMGAKVTILELDYAKLQNHPYYHLYDLEVLSVNEANIIQALNGAVGLVGAVLVTASQTPKVILRRHLKYMQKQGVVIDVACDLGGCIETIRQTSHSNPVYVEEDLLHYGVPNMPGIVAKTSSTAYSHASVPYLLYYLEHGLKGFLTANTKIVANTLGGLSAYNGYITQEGIAKAFNLAFKSPLEILKEL

SEQ ID NO: 10851 - protein, 482 aa, Bacillus halodurans C-125
MKKASTLPLFERLVQHDRGGPISCHVPGHKQGALFHKDACSYFQSILSLDVTELTGLDDLHDPRGVIAEAQALTARYVGAEATCFLVNGSTVGNLAMILGTLEPGDTVFVQRDSHKSVMNGLAMARVHPIFLSPSYDERTQLPTGITEQTLKQALIEHPNGKALILTYPSYYGVARSIRPLVQMAKEAGLYVLVDEAHGAHFPVGDPFPKQALEQGADVVVQSAHKTLPALTMGSYLHFAHGLHSKIKDSIREQLQILQSSSPSYPILASLDAARGFLEDLTNVKDTLDSIAEMNRRIEQVERLSVATFSPLPTDPLKTVITVEGATGFALQTELEKEGIYSELADDRHVLLMWGLTPLQKVRQEEIIDKMCRATKRLPALEQISKGCPLSLSWQAHTSLDLSYDEQKRYSIEEVAVEEAVGKVSGATVIPYPPGVPLLLKGEKITEPLIAQFQQLQEAGARFQGRPSEQQGLYVFTLEAMT

SEQ ID NO: 10852 - protein, 316 aa, Bacillus halodurans C-125
MANYGDPNLKVFTLNSNKGLAYEITERIGVPMGKSSVTRFSDGEVQINIEESIRGCDVFLIQSTAAPANEHIMELLIMIDAVKRASAKTINVVIPYYGYARQDRKARAREPITAKLVANLLETAGATRVLTLDLHATQIQGFFDIPVDQLMGVPILAEFFEKKGLDDVVVVSPDHGGVVRARKLADRLKAPIAIIDKRRPKPNVAEVMNIVGHIEGKTAIIIDDIIDTAGTITLAANALVEHGAKEVYACCTHPVLSGPAIERIKNSKIKELVVMNTIELEEEKLIDKITTLSVAPLMAEAIVRVHEHSSVSLLFD

SEQ ID NO: 10853 - protein, 400 aa, Bacillus halodurans C-125
MEEVVIIDAVRTPIGRYNGALRDVRPDDLGAIVLRALKERNPQVPIDEVEEVVFGNANGAGEDNRNVARMSTLLAGYPVQVAATTLNRLCGSGLDAVAYAARMIAVGEGEIVIAGGTESMTRAPYVMEKPGQSYMRGDQTLYDTTIGWRFVHPVMEETYGVDSMPETAENVAKTYSISRLAQDHFAYVSQMRAKEAMECGRLDEELVPVEIEDKKNGKYEVRTDEHPRPTSTMEKLNSLSPLFENGTVTAGNASGINDGAAAVLLMSRKKANELGLTPLASYIGAATAGVEPRIMGIGPVYATNKLLNRIGWTVNGLDLIELNEAFAAQALACIHELGLNQEVVNVNGGAIAYGHPLGASGARILTTLLYEMRRRGSRKGLATMCIGVGQGISVAVERID

SEQ ID NO: 10854 - protein, 237 aa, Bacillus halodurans C-125
MNVPVRSSDKDLLSDDLHHLLQQLSTRKKIWKDTYLFQEGMEAEELYLIQSGLVQIEKLTADGKEMTLRMCKANDIVGELTLFSEEAKYMLSAKVLSDGEVFVINKNKLEKELVENGALTFEFMKWMSTHLRKIQSKIRDLLLNGKKGALYSTLIRLANSYGIQRVDGILINIVLTNQELANFCAAARESVNRMLGELRKLGVISIEPSGKIVIHELDFLKNEIDCENCPIDICNID

SEQ ID NO: 10855 - protein, 578 aa, Bacillus halodurans C-125
MEKQQQTSLKPFFSLILSTNIPKVALTFGLIGSLITTLVGLTIPLLTREMVDGFSLESLNTLLIAAIIVVFILQAVLDGLSMYALAYVGQKIVARLRERMWFKLLRLPVNYFDKNTSGQTVSRVVNDTGIVKDLISQHFPQFVGGIITIIGAVIILFIMDWKMTLLMFIAVPITVAVMVPLGMRMSKISRGLQDETANFTGNVQQTLSEIRLMKASNAEQTEEKKGLTGIEKLFSFGLREGKIFALIAPLMYLVVMVVIVIIIGYGGIRVAEGTMTTGSLVAFLLYLFQIIFPITSFTMFFTQLQKAKGATERIIEILDIEEENGQQGLEMDISNKAIHVKNVSFAYNEEEPVIQKVSFDVEPGTMVAFAGPSGGGKTTMFGLLERFYEPTSGEILIGDTSIQELSMYSWRKQIGYVSQDSPMMVGTIRENLCYGLEDRDDIDDDRLWEVAKMAYADQFISEFPKGLDTEVGERGVKLSGGQRQRIAIARAFLRDPKILMMDEATASLDSQSEGIVQQALTRLMEGRTTFVIAHRLSTIVNADKIIFIEKGQITGIGTHQELVQTHDLYREFAEQQLT

SEQ ID NO: 10856 - protein, 611 aa, Bacillus halodurans C-125
MANPLTEPFRYRKIPINETEGSEKKKVRPAQASKTLRRIWTYLVNYRGRLLLVFLAVLLSSVLGLLGPFVIGMAIDHYLVEGDTSSLFKVMIGLLAIYAVYSLSMWLQQVWMIGIAQQTVYSIRSDLFHHFHRLPIPFFDKKQHGELMSRMTNDIENISNTLNSSVIKIFSSVLTLVGIMIVMLWLSPLMTVITMTVVPLMVFGLKWITRRTAVFFKQQQKALGDLNGYIEETVSGQSVIQAFSREGAAIATFSEKNRELKTTSFWAQTYTGFIPKVMNVLNSLNFAVIAGVGGILAMRGSITIGIIVIFAEYARQFTRPLNDLANQFNMLLAAIAGAERVFDILDEQEERHHDQTKQVKSIKGEVSFEQVSFSYEQKTTLNNLSFHVNPGETVALIGPTGAGKTTIIRLLSRFYEWDGGAIYVDGEDVTTWDRESYRRHLAFVLQESFLFQGTIRENIRYGRLEATDEEVEAAAKMANAHSFIMRLPDQYDTVLDSDGSGISQGQKQLLSIARAMIANPSILILDEATSNIDTITELNIQEALHRLMNGRTSFVIAHRLNTIQHADVILVLEKGTLVEQGSHEELMAKKGVYYDMIDRGQQTLAEGEVIR

SEQ ID NO: 10857 - protein, 385 aa, Bacillus halodurans C-125
MIKPSRRLAPLATSVFTELANMKAAYKQDGRELIDLSIGSPDLPPPDFVVQKMNAYVSNPNQYGYAITGLAAFHEAVAQFYQRRYQVNVKPHQVLSLMGSQDGLAHLALAYVDAGDLLLAPDPGYPIYAASAHIAGAELYTYPLNEENQFMFDVETLPDDVKQKAKLMIVNYPGNPTAAMADEAYFEKLVAFGIEHNILIVHDYAYSELLFDQREALSIFSVPRAFETAIEFNSLSKSFNIAGARIGYAIGAESILQPLAALKSHLDYGVFLPVQYGAIEALEHGDAFLETQRELYEKRRNTFVEALQLNGWTVSKPGGGMFIWAKIPDDGRDAMSFVKQAMEHAGVIVTPGHAFGKEGEGYVRMALVQPETELRKAANQLAQIL

SEQ ID NO: 10858 - protein, 584 aa, Bacillus halodurans C-125
MVTLESIRRYLLFVRPYWKQIFITIIIGLLKFGIPLLIPLLVAYIIDGIIFAEQMTNEEKFSALFTVMGGIFFIFIVLRPPIEYYRQYFAQWIGNKILYDIRDHLFTHIQKLSLRFYSNRKVGEIISRVIHDVEQTKTFVMTGLMNIWLDMFTIIIALAIMFSMNAWLTLVAIAMFPFYGFSIKYFYAKLRHLTRVRSQALADVQGHLHERVQGMSVIRSFALEDYEQTQFAKRNGTFLNRAIDHTKWNAKTFAVVNTVTDIAPLLVIFVAACFVINGELEVGAMTAFVLYMERLYNPLRRLVNSSTTLTQSIASMDRVFEFIDEKYDIVDKEGAVKLEEVHGDVTFDHVSFSYEKEETPALKDVHFHVKRGETVAFVGMSGGGKSTLISLIPRFYDVSSGRILIDGHDIRDYQVRSLRDQIGMVLQENILFSDSVRMNILMGKPDATEEEVIAAAKAANAHDFIMNLPNGYDTEVGERGVKLSGGQKQRVAIARVFLKNPPILIFDEATSALDLESEHYIQEAMEKLAKNRTTFIVAHRLSTITHADRIIVVENGEIVESGTHDELMSCNGVYKKLFEVQNLD

SEQ ID NO: 10859 - protein, 395 aa, Bacillus halodurans C-125
MPKVGGEHEYVHRAMGGKAAFLASWAITLGYVSVVAFEAVALPTVIEYIFPNYQVGYMWTIAGWDVYASWVLVGVAGSIFVIAINYFGLKPAAKIQVILTLSIILIGLMLVFGSAVGGEAANFEPLFVNGATGIMAVLIMVPFLFIGFDVIPQTAEEANIPARDIGKLLIFSVFCAIVFYILIAIGVVSALDANALEVTQLATADAMSALFGSTFFGHLLVVGGVAGIMTSWNAFIIGGSRVMFAMAQSGMLPKWFGRLHPKYRTPSNAILFIGGLAVLSPLLGRPALVWFVDSGGPAIVIAYLMVAIAFLLLRKNEPAMERPYQSGRSSIVGWIALVLSIGFLIIYLPGMPAALTGPEWVIFVGWFLIGLYFFVQMSKGKYKENENEKTSDQAM

SEQ ID NO: 10860 - protein, 411 aa, Bacillus halodurans C-125
MSTATLSQETKQIVKATVPILAEHGEAITKHFYKRMFSHHPELLNIFNQTHQKQGRQPQALANSIYAAAEHIDNLEAILPVVSRIAHKHRSLNIKPEQYPIVGENLLAAMREVLGDAASDDVLEAWREAYELIADVFIQVEKKMYEEASQAPGGWREFRSFVVEKKQRESATITSFYLKPEDGKALASYKPGQYITVKVTIPGHEHTHMRQYSLSDAPEKGYYRITVKREEGDGDLPPGIVSNYLHQHIHEGDVLEITAPAGDFTLQEEGERPIVFISGGVGITPLMSMFNTLMQRGVKREVIFIHAAINGFYHAMHDHLAQTASQQENVHYAVCYERPTPGDRMNPFMKKEGFIDESFLRSILHDREADFYFCGPVPFMKTIAQILKDWDVPEQQVHYEFFGPAGTLASS

SEQ ID NO: 10861 - protein, 395 aa, Bacillus halodurans C-125
MKTFEQAKMMKRLPEQFFAKLVEQVQEVKKDHDDIINLGQGSPDLPTPEHIVEKLQEAAENPLYHRYAPFSGYPFLKEAVSKYYEREYGVSVDPKTEVAVLGGAKTGLVEVSQCFLNPGDMALVPDPGYPDYWSGIAIAGGSMYGMPLKKELGFHPDLRGIPAPVLYEAKLMFLNYPNNPTGAVATEELFAEAIELAEEYDICVVHDFAYSAIGFDGQKPLSFLQVEGAKNVGIEMITLSKNYNMAGWRIGFAVGNPSVIKAIETLQDHYFCSLFGGIQAAAAHALLSDQSNVTTLVQTYEERRNALVKAARAIGWDVEAPKGSFFAWFPVPSGFTSEEFATYLLKKARVVVAPGKGFGEHGEGYVRVALLADIAKLEEAMGRVGKLDVFSNKRG

SEQ ID NO: 10862 - protein, 581 aa, Bacillus halodurans C-125
MDTFKRLAQFYWPYRRYFYWSLFAMGVMTLMTVLYPIILQFTIDNAVIGGRYDLIPWLALALIIVMGFKGVMVYIHQYLGDLFGVTAVYRLRNSLYEKLQYLPFRYYDNAKTGDLMSRLTGDVETFRFFLSFGFAQFIQFILLVSFSMGVMLYYSVPLTLATMCTLPFLAIVVAKFDRRVHPGFRDIRKSLAKLNTKVQENVSGMNTVKALSQEDEEVSRFEDRNVDYRQKHLDIARVWGNYFPLMEFIGNLSAVFLLSFGGYLVITGSMQTGQLVAFFSLVWYIIGPIMNLGFIINTFSQSKASGERLLEILDEENRVDEGKDERTSLQGSVTFRDVCLNYRGAETPALQNVSFEAPAGKTIGLVGATGSGKTSIVQLVNRFYERTSGEILIDGKPIESYPLETLRSQIGVVLQESFLFSSTIRDNIAYGRPDVSMKEIIAAARRAQAHDFIAELPDGYDTVLGERGLGLSGGQKQRIAIARAILMNPSILILDDATSAVDMKTEHKIQAAFREVMKGRTTFIIAHRISSVKQADEILVLDGGKVCERGTHHTLLQNKKGLYRRIYDIQSKDQEYVLQHA

SEQ ID NO: 10863 - protein, 427 aa, Bacillus halodurans C-125
MFVDKVKVYVKGGDGGNGMVAFRREKYVPDGGPAGGDGGKGGSVIFKVDEGLRTLMDFRYQRHFKADRGEHGRPKNQHGKNAEDKIVRVPPGTTVIDEQTGQVLADLTHHGQEAIIAKGGRGGRGNTRFATPANPAPELSENGEPGVERDVILELKVLADAGLVGFPSVGKSTLLSVVSSAKPKIAEYHFTTITPNLGVVRVDDGRSFVLADLPGLIEGAHEGIGLGHQFLRHIERTRVIVHVIDMSALEGRDPYDDYVSINEELKAYNLRLMERPQLIVANKMDMPNAAENLERFKEKLTDDHPIFPISALTRDGLQPLLRAIMDTIETTPEFPIYEETETESRVLYKHDKEQDPFVISRADDGAYVLSGAEIEKLFKMTDFSRDESVRRFSRQLRHMGVDEALRQRGAKDGDLVRLLEFEFEFIE

SEQ ID NO: 10864 - protein, 375 aa, Bacillus halodurans C-125
MIYLDYCATTPMSDYVKDVYVTVASQFYGNPNSLHDVGYEASNILEQCKRQIANLLHIDPAGIFFTGSASEANFLTIVSLALAHRRKGRHLITTKCEHPSVLSTFRYLESQQFDVSYVPVNRYGQVSVDALMGTIREDTILVSIAHSQSVLGTIQSLETFAEPLVTYDILFHSDCTQSIGKVDVPIRQLHSLTMSGHKINGPKGIGLAYVDPAIQWEPFLSGVTQQSGFRQGTVDIPSVAAFTAAIEESFQHRTAYDQHITKLHHQFKEKMMEWPMILEGHPSNRLKHHFGLRLHGMEGQFVMLEANRAGFAISTGTACSSSHHEPDPVFAAIGRTKEEADQFFRVSFGISTTEQEFNAFIDFLQQLIDRKGEPM

SEQ ID NO: 10865 - protein, 386 aa, Bacillus halodurans C-125
MEPIYLDHAATSPVHPEVIQAMLPYYEEQFGNPSSIHQFGRRARQGVDEARGTIARLLQADPSEFIFTSGGTEADNLAIFGYAYQHRGKGNHIITSQVEHHAVLHACQELEHQGFEVTYVPVDQTGRVSVEDVRQALRDDTILVTLMYGNNEVGTIQPIAEIGALLQDHQAVLHTDAVQAFGAISIELDHLPVDMLSVSAHKINGPKGVGLLYVRDGIVLKPALYGGEQERKKRAGTENVAAIIGFAKAVEIAIANREERQKAYFDYCQTFFDQFQQEGVQFVMNGHQTWRLPHIFNVSFPGVHVEALLVNLDLAGIAASSGSACTAGSIEPSHVLVAMHGSDSELVTSGVRFSFGLGNTKEHVQWAAKETAKIVKRLQDQEAFIR

SEQ ID NO: 10866 - protein, 207 aa, Bacillus halodurans C-125
MHSLQQLKSQLLSYHAGILGEEYVKKSAVFIPLVEKDDGVHVLFEVRAHTLKQQPGEICFPGGRIDPEDASPEEAAIRETSEELGIPSSVIAPITSLDVLVTPFRGIIYPVIGSIPHKNDYPLNQAEVDHVFTVPIDHFISHPPEQYRINVHFEPGAGFPIERIANQSAYQKSTRQITESFYYYQSYVIWGLTAKILRHVITILKPS

SEQ ID NO: 10867 - protein, 488 aa, Coprinopsis cinerea
MGSAQSKQDGNPDRLKRISAAFKKPRSSEESTRPQAPPPPPVAAPAAQVSDAGSANESHLKKGGDNDERAVMHDSVQRNAPHPALKQPQQPQNQQGQPMPATVPCQYRTGKTLGSGTYAIVKEAIHITTGKYYACKVINKKLMEGREHMVRNEIAVLKKISSGHPNIVTLHDYFETAHNLYLVFDLCTGGELFDRICAKGNYYEADAADLVRTIFKAVEYIHNSGVVHRDLKPENLLFKTQAEEAAIMIADFGLSRVMEEEKFSLLTEICGTPGYMAPEIFKRTGHGKPVDVWAMGVITYFLLAGYTPFDRESQQQEMEAIIAGDYKFEPAEYWENVSETAKDFVRTCLTIDPNKRPTATEALAHKWLADKEPHFVANPADGTPADLLPNVKRAFNAKRAWKKAAYGIRAMNRMASLASGGLTNPEAALMRENLDKYKAESEKEDIQTASITYMPQHTPVTAEFPAGSQKSATDDELQKKLANATIQG

SEQ ID NO: 10868 - protein, 367 aa, Bacillus halodurans C-125
MNERDIICAGCGVKIQTESKEMLGYTPPSALKRDVIICQRCFRMQHYNEVQDVSLTDDDFLKILHTIGERKALIVKLVDIFDFNGSWLPGLHRFVGGNDVLLIGNKVDLLPKSVNRNRMINWMRKSAKDLGLKPIDVALISGEKGIGVKEVASLIDRLRKGKDVYVVGATNVGKSTFINKMIQIFGGDEEQMITTSHFPGTTLDMIDIPLDDGKTLYDTPGIINHHQMAHYVAKNELKLITPKKEIKPKVFQLNEEQTLFFGGLARFDFVKGERTSFVCYVSNDLFIHRTKLEKADELYEKRLGDVLTPPEDPQHLPSLVKHEFTIRVQKVDVVISGLGWVTVNGTNVKVCAYAPEGVGVSIRESLI

SEQ ID NO: 10869 - protein, 614 aa, Bacillus halodurans C-125
MSKIIGIDLGTTNSCVAVMEGGEATVIPNPEGNRTTPSVVAFKDGERQVGEVAKRQAITNPNTVISIKRHMGTNHKENIEGKEYTPQEISAIILQKLKSDAEAYLGEEVTKAVITVPAYFNDSQRQATKDAGKIAGLEVERIVNEPTAAALAYGLDKEDDQTILVYDLGGGTFDVSILELGDGFFEVKATSGDNKLGGDDFDQVIIDHLIAEFKKENGIDLSQDKMAMQRLKDAAEKAKKDLSGVTSTQISLPFITADATGPKHLELTLTRAKFEELSSHLVERTLGPTRQALQDSGLSASEIDKVVLVGGSTRIPAVQEAIKNLTGKEPHKGVNPDEVVALGAAVQAGVLTGDVKDVVLLDVTPLSLGIETMGGVFTKLIERNTTIPTSKSQIFSTAADNQPSVDIHVLQGEREMAADNKTLGRFQLTDIPPAPRGVPQIEVTFDIDANGIVNVKAKDLGTNKEQSITITSSSGLTDEEIDQMVKDAEANAEADKKRREEVELRNEADQLVFTTEKTLKDLGDNVDEAEKTKAEEAKEKLKKAIEANNIDEIRTAKEELQQVVQALTTKLYEQAAQQAQQAQSAEGDQGTAEKGQDDNVVDADYEEVNEEDKK

SEQ ID NO: 10870 - protein, 304 aa, Bacillus halodurans C-125
MINQKEGFKSGFVSIIGRPNVGKSTLLNHVIGQKIAIMSDKPQTTRNKIQGVYTSEDSQIVFIDTPGIHKPKHKLGDFMMKVAQNTLKEVDLILYVVDGAEAFGPGEEFIIERLKEAKTPVILVINKIDKVHPDDLLSLIETYRHKHEFEEVVPVSALQGNNVPTLLLEITKHLSEGPQYYPSDQVTDHPERFVIAELIREKVLHLTREEIPHSIAVVIEQIKRRQHQDTVYIGATIVVERSSQKGIIIGKQGKMLKEVGQQARADIEALLGSKVFLELWVKVQKDWRNKPQHLRDYGFREDEY

SEQ ID NO: 10871 - protein, 566 aa, Bacillus halodurans C-125
MKEGNYTYTTEKPGSVFSISAVLIGLFVLWGAVSPSSLEWAAGIGLGWMIENFGWFYMLTTAFFVIFSIVIAISPYGRLRLGKQNDRPEYSWYSWIGMLFAAGIGVGFVFWGVAEPVLYYLDTPVGYIPGTREAAIAGLRYGVYHWALHPWAIFSIVGLTLAYVQFRKGRPALISSAFYPLFGEKVNGFAGRSIDILAVIATCTGVATTFGLSAMQITGGLSYISSIPNSVWTQLTIIAIVTCLFMISAGKGVNKGIKTLSNINLAVAAILLVFVIAVGPTLFIAENIVTTLGGYISNVIPMSLTMTPFYESEWLGTNTIFFWAWHIAWAPFMGLFIARISRGRTIREFMAGVLIVPSLLALIWFTTFGGTALNLEMYGPGGIAELVTSQVELALFATLGELPLSAVTNVIAVLLILIFFITSADSASYVLGAMTSKGSLEPKLSVKMVWGFLIAGTASVLLLSGGGGLQALQTASIIAALPFAVIMIMMIISLLFMFAKDDRAERKQKQTKQLSTLKEEIRDEMYDDMKQEVYEEVKEQVYEDVYEEVKEEVKDEILDELDQESK

SEQ ID NO: 10872 - protein, 456 aa, Bacillus halodurans C-125
MKVTKFGGTSVASAEQIRKVATIVADDVERKIVVVSAPGKRHSSDTKVTDLLIRLGETYLEKGYANEELEAVLRRYEEIAKGLELGQEIIDQIANDLHTRLTFNQSNPGAFMDQLKASGEDNNAKLIAAYLQTKGMNAVYVSPKEAGLLVSDEPGNAQVLPEAYDHLKKLRERDEMIVFPGFFGFSPDGALVTFPRGGSDITGAILAAGVKAELYENFTDVDSVFAANPNVVESPAQIRRMTYREMRELSYAGFSVFHDEALIPAFRQKIPVCVKNTNNPSSPGTMILAEREYFLNPVIGIAADKGFATIYVRKYLMNREIGFGRRLLQIIEDEGLSYEHIPSGIDDASVILRQEQLTDEIEHRILARIKEELCVDDVFVEKDFAMVMIVGEGMHNTVGISARATAALARAHVNIEMINQGSSEVSLVLGIHEKDADAAVRELYEEFFGGAEETVQ

SEQ ID NO: 10873 - protein, 615 aa, Bacillus halodurans C-125
MCGITGWVDWRRNLQNETETIKQMAETQTHRGPDDLNVWTEKHAALGHSRLIVVDPEGGCQPMMRERNGKRYTIVYNGELYNTEDLRKELIVKGYQFQGHSDTEVLLVSYIEWGYQCVEKFNGIFAFAIWNDKDQSLFMARDRLGVKPLFYTVRHGFLLFATEIKALLAHPEIEPVLTEEGLSEVLGLGPSRSPGNGVFDDIQELRPAHLLTYDRNGAKVSRYWRLKSMAHSEDAMETAAHLRDLLEDTVERQLFADVPVGMFLSGGVDSSALTAIAALIYEREGKGLIRTYSIDYDENDKYFKANDFQPNADGPWVEKVSTTFRTNHHNAVISIEELANQLKRAVELRDLPGMADVDSSLYWFCKQIKKDVTVGLSGECADEIFGGYPWFHKPEVMNFNGFPWMRSADERQELLHERWRQKLNLPKYVHDRYKETIAETPRFEEDTPEEARRREISYLNMVWFMTTLLDRKDRMSMGASLEVRVPFSDHRIVEYAWNIPWEIKQFGGREKGILRKALEGILPDEVLYRKKSPYPKTHHPKYTKMVQQEMERILGQSDSPLFDVVNRKKLKELTETGGKALTTPYFGQLMTGPQLLAHFIQMEHWLKHYNIKLIG

SEQ ID NO: 10874 - protein, 540 aa, Bacillus halodurans C-125
MIEQAIADKSQTENKAIYRILVSDAMSEQGLSPLLNDPRVECVQQNVADADDLHEYDALLVRSATTVTEELMEKMSSLKIIARAGVGVDNIDIDAATKHGIVVVNAPDGNTISTAEHTFAMICSLLRKIPQANASIKAGEWKRKAFQGTELRGKTLGIIGFGRIGSQIAKRAKAFEMTPYVFDPFLTKARAEKLGVTVASLDDVLQVADIITVHTPLTKETKGLLGMKNIGKTKKGVFLINCARGGIIDEEALKHYLREGHIAGAALDVFEEEPVADEELLAFDNVIATPHIAASTKEAQLNVAEQVSQEVLHFLEGNPVSNSINLPTLSKEVYEKVKPYYELTKKMGFLLSQCMKTPVQEIEVRYGGNVADIETSITTRSLMAGFLSPRVDAGVNDVNAGLIAKERGISFTEKHSSNQTFGYANIIHAVVHGEERTFEVHGTFIKEYGPRIVKINGFNVDFVPEGHLIYIQHNDRPGVIGKMGQLLAEHNVNIATMQVGRQEEGGDAIMMVAVDKVATDEVIEALKAVDEIHFADRIEL

SEQ ID NO: 10875 - protein, 127 aa, Bacillus halodurans C-125
MFRTMMKAKLHRARVTESNLNYVGSITIDEDIMDAVDIVENEKVQIVNNNNGARFETYVIKGPRGSGVFCLNGAAARLVQEGDVIIVISYALVAEENVKEHQPKVAVLNESNQIVEMLGTEPASTVL

SEQ ID NO: 10876 - protein, 395 aa, Bacillus halodurans C-125
MELAKRVSTLTPSSTLAITAKAKELKEQGHDVIGLGAGEPDFNTPQYIIDAAVRSMEEGHTKYTPSGGLPKLKEAIIEKFKQDQGLTYTAKEIFVGTGAKHVLYTLFQALLNEGDEVIIPSPYWVSYPEQVKLAGGEPVFVEGKESNDFKLTPAQLEPVLTDRTKAIIINSPSNPTGSLYTQEELAALGEVCLKHNVLIISDEIYEKLVYDGAKHTSVAEISPQLKENTVVINGVSKSHSMTGWRIGYAAGPEALIQAMTNLASHSTSNPTTSAQYGAIAAYTEDDGSVEKMRVAFEERLHTIYDKLVAIPGVSCVKPKGAFYLFPNVEEAAALTGHETVDDFVKVLLEEEKVALVPGSGFGAPDNVRLSYATSLELLEAAIDRIFRFVEAKRSK

SEQ ID NO: 10877 - protein, 319 aa, Bacillus halodurans C-125
MKGYPFLDKANAPFVDRHVTKAGEIFYPWDGKRIDGFGLIGAPLSKSSISHSGASFAPTVIRKCLHAFSTYSVEEDLDLAQLKLTDLGDITMHVTDIVGSQARIEETMTKLLENEQNWQPIVLGGDHSISFPSIKAFASAKGTIGVIQFDAHHDLRNLEDGGPCNGTPFRSLLETGSLVGEHLVQIGIRDFSNSYPYRKYAEKHGVKVYTMKDVNARGLLTILDEAVAKLKRSVDVIYVSVDMDVLDQAHAPGCPAIGPGGMDSTTLLQGIFHLGKDSLVQGMDIVEVDPTLDFREMTSRAAAHVILNYLKGKCIKSIG

SEQ ID NO: 10878 - protein, 392 aa, Bacillus halodurans C-125
MKDVVILDGARTPFTSFGGSFREVSAIELGVAAAKEAIKRANVDPEEVDQTIVGNVIQSSSDAILMGRHVGLKAGVRTETTGLTINRLCGSGLQSILTAAESIRLGNSEVALAGGAENMSQIPHVIRGARWGLPLGQAKMEDYLWEALYDPYCDCTMAITAENLAEQYQITREEVDMFALRSHRLALESMRDGTFAKEIVAVNVKTKKGERMIDKDEHPRETTLEKLRNLVPRFKESGVVTPGNASGINDGAAMMIVSSMDYAERRNLKPLARLVSYAVVGVEPSIMGIGPAPAIQEALRQASMKIEDLDLVEINEAFAAQYLACQQELDFNPDIGNVNGGAIALGHPLGASGARITLSLIYELARRNKKYGVSAVCIGGGQGIAAIWERLH

SEQ ID NO: 10879 - protein, 222 aa, Gossypium barbadense
MAPQDKNASKTLKKANGTGSTSSQEVHFRGVRKRPWGRYAAEIRDPGKKSRVWLGTFDTAEEAAKAYDAAAREFRGPKAKTNFPLPDETNCYKGQNQQSPSQSSTVEESGSPTVERGVNTLSGAVGRFPFACHQQLALGGGVANGGISGVTRSRPVLFFEALGGAGVVGQVYPVRFDPVGVQLGMGFASVVRSEPDSSSAIHCKARRPGLALDLNLPPPVDA

SEQ ID NO: 10880 - protein, 394 aa, Bacillus halodurans C-125
MTEEVVIASGVRTPIGRFGGHLKDLKAPTLGALVISEALHRAGVLNEQVDEVIMGNVLQAGLGQNPARQAALQAGLPETVPAMTINKVCGSGLKAVHLASQAIACGDAEIVVAGGMENMSQAPYLAVGARNGYRMGHHQLIDSMIHDGLWCAFNDYHMGITAENLCEQYGLSRTELDEFSAWSQEKAVQAIESGRFKDEIVPVDIPQRKGEPIQFDTDEYVKRGTTTETLGALRPAFKKDGKVTAGNASGINDGAAAVVVMSKEKAVELGIKPLVTVRANATAGVEPRIMGIGPVPATKKALTKAGLTMDDIDLIEANEAFAAQSLAVAKELSFAEDRLNVNGGAIALGHPIGASGTRIFVTLLHELLRRGETYGLATLCIGGGQGVATIIERA

SEQ ID NO: 10881 - protein, 278 aa, Datura metel
MGRAPCCEKMGLKKGPWTPEEDQILISYIQSNGHGNWRALPKLAGLLKCGKSCRLRWTNYLRPDIKRGNFTREEEDSIIQLHEMLGNRWSAIAARLPGRTDNEIKNVWHTHLKKRLKNYQPPQTSKRHCKNNNDSKAPSTSQIALKSSHNFSNIQEDINGPGPGPNSPQRSSSEMSTVTADSLAVTMGITNGGGHMDSSENFIPEIDESFWTDDLSTADNSNFNMVGSGGEELQVQFPFHAMKQESVEMDVGAKLEDDMDFWYNVFIKSGDLLELPEF

SEQ ID NO: 10882 - protein, 403 aa, Bacillus halodurans C-125
MNERISKGSAYMIAKEIEQNLTQSSWIRKMFEEGQRLKSIHGTENVFDFSLGNPIIDPPASYFEQLRAYANAPIQGGHSYIPNQGLPEARQKVAEHMNGRFNTNITAQTVTMTSGAAGALNVALKSIMNPGDEVIIFTPYFAEYKFYVGNANGVAVYCPLAEDFTFDFNELEKAISPKTKAIILNNPHNPTGQLIPQSDLERLNQYLVAKEQEWGTEIHVLYDDPYSQLIYDGNVPNPFAAIERLFYISSFSKDLGLAGERLGYLAIRPDFPSVEQYMAAFVFANRTLGFGNATVTVQRMISKMDTLTQEQHEYKKRRDAMVQVLEDAGFEFVYPKGGFFIFPKSPIADDTKFCQVAAEEFQLLVVPGIGFGRAGHFRLSYSVSMEQIERSAPVLKKLKSYFS

SEQ ID NO: 10883 - protein, 231 aa, Bacillus halodurans C-125
MERRVLVVDDEKKMQVLITVCVSEAGYLVQTAASGLAAMDRLKAEPFDLVLLDIMLPDVDGFSLIAQLRHLQEDVAIIMLTALGETEHIVRGLNEGADDYIVKPFEPDELNARILSVLRRKGGLASRKGEEKQLKVNEKAHDISFAGQSLGLTKTEYRVLHRLLSNPGRTYTREQLLDLAWDRQVEIYDRNVDAHIKNIRDKLEKVGADSTVIQTVWGVGYKYVEHEGINQ

SEQ ID NO: 10884 - protein, 522 aa, Bacillus halodurans C-125
MGEHFLLEMVDITKEFPGVKALDRVQLKVRKGSVHALMGENGAGKSTLMKILIGMYKPNEGKIIFDGEEVTFNSINDALDKGISMIHQELSPIPEMTVAENIFLGREPTFGKSGLVDNKKLIEMTRNLLESLEINIDPRKKMGELSIANTQMIEIAKAISFHSKLVIMDEPTSAITEKEVAQLFKMIESLKKKGVGIIYITHKMSELDEIADDISVFRDGKYIGTDTAKNLTRDDLIKMMVGRELNQIFDKPEPKLGEVILSVKSLTKQDYFEDVSFEVRKGEIVGFAGLMGSGRTEVLETIFGVKEAESGEIFVNGQKARIKSPQDAVKNNMGFLTEDRKLTGLFLPLSVRENMITVNIDKYINMGWLNGKRVKKDCEQQKQKLYIKTPSIEQIVENLSGGNQQKVLLARWLLKNPDILFLDEPTRGIDVGAKSEFYNLIFELASQGKAIVVVSSEMAEILGLCDRILVMHEGKVTGELTREEANQEKIMQYATGQAKMAKKLHVHNNFEQTVTANKIEIG

SEQ ID NO: 10885 - protein, 378 aa, Bacillus halodurans C-125; identical to SEQ ID NO: 451

SEQ ID NO: 10886 - protein, 411 aa, Bacillus halodurans C-125
MKIIIQKFGGTSVKTAEVREMAAKHVEKAVEGGYKVVVVVSAMGRSGDPYATDTLLQLVDTKTIAKREQDLLVSCGEIISSVVFTELLLKKGIQATAMTGAQAGFRTNEEFTNAKIVDMKVDRLKKTLVHQDVVVVAGFQGQSPTGETTTLGRGGSDTSATALGAALDAEWVDIFTDVEGIMTADPRIVSEARPLDTMTYNEVCNMAYQGAKVIHPRAVEIAMQAKIPIHIRSTYSDGKGTLVTSMLTEAGARDVQDRIITGIAHMSGVTQIKVHAKDGEFDLQEKVFRAMAAEKISVDFININLTGVVYTVMDEVADRAIEVLRELGFDPEVKRHCAKVSAVGAGMTGVPGVTAKIVAALSQENIRILQSADSHTTIWVLVSEDDLTKAVNALHRMFHLEQSEQTKQKQV

SEQ ID NO: 10887 - protein, 299 aa, Bacillus halodurans C-125
MSQKVGFVGLGTMGLPMTKHLVDKGFETYVKSRSRGPIEEAIQYGAIEVESYKELMETADIVMTCLPLPETVIDVYEGEDGLIAGLSQGKILIDHSTVDRETNVRVAEQIKEKGGAFLDAPVSGGPMGAKAGTLTIMCGGEADSFERSKEVLGAYGDYIVHVGPIGSGTVVKLANNMVIGVHQAVLGECYLFVEKAGVDPAIAYEIIKRSAGFSKSMEWSVDAILDRAFDPRFSINLLHKDIGLALKLGEQLGIPLEMVEKGEERVRAAKEQYGHEDVSAIIRPLEEKLGLELRRKSSS

SEQ ID NO: 10888 - protein, 491 aa, Bacillus halodurans C-125
MSRQEQTPLFSGVVAHAKHNPVQFHIPGHKKGAGMDPAFRSFIGDNALSIDLINIGPLDDLHHPHGIIKEAQELAAEAFGADHTFFSVQGTSGAIMTMIMSVVGPGEKIIVPRNVHKSIMSAIVFSGATPVFIHPEIDPLLGISHGITIEAVEKALDAHPDAKGLLVINPTYFGIAANLKKIVELCHSRDVPVLVDEAHGVHIHFHEALPLSAMQAGADMAATSVHKLGGSLTQSSILNVREGLVSAKRVQTIISMLTTTSTSYLLLASLDAARKHLATNGRDLIGYTIQLADQARDQINAIDGLYCVGKEILGTIATYDYDPTKLIISVKNLGITGYDAEVWLREHYQIEVELSDLYNILCIVSFGDTEREMDLLVKALSELADLHKHGICERSPVSVYVPNIPTLAMSPRDAFYAETEVVPFEDSVGRTIAEFIMVYPPGIPILIPGEIITESNLAYIRENNRAGLPVQGPEDDTFRTLRVIKEHEAIR

SEQ ID NO: 10889 - protein, 504 aa, Bacillus halodurans C-125
MGKYKVFIISVAIAAIFIAWGLIAPKNLAAVTKVIDSFILNELGWFYLLSATGFLAFAIFLIFSKYGNIRLGKQEEKPEYSYLTWFAFLFTAGMGIGLVFWGVAEPVYHYFDPPIAVPETAQAAGEAMRYSFFHWGLHPWAIYTIVALAIAYFTFRKGESGVLSSSFRPLIGDRVEGWIGTVINVIVVFATIFGVATSLGFGAAQISGGLNHLVPAVGDYSPYMVQLIVIFVVTILFMVSSQTGLNRGIRHLSRINIVLATLLMLLVLILGPTSYLLGVFTQTLGSYIQNLPGMSFRLDVYNPETNWVEGWTIFYWAWWISWAPFVGSFIARVSKGRTIREFVIGVLAVPALYGALWFSVFGGTGIYFQREGIADINGMMADHGMEIALFGLLEQFPLGTFLSVIALLLIASFFITSADSATVVLGIQSTDGDLNPSNVVKFVWGLIISASAAILLLNQEGLGALQTAAIIAALPFTVIMIVLIFSMVKSFRREIIPARQPKKR

SEQ ID NO: 10890 - protein, 354 aa, Desulfotignum phosphitoxidans
NLWHNYGDGDPTLTDKKPRVYYTHKIPSEAIKLLKLFCEVIEHNNFESPTKKEIIRNSRNADVLCCFVPDCIDEEIIASCPQLRIIASCAAGHDGINVPAATMRGIWVTIVNAETIEPTADLTWALLLSSARGIVPADFFVRSGDLKGWCQPPPFSGQNIFGKTLGIIGMGSLGRAIARRAVGFNMTSIYYQRHRLEVKYEQDLKIENVVLEELFKTSDFICIATPLTDETFHFISDKELALMKPTAIIINTARGSVVDEEAVAKALKEKKIAGYAADVFEMEDTHIVPRPFDVNQGLIDQKSCTVLTPHLGTAVMETRLEIFKRQALCVLQVLKGEKPNGAVNDVPLKPAITG

SEQ ID NO: 10891 - protein, 507 aa, Bacillus halodurans C-125
MNMVEPLAVAILIAYLVALLLIGLLSSKKSSVGMTDFFIAGRNLNKWTVALSAVSSGRSAWLVLGVTGTAYATGLDAVWAVAGYITVEVFLFFYVARRFRAYSEQTGSITIPDILETRFNDKTHILRGGSAFIIMFFMIAYVASQLVAGGGAFATSMGVSSSTGMWVTAVILLAYTMLGGFHAVSKTDVVQAGFMFVSLVILPVVAIIGLGGFDPLLQVMHTEGGGFTSPFAFGFGAVIGLLGIGFGSPGNPHILVRYMSLKNVKEMRQAALISSVWNVLMGWGAVMIGLAGRAYFPDVSLLPNGDQEQVFLMLGSEILHPLFFGFLLVAVLAAIMSSADSQLLVGSSAFVRDIYQKMFRRNRKLSQKKLVRLSRLTTVVFMGLSLILAFTAQEFVFWMVLFAFGGLGACFGPALLLSFYWKGVTRQGVLWGMIAGLLTVILVKQQPQWTYAFLPDVKELLNTYFFGITYEAVPGFIVATTITVVISLFTKRPKHAKQIIERLNESA

SEQ ID NO: 10892 - protein, 102 aa, Bacillus halodurans C-125
MYAIIETGGKQVKVEEGQEIYIEKLDAEAGESVNFDKVVLVGGDDVKVGSPYVEGASVTAKVEKHGRGKKIIVFKMKAKKNYRRKQGHRQPYTKVVIEKINA

SEQ ID NO: 10893 - protein, 412 aa, Bacillus halodurans C-125
MSIIVQKYGGTSVGSVQRIEHVANRIIATAASGKKVVVVVSAMGKTTDELVGLASEITDEPRKREMDMLLATGEQVTIALLAMALHKRGQEATSLTGWQAGMITESHHGNARILEVERARMDELLDKVHVVIVAGFQGIDQQGEIMTLGRGGSDTSAVAIAAALKAERCEIYTDVTGVFTTDPRVVKQARKLQTISYDEMLEMANLGASVLHPRAVEFAKNYEIPLLVASSMVDEPGTMIEEEGTMEQNLLVRGIAFENDVTKVTVHGLPNEIHTLPTLFAHLSAAGINVDIIIQNQTDSGMAISFSITQSSLKETLARLEELKGELSFQGIDYEEELAKVSIVGSGMVSNPGVAAKMFEILAANDIAIKMVSTSEIKVSAVIDEELMVLAVEMLHEQFKLHEEEPAVAVKV

SEQ ID NO: 10894 - protein, 371 aa, Bacillus halodurans C-125
MKIGVPTEVKNNENRVAITPAGVMTLTQHGHEVIVQKGAGEGSGFTDEQFVIAGAKIVDTADEVWQMEMVMKVKEPLPEEYGFFREGLILFTYLHLAPELKLTDALLEKKVIGIAYETVQLANGALPLLTPMSEVAGRMASQIGAQFLEKTQGGKGVLLSGLPGVKRGKVAVIGGGVVGTNAAKIAVGLGADVTILDLNPDRLRQLDDLFGESINTLMSNPLNIAETVKESDLVIGAVLIPGAKAPKLVTEEMVASMQPGSVIVDVAIDQGGIVATSDRITTHSNPTYEKHGVLHYAVANMPGAVPRTSTIGLTNVTIPYALAIANKGYVQACLDDPALRKGLNTLGGYIVYEAVAASQNKPYKDVMDLLA

SEQ ID NO: 10895 - protein, 409 aa, Bacillus halodurans C-125
MSKKKVVLAYSGGLDTSVAIKWLSDKGYDVIAVGLDVGEGKDLEFVKEKALKVGAIESYTIDAKKEFAEEFVLPALQAHALYEQKYPLVSALSRPLISKKLVEIAEQTGAQAVAHGCTGKGNDQVRFEVSIQALNPNLEVLAPVREWAWSRDEEIEYAKKNNIPIPIDLDNPYSVDQNLWGRSNECGILEDPWATPPEGAYELTVAIEDAPDQPEIVEIGFEKGIPVTLNGKSYPVHELILELNQIAGKHGVGRIDHVENRLVGIKSREVYECPGAMTLIKAHKELEDLTLTKEVAHFKPVVEKKIAELIYEGLWFSPLQPALSAFLKETQSTVTGVVRVKLFKGHAIVEGRKSEYSLYNEKLATYTPDDEFDHNAAVGFISLWGLPTKVYSMVNKEMKEKQEKKEVTS

SEQ ID NO: 10896 - protein, 391 aa, Bacillus halodurans C-125
MAINAGSSSLKFQLLNMPEEELVTKGVVERIGLGDGIFTIEVKGEKVTETFDIPDHAFAVKTLLEKLTSHEIIQSLDEIEGIGHRVVHGGEKFNDSVLITDEVIQGIEECNELAPLHNPANIVGIRAFKEVLPNVPAVAVFDTAFHQTMPESSFLYSLPYDYYKEFGIRKYGFHGTSHKYVSQRAAELLGRPIEQLRLLSCHLGNGASIAAIDGGKSIDTSMGFTPLAGVTMGTRSGNIDPALIPFIMEKTGQTANEVINTLNKKSGLLGVSGFSSDLRDIEEQAGEGNDRAELALEVFTSRIHKYIGSYAARMSGVDAIIFTAGIGENSTVIRERVLRGLEFMGVYWDPSLNQVRGKEAFINYPHSPVKVLVIPTNEEVMIARDTVRLAQ

SEQ ID NO: 10897 - protein, 380 aa, Bacillus halodurans C-125
MIYLDNSATTRPFMEVVDSYTKASLTFFGNPSSLHRMGTEAEQLLLKTKEQIAGILGISSSEIIYTSGGTEGNNLAIKGTAYQLKGRGTHLITTAVEHASTIEAFRSLEAEGFKVTYLKPGPTGQVTAEQVKAALTNQTILVSIIHVNNETGIIMPVEGIGELLKGYPKVRFHIDHVQGATKVPLRLAHGLIDLVTFSSHKFHGLKGTGFIYKKDGLRLTPLFHGGGQEGALRSGTENVAGAVATAKALRMAMELYEERHDKLLHLRNQLLEGLSEIEGVVINTPKELAAPHIVNFSIPKMKPEVIIQALSKRDIHVSTKSACSTKRSEPSHVLLAMGVGKERANSAIRLSLSYLTTEDEVSKALQELQHLIPELLEVVK

SEQ ID NO: 10898 - protein, 324 aa, Bacillus halodurans C-125
MRLLFTRALDPEWIEPLKDEHDIRMWTEENIPMPRELFLKELEEADGVFTNLTDRFDVEAFERAKRLKVVSTMAVGYDNIDIKEATKRGVSVGHTPGVLTEATADLTFALLMATGRRLRESIDYVRNDQWKSWGPFMLTGQAIYGTTLGIIGMGRIGQAVAKRAKGFNMTLLYHNRSRNEQAEKELGATYCSLDHLLARSDYVVLLAPSTDETRKMMGPAQFQKMKSTAHFINTSRGTNVDEQALYRALTEGWIAGAGLDVYEKEPISADHPLVQLPNVVALPHIGSAEVGTRREMVRLAIENLLLGIKGKSLTHIANPEVLEK

SEQ ID NO: 10899 - protein, 393 aa, Bacillus halodurans C-125
MTSSTSQRTRLSTRVQSIQPSGIRRFFDLASKMENIISLGVGEPDFVTPWNVREASISSMERGFTAYSANAGIIELREAISRYLYERFHIGYDPESEILVTVGASEAIDIGMRAIIDEGDEVIVVEPSFVSYAPLVTMAGGVPVPVGTHIDTDFQVTPAQIEAAITPRTKAIILCFPNNPTGSIMGKEELEAVAKVISGNDLIVFSDEIYAELTYDGTHVSLASMDGMRERTVLISGFSKAFAMTGWRLGYVCAPDDILSAMLKIHQYSLMCAPTMAQHGALEALETGMDDVHRMVQSYRQRRNFVVKTFTEIGLTCPMPGGAFYAFPSVKETGLTSEEFAERLLMEEHVAVVPGNVFGEGGEGHIRCSYATSMEHLETALERIGRFVQKCKQ

SEQ ID NO: 10900 - protein, 263 aa, Bacillus halodurans C-125
MSAPSLKIENLHVTIEGKEILKDFSLEVNGGEIHAIMGPNGTGKSTLASAIMGHPKYEITSGSVTLNGEDVLEMEVDERAKAGMFLAMQYPSEISGVTNSDFLRSAINAQREEGDEISLMKFIRQLDEKMDLLDMDESFAHRYLNEGFSGGEKKRNEILQLMMLEPKIAILDEIDSGLDIDALKVVSQGVNAMRGSEFGCLIITHYQRLLNYITPDKVHVMMQGRIVKSGGPELAQRLEAEGYDWIKEELGIEDERVSEGQEA

SEQ ID NO: 10901 - protein, 393 aa, Bacillus halodurans C-125
MREAVIVAGARTPVGKAKNGTLANVRPDDLGALTVKETLKRAGDFDPARIDDVIIGCAMPEAEQGMNMARNIAALAGMPHTVPAITINRYCSSGLQSIAYGAERIMLGQGEAIVAGGAESMSLIPMGGHVIAPNPTLVENQPEYYMGMGHTAEEVASRFGVSREDQDAFAVESHKRAAKAIEEGKFADEIVPVDVTLRHVDDNHKLVEKHVTFSVDEGVRPETNMETLSTLRPAFHAKGTVTAGNASQMSDGAAAVLLMDREVAEREGLTPVVKFRSFAVAGVAPEIMGVGPVEAIPKAVKMAGLDLSDIGLFELNEAFASQAIQVIRGLNLDHDKVNVNGGAIALGHPLGCTGTKLTLSLIHEMKRRGEQFGVVTMCIGGGMGAAGVFELIG

SEQ ID NO: 10902 - protein, 65 aa, Bacillus halodurans C-125
MQGKVKWFNAEKGFGFIEREDGDDVFVHFSAINTDGFKTLDEGQSVEFDIVEGARGPQAANVTKL

SEQ ID NO: 10903 - protein, 499 aa, Bacillus halodurans C-125
MIVEMTGIHKSFSGNPVLKDVSFTLEKGEIHALMGENGAGKSTLMKILTGIYERDSGTVKIKGREVHYKHPKEAEADGLAVIHQELNILPELTVAENLFVGKERTYGKTGWIKSKEMNRLAEEKLAELGLKVKGTERAGNLSVGKQQLIEIAKALMTNADIIIMDEPTAALTDREIDTLFATVRELQKKGVTFVYISHRMEEIFSLCQRITVLRDGEYVGTKVIAETSFDEIVKMMVGRALGNRFPEHTLTPGDVKLEIKHLTRAGEFENVSLSVRAGEILGISGLMGAGRSELVETIFGYRKADSGEVWIDGKQAAIKGPDQAIAQGIGFVSEDRKSKGLIVDFSIRDNISLTNLSRISTSSWISSEKERSLYEELAKKLHVKASGPSQQAKSLSGGNQQKIVIAKWLGIEPKILILDEPTRGVDVGAKKEIYTIMNELAKQGVAIIMVSSELPEVIGLSTRVAVMFEGKLMHILERDELSEETIMHYATGGDKHVRQ

SEQ ID NO: 10904 - protein, 212 aa, Bacillus halodurans C-125
MKFFIDTANINEIREANDLGILAGVTTNPSLVAKEGVDFHERLREITSLVKGSVSAEVVALDAEGMIKEGKELAAIAPNITVKVPMTTEGLKAVHAFHQEGITTNVTLVFSAVQALLAARAGATYVSPFLGRLDDIGHDGLDLISQIAEIFHVHDLDIQIIAASIRHPQHVTEAALRGAHIATIPFKVISQLSKHPLTDKGIEQFLKDWNNR

SEQ ID NO: 10905 - protein, 392 aa, Bacillus halodurans C-125
MKTAIISGVRTPFGKFGGSLSTLTAAQLGGHAIRETLKRANWRGERVDDLIMGNVLQGGQGQLPSRQALKEADLPWDVRTETINKVCASGMRSVTLADQLIRSGSSKVVVAGGMESMSQAPYYVPKARWGARMGHVEMIDGMVFDGLTCAFTGVHMGTYGNGTAHELAISREAQDEWAYRSHQRAIAAIGAGRLEEEIVPVEVPQRKGEPLLVACDEAPRKDTSMESLKNLRPVFGKEGTITAGNAPGVNDGAAAMLLMSEEEAKSAGMAPLAIIEGHTALATEPKDFPKTPGLVIQKLLQDTGKTPAEIDLFEINEAFAAVALASQQIAEIDPEKVNVNGGAVALGHPIGASGARIILTLAYELRRRGGGLGIAAICSGGGQGDAVLIRVP

SEQ ID NO: 10906 - protein, 330 aa, Bacillus halodurans C-125
MSDLFRNIQEQVKRHQPTIVLPEGTDERILEAAANLAKDEVVKPILVGNVADIQARASELNIDLGSVEIIDPKSYGAFDDMVHAFVERRKGKETEETAREKLVDVNYFGTMLVYTGVADGLVSGAAHSTGDTVRPALQIIKTQPGIKRTSGVFIMVKEDQKLVFADCAINIAPTAEELAEIAVATAETAKVFDIDPKVAMLSFSTKGSAVSPETEKVAEATKLAQEARPDLVIDGEFQFDAAFVPAVAQKKAPESPLKGEANVFVFPSLESGNIGYKIAQRLGGYEAIGPILQGLNQPVNDLSRGCNASDVYKLSLITALQAINQKGDNN

SEQ ID NO: 10907 - protein, 421 aa, Bacillus halodurans C-125
MDSIALMDNVWIMLCAVLVLLMQGGFILLEAGSTRMKNAGHIAGKTIFTVGIASLVYWAVGWGFTYGEGNAFIGLSDFFFGDYSTAEEGLVGSVDFFFQLMFAAIALTIAFGGFAERAKLSVYILFAVLFSAFVYPIVAHWIWGDGWLADLGKQDFAGSTVVHLTGAMGALAATILLKPRLGKYNKDGSMNDIQGHNQVYTALGVLLLWVGWFGFNAGSTLEVADAFFGYVALNTQLAAAAGAVAAMFIAWALSGKADVPTTLNGALAGLVAITASCAFVAPWAAVVIGIVGGLIVYFSMKFFDKAKIDDPIFALSVHGVAGVWGTLSTGFFATPELAEMNGGQAGLFYGGGFAQLGVQTLSVVACGVFAFIASYVLLLVCKSVLGGLRVTEEEEIIGLDLSEHGSYGYPESMPGSEKSGA

SEQ ID NO: 10908 - protein, 543 aa, Bacillus halodurans C-125
MKAVRSVLDYLAKGGVDTVFGIPAGSVNAFFDELYSMPQMTPVIAKHEGAASYMAAAYAKYSGQLAVAIGCSGPGSTNLLTGAANAMREQLPILFLTGAVPTNTEGLNASQELDVQPLYAPVTKYSVTVRKGSDLLSEVEKAVTIALSPVPGPVHVAMPIDVQLETIEPPDLPSYPTQPRTMPSNQSVKQAARELTELKNGIVFIGQGVRRAVREAIEMAERLRWPIVTTPQAKGYIPSGHPLNKGVFGFAGHTTASDLLNGEEGDGLFIIGSSLGETATNNYNKKLTDGRYVIQLDHDKTVFNRKYKIDFPIVGDVKITLTELNLELERLGRDHQPQPIARVENKVNKEYTTQHLLLSIQQALPPTTRYHIDIGEFMSYVIHYMDVYEPDTFNINVHFGAMGTAIGSAIGAAMVDRKRPTVCITGDGCFFMHGMEVLTAKEYGLPILFVIVNNARLGMVYHGHALQYERTHPRFEQAPVNLSKLLESVGIPTARIESLADLKEERISSLLPTDGPAILELAIVDSQIPPMGDRVKFLSSFGK

SEQ ID NO: 10909 - protein, 577 aa, Bacillus halodurans C-125
MIARFFSYYKPYKGLFFLDFFCAVFVGILELAFPLAVNQVIDRLLPEGNWQIIFWACVGLLFVYLLNTVMQYVVTYWGHKLGINIESDMRKKLFEHMQKLSFGYYDNNKTGHSISRLTKDLEEIGEVAHHGPEDVFVAVMTLVGAFAIMLSIHWQLAVALFCVVPFIIIFAVYFNKKMTTTFRRMFQDVGDINARVEDSIGGIRVVQAFANERYEQAQFAKNNQRYRKTKLASYKIMAQNVMANYVLMRSITLLTLLVGTWFVISGSLTYGEFVAFILLSNILIQPVQKINAVIESYPKGIAGFKRYTEILDTEPDIEDAPGAKEWNIQGNIQYEGVRFGYDGMEDVLKNIDLTIRAGETVAFVGPSGAGKTTLCSLLPRFYEVKDGRIVVDGLDIREMKLESLRNQIGIVQQDVFLFSGTVKENIAYGNLQATDEEIMEAARKAKLDDFILSQPDGLETVIGERGVKLSGGQKQRLSIARMFLKNPPILILDEATSALDTETELAIQQSLSELSKGRTTLVIAHRLATIKNADRIIVVTKEGIAEQGSHEQLLQTGGIYARLHRAQFGEFLVRTQV

SEQ ID NO: 10910 - protein, 517 aa, Bacillus halodurans C-125
MESKELWKNPVFYLSASFILLLVLLGVTMPSRFGAAASALFDLTAINFGWFYLFSVFILIVFLLFLAVSKYGLIRLGGEDERPEFPFFTWIGMLFSAGFGVGLVFWGVAEPMSHFFTPPFQTVDGQTEAAARVAMGYSFFHWGISQWSVFAIVGLVIAFLQFRKNKDGLVSTALAPAVGQRPAVRHTIDCLAIIATVLGIATSLGLGILQVNGGLHAVFGVGNATWIQMVIIGVIFVAYMLSSTTGLNKGIRYLSNLNLGLALLLLLFVLFLGPTRFILESFTLAIGDYISNFIQYSLRMEPYVGGTWVRDWTIFYWAWAIAWSPYVGAFVARVSRGRTIREFIVGVMIVPPLIACLWIATFGGTALWSDLNVQAGIADVVNEDLTLALFQTYEFLPLTTVASIVSLFLIVTFLVTSADSATFILASMSSFGRTNPPRLAKMTWGVLMSAIAAALLYAGGLDALQTASLVAALPFTIILLILLYAIVKLLRQEPLPIRKADLKRFRRLEKAANKKEK

SEQ ID NO: 10911 - protein, 264 aa, Bacillus halodurans C-125
MLQTTEVGYLKSCLNYTGGKHKLLGQIIPLFPENINNFTDLFCGGANVAINVNAKGVIRGIDKQKEVIRLFKTIKQSDKDEILQIINKIICDYSLSDTNKYGYSKYGCESGSGLAAYNKEHFLKLRQDYNNRMEDTIYYDLAFYLLTVYGFNNQIRFNKKGHYNIPVGKRDFNEKIKTNLVNFIRIIKEKDIDFICSDFREVEIEMSQGDFLYADPPYLISTATYNEQNGWTEKEENDLLSLLDSLSEKGVKFALSNVMNTKVK

SEQ ID NO: 10912 - protein, 257 aa, Bacillus halodurans C-125
MYRKFGMAAMLVSILLLMTGCFNVNEPINAQSEGIWDSYFVYPLSWLMIYFANAFNGSFGLAIIVVTLLIRLLILPLMIKQLKSTRAMQALQPEMQALREKYSAKDQRTQQKLQQETMALFQKHGVNPLAGCFPVLIQMPILLAFYHAIMRTREIGDEHFLWFVLNQPDPILLPIIAGITTFLQQKMMMVTDNPQMKVLLYVMPVMILVFAMFLPSSLALYWVIGNLFMILQTYFITGPNVGAKKVAADVKVGGKKK

SEQ ID NO: 10913 - protein, 403 aa, Buchnera aphidicola str. APS (Acyrthosiphon pisum)
MIRKKNNKVVLAYSGGLDTSAIIPWLKENYNFEVVAFVADIGQSKKDLNGIEKKSLESGASSCHVFDLKEEFIENYVYPVLKTGALYEGSYLLGTAMARPIIAKKQVELALNIGANSLCHGATGKGNDQVRFEMAYAALAPNLNVIAPWREWNLNSRESLLKYLDKKNISTTATLEKIYSKDENSWHISTEGGLLENPWNQSNEDCWSWTVNPEDAPEKPEYVSLQLKEGCVVSVNNQKLNPLKCVEELNSLGAKHGIGRIDIIENRLIGMKSRGCYETPGGTIIMTAIKAIEQLVLDRESFRWREKIGLEMSSIVYDGRWFSPIRKSLQAAADSLSLEITGEVILKLYKGSVTAVQKKSPNSLYSEEYATFGEDKVYKQSDADGFIRLFSLSSKIRAQNMLK

SEQ ID NO: 10914 - protein, 353 aa, Buchnera aphidicola str. APS (Acyrthosiphon pisum)
MKNKILFIDRDGTLIDEPINTFQVDSINKLVFKKYVISSLRKLVELDYKLIMITNQDGLGTESFPLQDFSTAHLFMLSVFRSEGVIFDDILICPHFLDDDCVCRKPKIKMIEPWLDKIDLKKSYVIGDRDTDMQLSNNLKIKGIKYKEDICNWLHITKYIIKHNRYAEIIRRTKETKVSIKVWLDLEETSKIDTGVKFFDHMLEQLSVHSGICMNISVQGDLDIDDHHTIEDTGIVLGEALLQALGKKNGLSRFGFYLPMDESRSNCIMDISNRPYLNFKAKFNHKMAGDLSTNMVEHFFYSLCYSMKITLHLYAEGKNDHHCIESLFKVFGRTLRQAIKIEGNMLPTSKGIL

SEQ ID NO: 10915 - protein, 637 aa, Buchnera aphidicola str. APS (Acyrthosiphon pisum)
MGKIIGIDLGTTNSCVAIMDGNKPRVLENAEGDRTTPSIIAYTQEGEVLVGQPAKRQAITNPKNTLFAIKRLIGRKFKDDEVQRDIKIMPYNIVNSDNGDAWIDVKKQKMAPPQISAEVLKKMKKTAEDYLGETIKEAVITVPAYFNDAQRQATKDAGRIAGLEVKRIINEPTAAALAYGLDKGKGNRTIAVYDLGGGTFDISIIEIDEVDKEKTFEVLATNGDTHLGGEDFDSRLINYLVTEFKKEQGIDLRNDPLSMQRLKESAEKAKIELSSAQQTDVNLPYITADSNGPKHLNIKVTRAKLESLVEDLILRSIEPLKVALKDAGLSVTDINDVILVGGQTRMPMVQSKVADFFGKEPRKDVNPDEAVAVGAAVQGGVLSGDVKDVLLLDVTPLSLGIETMGGIMTSLINKNTTIPTKHSQIFSTAEDNQSAVTIHVLQGERKRSSDNKSLGQFNLDGINPAPRGTAQIEVTFDIDSDGILHVSAKDKKTGKEQKITIKASSGLNEEEIKKMVNDAEANSEADQKFEELIQTRNQGDQLVHSIKKQLNENKNSIEEESKKDIQLALNKLENALKGEDKSDIEKNIQNLLKISSKLTEINQKKSEKDQKDNNMSANKKDENVVDAEFEEIKDPKK

SEQ ID NO: 10916 - protein, 405 aa, Buchnera aphidicola str. APS (Acyrthosiphon pisum)
MDKKLNNLILVLNCGSSSIKFAILNPDNKEKYLSGSVECLFLLETYITWQCLGTKHKKKIGANVNHKDALNFIIEQVFSQQKDIFKNLIGVGHRVVHGGTKIKKSTLIDSNIIKCIQDASSFAPLHNPANLIGIKMIIEKYPSLSRKNIAVFDTSFYCNMPETSFLYAIPYNFYKKYGIRRYGAHGISHNYVAHRASLMLNKQFKSLNIITCHLGNGSSISAICNGICVDTSMGLTPLEGLVMGTRSGDLDPSIIFFMNNHLNLSIDKIETILNKKSGLLGLSGISSDFRYFEKKYYCKKHAKRSVDIFCHRLSKYIAAYTSVLENRLDAVIFTGGIGENVPLIRELVFSRLSLLGFKINSNLNLSTIGGKSGLITEDNSTPVFVITTDEELAIAQETNSIINRK

SEQ ID NO: 10917 - protein, 708 aa, Buchnera aphidicola str. APS (Acyrthosiphon pisum)
MSRIIMLIPLDKDIGLTSIGLSIIYFFYQKKIKKKSVQSILYFSCTQNSSNSTSHVINKYFSKIVHTVDYIDFSKVLFNSPEYSFLLNKVIDEHYNNKFLRELILIEGIKNNYCINSEEMNYDISQNLNAEVIFIANLENSSPEYIKNKEKKINFFLKQKKYKNILGVIFNQINSPFLENKYDFIKKLIVLKKIKNETKTIVPKKILKNNFFSIIACIPWNRNIVTTRVIDLFNFLNIQHTNLVQKKNHIIEEIIIFDTHHLNLLNKHSLNTLVIVSFSRVDVFLNVLNCNVNRSKVKCIILTGILKLKKNIASLYKFLIKRSISIFFTEKNTIEILSQLQNFNFDISVKDITYIKKLQRYISNFFCHSSFMFFKKKYNINVIYPPKEFCYNLKLLSQKKNKRIKLPESYEIRILKSVAICSDSNIAQCVLLGDPKKIYSIANDNGINLKKNIEIIDPISVRQEYLARFLEIRKGKNINEFSAKKQLEDNTVLATLILESNHVDGLVSGSINTTSDTIRPALQIIKTNPQSLLVSSIFFMLLPNQVLIYGDCAININPTAEELAVIAIQSADSAKMFGIEPRIAMLSYSTGCSGFGCQVEKVKEATSIIKNRRSDLIIDGPIQYDAAVSNKVAKLKAPSSPISGSANVFIFPDLNSGNIAYKAVQRSSRIVSIGPMLQGLRKPVNDLSRGASVEDIIYTIALTSIQSE

SEQ ID NO: 10918 - protein, 108 aa, Buchnera aphidicola str. APS (Acyrthosiphon pisum)
MSIFQKIKKQIQDNIILIYMKGTPEAPSCGFSAQAVQALSFCGEKFAYVNILENPDIRSELPKYANWPTFPQLWIDGELIGGCSIILEMLENGELKKLILKVKKKYQT

SEQ ID NO: 10919 - protein, 816 aa, Buchnera aphidicola str. APS (Acyrthosiphon pisum)
MKLLKFGGTSLANAEKFLSVSSIIEENTQTDQIAVVLSAPAKITNYLVKIIENTIKNNQILETVHLAENIFMQLINNFLNIQSNFPHKEIEKIIKKEFNELKNIIQGILLLKQCPDNIRAIIISRGEILSVFIMKSILQSKNYNVTIINPVKNLVAIGDNYLDSTVDISESKKNIQNMNINQSNIILMAGFIAGNKDKKLVVLGRNGSDYSAAVLAACLDANCCEIWTDVDGVFTSDPRKVPNARLLKSISYQEAMELSYFGAKVLHPRTIEPIAQFKIPCLIKNTNNVKSIGTLICEQNCSEKDFLKGVTHLDEIAMFNISGPHIKDVGSVISRIFTMMSRGNIKILLITQSSSENKINFCVYEHDIYKILYLFNKEFQLELKDGLLNPFKIKKNLSILSIVGSNIYKKHNIASKIFSVLGALKINVIAISQGSSKHSISLVIKKENILKAVQHVHNTLFFNKKTIHMFLIGIGGIGSTLLNQILKQKQFLDKKNIEIKICAIANSKKILLLDNTNDLSNWKNDFKKSTQKFNLELLNNLIKNNHFSNSVIVDCTSSQLLSEQYVNFIDNNFHVVTSNKKANTSEWNYYKKIRKSVAQTGKKFLYETNVGAGLPVIETLQNLFKSGDNLICFKGILSGSLSFIFGRLEEGILLSQATREAKELGFTEPNPCDDLSGIDVARKLLILARESGYNIELKDIKIEPLLPNNFKIYEDTDKFLLKLKELDVYFSNKIKQALNVGNVLRFVATIEQKRQFFIKLEEVNINNPLYKVKNGENALAFYTNYYQPIPLVLRGYGAGNNVTASGVFSDLLRTLS

SEQ ID NO: 10920 - protein, 283 aa, Buchnera aphidicola str. APS (Acyrthosiphon pisum)
MKIKKKYCGHVIIVGKANVGKSTLLNNIIGKKISIVSRKKNTTQSNITGIKTEDNYQSIYIDTPGVVFDKNNNQMKHHKNNFYQTTQIATLIIFIIDRIDWTIHDEIILNEIKKTKIPILIIINKIDKISNKIILLPFINFLKKKIDFIEILPISAKKISNLILLKNIIKSYLPENCHIYPECYITTNSDFFTVSEIIREQLILFLGDELPSIIKVEIESFKKKEKIALYIKAIIWVKNVRQKSIVIGHNGEKIKKISMISRNNIEKKFYIKTHLVLWVKDKN

SEQ ID NO: 10921 - protein, 334 aa, Buchnera aphidicola str. APS (Acyrthosiphon pisum)
MKFIDQAIIHVIAGNGGNGCVSFRREKYIPKGGPDGGNGGDGGNIWLEANNNLNTLIDLRFKKKFQAQNGQNGSSRKSSGKKGDDIKIHVPIGTKVINYQTREIIGDLIQHKQKMLIAKGGWHGLGNARFKSSTNRTPRQSTLGSIGEKRDIQLELMLLADVGTLGMPNVGKSTLVTNISGAKTKISDYPFTTLHPVLGSVNIQKNKKFIIADIPGIIKGASYGAGLGIRFLKHLERCKLLLHIIDLVPQNNCHPSDNIKTVLNELKKYSLKLYNKPRWFIFNKIDLLSVEELNQIIKEIIFQFKIHEKYYLISSMKKIGIKKLCSDITKYLKK

SEQ ID NO: 10922 - protein, 571 aa, Buchnera aphidicola str. APS (Acyrthosiphon pisum)
MDTKKEIKNNNFICQIINKDLNENKNLSFYTRFPPEPNGYLHIGHAKSICLNFELASLYKGRCNLRFDDTNPLKENIKYIESIKHDINWLGYKWHGNVRYASEYFLKLYQYAQELIKKGLAYVDHLTKEQIREYRGTLNTPGKNSPYRNRTIQENIELFEKMKKGDFSEGEACLRAKINMSSSSIIMRDPVLYRIIFIKHHQTQNKWCIYPMYDFAHCLSDSIEGITHSLCTLEFQDNKFLYNWILKNTSVKHYPKQYEFSRLNLEFSILSKRKIKILIDKNIIEGWDDPRIPTLSALRRKGYTPSSIKNFCQKIGVTKQNNLIEFSMLEHCIRKELNQTAIRTMAILDPIKIFLYNLDSNYKEEFIVPNHPNNPEMGTHKIIFTNTIYIDRSDFKEKYDKKYKRLKLGEKIRLRYSYIIHAEKIEKDEYGNISNIICYCDLNTLGRKPKDNKNPAVIHWISEKNTLSAEFKLYDQLFNIKNPEQQENFLLYINSKSLIKKFGFIEKKIGEEIQKKISNNNIEIFFQFERIGYFCIDFIDSKKNQLVFNRTVGLRDTWDSKKIKTKNITNN

SEQ ID NO: 10923 - protein, 404 aa, Buchnera aphidicola str. APS (Acyrthosiphon pisum)
MKTPIYLDYAATTPVEFEVAKKMMNYLTIDGVFGNSASRSHKFGWKAEEVVDIARNQISELIGADSREIVFTSGATESNNLAIKGIASFHQNKGKHIVTSKTEHKSVLDTCRYLENKGFTVTYLTPKNNGIIDLNNLKKNIKKDTILVSIMHVNNEIGIIQDINSISQICRNHGVFFHVDATQSVGKIPIDLKKIPIDLMSFSAHKIYGPKGIGGLYVRRKPRVRLLSLIHGGGHERGMRSGTLPVHQIVGMGESFVLAKRKIHDDFIHLTKLKNILWNGIKNIEEVYLNSDLQQGAPHILNVSFNYVEGESLIMALKDLAISSGSACTSASLEPSYVLKSLGIRDELAHSSIRFSIGRFTTEKEIIHAIKLVHKSIHRLRELSPLWEMFKSGVDLNSIEWDHV

SEQ ID NO: 10924 - protein, 256 aa, Brassica oleracea var. italica
MGRGRVQLKRIENKINRQVTFSKRRAGLFKKAHEISVLCDAEVALVVFSHKGKLFEYSTDSCMEKILERYERYSYAERQLIAPESDVNTNWSMEYNRLKAKIELLERNQRHYLGEDLQAMSPKELQNLEQQLDTALKHIRSRKNQLMYDSVNELQRKEKAIQEQNSMLSKQIKEREKVLMAQQEQWDQQNHGQNMPSPPPPQQHQIQHPYMLSHQPSPFLNMGGLYQEEDPMAMRRNDLDLSLEPVYNCNLGCFAA

SEQ ID NO: 10925 - protein, 256 aa, Brassica oleracea var. italica
MGRGRVQLKRIENKINRQVTFSKRRAGLMKKAHEISVLCDAEVALVVFSHKGKLFEYSTDSCMEKILERYERYSYAERQLIAPESDSNTNWSMEYNRLKAKIELLERNQRHYLGEDLQAMSPKELQNLEQQLDTALKHIRSRKNQLMYDSINELQRKEKAIQEQNSMLSKQIKERENVLRAQQEQWDEQNHGHNMPPPPPPQQHQIQHPYMLSHQPSPFLNMGGLYQEEDQMAMRRNDLDLSLEPVYNCNLGCFAA

SEQ ID NO: 10926 - protein, 866 aa, Chlamydophila pneumoniae CWL029
MEKFSDAVSEALEKAFELAKSSKHTYVTENHLLLALLENTESLFYLVIKDIHGNPGLLNTAVKDALSREPTVVEGEVDPKPSPGLQTLLRDAKQEAKTLGDEYISGDHLLLAFWSSNKEPFNSWKQTTKVSFKDLKNLITKIRRGNRMDSPSAESNFQGLEKYCKNLTALAREGKLDPVIGRDEEIRRTIQVLSRRTKNNPMLIGEPGVGKTAIAEGLALRLIQGDVPESLKGKQLYVLDMGALIAGAKYRGEFEERLKSVLKDVESGDGEHIIFIDEVHTLVGAGATDGAMDAANLLKPALARGTLHCIGATTLNEYQKYIEKDAALERRFQPIFVTEPSLEDAVFILRGLREKYEIFHGVRITEGALNAAVLLSYRYIPDRFLPDKAIDLIDEAASLIRMQIGSLPLPIDEKERELAALIVKQEAIKREQSPSYQEEADAMQKSIDALREELASLRLGWDEEKKLISGLKEKKNSLESMKFSEEEAERVADYNRVAELRYSLIPQLEEEIKQDEASLNQRDNRLLQEEVDERLIAQVVANWTGIPVQKMLEGEAEKLLILEESLEERVVGQPFAVSAVSDSIRAARVGLNDPQRPLGVFLFLGPTGVGKTELAKALADLLFNKEEAMVRFDMSEYMEKHSISKLIGSSPGYVGYEEGGSLSEALRRRPYSVVLFDEIEKADKEVLNILLQVFDDGILTDGKKRKVNCKNALFIMTSNIGSPELADYCSKKGSELTKEAILSVVSPVLKRYLSPEFMNRIDEILPFVPLTKEDIVKIVGIQMRRIAQRLKARRINLSWDDSVILFLSEQGYDSAFGARPLKRLIQQKVVILLSKALLKGDIKPDTSIELTMAKEVLVFKKVETPS

SEQ ID NO: 10927 - protein, 795 aa, Chlamydophila pneumoniae CWL029
MNKRTLLFVSLIGIAFVGCQIFFGYNEFRSCKNLAEKQRKISEQTLAAVESVGLSVASWDTDVNGEEHKNNYAVRVGDKLFLLHNGEAAQSVYSSGESWSFVDHKCGFDNIHLALYRQQGSSFNPTNTGKVFLPTNHEGLPVLVVEFRNNKEPLVFLGEYAQGRISNKDSTIFGTALVFWRSGSDYIPLGLYDSREEKLVSLDLPITRAVIFGNDQDSAKSSDTANHYVLFNDYMQIIVSEESGSIEGINLPFASTNNKSIVNEIGFDRDLASEKSPEALFPGLSSKLPDGQQAKNSIGGYYPLLRRGLLSDSKKLLPLEYHALNVVSGRELATPVALRYRVLSYTPHSIQLESLDRSVQKVYKLPENPEEKPYVFETAITLTKETEDVWVTSGVPEVEIMSNASAPTIKYRVIKKNKGSLDKVKLPKVKEPLAIRRGVYPQWILNSNGYFGIILTPLSEIASGYGSLYISGSTAPTRLSAISPKNQLYPVSKYPGYETLLPLPKDAGTHRFLVYAGPLAEPTLKVLDKTITQEKGENPEYLDSISFRGVFAFITAPFAALLFIIMKFFKLVTGSWGISIILLTVFLKLLLYPLNAWSIRSMRRMQILSPYIQQIQQKYKNEPKRAQMEIMGLYKTNKVNPITGCLPLLIQLPFLIAMFDLLKSSFLLRGASFIPGWIDNLTAPDVLFSWQTSIWFIGNEFHLLPILLGIVMFLQQKVTSLHKKGPVTDQQKQQQVMGNMMAILFTAMFYNFPSGLNIYWLSSMILGVVQQWITNKILDSKHLKNEVVLNNKKHR

SEQ ID NO: 10928 - protein, 371 aa, Chlamydophila pneumoniae CWL029
MIYLDNNAMTPPERGLLEFLQKTFLIEGTYANPSSVHQLGKKSRQLVLEASHWMQKVLSFQGRVLYTSGATESLNLAIASLPKDSHVITSGSEHPAILEPLKHSSLSVSYLNPEEGRCVLTIEQIERAVTPKTSAIILGWVNSETGAKADIAAIAHFAQERQLQFIVDATANVGKERIVLPSGVTMAAFSGHKFHALSGIGALLVSPGVKLHPQLWGGGQQGGLRAGTENLWGIASLLYIFKYLDLHQERISQEILTHRNGFEKAIKARIPDVHIHCADQPRANNVSAIAFPPLEGEVLQIALDIEGVACGYGSACSSGATAPFKSLVSMGVDEELTLATLRFSFSHLLLQEDVERAVGIIEKVVERLKNS

SEQ ID NO: 10929 - protein, 660 aa, Chlamydophila pneumoniae CWL029
MSEHKKSSKIIGIDLGTTNSCVSVMEGGQAKVITSSEGTRTTPSIVAFKGNEKLVGIPAKRQAVTNPEKTLGSTKRFIGRKYSEVASEIQTVPYTVTSGSKGDAVFEVDGKQYTPEEIGAQILMKMKETAEAYLGETVTEAVITVPAYFNDSQRASTKDAGRIAGLDVKRIIPEPTAAALAYGIDKVGDKKIAVFDLGGGTFDISILEIGDGVFEVLSTNGDTLLGGDDFDEVIIKWMIEEFKKQEGIDLSKDNMALQRLKDAAEKAKIELSGVSSTEINQPFITMDAQGPKHLALTLTRAQFEKLAASLIERTKSPCIKALSDAKLSAKDIDDVLLVGGMSRMPAVQETVKELFGKEPNKGVNPDEVVAIGAAIQGGVLGGEVKDVLLLDVIPLSLGIETLGGVMTTLVERNTTIPTQKKQIFSTAADNQPAVTIVVLQGERPMAKDNKEIGRFDLTDIPPAPRGHPQIEVSFDIDANGIFHVSAKDVASGKEQKIRIEASSGLQEDEIQRMVRDAEINKEEDKKRREASDAKNEADSMIFRAEKAIKDYKEQIPETLVKEIEERIENVRNALKDDAPIEKIKEVTEDLSKHMQKIGESMQSQSASAAASSAANAKGGPNINTEDLKKHSFSTKPPSNNGSSEDHIEEADVEIIDNDDK

SEQ ID NO: 10930 - protein, 329 aa, Chlamydophila pneumoniae CWL029
MPSPMISTDVCQDILGKQKEAVDFFFQAFQPKEAMQLAEKILGHSGWVFFSGVGKSGCVARKLVATLQSLSERALFFSPVDLLHGDLGLVSPGDIVCLFSKSGETQELLDTVPHLKSRRAILVAITSMPYSNLAALSDLVVILPSVAELDPFNLIPTNSTTCQMIFGDFLAMLLFHSRGVSLSTYGKNHPSGQVGMKANGKVKDFMFPKTEVPFCHLGDKVSFSLEVFSAYGCGCVCIVDPQFRLMGIFTDGDLRRSLASYGGEVLSLSLEKVMTANPRCITEDSDIAIALQLMESSSPVAVLPVLDNEENRHVTGLLHMHTLAKAGLL

SEQ ID NO: 10931 - protein, 335 aa, Chlamydophila pneumoniae CWL029
MFVDQITLELRAGKGGNGVVAWRKEKYLPKGGPYGGNGGNGGSVIIEATTSVYSFEAYRNIRFLKAPDGQSGATNNRTGRSGKDLIVSVPTGTLLRDAETGEILHDFTVDGERLLVSQGGKGGKGNTFFKTSVNRAPTKATPGKPGEIRQVELELKLIADIGLVGFPNAGKSTLFNTLAHTEVKVGAYPFTTLAPSLGLVLCKDRLYQKPWIIADIPGIIEGAHQNKGLGLDFLRHIERTLLLLFVIDVSKRERNSPEEDLETLIHELHSHQPDFEKKDMLVALNKIDDLLPDEQEECLQSFQKRFPSYTFVLISGLTGEGVDGLYRFFTQRLAV

SEQ ID NO: 10932 - protein, 106 aa, Chlamydophila pneumoniae CWL029
MEPYAVIQTGSKQYQVRSGDVIDVELLGEVASDKEVIFQDVLFVFDGTKASLGSPTIANAQVKAEYLSHVKGEKVVAYKYKKRKNYHRKHGHRQKYLRVKIREILI

SEQ ID NO: 10933 - protein, 256 aa, Chlamydophila pneumoniae CWL029
MLKIKHLHASCNDVKILDDFNLNIQPGTMHVIMGPNGAGKSTLAKILAGDESVLVSSGEIALQEQNLLSMLPEERSRAGLFVGFQMPPEIPGVNNKMFLRDAYNARRRANQEGDISIDEFNTLLSTVLETYEYNATTDLFLDRNVNEGFSGGERKRNEICQMLVLEPEMVLLDEPDSGLDVDALRLICRVLEKYRELHPTSSLCIVTHNPKLGNLIRPDVVHLLLDGRVALSGDVSLMHELEAKSYQEVTKRVAWR

SEQ ID NO: 10934 - protein, 228 aa, Picea rubens
NYDGSSTGQAQGHDSEVILYPQAIFPDPFRRGKHILVICDTYSPNGTALPSNKRAAAEKIFSTKAVSDEEPWYGLEQEYTLLQKDVKWPLGWPIGGYPGPQGPYYCGVGADKAWGRDIVDAHYKACLYAGINVSGTNGEVMPGQWEFQVGPSVGISAADELWCARYIMERITEKEGVVLSFDPKPIEGDWNGAGCHTNYSTKSTRKEGGFEVIKKAIEKLRLRHKEHI

SEQ ID NO: 10935 - protein, 228 aa, Picea rubens
NYDGSSTGQAPGKDSEVIIYPQAIFRDPFRRGKNILVICDTYTPAGEPIPTNKRANAAKIFSHPDVVAEEPWFGIEQEYTLLQKDVQWPLGWPIGGYPGPQGPYYCGTGADKAYGRDIVDAHYKACLYAGINISGINGEVMPGQWEFQVGPTVGISSGDQVWAARYILERITEVAGVVLSFDPKPIQGDWNGAGAHTNYSTKSMREEGGIKVIKKAIEKLGLRHKEHI

SEQ ID NO: 10936 - protein, 487 aa, Chlamydophila pneumoniae CWL029
MLKIAILGRPNVGKSSLFNRLCKRSLAIVNSQEGTTRDRLYGELHAFGVPAQVIDTGGVDHNSEDYFQKHIYNQALTGAKEADVLLLVIDIRCGITEEDAHLAKLLLPLKKPLILVANKADSRQEELQIHETYKLGIRDIVVTSTAHDKHIDTLLQRIKLVANLPEPREEEEEGLEELSVDEHEESEAALPSNTFPDFSEVFTEGFSPEEPCTIPESPQQAPKTLKIALIGRPNVGKSSIINGLLNEERCIIDNTPGTTRDNIDILYSHKDRQYLFIDTAGLRKMKSVKNSIEWISSSRTEKAISRADICLLVIDATQKLSSYEKRILSLISKRKKPHIILINKWDLLEEVRMEHYCKDLRATDPYLGQAKMLCISATTKRNLKKIFSAIDELHHVVSNKVPTPIVNKTLASALHRNHPQVIQGRRLRIYYAIQKTTTPLQFLLFINAKSLLTKHYEYYLKNTLKSSFNLYGIPFDLEFKEKPKRHN

SEQ ID NO: 10937 - protein, 565 aa, Chlamydophila pneumoniae CWL029
MKVPWAFKNFIPKLYTSIKEGYSFNTFKKDFQAGITVGILAFPFAIAIAIGVGVSPIQGLLASIIGGLLASAMGGSNVLISGPSSAFISILYCLSAKYGAEALFTVTLLAGVFLIAFGLTGLGTFIKYMPYPVVTGLTTGLAIIIFSSQIKDFLGLQMGANIPADFLPKWIAYWDHLWTWDSKSFAVGLFTLLIMIYFRNYKPRYPGVMIAIVTATTLVWLLKIDIPTIGSRYGTLPTAIPLPKIPQLSITKILQLMPDALTIAVLSGLETLLSAVVADGMTGWRHQSNCQLVAQGVANIGTSLFSGIPVTGSLSRTAASIKSEATTPIAGIVHSIFICFILLLLAPLTVKIPLTCLAAVLILIAWNMSEIHHFIHLFTAPKKDIVVLLTVFILTVMTTITAAVQVGMMLAAFLFMKQMSDLSDVISTAKYFDKDSDFLSKAEVPQNTEIYEINGPFFFGIADRLKNLLNDIEKPPKIFILCMTRVPTIDASAMHALEEFFLECDRQGTLLLLAGVKKTPLADLKRYHLDELIGVDHIFSNIKSALLFAQALTNLESKTSTRHLV

SEQ ID NO: 10938 - protein, 440 aa, Chlamydophila pneumoniae CWL029
MSKIVYKFGGTSLATAENICLVCDIICKDKPSFVVVSAIAGVTDLLVDFCSSSLREREEVLRKIEGKHEEIVKNLAIPFPVSTWTSRLLPYLQHLEISDLDFARILSLGEDISASLVRAVCSTRGWDLGFLEARSVILTDDSYRRASPNLDLMKAHWHQLELNQPSYIIQGFIGSNGLGETVLLGRGGSDYSATLIAELARATEVRIYTDVNGIYTMDPKVISDAQRIPELSFEEMQNLASFGAKVLYPPMLFPCMRAGIPIFVTSTFDPEKGGTWVYAVDKSVSYEPRIKALSLSQYQSFCSVDYTVLGCGGLEEILGILESHGIDPELMIAQNNVVGFVMDDDIISQEAQEHLVDVLSLSSVTRLHHSVALITMIGDNLSSPKVVSTITEKLRGFQGPVFCFCQSSMALSFVVASELAEGIIEELHNDYVKQKAIVAT

SEQ ID NO: 10939 - protein, 362 aa, Rickettsia conorii str. Malish 7
MRATARSVAISRDLMRFPRRFAPCNDVENINHMHFIDEVKIYIKGGNGGNGCVSFHREKFIDRGGPDGGDGGRGGSVIFRSNHHLNTLVNYRYKQHFTAENGENGKDSNRSGKSGKSLVLDVPIGTQIFSEDGNILFYDFTVDDQSFEIIKGGSGGLGNSHFKSSVNQAPRKRTEGEIAEEMWIHLSLKLLSDVGLVGLPNAGKSTFLSVVTAAKPKIADYPFTTLVPNLGVVYVDDEEFVIADIPGLIEGAHQGHGLGDKFLKHIERCNVLIHLIDGSSNDVVADYNTVRLELELYSDYLKNKIETICLNKCDVLTDEEIQEKINKLQKATNKEIFPISTCTNAGVNKIVKLALETIKNQK

SEQ ID NO: 10940 - protein, 400 aa, Paracoccus sp. 12-A
MAKVVCVLYDDPVDGYPTSYARDSLPVIERYPDGQTLPTPKAIDFVPGSLLGSVSGELGLRNYLEAQGHELVVTSSKDGPDSELEKHLHDAEVVISQPFWPAYLTAERIAKAPKLKLALTAGIGSDHVDLQAAIDRGITVAEVTFCNSISVSEHVVMTALNLVRNYTPSHDWAVKGGWNIADCVTRSYDIEGMHVGTVAAGRIGLAVLRRFKPFGMHLHYTDRHRLPREVELELDLTWHESPKDMFPACDVVTLNCPLHPETEHMVNDETLKLFKRGAYLVNTARGKLCDRDAVARALESGQLAGYGGDVWFPQPAPQDHPWRTMPHNAMTPHISGTSLSAQARYAAGTREILECHFEGRPIRDEYLIVQGGSLAGVGAHSYSKGNATGGSEEAAKFKKA

SEQ ID NO: 10941 - protein, 280 aa, Triticum aestivum
MSDPSASSTASSSPTSSSTSPRLTTGVVNFLARRAVTTQQNHHLPAAEAFPLHSPGSSTGSADSAPWHHRAPATPPPVLPFDPSDADEMLLLDMLSQHHEVQHAAAAPTTAPAKQEADEEGKVALGVGRAFRGVRKRPWGKFAAEIRDSTRNGVRVWLGTFDSPEAAALAYDQAAFAIRGGAAVLNFPADQVRRSLEGAADDACGRAHGLSPVLALKRRHCMRSRKAAAAGRVAKAATRGVRPGCVMELEDLGAEYLEQLLGASEDTASMSSWCWSHQSV

SEQ ID NO: 10942 - protein, 574 aa, Klebsiella pneumoniae
MEMLSGAEMVVQSLVDQGVKQVFGYPGGAVLDIYDALHTLGGIDHVLVRHEQAAVHMADGLARATGEVGVVLVTSGPGATNAITGIATAYMDSIPLVILSGQVATSLIGYDAFQECDMVGISRPVVKHSFLVKQTEDIPGVLKKAFWLAASGRPGPVVVDLPKDILNPAKKLPYVWPDAVSMRSYNPTTSGHKGQIKRALQTLVAASKPVVYVGGGAINAHCEPQLRELVEKLKLPVASSLMGLGAFPATHSQALGMLGMHGTYEANMTMHHSDVIFAVGVRFDDRTTNNLAKYCPNATVLHIDIDPTSISKTVPADVPIVGDARLVLEQMLELLEQEEAQQPLDDIRDWWQQIEQWRARHCLRYDDQSDKIKPQAVIETIWRLTQGDAYVTSDVGQHQMFAALYYPFDKPRRWINSGGLGTMGFGLPAALGVKMALPDEMVVCVTGDGSIQMNIQELSTALQYELPVLVLNLNNRYLGMVKQWQDMLYSGRHSQSYMESLPDFVRLAEAYGHVGIRISEPQELETKLAEALEQVRQRRLVFVDVTVDGSEHVYPMQIRGGGMDEMWLSKKERT

SEQ ID NO: 10943 - protein, 133 aa, Beta vulgaris
SAIKQVASGRFGVTPTFLVNADQLEIKIAQGAKPGEGGQLPGKKVSAYIARLRNSKPGVPLISPPPHHDIYSIEDLAQLIYDLHQINPKAKVSVKLVGEAGIGTVASGVAKANADIIQISGHDGGTGASPISS

SEQ ID NO: 10944 - protein, 115 aa, Tilia platyphyllos
MALPKAKEIVSGNPVVVFSKSYCPFCVSVKQLLEQIGASFKAIELDNESDGSEIQAALAEWTGQRTVPNVFIGGKHIGGCDSTTAMHKNGKLIPLLTEAGAVATATATVTATASA

SEQ ID NO: 10945 - protein, 878 aa, Treponema pallidum subsp. pallidum str. Nichols
MNTDRYTVKASEALNDAISLAEAENHGQVEEEHLLHALLSQKDGIISPLIEKIGAKPDFLYDELLQCLRRKPRVTGPAAQTRCAPTLSKACARAERLALKNQDEYVSCEHLLLAISETDSNTARLLHSQGITSKTISAALKDIRGSKRVTSQDPESTFQCLEKYCRDLTTLAREEKIDPVIGRDEEIRRVMQVLSRRTKNNPVLIGEPGVGKTAIVEGLARRIVSGDVPESLKGKRLLSLDLGALVAGAKFRGEFEERLKAVIEAVQKSDGGVILFIDELHTLVGAGASEGSMDASNLLKPALARGELRSIGATTLNEYRKYIEKDAALERRFQQVYCVQPTVEDTIAILRGLQEKYEVHHGVRIKDEALVAATVLSDRYITNRFLPDKAIDLVDEAASRLKMEIESQPVELDQVERKILQLNIEKASLLKESDPASKERLEKLEKELAGFLERRAAMQVQWQNEKGRIEESRRYKEELERLRIEETMFSREGDLNKAAELRYGKIPELEKKIMLLTAEVEKKSGLEGQLLREEVCEEDIAKIISMWTGIPVSKMMASEQQKYLQLESVLMQRVVGQDEAVRVISDAIRRNKAGLSDTRRPLGSFLCVGPTGVGKTELARTLADFLFNDERALTRIDMSEYMEKHAISRLIGAPPGYVGYDEGGQLTEAVRRRPYSVLLFDEVEKAHQDVFNIFLQILDDGRLTDGQGRVVDFRNTIIIMTSNIGSEHILSARESRTHTSDLPVPETQSTEEQTLPEQIRGLLHTYFRPEFLNRIDEVLIFKRLTRKHIRLITDIQLQMVVERLESRHIKLRVRDAAKAYLAERGYDDTFGARPLKRAIQTELENALAREILSGRFRGGSTIVVDMCKDALCFTEQTS

SEQ ID NO: 10946 - protein, 336 aa, Treponema pallidum subsp. pallidum str. Nichols
MTFVESMQRRAVLAQKRLVLPEACEQRTLEAARLIVFRNIAAKVFLVGCERDIKNTADRCGIDLTDMVVIDPSVSKHRDQFAERYFQKRKHKGISLAQAAEDMRDPLRFAAMMLDQGHADAMVAGAENTTARVLRAGLTIIGTLPSVKTASSCFVMDTNNPRLGGTRGLFIFSDCAVIPTPTAEQLADIACSAAESCRTFIGEEPTVALLSYSTKGSGGDSDENILRVREAVRILHERRVDFTFDGELQLDAALVPKITEKKAPHSPITGKVNTLVFPDLSSGNIGYKLVQRLSDADAYGPFLQGFAKPLSDLSRGCSVEDIVAACAVTLVQSNGR

SEQ ID NO: 10947 - protein, 510 aa, Treponema pallidum subsp. pallidum str. Nichols
MQKEKCDFSVSLIPLGIVISCALLFISFPDISHRVIGTLLNILVNKLGFFYILTGLFFLGTTLTIAFSRYGAVYLGTTRTARYSNFTWGSMIFTSTMAADILYWSLIEWAHYFTQAPFIAEHSPPTERQEWAAAYPLFHWGIIPWSFYVLLAVAFGYMLHVKKRHTHKISEACRPLLGAYVDGIIGEAIDICSVVGLLLGVATTFSLATPLLSLMVSLLFGISNTQLLALALLCVIALVYTTAVLLGTQGISKLSRAAVYCFSTVLVFFLCAGPTVYLIETGITAIGKMLQNFFLMATWMDPSRISLQETDGTLGFPQRWTIFYWAYWITWSVATPFFIGAISEGRTIRNTIVGGLCWGIAGTYGSFIVLGNYGLYLQTHHLLPAAYFVRAGNTPAEVIIAIIQTLPCAYIVMALLAATMIAFYASTFDALTLIIASYSQKSVAPGEEPRQIMKSFWAVACILLPASLIFSQSTLMHLKSLAIIAAFPLALIMLCVVASFFKELRAEVTS

SEQ ID NO: 10948 - protein, 635 aa, Treponema pallidum subsp. pallidum str. Nichols
MGKIIGIDLGTTNSCVAIMEGGEPVVIQNAEGGRTTPSIIGFTSDGGRVVGQPAKNQMVTNPEHTIYSIKRFIGSRFNELTGEAKKVPYKIVPQGDDVRVEVEGKLYSTQEISAFILQKMKKTAEDYLGEAVTEAVITVPAYFNDAQRQATKDAGKIAGLDVKRIINEPTAASLAFGFNKDSKREKIIAVYDLGGGTFDISILELGDGVFEVKSTNGDTHLGGDDFDARIVQWLEQGFKSDTGIDLGNDRMALQRLREAAEKAKIALSSSASTEINLPFITADANGPKHLQRTLSRSEFEKMTDDLFERTKEPCRKALKDAGISADRIDEILLVGGSTRMPKVAHVIKDVFGKEGSKGVNPDEAVAIGAAIQGGILGGDVKDVLLLDVTPLSLGIETMGGVFTPLISRNTTIPTRKSQVFSTAADGQTAVSIHVLQGERGMANQNRTLGNFDLVGIPPAPRGVPQIEVTFDIDANGIVHVSAKDLGTGKEQHIRIESSSGLSESEIDRMVKEAEANAESDKREREKIEARNVADSLIYQTEKTLKEAGDGVNAADRARIDEAIAELKTVLSGDDVASIKAKTEILQQASYKIAEEMYKRQAAAGAAAGKKSDAPSGNEAEGGDVDYEVVKDEDSK

SEQ ID NO: 10949 - protein, 421 aa, Treponema pallidum subsp. pallidum str. Nichols
MRCSGFTDLAIVACPGGEHFADETIKHLTRVCERKFHQRMDRLTDRYGLDSGSVIRDANFYRDLFSTELCAHDDVRRFNPPHFKVDAQFICFLNGELKTQINECIRGKDVFIFQDVENHQPVLVNNGKSKKIFSVNDHVMMLIVTIDAVRHAGAGRVTLVLPTYPYSRQHKKCGREGLTAGLLGSVYEYLGVSHIVTLDLHSREIENAFHRTRLENLHASYQIIRELAKIENLSDPDIPFVVVAPDSGAVERNKFYSSGLKKPLAMIYKVRDYSVVAQNAKQSNIVEINLLGDVEGKTAFIADDMLGSGGTMLKAMEFLKSRGAKQVIAAVSLPFFTGNALELFDEAYEKRYFSRIIGTNAVFHTQLSHKQWYTETDVSGLFARVIARIHHNQSLSSLLDDRSIIERLLHARLSVAGTPRA

SEQ ID NO: 10950 - protein, 448 aa, Treponema pallidum subsp. pallidum str. Nichols
MIILTLNCGSSSVKYQVYNWTERAVIAVGVVERVTQAGSVITHEVHGRENHVRESPCPTHTEAVQLIISTLTDAHVGVISDMSLIKAVGHRVLHAADRFVKSVVVTPDVLETFRSVQDLGPLHNPANIRGIEAAQAVIPSVPHCAIMDTAWHQTMPEASFMYAVPRQWYEEYAVRRYGFHGTSFLYTAKRASVILKKRAEDTNIIIAHIGNGASMCCVKNGVSFDTSMGITPLEGLIMGTRCGDCDPALAFYIMRKTGMSVSDIDTTLNKQSGLLGITGKYVDRRDVCAAMKNGDALARLAFDMEVHRIRKYFGAYVAALGKQPDALVFTAGVGEMCCDVRAAACAGLEHLGIRLDARKNELARTRNAETEISTDDSPVRILVIPTDEELVMTEDTYALMQGTYDVHTRFTYSFQDPTYVNKARAAGLKRDLEKNPALATIVVPRLDT

SEQ ID NO: 10951 - protein, 319 aa, Treponema pallidum subsp. pallidum str. Nichols
MVTDGASPRSGVSLIIGRPSSGKSTFLNAVCGYKVSIVSPIPQTTRNTVRGIVNIESDQIVFMDTPGYHRSDRKFNLRLQSLVHSNVKDADVLLYLVDATRQFGEEEAAICALLAPYQKTRVLLAFNKVDVLHNSTSCDEHAFLHRQGSVLRAGSLGRALHAALPHLPADRVFTISALHQVGLDALMRTLRDLLPEAAPLYPQDCYTDQTIAFRVTELIREQAIARCRDELPHALYAGVEDMELRRGKRELWCRAFLAVERESQKAVLVGKKGAVIRAIRLDAIRALRTLLPYHISLDIRVKVDRSWRQRDHTLSSLLY

SEQ ID NO: 10952 - protein, 330 aa, Treponema pallidum subsp. pallidum str. Nichols
MEKSFILQQQGISFAKHTFTQKLMEHLGLIEVQGPLLSQVGDGIQDGLSGREKAVSVSVKQIPGTAFEVVHSLAKWKRHTLARYGFQDNEGLFVHMIALRPDEDFLDQVRSVCVDQWDWEKVVPVGSRNLAYLKDTVRKVYGALRESEVLVSERFGLRAFLPADIVFVQSEELVRRYPHLDSKGREDAICKEHGAVFLIGIGGVLSDGKPHDVRAPDYDDWTTPSEGEYKGLNGDILVWNPVLGRAFEVSSMGIRVDEGALRTQLALTGDEDSLACSWHQDLINGRLPQSIGGGIGQSRLAMLLLQRKHIGEVQASVWPRSVREEFENIL

SEQ ID NO: 10953 - protein, 259 aa, Treponema pallidum subsp. pallidum str. Nichols
MPTLLDIRDLCMSIADRPILKSLNLTLNTGEVHAVMGPNGAGKSTLAGTIVGNPHCTIERGEIYFQGQCINDVPVYERARRGIFLSFQTPEEVPGLSVEEFLRAAKEAVLGTKVSVLDFHTQLRAKLARLRISEAYASRGLNVGFSGGEKKKNEILQLAVLEPKLAILDETDSGLDVDATRIVFEGIDDIRTPDMGFLIITHHREVLEYIKPDVVHILVDGTIVKTGDVSLVHYVVEHGYADFATPRAGEQGGTPVSPE

SEQ ID NO: 10954 - protein, 376 aa, Treponema pallidum subsp. pallidum str. Nichols
MASFVDEVLIRVSSGRGGNGCVAFRREKYVPRGGPAGGDGGRGGDVVFQVRRNMRTLVHLRYGRVFRAKNGQDGEGARRFGAKGHDCVIPLPPGCLLRDAQTHEVLHDFGHAHEGCVTLLSGGRGGWGNYHFRGPVQQAPQRAHSGQPGQERVVHVELRIVADVGFVGLPNAGKSSLLNFFTHARSRVAPYPFTTRIPYLGVLRTGDGRDVILADVPGILERASQGVGLGLRFLKHLTRCAGLAFLIDLADERALHTYDLLCKELYAFSPVFETKARVLVGTKLDLPNARECLQQLRAQHPSTEVCGVSVHNRWGLDELQEAFVRLSDAGAGALRSPVWRNQAPSFMYAQLEDPVCQVRDDFGATVSLSRKRKVRG

SEQ ID NO: 10955 - protein, 105 aa, Treponema pallidum subsp. pallidum str. Nichols
MYALIEYKGKQYKVERGSSIVVDNISEVAPGGCIDVREVLMIGGEGLTRIGSPYLEGVGVRAVVGECFRSRKITVYKYKSKKDYHRTIGHRQWYTRLTVSDILGV

SEQ ID NO: 10956 - protein, 303 aa, Treponema pallidum subsp. pallidum str. Nichols
MSRSDTARPFVKWAGGKRALAPTLFAHMPQTFGSYFEPFVGGGALFWHLCACTRVRLHDIYLSDINWPLLCAYAAVRDRVEELIVRVGQHIACHTPTYYRLARRKFAVCEHPLEVAALFLYLNRSCYNGLYRVNKAGQFNVPLGRAAPASPFLNTTAPTPRSTQPAAQVGHLAIRIDEENLRSCARALANTTLNCQHFSCIQPARGDFVYLDPPYLGTFSAYDKTGFDRAAHESLAAFCMHLDARGVLFMLSNSDCPEVRAWYRPFRVQQLNAPRCIARSAHARGKRCEVLITNYPCADTATP

SEQ ID NO: 10957 - protein, 934 aa, Treponema pallidum subsp. pallidum str. Nichols
MHIHNRGIVWFVGSTFACFLVLLSCTTTSSPSPQASVDLFEMVARGDLDTLKTRFGKDSVNVRDANGDTLLHVGVLRNDAHVVDFLLSMGADTEAQDASGSTPLMVAVTENCFESVRMLIARDASLFSRDAQGDTPLTRAIRKGTAHELVTRKTLLQKDKSGKTPWHWAVRALDRDLIKHLVTLGPPTQERDADGHTPLSLAYSSSSDARAAEVAADLLLGGAELMHGSFSEFEIAVLKRNYDLHFTDGSTPLHVMAKRGYTGFVQFLVDRKVNLNAKNLSSATPLHEAVRAGQVDAAVLLLRSGADPNVRDASGNTCLHLVAPAPFRVRLVGALLDAGASVAIKDDYGETPLHVAARLGMDRAFVERLVGAGADISERNKKGETPLVLTIDRDHRDLTAYFVSLGADIHAEDMRGETPLTKALARGLETVKIVVTDSNLYKQDVVGRDPLHVAVSRRAHLDIVKFLFREPKQMIARDTMGNTLLHYAVANDDRAVGEFLMREGADIFSTNVHGVSPLKTALTTSGGREDWILTAANVHAQDTGGNTPLHLACEWKLTQAINGILRKGAEIEARNLNQETPLFSAVKSDAAEVISILLHPQAGNPALVDARDAVGNTVLHACVRWSALRSADVLIREADARHVSLLNARNLSGKPPLHLAARAGNVDFIRLLLSHRVALHMGDETGKSALTDAVLADQEESVHMLLSAGANPVQQDMYGRTPLHEAVLCNSQSVIAALRAAGGNPFARDSYGTTPLSLALLKGDTFVGAVVGKDPLLANSDGQTPLHLAVMENVPVQTFRLLLAKGYPIDKRDRMGSSALVLAIKKDRSDLCHELLALGADLFIANNVGESPALLVLSKNTSILKTLVGFAVNKTDSAGESILHYAAKVADEKTLQGLLAMNRFGKFLRNVAGETPYDVAVRWSRPKIAALLKE

SEQ ID NO: 10958 - protein, 665 aa, Treponema pallidum subsp. pallidum str. Nichols
MCMGSFSYCKESCTLSSFCSRWLRPSTNKGRTPIANRRAGVFVMKKNMFIAVVLSVLVLVGASFLQELLYPSASSSHSAAEHTLSAVPEETRTQSAHGGAADTQETTQPAAHPSGQVLVFPESETEERVERTYVVRTPLVQVTFTNRGGDILSYQLREHYAAQRREYVEMVEQARPDHRAFSLALGDEYAPNVNALFQVKQEIGARGVHSIGFYRSVATQHADGTRTPFVLAKRYVFYPDNYMFELHVSLSADVLEEREDSRQGAKVRAVAETNAGPATTVLARANGFDFGTASYTLRTPPEIGPERNAADKYEFRTFMVGAGGKAKTYALKGDGREQVDTPVSWASVSGKYFALIVLPNDADSLKRLVLSAPQAETAVQHHIAFVRRAVAQPAVADVYRVYIGPCAEQYLSAYNVASRNPYGLERTYIDAVAVSGGILYPLEVLLKWLLRLFYTLIPNWGVAIILVTIAIKVLFFPLTKRSFIAMQKMQELQPHMQRIQERYKGNTQKIHEEMAKLYREAQYNPLSGCLPTLVQMPIIFAMYRLFNNYFEFRGAMFIPYWIPDLSLADSVWTLPFALPVTQWTQMRMLPVLYVVSQIMFSKLTQVPHTEQQKTSMTIMTYVMPLFFFFFFYDAPSGLLVYWTAMNGVTLVQQLVMKRTANKNKT

SEQ ID NO: 10959 - protein, 541 aa, Vibrio cholerae O1 biovar eltor str. N16961
MDSQRNILLIALALVSFLLFQQWQVAKNPAPQATQQAQSTGAAPAPSFSDELDPTPAQNVAAKAKTITVSTDVLTLSIDTLGGDVVSAKLNQYSEELNSPESFVLLQNTQGHQFIAQSGLVGPQGIDVTSNNRPAYQVSADSFTLAEGQDELRIPMTYQANGIDYTKTFILKRGSYAVDVVFDVANNSGSEATLGMYAHLRQNLLDSGGNLAMPTYRGGAYSTSDVRYKKYSFDDMKDRNLSAPNDVTVNWVAMIQHYFASAWIPRDEPQAQLYSRVINNLGDMGIRTPNKTIANGDKAEFEATLWVGPKLQDQMAATAPNLDLVVDYGWLWFIAKPLHWLLSVIQTFVGNWGVAIICLTFIVRGAMYPLTKAQYTSMAKMRMLQPKLQAMRERIGDDRQRMSQEMMELYKKEKVNPLGGCLPILLQMPIFIALYWALMESVELRHSPFFGWIHDLSAQDPYYILPLLMGASMFVIQKMSPTTITDPMQQKIMTFMPVMFTFFFLWFPSGLVLYWLVSNIVTLIQQTLIYKALEKKGLHSK

SEQ ID NO: 10960 - protein, 548 aa, Vibrio cholerae O1 biovar eltor str. N16961
MTGAQLVVAALKQQGIKTVFGYPGGAIMPIYDALYDGGVEHILCRHEQGAAMAAIGMARSTQKVAVCMATSGPGATNLVTGLADAFLDSVPLVAITGQVASSHIGTDAFQEMDVIGMSLSCTKHSYLVTDINELAPTLAEAFEVAQTGRPGPVLVDIAKDVQLGKAPVSALPSFTPPAMPHVDATHLANAQALLAQSKRPVLYVGGGVQLANATDTVREFLRLNPMPSVSTLKGLGTIERHDPHYLGMLGMHGTKAANLIVQECDLLIAVGARFDDRVTGKLDTFAPHAKVIHVDIDAAEFNKLRHAHAALRGDINLILPQLELSHDISPWVHHSESLRSGFKWRYDHPGDNIFAPLLLKQLSDMMPDSSIVSTDVGQHQMWAAQHIQPRAPQNFISSAGLGTMGFGLPAAMGAAVARPDDQSILISGDGSFMMNVQELGTLKRRQIPVKMVLLDNQRLGMVRQWQSLFFDGRHSETILDDNPDFVMLAKAFNIPGKTISRKEEVEPALREMLASKTAYLLHVLIDEEENVWPLVPPGASNTDMLENT

SEQ ID NO: 10961 - protein, 857 aa, Vibrio cholerae O1 biovar eltor str. N16961
MRLDRFTSKFQIAISDAQSLALGRDHQYIEPVHLMVALLDQNGSPIRPLLTMLNVDVMQLRSKLGEMLDRLPKVSGIGGDVQLSSALGSLFNLCDKVAQKRQDAYISSEIYLLAAIEDKGPLGHLLKEFGLTEKKVSEAIEKIRGGQKVNDPNAEELRQALEKFTIDLTERAEQGKLDPVIGRDDEIRRTIQVLQRRTKNNPVIIGEPGVGKTAIVEGLAQRIINNEVPEGLRGRRVLSLDMGALVAGAKYRGEFEERLKSVLNELAKEEGNIILFIDELHTMVGAGKGEGSMDAGNMLKPALARGELHCVGATTLDEYRQYIEKDPALERRFQKVLVDEPTVEDTIAILRGLKERYELHHHVEITDPAIVAAASLSHRYISDRQLPDKAIDLIDEAASSIRMQIDSKPEALDKLERKIIQLKIEQQALSNEHDEASEKRLAILNEELQEKERDYAELEEVWKAEKAALSGTQHIKAALEQARMDLEVARRAGDLNRMSELQYGRIPELEKQLDLAAQAEMQEMTLLRNKVTDAEIAEVLSKQTGIPVSKMLEAEKEKLLRMEDVLHKRVIGQKEAVEVVANAIRRSRAGLSDPNRPIGSFLFLGPTGVGKTELCKTLANFLFDSEDAMVRVDMSEFMEKHSVARLVGAPPGYVGYEEGGYLTEAVRRKPYSVILLDEVEKAHPDVFNILLQVLDDGRLTDGQGRTVDFRNTVVIMTSNLGSSRIQENFARLDYQGIKEQVMDVVSKHFRPEFLNRVDESVVFHPLGQEHIKSIASIQLARLRQRLAERDYQLEVDDEALDLIAHVGFDPVYGARPLKRAIQQNVENPLAKSILAGKFLPGSPILLSVKDGNIFASQ

SEQ ID NO: 10962 - protein, 404 aa, Vibrio cholerae O1 biovar eltor str. N16961
MKLPIYLDYSATCPVDPRVAEKMVQYMTMDGTFGNPASRSHRYGWQAEEAVDTAREQIAALLNADPREIVFTSGATESDNLAIKGVAHFYNKQGKHIITSKTEHKAVLDTMRQLEREGFEVTYLDPESNGLVDLAKLEAAMRDDTILVSIMHVNNEIGVVQDIAAIGELCRSRKVVFHVDAAQSAGKVAIDVQEMKVDLISLSAHKAYGPKGIGALYVRRKPRIRLEAQMHGGGHERGFRSGTLPTHQIVGMGEAFRIAKEELQQDYDHALKLRNRLLDGIKDMEAVTINGDLDQRVPHNLNVSFAFVEGESLLMALKDLAVSSGSACTSASLEPSYVLRALGLNDELAHSSIRFSFGRFTTEAEIDYAIELIRVAVDKLRAMSPLWDMYKDGVDLNTVEWAHH

SEQ ID NO: 10963 - protein, 635 aa, Vibrio cholerae O1 biovar eltor str. N16961
MGKIIGIDLGTTNSCVAVLDGDKPRVIENAEGERTTPSVIAYTDGETLVGQPAKRQAVTNPQNTLFAIKRLIGRRFEDEEVQRDIKIMPYKIVKADNGDAWVEAKGQKMAAPQVSAEVLKKMKKTAEDFLGEPVTAAVITVPAYFNDAQRQATKDAGRIAGLEVKRIINEPTAAALAYGLDKQGGDRTIAVYDLGGGTFDISIIEIDEVEGEKTFEVLSTNGDTHLGGEDFDNRMINYLVDEFKKDQGIDLRNDPLAMQRLKEAAEKAKIELSSAQQTDVNLPYITADATGPKHMNIKVTRAKLEALVEDLVQRSLEPLKVALADADLSVNDITDVILVGGQTRMPMVQKKVAEFFGKEPRKDVNPDEAVAVGAAVQGGVLAGEVKDVLLLDVTPLSLGIETMGGVMTKLIEKNTTIPTKANQVFSTAEDNQSAVTIHVLQGERKQAMYNKSLGQFNLEGINPAPRGMPQIEVIFDLDADGILHVSAKDKQTGKEQKITIQASGGLSDAEIEKMVQEAEANKEADKKFEELATARNQADQMIHATRKQITEAGEALPADEKAKIETAINELETAKKGEDKAEIDAKVQALMAAAQKLMEIAQQQAQAQGANAGQSSAKEDDVVDAEFEEVNDDKK

SEQ ID NO: 10964 - protein, 186 aa, Vibrio cholerae O1 biovar eltor str. N16961
MAKPAVFLDRDGVINVDHGYVHDEHDFQFIEGVFEATAALQRMGYLLVLVTNQSGIARGKFSEERFISLTQWMDWNFADNGVEFDGIYYCPHHAEHGIGQYKEECDCRKPKPGMFLSARDFLNIDMANSVMVGDKAEDMMAAEAAGVGTKILVRTGKPITEQGEALATVVLDSIRDVPHYLLRVKK

SEQ ID NO: 10965 - protein, 554 aa, Vibrio cholerae O1 biovar eltor str. N16961
MCSIFGILDIKTDAATLRPIALEMSKKLRHRGPDWSGIYASDKAILAHERLAIVGLNSGAQPLYSPDRKLILAVNGEIYNHKEIRERYKGQYEFQTDSDCEVILALYRDKGADLLEELNGIFAFVLYDEEKDEYLIGRDHIGIIPLYQGHDEHGNFYVASEMKALVPVCKTLSEFPPGSYLSSKDQAVTRYYVRDWNSFDEVKDNVSSKEELTQALEAAVKRQLMTDVPYGVLLSGGLDSSITSAIAKRFAAMRIEDDEKSAAWWPQLHSFAIGLEGAPDLKAAREVAEKIGTVHHEMTYTIQEGLDAIRDVIYHIETYDVTTIRASTPMFLMGRKIKAMGIKMVLSGEGADEIFGGYLYFHKAPNAKEFHEETVRKLLALNLFDCARANKSLAAWGVEGRVPFLDKEFIDVAMRLNPADKMCGNGKMEKHILRECFEHYLPESIAWRQKEQFSDGVGYGWIDTLKATAEAKISDQQMETAKFRFPYNTPTTKEGYVYREIFEELFPLESAARCVPGGPSVACSSAKAIEWDESFKNCIDPSGRAVKAVHKQAY

SEQ ID NO: 10966 - protein, 556 aa, Vibrio cholerae O1 biovar eltor str. N16961
MSEAEARPSNFIRQIIDKDLADGKHTTVHTRFPPEPNGYLHIGHAKSICLNFGIAQDYQGQCNLRFDDTNPEKENLEYVESIKKDVTWLGFDWSGEVCYSSDYFDKLYEYAIELIQKGLAYVDELTPEQIREYRGTLTEPGKHSPYRDRSVEENLALFEKMRAGEFAEGQACLRAKIDMASSFIVMRDPVLYRVRFAEHHQTGDKWCIYPMYDFTHCISDALEGITHSICTLEFQDNRRLYDWVLDNITIPCHPRQYEFSRLNLEYTVMSKRKLNQLVTEKLVTGWDDPRMPTISGLRRRGFTPSAIREFCKRIGVTKQENMIEYSALESCIRDDLNENAPRAMAVLDPVKLVIENFAAGTVETLTLANHPNKPEMGDREVPFTRELWIEREDFREEANKKYKRLVLGKEVRLRGAYVIKAERIEKDEQGNITTIFCSYDPETLGKNPADGRKVKGVIHWVSAEKGVPAEFRLYERLFTVPNPGAADNFAETINPESLVKVQGYVEPSLVEAKPEFGYQFERMGYFCADNKDSSPQALVFNRTVGLRDSFAKIDEE

SEQ ID NO: 10967 - protein, 714 aa, Vibrio cholerae O1 biovar eltor str. N16961
MSRTIMLIPISAGVGLTSVSMGLLRAMERKGVSVSFYKPIAQPRTGDDQPDLTSTVMSRNSDIKIGQPMSMSAAETLIGSEKMDVLLETVVERYNQINKDAEVTLIEGLVPTRKHPFANQVNAEIANTLGAEIVFVATPGTDNPTQLKERIEVACSNFGGTKNKSISGVIINKLNAPVDEAGRTRPDLSEIFDDADHAKQANLEVMQIFNTSPIRVLGCVPWSIDLIATRAIDMAKHLKAEIINQGDINTRRIKSITFCARSIPNMIEHFKPGSLLVTSADRPDVIVAAALAAMNGVEIGAVLLTGGYDIPRELVSLCKPAFDTGLPIFKAQGNTWQTSLNLQSFSLEVPADDKERIEFISEHVASHIDGPWVDSLTEGAQASRRLSPPAFRYQLTELARSANKRIVLPEGDEPRTVKAAAICAERGIAQCVLLGNPEEIKRVAAQQGVELGSGIEIIDPKVAQEKYVARLVELRKSKGMTEVVAREQLEDTVVLGTMMLERNEVDGLVSGAVHTTANTIRPPLQIIKTAPNASLVSSIFFMLLPDQVLVYGDCAINPDPNAEQLAEIAIQSADSAAAFGIEPRVAMISYSTGTSGQGADVDKVREATRIAKEKRPDLVIDGPLQYDAAIMENVAASKAPNSPVAGKATVFVFPDLNTGNTTYKAVQRSADLVSIGPMLQGMRKPVNDLSRGALVDDIVYTIALTAIQAGQEQK

SEQ ID NO: 10968 - protein, 398 aa, Vibrio cholerae O1 biovar eltor str. N16961
MSKLVLVLNCGSSSLKFAVVDAQSGEQHLSGLAECLHLPEARIKWKLDGKHEAQLGEGAAHDEALSFIVETILASKPELAAQLKAIGHRVVHGGEQFTQSALIDDAVLKGIEDCAALAPLHNPAHIIGIKAAQKAFPELKNVAVFDTAFHQTMPEEAYLYALPYNLYKEHGIRRYGMHGTSHLFIAREAAERLGKPANELNIINCHLGNGASVCAIKNGQSVDTSMGLTPLEGLVMGTRCGDIDPAIIFHLHDTLGYSVEKINTMLTKESGLLGLTEVTSDCRFVEDNYGQKEEATRAMDVFCHRLAKYVAGYTASLDGRLDAITFTGGIGENSAPIREMVLNRLAIFGITVDSAANLKARFGGEGVITTADSRIPAMVIATNEELVIAEDTARLTNI

SEQ ID NO: 10969 - protein, 357 aa, Vibrio cholerae O1 biovar eltor str. N16961
MSKQQKILFIDRDGTLIVEPPVDFQVDRLDKLKLEPYVIPSLLKLQEAGYRLVMVTNQDGLGTSSYPQADFDAPHNMMMDIFESQGVKFNDVLICPHFERDNCSCRKPKLGLVKEYLQGGKVDFKSSAVIGDRMTDLQLAENMAIRGIQYHPQTMGWLDIVKDLTTKPRVAQVVRKTKETDIQVLVNLDQTGGNQIETGLGFFDHMLDQIATHGGFQLQLKVVGDLHIDDHHTVEDTALALGQALREALGDKRGIGRFGFTLPMDECLAQCALDLSGRPYLKFDASFSRPQVGDLSTEMVYHFFRSLTDTLACTLHLSSSGDNDHHIIESLFKAFGRTLRQAITVQGNDLPSSKGVL

SEQ ID NO: 10970 - protein, 76 aa, Vibrio cholerae O1 biovar eltor str. N16961
MYSMATGTVKWFNNAKGFGFICPEGEDGDIFAHYSTIQMDGYRTLKAGQQVSYQVEQGPKGYHASCVVPIEGQSAK

SEQ ID NO: 10971 - protein, 540 aa, Vibrio cholerae O1 biovar eltor str. N16961
MTQRGYMTKEIDKYSIDNTDYTVGQDNVQKWGFDVHNPVFGISAGLIAAFLLLTVLVDAHQAKIGLDTVKQSIIASFDWLFIWSGNLFLLFCVGLVISPFGKIRLGGQAAKADHSFLSWLAMLFAAGMGIGLMFWSVAEPVAYYTGWYETPLGVEANTPQAAQLAMGATMFHWGLHPWAIYGVVALSLAFFCYNKGLPLSMRSVFYPLLGDRAWGWAGHVVDILAVLATLFGLATSLGLGAQQAASGIHHVFGFESGIGLQIAVICVVTGLATLSVVRGIDGGVKVISNINMIVAFLLLALVAVIGYSVTLTSIPTTLMAYLQNLIPLSNPHGREDEVWFQGWTVFYWAWWISWSPFVGMFIARVSKGRTIREFIVAVLLIPTLVTLVWMSVFGGLAVDQVINEIGVLGQNGLTDVSLAMFQMFDSLVFGKVLSVIAVVLVLVFFITSSDSGSLVIDSITSGGKLDSPVLQRVFWAVLEGAVAVALLWIGGTEAVQALQAGVISTALPFTVILLLMCVSLWKGLKTEPEFMASSKRLHQS

SEQ ID NO: 10972 - protein, 204 aa, Vibrio cholerae O1 biovar eltor str. N16961
MQNISRHEFIQQFQLHLPAAYPQESLRRVAHLAPEKLRKASVLIGVVERPQGLQVIMTKRAAHLRHHPGQISFPGGKYEESDHSLQQTAKREAREEIGIPEEKIRIVGQLPELVTVSQFAVTPFLAFVESDYPIQLDHNEVDEVFEVPISFLLDRKKIYSGTFQLKKHRHKLFALSYKQHFIWGMTAQIIQSLQKQFINYNELV

SEQ ID NO: 10973 - protein, 280 aa, Vibrio cholerae O1 biovar eltor str. N16961
MEHNQFDSLLPPQMAERAAITGEGKAKKAAYKSFLLAISAGIQIGIAFVFYTVVTTGAHDMPYGVTKLLGGLAFSLGLILVVITGGELFTSSVLILVAKASGKISWKELVRNWTVVYFGNLCGSIILVFIMLATRQFMEDGGQLGLNAMAISQHKLHHTFLQAFALGLMCNILVCLAVWMTFSARSLTDKVMVLILPVAMFVSSGFEHCIANMFQVPMAIGIKYFAPESFWAMTGANIAQYADLNFVNFIVNNLIPVTLGNIVGGGVFVGMWYWLIYLKD

SEQ ID NO: 10974 - protein, 582 aa, Vibrio cholerae O1 biovar eltor str. N16961
MSLHSDESNWQTFKRLWTYIRLYKAGLVVSTIALVINAAADTYMISLLKPLLDEGFGNAESNFLRILPFMILGLMFVRGLSGFASSYCLSWVSGNVVMQMRRRLFNHFMHMPVRFFDQESTGGLLSRITYDSEQVAGATSRALVSIVREGASIIGLLTLMFWNSWQLSLVLIVVAPVVAFAISFVSKRFRKISRNMQTAMGHVTSSAEQMLKGHKVVLSYGGQEVERKRFDKVSNSMRQQTMKLVSAQSIADPVIQMIASLALFAVLFLASVDSIRAELTPGTFTVVFSAMFGLMRPLKALTSVTSEFQRGMAACQTLFGLMDLETERDNGKYEAERVNGEVDVKDVTFTYQGKEKPALSHVSFSIPQGKTVALVGRSGSGKSTIANLFTRFYDVDSGSICLDGHDVRDYKLTNLRRHFALVSQNVHLFNDTIANNIAYAAEGEYTREQIEQAARQAHAMEFIENMPQGLDTVIGENGTSLSGGQRQRVAIARALLRDAPVLILDEATSALDTESERAIQAALDELQKNKTVLVIAHRLSTIEQADEILVVDEGEIIERGRHADLLAQDGAYAQLHRIQFGE

SEQ ID NO: 10975 - protein, 374 aa, Vibrio cholerae O1 biovar eltor str. N16961
MIIGVPKEIKNHEYRVGMIPASVRELVSHGHQVYVETNAGSGIGFSDDDYIAVGASILPTAADVFAKAEMIVKVKEPQAIERAMLKEGQILFTYLHLAPDFPQTEELIKSKAVCIAYETVTDNMGRLPLLAPMSEVAGRMSIQAGAQTLEKSRGGSGLLLGGVPGVAPAKVVVLGGGVVGANAARMAIGLRADVTILDRNIDTLRKLDEEFQGRANVVYSTADAIEKYVLEADLVIGAVLIPGAAAPKLVTQQHIKRMKPGSAVVDVAIDQGGCFETSHPTTHAEPTYIVDDVVHYCVANMPGAVARTSTFALNNATLPYIVKLANKGYQKALLEDAGFLKGLNVIHGKVTYKEVAENFGLDYVDPAKAIAMFN

SEQ ID NO: 10976 - protein, 404 aa, Vibrio cholerae O1 biovar eltor str. N16961
MQNIGMSSKLDNVCYDIRGPVLKHAKRMEEEGHKILKLNIGNPAPFGFDAPDEILVDVIRNLPTSQGYCDSKGIYSARKAVVQYYQKKGIRSLDVEDVYIGNGASELIVMAMQALLNNGDEMLVPAPDYPLWTAAVALSGGKAVHYICDEEADWYPDLDDIRSKITPKTRGIVLINPNNPTGAVYSRDFLLEIIEIARKHKLMIFADEIYDKVLYDGAVHTSIATLADDVLVVTFNGLSKAYRVCGFRGGWMFLTGPKQQAQGYIAGLDMLASMRLCANVPMQHAIQTALGGYQSINELILPGGRLLEQRDRAWELINQIPGISCVKPKGAMYLFPKIDTKMYPIKDDQKMVLDFLVQEKVLLVQGSGFNWPKPDHFRIVTLPHVEDLEIAISRFERFITTYSQ

SEQ ID NO: 10977 - protein, 110 aa, Vibrio cholerae O1 biovar eltor str. N16961
METIDKIKQQIAENPILLYMKGSPKLPSCGFSSQAAQALMACGEKFAYVDILQNPDIRAELPVYAQWPTFPQLWIEGELIGGCDIMLEMFQKGELQTLVKEAAARSASQE

SEQ ID NO: 10978 - protein, 314 aa, Vibrio cholerae O1 biovar eltor str. N16961
MPDMKLFAGNAIPELAQRIADRLYISLGDATVSRFSDGEVAVQINENVRGSDVFIIQSTCAPTNDNLMELVVMIDAMRRASAGRITAVIPYFGYARQDRRVRSARVPITAKVVADFLSNVGVDRVLTIDLHAEQIQGFFDVPVDNIFGTPVLLEDMKARNLEDPVVVSPDLGGVVRARATAKALGDIDIAIVDKRRPRANVSEVMNLIGDVEGRDCVIVDDMIDTGGTLCKAAEALKERGAKRVFAYATHAVFSGNAAKNIKNSVLDQVIVTDSITLSKEMAATGKVTQLTLSSMLAEAIRRISNEESISAMFN

SEQ ID NO: 10979 - protein, 325 aa, Vibrio cholerae O1 biovar eltor str. N16961
MADQEFDIDAYFASQSEGKSVVASTPENQHCGFVAIVGRPNVGKSTLLNNLLGQKISITSRKPQTTRHRIMGVETDGNYQAIYVDTPGLHIEEKRAINRLMNRAASSSLSDVNLVLFVVEGTHWTADDEMVFTKLQKANFPVVLCVNKVDQVKDRNEVMLHMLELSKRMQFVDIVPISAKQGKNTDVLKKHVRDHLPKAVHHFPEEYVTDRSQRFMASEIVREKLMRFTGEELPYSVTVEIERFDYNPDTDGFHINALILVERIGQKKMVIGKNGEKIKTIGREARLDMEELFGRKVYLETWVKVKSGWADDERALRSLGYIDDL

SEQ ID NO: 10980 - protein, 409 aa, Vibrio cholerae O1 biovar eltor str. N16961
MAKVSLEKDRIKILLLEGLHPSSVEVLQAAGYSNIEYHKGSLEEAELIKAIKDVHFVGIRSRSNLTEKVINAAEKLVAIGCFCIGTNQVDLNAAAKRGIPVFNAPFSNTRSVAELVLGEILLLLRGIPEKNALAHRGIWKKSADNSYEARGKRLGIIGYGHIGTQLGIIAENLGMHVYFYDIESKLSLGNATQVHTLSELLNKCDVISLHVPETAGTKNMMGAEEFARMKPGAIFINAARGTVVDIPALCNALESGHIAGAAIDVFPEEPASNKEPFESPLMKFDNVILTPHVGGSTQEAQENIGIEVAGKLAKYSDNGSTLSSVNFPEVSLPEHRSCSRLLHIHANRPGILTQINTIFAEEGINIAAQYLQTTAEIGYVVIDVETARSEEALTKLKAIDGTIRARILH

SEQ ID NO: 10981 - protein, 325 aa, Vibrio cholerae O1 biovar eltor str. N16961
MSLPTTSLPTVVFLDRATIPRHISLPALPFEHHWLEYDACEPQQVVERLLAADIVITNKVVLTREMLIQLPKLKLIAISATGTNNVDLPACRDLNIAVCNVQGYATRSVPEHVVAMMFALRRNLIGYHNDIAAGEWQRHKQFCFFTHPIGDIAGSTMGIIGSGALGQATANLARALGMHVLLAERKGQVECRDGYTSFEQVLAQSDVLSLHCPLTDETRNIISEAELAQMNPNALLINTGRGGLVDEQALVDALKRRQIAGAGVDVFSAEPADMDNPLIANRDLPNLLLTPHVAWGSDSSIQQLATILIDNISAFMRGEAKNRVV

SEQ ID NO: 10982 - protein, 326 aa, Vibrio cholerae O1 biovar eltor str. N16961
MRMPHSFDYQTVAKQVLATEIHALQQLEQYINDDFARACAMILANQTGKVVVMGMGKSGHIGKKIAATLASTGTSAFFVHPGEASHGDLGMIERGDIVLAISNSGESSEILALLPVLKRLSIRVISMTGNPNSNMAKLADIHLQITVPREACPLELAPTSSTTATLVMGDALAVALMQARGFTAEDFALSHPGGALGRKLLLKLNDIMHSGDALPKVAPQALIRDALLEISQKGLGMTAIVDEQDTLLGIFTDGDLRRILDKRIDIHSTVIADVMTRQPTVAQPNLLAVEGLNLMQAKRINGLMLVENNKLVGALNMHDLLKAGVM

SEQ ID NO: 10983 - protein, 277 aa, Vibrio cholerae O1 biovar eltor str. N16961
MKKQRAFLKWAGGKYSLVEDIQRHLPEARELVEPFVGAGSVFLNTDFERYLLADINPDLINFYNLLKTEPQAYIHEAKRWFVPENNRKEVYLDIRKQFNQSDDAMFRSLAFLYMNRFGFNGLCRYNKKGGFNVPFGSYKKPYFPEQELEFFAEKAQRATFICASYGETFARAQSDSVIYCDPPYAPLSTTANFTSYAGNGFTLDDQAALADIAEKTAKERGISVLISNHDTTHTRRLYRGAQLNVVKANRTISRNGAGRNKVDELLALFTPHLSSQA

SEQ ID NO: 10984 - protein, 404 aa, Vibrio cholerae O1 biovar eltor str. N16961
MSKVQVKKVVVAYSGGLDTSVIIPWLKENYDCEVVAFVADVGQGDEELKGVEAKALSSGASECYIVDLKEEFVKEYIYPTLKTGAYYEGKYLLGTSMARPVIAKAQVEIARKVGADALAHGCTGKGNDQVRFEGAFAALAPDLHVIAPWREWDLRSREACLDYLAERNIPCAASLTKIYSRDANAWHVSTEGGVLESTWNAPNEDCWVWTVDPEQAPNEAEYVTLQVAHGEVVAVDGEAMTPYNALLYLNQKGAKHGVGRIDIVENRLVGMKSRGCYETPGGTIIMEALRAVEQLVLDKTSFEFREELGIKASHLVYDGRWFTPLRQAVFAAADELAKDVNGEVVIKLYKGQAVATQKRSANSLYSEDFATFGADEVYDHSHAGGFIRLYSLSSRIRALSQNKQ

SEQ ID NO: 10985 - protein, 803 aa, Vibrio cholerae O1 biovar eltor str. N16961
MTHPRQLHKFGGSSLADPECYQRVAKILKSYSKSDDLVVVSAAGKTTNRLISFVEALSKDGRVAHETLHALRQYQSELITKLLSNEAAEPLLSQLQQEISVLGELTAPLSNAQYAWVLGHGELWSARLLAALLNQQDLPAVAQDARTFLRAEAGTQPEVDRARSYPLLKAVLAQHTQRRVVITGFMAQNEQGDTVLLGRNGSDYSATVIGALAEVSRVTIWSDVAGVYSADPRIVSDACLLPLLRLDEANELARLAAPVLHSRTLQPVAQSTMELHLRCSHQPESGSTRIERVLASGRGAKIITSLDDVLLIELSFAHHHDFQRVQEDVLQHLQRVQLQPLTYEAQPDQYRLRLAYTAEIAPGAFAALQDAAFEAEIKLKEGYDLIAAVGAGVTKNPNHCYGFYQQLNALPVEFISASESSLSLVAVLRQTPIHSLVNAIHKQLFQAQKHVAIALCGKGNIGSSWLKLFAEQKEKLEQRHGMNFELVAVVDSQTYWFNEQGINPNQVATHFQDEALPNQEQSWLKKLGALEGYDEAVVIDVTASEELAEQYLDIAEHGLHLISANKVAGSAAGNYYYQVKDAFHKIGRHWLYNATVGAGLPINHTVRDLRESGDDIMALSGIFSGTLSWLFQQYDGSLPFSELVDLAWQQGLTEPDPRCDLDGSDVMRKLVILARESGLEIEPQNVKVESLVPAELRSVSLDDFLDNSKLLNEQLAERLARAQKQGKVLRYVARLEKNGKASVGVEALEQDHPLANLLPCDNIFAIESKWYRDNPLVIRGPGAGREVTAGAIQSDLNLLASLL

SEQ ID NO: 10986 - protein, 387 aa, Vibrio cholerae O1 biovar eltor str. N16961
MNTVVIVDCLRTPMGRSKGGAFRHQRAEDLSAHLMKGILARNPQVNPKEIEDIYWGCVQQTLEQGFNVARNAALLAGLPIEIGAVTVNRLCGSSMQALHDAARAIMVGDAEICLVGGVEHMGHVPMTHGVDFHPGLSKNVAKAAGMMGLTAEMLGKLHGISRQQQDEFAARSHARAHAATLEGRFKNEILPTEGHAADGTLFTLDYDEVIRPETTVAGLAELRPVFDPANGTVTAGTSSALSDGASAMLVMSEQKAKALGLTIRARIKAMAVAGCDPSIMGYGPVPATHKALQRAGLTMQDMDVVELNEAFAAQSLPCAKDLGLLEMMDDKVNLNGGAIALGHPLGCSGTRISTTLINLMEAKDAKYGLATMCIGLGQGIATIFERP

SEQ ID NO: 10987 - protein, 435 aa, Thermotoga maritima MSB8
MNIERADFVDRVKIFVKAGDGGNGCVSFRREKYVPKGGPDGGDGGNGGFVFLRANPSVSTLIEFVNKRKFMAENGKHGMGKKMKGRNGKDLFIDVPVGTVVKDAVTGEVIADLNEPGKIVCVARGGRGGRGNAHFATSIKQAPLIAERGEKGESRWLELELKILADVGLVGYPNVGKSSLISRISNARPKIANYPFTTLIPNLGVVKYDDFSFVVADIPGLIEGASEGVGLGNVFLRHVERCYLIAHVIDVSGYEREDPVRDYFVIREEMKKYSPFLLEKPEIVVANKIDLIGKEELEKILKRLRDATNREVIPVSAVTGEGIDLLVSKLASIVREMKVEKPERKEEKFVKPSPVWRRLPEKFHLEVVKEDEGYWVVEGENLRVWIERFDLNQRDARLMLLQVLEKNGLNNKLKEAGVKEGDVVRIGDFEFEYRE

SEQ ID NO: 10988 - protein, 820 aa, Thermotoga maritima MSB8
MFDKFSEKTAQIFVTAQEEAKELGHSYVGTEHLLLAILKVDRSPAVELLEEMGASYSKVRSEIISMVGMGMRGFVPSPQMTPRAKRVTELAYEEAKILGSDKINPEHLLLGILREGEGIAIHILRKLGVDIATLRREIIDIYSYSSNKNLEYEEEEDYTYRSVKQLEGFGVNLTELAAKKELDPVIGREEEIERVMQVLVRRKKNNPVLIGDPGVGKTAIVEGLAQRIVAGDVPEILKNKVIFSLDVAALVAGTKYRGEFEKRMKKLLQIVTKDKNIILFIDEIHTIVGAGSAEGAIDAANILKPALARGEISCIGATTPDEYRRYIEKDAALERRFQKIYVKEPTEEETLEILKGLKRKYEAHHKVIYTDKALEAAVYLSKRYITDHYLPDKAIDVIDEAGARARLKVFVLPPELKDMKLELERIRSDKELAVLNQDYEKAAQLKEEEMELEAEYRKRYAEWRRRAETAVVKVDVDDVAEVVSSWTGVPLRKIEETEVEKLLNLEEALHQRIVAQDEAIKAVARAIRRARSGLKDPRRPIGVFLFLGPTGVGKTELAKALAEYLFGDERALIRFDMSEYMERFSVSRLIGAPPGYVGYEEGGTLTEKVRRRPFSVILFDEIEKAHPDVFNILLQIMDDGRLTDSQGREVDFRNTIIIMTSNIGSSYINKSKRTLGFVGDNNEEKEFEKIKDLVLEEVKRTFRPEFLNRIDETIIFHPLKKEHIEQIIDILLRDLRKRLSEKNMKLVLTKSAKEFLVEKGFDPVYGARPLKRAIQRYVEDPLSEEILRGKFNEGDTIVCRARKDALRFTRKGEKKEKVVQ

SEQ ID NO: 10989 - protein, 403 aa, Thermotoga maritima MSB8
MRVLVINSGSSSIKYQLIEMEGEKVLCKGIAERIGIEGSRLVHRVGDEKHVIERELPDHEEALKLILNTLVDEKLGVIKDLKEIDAVGHRVVHGGERFKESVLVDEEVLKAIEEVSPLAPLHNPANLMGIKAAMKLLPGVPNVAVFDTAFHQTIPQKAYLYAIPYEYYEKYKIRRYGFHGTSHRYVSKRAAEILGKKLEELKIITCHIGNGASVAAVKYGKCVDTSMGFTPLEGLVMGTRSGDLDPAIPFFIMEKEGISPQEMYDILNKKSGVYGLSKGFSSDMRDIEEAALKGDEWCKLVLEIYDYRIAKYIGAYAAAMNGVDAIVFTAGVGENSPITREDVCSYLEFLGVKLDKQKNEETIRGKEGIISTPDSRVKVLVVPTNEELMIARDTKEIVEKIGR

SEQ ID NO: 10990 - protein, 598 aa, Thermotoga maritima MSB8
MPEIRRRPHGPILEKPALKNPTATLRRLLGYLRPHTFTLIMVFVFVTVSSILGVLSPYLIGKTIDVVFVPRRFDLLPRYMLILGTIYALTSLLFWLQGKIMLTLSQDVVFRLRKELFEKLQRVPVGFFDRTPHGDIISRVINDVDNINNVLGNSIIQFFSGIVTLAGAVIMMFRVNVILSLVTLSIVPLTVLITQIVSSQTRKYFYENQRVLGQLNGIIEEDISGLTVIKLFTREEKEMEKFDRVNESLRKVGTKAQIFSGVLPPLMNMVNNLGFALISGFGGWLALKDIITVGTIATFIGYSRQFTRPLNELSNQFNMIQMALASAERIFEILDLEEEKDDPDAVELREVRGEIEFKNVWFSYDKKKPVLKDITFHIKPGQKVALVGPTGSGKTTIVNLLMRFYDVDRGQILVDGIDIRKIKRSSLRSSIGIVLQDTILFSTTVKENLKYGNPGATDEEIKEAAKLTHSDHFIKHLPEGYETVLTDNGEDLSQGQRQLLAITRAFLANPKILILDEATSNVDTKTEKSIQAAMWKLMEGKTSIIIAHRLNTIKNADLIIVLRDGEIVEMGKHDELIQKRGFYYELFTSQYGLVVEKE

SEQ ID NO: 10991 - protein, 218 aa, Thermotoga maritima MSB8
MKIFLDTANLEEIKKGVEWGIVDGVTTNPTLISKEGAEFKQRVKEICDLVKGPVSAEVVSLDYEGMVREARELAQISEYVVIKIPMTPDGIKAVKTLSAEGIKTNVTLVFSPAQAILAAKAGATYVSPFVGRMDDLSNDGMRMLGEIVEIYNNYGFETEIIAASIRHPMHVVEAALMGVDIVTMPFAVLEKLFKHPMTDLGIERFMEDWKKYLENLKK

SEQ ID NO: 10992 - protein, 327 aa, Thermotoga maritima MSB8
MKKILIVTRTFGKYSQEPVEFLRKEGFEIIRSDTIDPDILKEVDALIVGTHPVTAEMVENSSLKIIAKHGVGVDNIDLEAATKKGIPVTITAGANSLSVAELTIAFIFALSRGLVWAHNKLFLERRWEGTVGQEVSGKTLGVVGFGSIGREVVKKAVCLGMNVLVYDPYVSKDSVRLLEATPVDDLEQLLKESDFVSLHVPLNESTKNMIGERELSLMKKSAFLINTSRGELVDEEALVKALKEGRIAGAALDVFSEEPPDANSPLFECPNLITTAHIGAHTKEAIFRMNMMAAQSIVDFFKGRIPRYVVNKEVIRILKEKGYQEIS

SEQ ID NO: 10993 - protein, 147 aa, Thermotoga maritima MSB8
MLLGRREDIFRPFRELQREIDRLFDDFFRTEVRPAKEFFAPDMDVYETDDEVVIEVEIPGIDRKDVKITVEENILKISGEKKLEREQKGKNYYYVERSAGKFERAIRLPDYVDVEKIKAEYKNGVLTIRVPKKEERKKKVIEVEVQE

SEQ ID NO: 10994 - protein, 507 aa, Thermotoga maritima MSB8
MAKRKVPPEFVVERDDYKCIRCLACVRVCSYGANFYDENANRVYTENTKCVGCHFCEAICPTEAITVRKNDFDIRPLAHWTPEHLIGIMKQAETGGVLLTSMGNDRPYFSYFDRIVLNASQVTNPSIDPLREPMEIRTYIGRKEEKLEIEEDEDGTVKLKTEIAPQLKLEVPVMFTAMSYGSISLNAILSLARAARTVGTFFNTGEGGLPKELREFKDNMIVQVASGRFGVSADYLNAGSAVEIKIGQGAKPGIGGHLPGEKVTEPISETRMIPVGTDALSPAPHHDIYSIEDLRQLIYAIKEATRYEKPVGVKIAAVHNVAPIAAGAVRAGADYIVIDGIRGGTGAAPKITRDHVGIPIEFAVAVVDQRLREEGIRHMASIVVAGGIRNSADVIKAIALGADAVYIGTAALISLGCHLCQTCYLGKCNWGIATQDPKLTKRLNPEIGARRAANLLRAWAHEIKEILGGMGINAIESLRGNREVLRGVGLHEYELKLLGIKPAGEAW

SEQ ID NO: 10995 - protein, 435 aa, Thermotoga maritima MSB8
MRKRVFSLLLVLAFLSVGFAQDGVTDVGWSLDMVWILISAALVFFMQAGFAMVESGFTRAKNTVNVLMKNLMDFAIGSVVFFIFGYWIMFGKHPLTFDPSTKEGLWDFAMWMFQMAFAGTAATIVSGAMAERTKFPAYLAYTGFITGIIYSVVGRWIWGGGWLAQKGFIDFAGSTVVHSVGGWAAMIGASLLGPRFGKYDSQGNPKPIPGHNIPLAALGTFILWFGWFGFNGGSTLAGTNGAIGMIILNTNLAAATGALAAMVTVWAKYGKPDASMTMNGALAGLVAITAPCAVVSPVSSLIIGAIGGVIVVFAVEFFDKVLKIDDPVGAISVHGVNGAWGTLAVGLFAESKYALASGMGDVNGLFFGGGVHQLGVQFLGVVSVFAWTVVTSFLVFWFIKKTIGLRVDRDIELKGLDIEEHGMEGYADFEIFTTR

SEQ ID NO: 10996 - protein, 364 aa, Thermotoga maritima MSB8
MITTTIFPGRYVQGAGAINILEEELSRFGERAFVVIDDFVDKNVLGENFFSSFTKVRVNKQIFGGECSDEEIERLSGLVEEETDVVVGIGGGKTLDTAKAVAYKLKKPVVIVPTIASTDAPCSALSVIYTPNGEFKRYLFLPRNPDVVLVDTEIVAKAPARFLVAGMGDALATWFEAESCKQKYAPNMTGRLGSMTAYALARLCYETLLEYGVLAKRSVEEKSVTPALEKIVEANTLLSGLGFESGGLAAAHAIHNGLTVLENTHKYLHGEKVAIGVLASLFLTDKPRKMIEEVYSFCEEVGLPTTLAEIGLDGVSDEDLMKVAEKACDKNETIHNEPQPVTSKDVFFALKAADRYGRMRKNLT

SEQ ID NO: 10997 - protein, 739 aa, Thermotoga maritima MSB8
MRTYRSFKMFTNSSQGVRKVRVGIAGLGTVGGSIYRILKERGNEIEKRIGEKFIISKVINRSPQKYELLGVPKEEIAFDFDDLILNSDVVVEAIGGTDVAVDLVRRALELGRIVVTPNKNLISEYGNEFSEYIKKRKLFFEASVGGGIPIISLLQDYLIFQKVTRIRGIMNGTTNYILTEMSKGRHFEEVLKEAQELGYAEADPTNDIEGYDVAYKVSVLAGVVTGRFPGINSVQFEGITRIDPEYLKEIVRSGKKLKLIGELDFSTNRYEVRLREVTPEDPFFNVDGVDNAIEVSTDLAGDFLLKGRGAGGYPTASAVIADLFRVAKYKVLGGAEKFSVVVMKFGGAAISDVEKLEKVAEKIIKRKKSGVKPVVVLSAMGDTTDHLIELAKTIDENPDPRELDLLLSTGEIQSVALMSIALRKRGYKAISFTGNQLKIITDKRYGSARIIDINTDIISRYLKQDFIPVVAGFQGITETGDITTLGRGGSDLTAIALAYSLGADLCELYKDVDGVYTADPRIVKDARVIKELSWEEMIELSRHGAQVLQARAAEFARKYGVKVLIKNAHKETRGTLIWEGTKVENPIVRAVTFEDGMAKVVLKDVPDKPGVAARIMRTLSQMGVNIDMIIQGMKSGEYNTVAFIVPESQLGKLDIDLLKTRSEAKEIIIEKGLAKVSIVGVNLTSTPEISATLFETLANEGINIDMISASSSRISVIIDGKYVEDAVKAIHSRFELDRE

SEQ ID NO: 10998 - protein, 584 aa, Thermotoga maritima MSB8
MVHVKMKGSKMLFEALLKEGVDTIFGIPGGAIINVYDELCNYEDKINFYLFRHEQGATHAADGYARVTGKPGVVIVTSGPGATNTVTGIATAYMDSIPIVVITGQVPTSFIGTDAFQEVDVTGITMPITKHNHLVTSIEELPYAIKEMFYVATTGRPGPVLLDFPKDIQTAEGEFNYPDTVEIPGYKPTVKGHPKQIKKAVELLKESKRPVVIVGGGANLSGAMDLVNQFIDKFKVPAVSTLMGRGVNPSDEKLYYEGIGMHGTYYGNYAVANADLIIALGVRFSDRILGNPRTFAKNARIVHVDIDPAEIGKNVRVDVPIVGDLKSVLEEFLKYEIETDFSDWIEELQEIKKKYPLTYKRDGKLIKPQYVVEKVNEVFPDDTVVVADVGQNQMWVAQFYKFKHQRSFLCSGGLGTMGYALPAGIGAKIGAPDKEVVVFAGDGGFQMNIQELMTIKRYNLPVKIIVMDNKALGMVRQWQQLFFNCRYSATILSDNPDFAKIAEAVGIKAMRIEKPDQVDEAIEKLAKSKEPMLIHAVVDPAENVLPMVPPGGDVGTPLIEAPYDETFVERVLKVIEESRRGDER

SEQ ID NO: 10999 - protein, 246 aa, Thermotoga maritima MSB8
MKKLLAVSILLVSIVIFSGAIDEIKSRGYLLVGLSADFPPFEFVDENGNIVGFDVDLAKEIARRLGVELKIVDMTFDGLIPSLLTKKIDVIISGMTITEERKKVVAFSDPYFDAGQVIVVRKDSDFRPKTYEDLVGKTVAVQIGTTGDIEVSKYDGIKVVRFDKFTDAFLELKRGRADAVVLDSATARAFVAKNPDLVISSGVLSSEQYGIAVRKEDTDLLEFINSVLRELKKSPYDVLIEKWFSE

SEQ ID NO: 11000 - protein, 304 aa, Thermotoga maritima MSB8
MKLIESVPNFSEGRRKEVVEKIVAEAKKYDRVWVLDWSMDADHNRSVITLVGEPENLINALFDMTKKAAELIDLRNHTGQHPRMGAADVIPLVPLYNTTMEECVEYSKILGRRIGEELGIPVYLYEKSATRPERQNLADIRKGEFEGFFEKIKDPLWKPDFGPDRVHPTAGVTAVGAREFLIAFNVNLGTRDVKIAEKIARAIRFSSGGLRYVKAIGVDLKGRGVVQVSINITNHKKTPLYRVFELIKMEAERYGVPVLGSEIVGLFPLESLLKTVSYYLRTDLNAKKVIESNLLEILVRESEK

SEQ ID NO: 11001 - protein, 300 aa, Thermotoga maritima MSB8
MSIKSGFVALAGKPNVGKSTFINAVMGRKVVIVSDKPQTTRNRINCIYTDKDSQIIFVDTPGIHKPLHRLGEYMVKAAVQALKGVDLVLFMLDAADGFTKTDEHVAKIVNDSGTKTIIAVNKIDVAGEEKAKAVGELAKSMVENVVSVHYISALKGEGVFEVLEKIKEELPEGPQYYPEDMVTDRPLSFMAAEIIREKIFHLTRQEVPHSTAVVIEEIKDRPNGVLYIRANIYVERDSQKGILIGKNGSMIKKIGTLAREELEFLVGRKVYLDLNVKVKEKWREKDFIILQEIGLKDDIK

SEQ ID NO: 11002 - protein, 114 aa, Thermotoga maritima MSB8
MLNIYLKSKIHMATITRKEVYYEGSIEIDEELMGKAGISEGELVLVVNVNNAERFVTYVIKGKRGSREINLYGAAARLGEEGDRVIIMAFTFSDKPVKAKTIVLNEKNEIVQEK

SEQ ID NO: 11003 - protein, 359 aa, Thermotoga maritima MSB8
MMKMEKKLSARTNFILTVVFLIFMALLLYLADRYMDSYKLRVVRLIAIYGIMAVSLNLINGITGIFSLGHAGFILIGAYTASLLTLSPEQKAMSFIIEPIVPWLANAHTDFFTATVAGGVLAAVFAFLIGWPVLRLSGDYLAIASLGFAEVIRIIALNAISITNGPLGLKGIPEYSNIWWCYGWLFVTVLFMASLVNSSYGRALKAIREDRIAAEAMGINVFKHQLLSFVIGAFFAGVSGSLYAHWLTTIDPRTTTLGPMLTFYVLIMIVLGGLGSISGSLIGAALFAILFEWLRDLEEPFTFFGIHVPGIKGMRILVISAIFILVMIFWQRGIMGREELTWNNLYRWLFARRRGGEEK

SEQ ID NO: 11004 - protein, 377 aa, Thermotoga maritima MSB8
MVSRRISEIPISKTMELDAKAKALIKKGEDVINLTAGEPDFPTPEPVVEEAVRFLQKGEVKYTDPRGIYELREGIAKRIGERYKKDISPDQVVVTNGAKQALFNAFMALLDPGDEVIVFSPVWVSYIPQIILAGGTVNVVETFMSKNFQPSLEEVEGLLVGKTKAVLINSPNNPTGVVYRREFLEGLVRLAKKRNFYIISDEVYDSLVYTDEFTSILDVSEGFDRIVYINGFSKSHSMTGWRVGYLISSEKVATAVSKIQSHTTSCINTVAQYAALKALEVDNSYMVQTFKERKNFVVERLKKMGVKFVEPEGAFYLFFKVRGDDVKFCERLLEEKKVALVPGSAFLKPGFVRLSFATSIERLTEALDRIEDFLNSR

SEQ ID NO: 11005 - protein, 246 aa, Thermotoga maritima MSB8
MLRIVNLHAKLRDEDKEILKGVNLEIEKGEVHVLMGPNGSGKSTLANVIMGNPRYIVTEGDIVFEGNSIKDLPPNERAKLGIMMTFQNPYEVEGVKLSQFLITAHRRIHGEDKNYLELRKELEETAEKLGLDKDFLERYLNVGFSGGEKKRSEILQSLFLRPKLLILDEIDSGLDVDALRLIANLIARLNEEGVTLLIITHYKRLLDHLKRIDKVHVYVDGRIVTSGGPELADEIEEKGYSLEGVR

SEQ ID NO: 11006 - protein, 791 aa, Thermotoga maritima MSB8
MFNLEEYTEKAQKVMMSIQDIMTRYRQNQLSSEHILLAILEEGNNVGVELLKELNVDINRLKDEVEVFIGKYGVRVPEGASVSQIFITPDARHVIEKAREEARRMGDSKIGTEHLILGMVLSPDSTAFRILSRYGVTPERVYEAIRKIRSTGKTDEAENVEALARFTVDLTQLAREKKLMPVVDREKEIRRVIQILSRRTKNNPVLIGDPGVGKTAVVEGLAQRIVEGKVPLFLRNVRVLKLDMGRLVAGTRFRGDFEERLKRLLDELKRKKGEVILFIDEVHTVVGAGAAEGALDAANIMKPELTTGEIQIIGATTVEEYRKYIEKDRALERRFQPVMVEEPTVEQTIEILKGLRKVFEEHHHVKITDDALEAAAKLSARYITNRFLPDKAVDLIDEAAAYVRLESSYPSEELLKLEEEIKNLEDKINDAVVKGEYEEAAKLKVELQKLKNEYEEKRKKQEKVEPVVDENVVAKIVEQWTGIPVSRIMESEREKLLKLEEFIHQRLVNQEEAVKIVARTIRRARVGIKNPRRPIGVFLFLGPTGVGKTELARTLADVLFGSEDAMIRLDMSEYMEKHSVARLIGAPPGYVGYEEGGQLTEAVRKRPYSVILLDEIEKAHPDVFNILLQVFEDGRLTDGKGNTVDFRNTIIIMTSNIGSEKILEMSENGVRIEIEKELRNTFKPEFLNRIDAIVYFKPLTMEEVKKIVEIMVRQLQEILKEKNISIELTERAKEYLAEAGYVPSLGARPLRRIIELELESMIADKILEGEIKEGDRVLVDADEYGLKIERR

SEQ ID NO: 11007 - protein, 306 aa, Thermotoga maritima MSB8
MARYRVHVNDPLDKEATQLLMNKEELEVTSEHLEKDELMKIIPEVDVLVVRSATKVTADIIEAGKNLKIIARAGIGLDNIDVQKAKEKGIKVLNTPGASAPSVAELAMGLMLACARHIARATVSLKEGKWEKKALKGKELLGKTLGLIGFGNIGQEVAKRALAFGMKIIAYDPAKPETDLPVEYVDLDTLFKESDFISLHVPLTESTRHIINRESIAKMKDGVIIVNTARGGTIDEEALYEEVVSGKVYAAGLDVFEVEPPTDEIRRKLLSLDNVVATPHIGASTAEAQRRVGIELVEKIFKELGI

SEQ ID NO: 11008 - protein, 245 aa, Thermotoga maritima MSB8
MNVLELIDVWYEVEGKAILKGINARFEKQRVYSILGTNGAGKSTLAYLIMGLEGYRPTRGKILLDGEDITDLSVTERAKRGITLMWQEPARFTGIKIRDYLTLGGRRKVSKEELERVLELVGLNPALYLERNVDEKLSGGERKRVELASILLMKPRYTILDEPDSGIDIMSLEMIEKVLSELVSAGGSVILVTHREEIALESDYAFLICHGSILKEGNPSEIVQFYKNSCDRCDHPNEPSGEMIV

SEQ ID NO: 11009 - protein, 105 aa, Thermotoga maritima MSB8
MLYAIVETAGRQYRVEEGKILYTEKQKDYSPGDEIVFDRVVFVRKDGEVLVGKPYVEGAKVVGKVLEHAKARKVKTVKYRPRKNSKVEKGHRQWYTAIKIEKIEL

SEQ ID NO: 11010 - protein, 445 aa, Thermotoga maritima MSB8
MVLRKVVAILLAILPIFLFAVEPIKVVRSEKEIVVLTRFEEYHFDLEKGILKDFYTLVDGRKHVFTYGNDGFDVLDEGTPLTVIEEPIVTGVGKVSEGFSDEVSIVYNYGYVKKIFTIKNNENYTFFVDIESSKPVDVTVPRVSVDTSTDRYLENYFASFNPKTRTLVLLKHDEGLLFEGTLKVNGQKRFIVFMGPNKRTLIKKAFPEDYDVLIKALVNIPGFNKWYDSVFYGLVWFFWWLKDLTKNFGWAIMLFTLIVRLILYPLYHAQTKSLINMRKLQPQIEAIKKKYKDPTKQQEALLKLYREAGVNPASGCLMLLIQLPIFMLLWSVIRYYVEEFAYSGSFLIWKDLSAGGFSNNWLFLVITIVASYYTTLLTSQDARTAWQGIIMSVIFPFLFVGLPSGLFLYYATNTLIQLAVTYYTYKRYKIKGLTTRELLGLPKKA

SEQ ID NO: 11011 - protein, 401 aa, Thermotoga maritima MSB8
MNVVVQKYGGSSVATPERIKNVAQRIKKKVDEGYKVVVVVSAMGKTTDNLIKLAKEISPRPDSRELDMLLATGEQVSAALLSMALKDLGVKAKSLNAFQVKIKTTPHHTSARIVDIDDSVIRENLKDYDVLVVTGFQGVNEHGDLTTLGRGGSDTSAVALAAKLRVPCEIYSDVDGIYTCDPRVHPRAKKLAYITYDEALELTALGAKVLHSRSVEIAKKYGIPIYCASSFTEEEGTMVVERLPEWLEEPVVTGATISHGQIKVSISFLPKDVKYITAIFEEVGKRALNVDMISLVPSNGKVFLSFTILEDHKEDLDEALKEALRDVEGWKSTYEGGFAKLSIVGVGMRTSPGVAARFFEALERAGVTPELVTTSEIKISCLVPEEKAEEALKSVIEEFEL

SEQ ID NO: 11012 - protein, 315 aa, Thermotoga maritima MSB8
MSFSNEMKVFSGNANRPLAEKIANYLNLQLGDCEVGRFADGEINVRINETVRGHDIFLIQPTSPPVNENLMELLIMIDAFKRASANTIAVVIPYYGYARQDRKAKGRDPISAKLVANLITVAGATRVLTVDLHAEQIQGFFDIPVDNLWSYPVFAEELLKRENIVPEETVVVSPDVGGVRRARRMAERLGTSLAILDKRRPSDNVAEVVNIIGEVEDKVVIMFDDIIDTAHSIVKGAEALKNAGAKRIIACATHGVFSDRALERIENSSIDTVYITDTIYHENLPEKVKVISVANLIGEAIMRIRKHLSVSTLFR

SEQ ID NO: 11013 - protein, 66 aa, Thermotoga maritima MSB8
MRGKVKWFDSKKGYGFITKDEGGDVFVHWSAIEMEGFKTLKEGQVVEFEIQEGKKGPQAAHVKVVE

SEQ ID NO: 11014 - protein, 384 aa, Thermotoga maritima MSB8
MRVYFDNNATTRVDDRVLEEMIVFYREKYGNPNSAHGMGIEANLHMEKAREKVAKVLGVSPSEIFFTSCATESINWILKTVAETFEKRKRTIITTPIEHKAVLETMKYLSMKGFKVKYVPVDSRGVVKLEELEKLVDEDTFLVSIMAANNEVGTIQPVEDVTRIVKKKNKETLVHVDAVQTIGKIPFSLEKLEVDYASFSAHKFHGPKGVGITYIRKGVPIRPLIHGGGQERGLRSGTQNVPGIVGAARAMEIAVEELSEAAKHMEKLRSKLVSGLMNLGAHIITPLEISLPNTLSVSFPNIRGSTLQNLLSGYGIYVSTSSACTSKDERLSHVLDAMGVDRRIAQGAIRISLCKYNTEEEVDYFLKKIEEILSFLDLTGNNRR

SEQ ID NO: 11015 - protein, 375 aa, Thermotoga maritima MSB8
MFRILTINPGSTSTKLSIFEDERMVKMQNFSHSPDELGRFQKILDQLEFREKIARQFVEETGYSLSSFSAFVSRGGLLDPIPGGVYLVDGLMIKTLKSGKNGEHASNLGAIIAHRFSSETGVPAYVVDPVVVDEMEDVARVSGHPNYQRKSIFHALNQKTVAKEVARMMNKRYEEMNLVVAHMGGGISIAAHRKGRVIDVNNALDGDGPFTPERSGTLPLTQLVDLCFSGKFTYEEMKKRIVGNGGLVAYLGTSDAREVVRRIKQGDEWAKRVYRAMAYQIAKWIGKMAAVLKGEVDFIVLTGGLAHEKEFLVPWITKRVSFIAPVLVFPGSNEEKALALSALRVLRGEEKPKNYSEESRRWRERYDSYLDGILR

SEQ ID NO: 11016 - protein, 409 aa, Thermotoga maritima MSB8
MKEKVVLAYSGGLDTSVILKWLCEKGFDVIAYVANVGQKDDFVAIKEKALKTGASKVYVEDLRREFVTDYIFTALLGNAMYEGRYLLGTAIARPLIAKRQVEIAEKEGAQYVAHGATGKGNDQVRFELTYAALNPNLKVISPWKDPEFLAKFKGRTDLINYAMEKGIPIKVSKKRPYSEDENLMHISHEAGKLEDPAHIPDEDVFTWTVSPKDAPDEETLLEIHFENGIPVKVVNLKDGTEKTDPLELFEYLNEVGAKNGVGRLDMVENRFIGIKSRGVYETPGATILWIAHRDLEGITMDKEVMHLRDMLAPKFAELIYNGFWFSPEMEFLLAAFRKAQENVTGKVTVSIYKGNVMPVARYSPYSLYNPELSSMDVEGGFDATDSKGFINIHALRLKVHQLVKKGYQR

SEQ ID NO: 11017 - protein, 66 aa, Thermotoga maritima MSB8
MRGTVKWFDSKKGYGFITMENGEDIFVHWSAIQMDGFKTLRENETVEFEVQKGTKGPQAVNVRPVR

SEQ ID NO: 11018 - protein, 117 aa, Helicobacter pylori 26695
MTFEMLYSKIHRATITDANLNYIGSITIDEDLAKLAKLREGMKVEIVDVNNGERFSTYVILGKKRGEICVNGAAARKVAIGDVVIILAYASMNEDEINAHKPSIVLVDEKNEILEKG

SEQ ID NO: 11019 - protein, 620 aa, Helicobacter pylori 26695
MGKVIGIDLGTTNSAMAVYEGNEAKIIANKEGKNTTPSIVAFTDKGEILVGESAKRQAVTNPEKTIYSIKRIMGLMFNEDKAKEAEKRLPYKIVDRNGACAIEISGKVYTPQEISAKILMKLKEDAESYLGESVTEAVITVPAYFNDSQRKATKEAGTIAGLNVLRIINEPTSAALAYGLDKKESEKIMVYDLGGGTFDVTVLETGDNVVEVLATGGDAFLGGDDFDNRVIDFLASEFKSETGIEIKNDVMALQRLKEAAENAKKELSSAMETEINLPFITADATGPKHLVKKLTRAKFESLTEDLMKETISKIESVIKDAGLTKNEISEVVMVGGSTRIPKVQERVKAFINKDLNKSVNPDEVVAVGASIQGGVLKGDVKDVLLLDVTPLSLGIETLGGVMTKVIDRGTTIPAKKSQVFSTAEDNQPAVSIMVLQGERELARDNKSLGKFDLQGIAPAPRGVPQIEVTFDIDANGILTVSAQDKNTGKSQEIKISGSSGLSDSEIEKMVKDAELHKEEDAKKKEVIEARNHADSLAHQTQKSLDEHKTNLNENDANEIQNAINALKDCVKNDNATKAELEDKTKLLAQAAQKLGEAMANKNNAEQPKKKDDDVIDAEVE

SEQ ID NO: 11020 - protein, 574 aa, Klebsiella pneumoniae
MEMLSGAEMVVQSLVDQGVKQVFGYPGGAVLDIYDALHTLGGIDHVLVRHEQAAVHMADGLARATGEVGVVLVTSGPGATNAITGIATAYMDSIPLVILSGQVATSLIGYDAFQECDMVGISRPVVKHSFLVKQTEDIPGVLKKAFWLAASGRPGPVVDDLPKDILNPAKKLPYVWPDAVSMRSYNPTTSGHKGQIKRALQTLVAASKPVVYVGGGAINAHCEPQLRELVEKLKLPVASSLMGLGAFPATHSQALGMLGMHGTYEANMTMHHSDVIFAVGVRFDDRTTNNLAKYCPNATVLHIDIDPTSISKTVPADVPIVGDARLVLEQMLELLEQEEAQQPLDDIRDWWQQIEQWRARHCLRYDDQSDKIKPQAVIETIWRLTQGDAYVTSDVGQHQMFAALYYPFDKPRRWINSGGLGTMGFGLPAALGVKMALPDEMVVCVTGDGSIQMNIQELSTALQYELPVLVLNLNNRYLGMVKQWQDMLYSGRHSQSYMESLPDFVRLAEAYGHVGIRISEPQELETKLAEALEQVRQRRLVFVDVTVDGSEHVYPMQIRGGGMDEMWLSKTERT

SEQ ID NO: 11021 - protein, 387 aa, Helicobacter pylori 26695
MLQRIYLDNNATTRIDPKVKEIMDPFLRDHYGNPSSLHQFGTETHPAIAEALDKLYKGINARDIDDVIITSCATESNNWVLKGVYFDECLKKGKNHIVTTVAEHPAVRSTCNFLESLGVEVTYLPINEHGSITAEQVKEAITEKTALVSVMWANNETGLIFPIEEIGAICKEKGVLFHTDAVQAIGKIPVDVLKANADFLSFSAHKFHGPKGIGGLYIRSGVGLTPLFHGGEHMNGRRSGTLNVPYIVGMGEAMKLAVEHLDYEKEVVGKLRDKLEEALLKIPDVMVVGDRIHRVPNTTLVSVRGIEGEAMLWDLNRSNIAASTGSACASEDLEANPVMVAIGASKELAHTAIRLSLSRFNTEAEIDKTIEVFSQAAVRLRNISSSY

SEQ ID NO: 11022 - protein, 856 aa, Helicobacter pylori 26695
MNLFEKMTDQLHETLDSALALALHHKNAEVTPMHMLFAMLNNSQGILIQALQKMPVDIQALRLSVQSELNKFAKVSQISKQNIQLNQALIQSLENAQGLMAKRGDSFIATDVYLLANMGLFESVLKPYLDAKELQKTLESLRKGRTIQDKNDDSNLESLEKFGIDLTQKALENKLDPVIGRDEEIIRMMQILIRKTKNNPILLGEPGVGKTAVVEGLAQRIMNKEVPKTLLNKRVIALDLSLLVAGAKYRGEFEERLKKVIEEVKKSANVILFIDEIHTIVGAGASEGGMDAANILKPALARGELHTIGATTLKEYRKYFEKDMALQRRFQPILLNEPSINEALQILRGLKETLETHHNITINDSALIASAKLSSRYITDRFLPDKAIDLIDEGAAQLKMQMESEPAKLSSVKRSIQRLEMEKQALEMEKKESNAKRMQEILKELSDLKEEKIQLEAQFENEKEVFKEISRLKMEMESLKKEAERFKRNGDYQQAGEIEYSKIPENKKKEEELQRKWEAMQQNGALLQNALTENNIAEIVSQWTHIPVQKMLQSEKNRVLNIESELQKRVVGQEKAIKAIAKAIKRNKAGLSDSNKPIGSFLFLGPTGVGKTESAKALAQFLFDSDKNLIRIDMSEYLEKHAMSRLIGAAPGYVGYEEGGQLTEAVRRKPYSVVLLDEVEKAHPDVFNLLLQVLDEGHLTDSKGVRVDFKNTILILTSNVASGALLEENLSEAEKQKAIKESLRQFFKPEFLNRLDEIISFNALDSHAVINIVGILFENIQKKALERGINITLDEEAKELIAEAGFDRFYGARPLKRALYEMVEDKLAELILEDKVKENDSVAFVVENNEIVPKIK

SEQ ID NO: 11023 - protein, 360 aa, Helicobacter pylori 26695
MFVDSVEIIIASGKGGPGMVSFRREKFVIKGGPDGGDGGDGGDVYFEVDNNTDTLASFRGTKHHKAKNGAPGGTRNCAGKKGEDKIIVVPPGTQVFVGDELWLDLVEPKERVLALKGGKGGLGNAHFKSATKQQPTYAQKGLEGVEKCVRLELKLIADIGLVGFPNAGKSTLISTISNAKPKIANYEFTTLVPNLGVVSVDEKSGFLMADIPGIIEGASEGKGLGISFLKHIERTKVLAFVLDASRLDLGIKEQYQRLRLELEKFSSALANKPFGVLLNKCDVVENIDEMTKDFCAFLNLGAQKLNEFGLEPYLGFLHPHLTNDFENNPNEQSALFVLPLSAVSALNVHALKFVLLEALP

SEQ ID NO: 11024 - protein, 302 aa, Helicobacter pylori 26695
MMKTKAGFVALIGKPNAGKSTLLNTLLNAHLALVSHKANATRKLMKCIVPFKDKEWYESQIIFLDTPGLHHQEKLLNQCMLSQALKAMGDAELCVFLASVHDDLKGYEEFLSLCQKPHILALSKIDTATHKQVLQKLQEYQQYDSQFLALVPLSAKKSQNLNALLECISQHLSPSAWLFEKDLMSDEKMRDIYKEIIRESLFDFLSDEIPYESDVMIDKFIEEERIDKVYARIIVEKESQKKIVIGKNGVNIKRIGTNARLKMQEVGEKKVFLNLQVIAQKSWSKEEKSLQKLGYIHRRNRD

SEQ ID NO: 11025 - protein, 390 aa, Helicobacter pylori 26695
MLYSSKIQSLSESATIAISTLAKELKSQGKDILSFSAGEPDFDTPQAIKDAAIKALNDGFTKYTPVAGIPELLKAIAFKLKKENNLDYEPNEILVSNGAKQSLFNAIQALIEEGDEVIIPVPFWVTYPELVKYSGGVSQFIQTDEKSHFKITPKQLKDALSPKTKMLILTTPSNPTGMLYSKAELEVLGEVLKDTKVWVLSDEIYEKLVYKGEFVSCAAVSEEMKKRTITISGLSKSVAMTGWRMGYAASKDKKLVKLMNNLQSQCTSNINSITQMASIVALEGLVDKEIETMRQAFERRCDLAHAKINAIGGLNALKPDGAFYLFIHIGSLCGGDSMRFCHELLEKEGVALVPGKAFGLEGYVRLSFACSEEQIEKGIERIARFVKSKG

SEQ ID NO: 11026 - protein, 391 aa, Helicobacter pylori 26695
MNEVVVVAAKRSAVGSFLGSLKSVGAREMGVSVLKDALNASGLKPSDVDSVILGNVLGAGLGQNIARQIQLDAGIPNDKNAFSVNMVCGSSMKAIQLAHDSIMLGRDEMVVCGGVENMSAAPYLSFDMRDGKRMGNANMIDSMIHDGLWDAFNNYHMGITADNVAQAYHISREDQDNFALQSQLKARAAINAGKFQEEITPIEIANKKGVVVFKEDEYPRETTLESLAKLKPAFKKDGSVTAGNSSGINDGASIIILCSTKKAQTLGLKAMATIKGFGLGGCSPDIMGICPSIAIKNNLKNVKMNLNDIHLFELNEAFAAQSLAVLKELELNPNIVNVNGGAIAIGHPIGASGARILVTLLHEMKRSGHGVGCASLCVGGGQGLSVVVEQK

SEQ ID NO: 11027 - protein, 318 aa, Helicobacter pylori 26695
MKARGFKAKMRGFKIFSGSAHPAFGKEVSKHLGFPLSKAVIGKFSDGEINIQISESVRGKDIFIIQPTCVPVNDNLMELLVMVDALRRSSANSITAVLPYFGYARQDRKAAPRVPITAKMVANLMQEVGIERIITMDLHAGQIQGFFDVPVDNLYGSIVFRDYIRSKALKNPVIASPDVGGVTRARYFANQMGLDLIIVDKRREKANESEVMNIIGSAKERDVILVDDMIDTAGTICKAALALKEQGATSVMALGTHAVLSGNAIKRIKESALDEVVVTNSIPLVQKCDKITTLSVAPLFAEVIRRIYHNESVQSLFT

SEQ ID NO: 11028 - protein, 173 aa, Helicobacter pylori 26695
MNTNKALFLDRDGIINIDKGYVSQKEDFEFQKGIFELLKHAKSLGYKLLLITNQSGINRGYYTLKDFEQLTQYLQESLFKELGFNLDGIYFCRHAPEENCACRKPKPSLILQAAKEHQICLEQSFMIGDKESDMLAGLNAKVKNNLLLIQNPLKTPHSWIQCKDFKEMIDLIK

SEQ ID NO: 11029 - protein, 277 aa, Helicobacter pylori 26695
MKTNGLFKMWGLFLVLIALVFNACSDSHKEKKDALEVIKQRGVLKVGVFSDKPPFGSVDSKGKYQGYDVVIAKRMALDLLGDENKIEFIPVEASARVEFLKANKVDIIMANFTRTKEREKVVDFAKPYMKVALGVVSKDGVIKNIEELKDKELIVNKGTTADFYFTKNYPNIKLLKFEQNTETFLALLNNKATALAHDNTLLLAWTKQHPEFKLGITSLGDKDVIAPAIKKGNPKLLEWLNNEIDSLISSDFLKEAYQETLAPVYGDEIKPEEIIFE

SEQ ID NO: 11030 - protein, 405 aa, Helicobacter pylori 26695
MLIVQKYGGTSMGSIERIHNVAQRVLESVTLGHQVVVVVSAMSGETDRLLEFGKNFSHNPNKREMDRIVSVGELVSSAALSMALERYGHRAISLSGKEAGILTSSHFQNAVIQSIDTKRITELLEKNYIVVIAGFQGADIQGETTTLGRGGSDLSAVALAGALKAHLCEIYTDVDGVYTTDPRIEEKAQKIAQISYDEMLELASMGAKVLLNRSVELAKKLSVKLVTRNSFNHSEGTLIVAEKDFKGERMETPIVSGIALDKNQARVSMEGVEDRPGIAAEIFGALAEYRINVDMIVQTIGRDGKTDLDFTIVKTQIEETKQALKPFLAQMDSIDYDENIAKVSIVGVGMKSHSGVASIAFKALAKDNINIMMISTSEIKISVLIDIKYAELAVRTLHAVYQLDQ

SEQ ID NO: 11031 - protein, 380 aa, Helicobacter pylori 26695
MTIGLVKESMDLESRVALVPDDVALIVQKGVEVLVQNSAGANSGYSNEAYESVGAKIVDSKTAWGQDLVVKCKEPLEHEYPLLKEKATLFSYLDLAYQKSLCEMFIDKKITSICTETIAGPKNDYPILAPMSVVAGRLAAHLVQHYLLALEHVKGFMGKGVMLGGLSGAQRAKIVVVGGGVVGMESAKVLSQMGAKVTILELDYAKLQNHPYYHLYDLEVLSVNEANIIQALNGAVGLVGAVLVTASQTPKVILRKHLKYMQKQGVVIDVACDLGGCIETIHQTSHSNPVYVEEDLLHYGVPNMPGIVAKTSSTAYSHASVPYLLYYLEHGLKGFLTANTKIVANTLGGLSAYNGYITQEGIAKAFNLAFKSPLEILKEL

SEQ ID NO: 11032 - protein, 329 aa, Helicobacter pylori 26695
MPILFDCNAIASQVLKDEASALLESVGQFQKPNDLEAIVKLILKSQENGGKLVIVGVGKSALVAQKIVASMLSTGNRSAFLHPTEAMHGDLGMVEKNDVVLMISYGGESLELLNLVSHLKRLSHKIITFTKSPNSSLSKLGDYYLSLKIQKEACPINTAPTTSTTLTLALGDVLMACLMRAKNFSQEDFASFHPGGLLGKKLFVKVKDLLQTTNLPLIAPSTSFKDALIEMSEKRLGSAILVNEANELVGVLSDGDVRRALLKGVSLKSEVRHFATLKPKSFKNLDALLLEALEFLERHKIQLLVCVDDHNKVLGVLHLHQLLELGLKA

SEQ ID NO: 11033 - protein, 408 aa, Helicobacter pylori 26695
MQEIKLDIYATLVCMVLVLLLGRYVISKVKFLRDYDIPEPVVGGVLVAFAIMLARQFYNFGLQFDSSLKDPLMLTFFITIGLSADFKSLQKGGKMLAVFLLAVAGFVVCQNAVGISTASLLGVNPLMGLLGGSIALVGGHGTSAAWANFFTQPPYNFSSSLEVGMACATFGLVSGGIIGGPVAKYLISKYKLEPKDTKEKDTLEGVVSKGFETPKEQRLITESSFVETLALIAIALLVGTFLSHLVPKSFTLPTFVWCLFVGVILRNTLSFFKIHSVFDREVSVIGNVSLSLFLAYALMSVNLLELLKLAVPLAVILSVQVVFMILYVVLVTFRVCGKDYDAAVLCAGHCGFGLGATPTAMVNMQTITNHYGPSHVAFIVVPLVGAFFVDIINALAIKGFLLLPFFPS

SEQ ID NO: 11034 - protein, 701 aa, Prunus salicina
QLQLALALRLSSEATCADDPNFLDLVPDVSASRSSGSVDAVSHRFWVNGCLSYFDIVPDGFYLIHGIDPYVWTVCTDMQENGRIPSIESLRSVDPGIGSSIEVVLIDRRSDPSLKELQNRVFSLSCTCITTKEIVDQLAKLVCNRMGGSASVGEDEFVPIWRESSDDLKDCLGSVVVPIGSLSVGLCRHRALLFKVLADRIDLSCRIAKGCKYCTRDDASSCLVRFGLDREYLVDLIANPGYLCEPDSLLNGPSSISISSPLRFPRLKPVEPTIDFRSLAKQYFSDCQSLNLVFDEASAGSAVDEDNKEFSMYPEQLDRKITGGNNLLLVSSLNDNTSMHAKVSRPSFEDRNPQLFNPSQNIVHTPGMVKDPIPLKRIPPIGHRDVSRVDTTKGSRFVEGVQLVPSKPSKELTFDIEDLDIPWNDLVLKERIGAGSFGTVHRADWHGSDVAVKILMEQDFHAERFKEFLREVTIMKRLRHPNIVLFMGAVTKPPNLSIVTEYLSRGSLYRLLHKPGAMEALDERRRLNMAYDVAKGMNYLHRRNPPIVHRDLKSPNLLVDKKYTVKVCDFGLSRLKANTFLSSKSAAGTPEWMAPEVLRDEPSNEKSDVYSFGVILWELATLQQPWGNLNPAQVVAAVGFKNKRLEIPRDLNPQVASIIEACWAKEPWKRPSFATMVESLMPLNKLPVNLPSPPIQTLPTE

SEQ ID NO: 11035 - protein, 452 aa, Poncirus trifoliata
MAKTLISSPPFVGTPLPSPSSSLSRHGLHPLPNRRLASTRVRLSFQEIPPILSLDSSIDLNSVFSRTESLLYTLADAAVSLDSASGGAASTSADGATQKNGGWFGFISEAMEFVLKILKDGIDAVHVPYSYGFAIILLTVIVKVATFPLTKKQVESTLAMQNLQPKIKAIQQRYAGNQERIQLETSRLYRQAGVNPLAGCLPTLATIPVWIGLYQALSNVANEGLLTEGFFWIPSLSGPTTIAARQSGSGISWLLPFVDGHPPLGWHDTAAYLVLPVLLVVSQYAMEIMKPPQTDDPAQKNTLLVFKFLPLMIGYFSLSVPSGLSIYWFTNNVLSTAQQVWLRKLGGAKPVVTENASEIITAGRAKRSVSQPSRAGDRFRQLKEEEKGKKLNKALPAEDVQTMNSASDSEGESDGEKGQGVLEEAYASNRSKQVPDPSRPRKSKRSKRKRAV

SEQ ID NO: 11036 - protein, 302 aa, Paracoccus methylutens
MAKVGFLGLGRMGFPMARNLATAGHDVHVYDPSEEVGRKAAKAGLKTASRVDVAVEGADFVITMVPTGRHVLEIFLGDDGVLAKMAKGSMAIDSSTIDTADARRLHAAGRERGIAVLDAPVSGGVMGAEAGTLTFMVGGSAEDLERARPVLEAMGRRIFHAGEPGVGQAAKLCNNLLAGISMIAVSEAFALARHLGLDARKMQEISAVSTGGCFSLTNYPPVPGLVPNVPSSREYRNGFASQLMLKDLKLAQQAAIQSGTALPLGGLAAALYGMFCQAGHSELDYSAIIKLIEGDGVRTSDA

SEQ ID NO: 11037 - protein, 568 aa, Zymomonas mobilis
  misc_feature (208)..(208): Xaa can be any naturally occurring amino acid
  unsure (1)..(568): unsure at all Xaa locations
MSYTVGTYLAERLVQIGLKHHFAVAGDYNLVLLDNLLLNKNMEQVYCCNELNCGFSAEGYARAKGAAAAVVTYSVGALSAFDAIGGAYAENLPVILISGAPNNNDHAAGHVLHHALGKTDYHYQLEMAKNITAAAEAIYTPEEAPAKIDHVIKTALREKKPVYLEIACNIASMPCAAPGPASALFNDEASDEASLNAAVEETLKFIAXRDKVAVLVGSKLRAAGAEEAAVKFADALGGAVATMAAAKSFFPEENPHYIGTSWGEVSYPGVEKTMKEADAVIALAPVFNDYSTTGWTDIPDPKKLVLAEPRSVVVNGIRFPSVHLKDYLTRLAQKVSKKTGALDFFKSLNAGELKKAAPADPSAPLVNAEIARQVEALLTPNTTVIAETGDSWFNAQRMKLPNGARVEYEMQWGHIGWSVPAAFGYAVGAPERRNILMVGDGSFQLTAQEVAQMVRLKLPVIIFLINNYGYTIEVMIHDGPYNNIKNWDYAGLMEVFNGNGGYDSGAGKGLKAKTGGELAEAIKVALANTDGPTLIECFIGREDCTEELVKWGKRVAAANSRKPVNKLL

SEQ ID NO: 11038 - protein, 158 aa, Prunus domestica
VRKRPWGRYAAEIRDPWKKTRVWLGTFDTPEEAALAYDGAARSLRGAKAKTNFPAPVPGGLSLDLNIPSAAHWASHSGRLVEFLHTGVLNDMSCGDATPDTTTLVSKREQPQAPVGVVGNVGGVAGGTVAEGSSTASYLGLVRRGLPIDLNEPPPLWL

SEQ ID NO: 11039 - protein, 1286 aa, Nakaseomyces delphensis
ISVGFHGDGAEQLARTGISFVNFEKLLRGSVSSSASTLFGTEGATDLIINLSQCSDELVKSAPNDVAVYNISEYKRGLLSEILERAPQSVSRITLLQGSVPNNTTSTLEFEPFLLDFFGDFDLLVERNIKQLLLTKIGNEVADFEQTLSQIIENLRSQEPVNNLFVGESAVTNKDEVEKYHQSVQKILHLEDAYIKVLKQLLKDNLSIINEYTSPSITVNSPEYGYGHYLYEKQIRNAVVDEVKKSLDPELFHSQDSGEFVQKLSKWVSFHNSALDEQQLNEANKIGREVYQYLSENAHSQTAIKIIETAGNNLDAFLFKSNWLIGSDAWSYDLGNSGVHQVLTSNDNINILIIDSEPYENRKASKDRKKDVGLYAMNFHNVYVASVAVYSSYTQLLTAFIEAAKYNGPSVVLAYLPYKSERDTPLDILKETKIGVESGYWPLYRYNPLKEDTKESPAFYLDSSVIRKQLQSFLERENKLTLLAKRDPELARNLAQSASDAITKKQNKRAEAALDDLLNGLSGPPLHIYFASDGGNASNLAKRLHGRATSRGLKATVLSMDDIILEDLPGEENAVFITSTGGQGEFPQDGKTFWDALKASTDLDLSSLKVSVFGLGDSQYWPRKEDKKYYNKPSQDLFKRFSTLGAQFLAPLGLGDDQDDDGYQTAYNEWEPKIWEALGVSGVEVEDEPKPVTNEDIKMQSDFLRGTIASDLIDESTGTVQYSNEQLMKFHGIYTQEDRDVREIRKSEGLEPAYQFMARARLPGGKCSGSQWLGLDKLSDDSGNGTLKLTTRATFQIHGVLKKNLKHTIRGMNAVLIDTLAAAGDVNRNVMVTSLPARAKVHEQVSDMGAKISEHFLPKTTAYHEIWLDGPEDQDYEDNWNKRFDSRNEGPRKKKTLVSGNALVDIEPIYGPAYMPRKFKFNLTVPPYNDVDVFSADIGLIAIVDDKTDIVEGYNTYVGGGMGTTHGNKKTYPRIASSFGFVKTEKILPALEALFIIQRDYGNRQDRKQARVKYTVDTLGVEGYKEKAEEIWGDKFEPERPYEFTSNIDYFGWVKDEFNKNHFTAYIENGRVLDTPEVPHKTGLRKIAEYMQKTGVGHFRLTGNQHLVISDIEDGHLDNIKALLAEHKLDNADYTGLRLSSSACVGLPTCGLAFAESERYLPDVITQLEDTLEEYGLRHDNIIMRMTGCPNGCSRPWLAELALVGKAPHVYNLYLGGGYYGQRLNKLYRANLNDTDIVDVIKPLIKRYALEKNEGERFGDFVLRVGIVKPTLEGRLFHEDIAEDAY

SEQ ID NO: 11040 - protein, 343 aa, Petunia x hybrida
YAGGFTLEYIEAVTQNYRTLIGEGGFGSVYRGTLPDGEEVAVKVRSATSTQGIREFNNELNLLSAITHENLVPLLGYCCENDQQILVYPFMSNGSLQDRLYGAAAKRKTLDWPARLSIALGAARGLLYLHTFSERSLIHRDVKSSNILLDQSMCAEVADFGFSKYASQEGDSGTSLEVRGTAGYLDPEYYSTQHLSAKSDVFSFGVVLLELLTGREPLNINRPRNEWSLVEWAKPLIRNSRVEEIVDPAIKGGYHGEALWRVVEVALSCTETYSTYRPCMADIVRELEDALIIENNASEYLKSLDSFGGSHRFSIERSIVLPPIKSQIEPSSLLSEPAPPQPR

SEQ ID NO: 11041 - protein, 375 aa, Methanocaldococcus jannaschii DSM 2661
MISSRCKNIKPSAIREIFNLATSDCINLGIGEPDFDTPKHIIEAAKRALDEGKTHYSPNNGIPELREEISNKLKDDYNLDVDKDNIIVTCGASEALMLSIMTLIDRGDEVLIPNPSFVSYFSLTEFAEGKIKNIDLDENFNIDLEKVKESITKKTKLIIFNSPSNPTGKVYDKETIKGLAEIAEDYNLIIVSDEVYDKIIYDKKHYSPMQFTDRCILINGFSKTYAMTGWRIGYLAVSDELNKELDLINNMIKIHQYSFACATTFAQYGALAALRGSQKCVEDMVREFKMRRDLIYNGLKDIFKVNKPDGAFYIFPDVSEYGDGVEVAKKLIENKVLCVPGVAFGENGANYIRFSYATKYEDIEKALGIIKEIFE

SEQ ID NO: 11042 - protein, 250 aa, Methanocaldococcus jannaschii DSM 2661
MVSIMLLKVEDLHVYRGNREILKGVNLTVEENEIHAIIGPNGAGKSTLAYTIMGISGYKPTKGRIIFKGVDIIDKNITERARMGMTLAWQEPARFEGIKVKNYLMLGMNEKYKKDKEIAEEKIREALKLVNLDPDKYLDRYVDETLSGGERKRIELASIICMEPDLAILDEPDSGIDIVSFDEIKRVFDYLKDKGCSLLVITHREELAEHADRVSLICAGEVIKSGDPKEVGEFYKKECGKCYKKVPDGK

SEQ ID NO: 11043 - protein, 391 aa, Methanocaldococcus jannaschii DSM 2661
MFEVKHMDGIDVFFFMWAASLIFFMKAGFIALEIGQFRAKNVSYHCVLKLLDLAAVFIAYLFIGYGISYGFENIMPLITGTFDADLGAWWMKMVMFAAAAVTIITGGVAERIKILPYFIGALIVGGILYPIVEHLVWGGGFANLGINFHDYAGSGAVHLFGGLVGLMAAYVLGPRIDKYINGKPQAIPGHNIPIAVLGAFILAFGWYGFNIGSASGIANGVELASVAMATTMALAGGIIGGALSSRNDPLYTANGMCAGLVAVCSGVDLFTPIGAFIVGLLAGIQQPFTYKFIEEKLKIDDVCAIGPVHAMSGLIGVICAGIPFLLKADAVSKVSITGQIIGAIVIALIAIVGGLIIYKGLDLTIGLRVSEEAEKVGLDTAILQTTAYSEE

SEQ ID NO: 11044 - protein, 347 aa, Methanocaldococcus jannaschii DSM 2661
MKIIEEIPQKNIIKLMPENLDDLWVLYNIIEEGDKIFAVTERRVQDKGDVIRADRGAKRKMFLGIEVKNVEFDENTKRVRILGTIIHGPDDVPLGSHHTIEIKPFDELSIEKNWKKWQIERIKEAIESSKRPKVLVVVMDDEEADIFEVRDYSIKEICSIKSHTSKKLDYKINEELKKEYYHEIAKVLSEYDVDNILVAGPGFAKNSFYNFISSQYPELKNKIVVESISTTSRAGLNEVIKRGIINRIYAESRVAKETQLIEKLLEEIAKKGLAVYGIDEVKKALEYSAIDTLLVSDSLVRNHEIEKIIDTTEEMGGKVVIVSSEHDAGKQLKALGGIAGLLRFPIE

SEQ ID NO: 11045 - protein, 591 aa, Methanocaldococcus jannaschii DSM 2661
MKGAEAIIKALEAEGVKIIFGYPGGAMLPFYDALYDSDLVHILTRHEQAAAHAADGFARASGEAGVCVSTSGPGATNLVTGIATAYADSSPVIALTGQVPTKLIGNDAFQEIDALGLFMPITKHNFQIKKPEEIPETFRAAFEIATTGRPGPVHIDLPKDVQDGEIDIEKYPIPAKVDLPGYKPKTVGHPLQIKKAAKLIAESERPVILAGGGVIISGASEELLRLAEFVKIPVCTTLMGKGCFPEDHPLALGMVGMHGTKAANYAVTECDVLIAIGCRFSDRVTGDIRYFAPEAKIIHIDIDPAEIGKNVRADIPIVGDAKNVLRDLLAALIALEIKDKETWLERIYELKKLSIPMMDFDDKPIKPQRFVKDLMEVLNEIDSKLKNTIITTDVGQNQMWMAHFFKTKMPRSFLASGGLGTMGFGFPAAIGAKVAKPYANVISITGDGGFLMNSQELATISEYDIPVVICIFDNRTLGMVYQWQNLYYGQRQSEVHLGESPDFVKLAESYGVKADRIISPDEIKEKLKEAILSNEPYLLDIVIDPAEALPMVPPGGRLTNIVQPIRVEPKIKKPQFDEIKKIRDMAAVKEF

SEQ ID NO: 11046 - protein, 284 aa, Methanocaldococcus jannaschii DSM 2661
MEEHFIDLSKFMMANCPYEEAEGVIFSIPYDETTSFKPGAREGGNAIRTASWGLETYSPILDRDLAELKYCDLKDLDLYGSQEEIFGTIHSVSREILKENKKIIVFGGEHSITYPIIKAVKDIYDDFIVIQFDAHCDLRDEYLGNKLSHACVMRRVYELTKNIFQFGIRSGDKEEWDLARKNNLYLKMDLMNKDDLEYIKSLDKPIYVTIDIDVLDPAYAPGTGTPEPCGFSTRELFNSLYLLEEVKDKIIGFDIVEVSPIYDIANITAITAAKIARELMLMIL

SEQ ID NO: 11047 - protein, 395 aa, Methanocaldococcus jannaschii DSM 2661
MERIAVLAYSGGLDTSCCLKLLEDKYGYKVVSVCVDVGQPEEEIKEVEEKAKKLGVLKHYTIDAKEEFVKDYIFRAIKANAMYEGYPLSTALARPLIAHKVVEIAEEVGAEAVAHGCTGKGNDQFRFETTIRIKAPHLKIIAPIRDLNLTRAEEIEYAKEKGIPIPTESKKYSIDENLWGRSIEGSELENPDFVPPEEIYAWTKNPVEDKEEEIVEIEFKEGVPVAINGEKLEPVELIKKANEIAGKHGVGRIDIIEDRIIGLKSRENYECPGAVLLLTAHKALEQLVLTRDELRFKEIVDSLYGELIYKGLWFDPLREDLDAFIDKTQERVTGTVKVKLFGGTARVVGRDSPYALYSKELVSFDEKEIDQKELAGMVKYHGLQAMLYEMRKKRK

SEQ ID NO: 11048 - protein, 473 aa, Methanocaldococcus jannaschii DSM 2661
MTTVMKFGGTSVGSGERIRHVAKIVTKRKKEDDDVVVVVSAMSEVTNALVEISQQALDVRDIAKVGDFIKFIREKHYKAIEEAIKSEEIKEEVKKIIDSRIEELEKVLIGVAYLGELTPKSRDYILSFGERLSSPILSGAIRDLGEKSIALEGGEAGIITDNNFGSARVKRLEVKERLLPLLKEGIIPVVTGFIGTTEEGYITTLGRGGSDYSAALIGYGLDADIIEIWTDVSGVYTTDPRLVPTARRIPKLSYIEAMELAYFGAKVLHPRTIEPAMEKGIPILVKNTFEPESEGTLITNDMEMSDSIVKAISTIKNVALINIFGAGMVGVSGTAARIFKALGEEEVNVILISQGSSETNISLVVSEEDVDKALKALKREFGDFGKKSFLNNNLIRDVSVDKDVCVISVVGAGMRGAKGIAGKIFTAVSESGANIKMIAQGSSEVNISFVIDEKDLLNCVRKLHEKFIEKTNS

SEQ ID NO: 11049 - protein, 289 aa, Methanocaldococcus jannaschii DSM 2661
MEVKPFLKWAGGKTQILSQIEENLPKELKEGNIKKYIEPFVGGGAVLFYLLQKYEFKKVIISDINEDLMLCYKVVKNDVDRLIEELSSLRDEFLSLDEEKRKEFYYKVRDDFNKNKNDCDEVKRVAQFIFLNKTCYNGLYRVNKKGEFNVPYGRYKNPKIFDEQNLKNVSKLLKNVKILCGDFEIVDEYVDAESFVYFDPPYKPLNKTSSFTSYTKYDFNDDDQIRLAKFYRKLDKRGAKLMLSNSYNVDFFGKLYEGFNIKKVVAKRMINCKGDKRKDGIYELLIMNY

SEQ ID NO: 11050 - protein, 435 aa, Methanocaldococcus jannaschii DSM 2661
MELKNKKLSLWEAVSMAVGVMIGASIFSIFGVGAKIAGRNLPETFILSGIYALLVAYSYTKLGAKIVSNAGPIAFIHKAIGDNIITGALSILLWMSYVISIALFAKGFAGYFLPLINAPINTFNIAITEIGIVAFFTALNFFGSKAVGRAEFFIVLVKLLILGLFIFAGLITIHPSYVIPDLAPSAVSGMIFASAIFFLSYMGFGVITNASEHIENPKKNVPRAIFISILIVMFVYVGVAISAIGNLPIDELIKASENALAVAAKPFLGNLGFLLISIGALFSISSAMNATIYGGANVAYSLAKDGELPEFFERKVWFKSTEGLYITSALGVLFALLFNMEGVASITSAVFMVIYLFVILSHYILIDEVGGRKEIVIFSFIVVLGVFLLLLYYQWITNRFVFYGIIATFIGVLIFEIIYRKVTKRTFSNNMYVKS

SEQ ID NO: 11051 - protein, 370 aa, Methanocaldococcus jannaschii DSM 2661
MLSKRLLNFESFEVMDILALAQKLESEGKKVIHLEIGEPDFNTPKPIVDEGIKSLKEGKTHYTDSRGILELREKISELYKDKYKADIIPDNIIITGGSSLGLFFALSSIIDDGDEVLIQNPCYPCYKNFIRFLGAKPVFCDFTVESLEEALSDKTKAIIINSPSNPLGEVIDREIYEFAYENIPYIISDEIYNGLVYEGKCYSAIEFDENLEKTILINGFSKLYAMTGWRIGYVISNDEIIEAILKLQQNLFISAPTISQYAALKAFEKETEREINSMIKEFDRRRRLVLKYVKDFGWEVNNPIGAYYVFPNIGEDGREFAYKLLKEKFVALTPGIGFGSKGKNYIRISYANSYENIKEGLERIKEFLNK

SEQ ID NO: 11052 - protein, 335 aa, Methanocaldococcus jannaschii DSM 2661
MIIVTPRYTIIEDGAINKIEEILKKLNLKNPLVITGKNTKKYCRFFYDIVYYDEILNNLEIELKKYTAYDCVIGIGGGRSIDTGKYLAYKLGIPFISVPTTASNDGIASPIVSIRQPSFMVDAPIAIIADTEIIKKSPRRLLSAGMGDIVSNITAVLDWKLAYKEKGEKYSESSAIFSKTIAKELISYVLNSDLSEYHNKLVKALVGSGIAIAIANSSRPASGSEHLFSHALDKLKEEYNLNINSLHGEQCGIGTIMMSYLHEKENKKLSGLHEKIKMSLKKVDAPTTAKELGFDEDIIIEALTMAHKIRNRWTILRDGLSREEARKLAEETGVI

SEQ ID NO: 11053 - protein, 217 aa, Methanocaldococcus jannaschii DSM 2661
MKFFLDTANVEEIKKYAELGLVDGVTTNPTLVAKEGRDFYEVVKEICEIVEGPVSAEVISTDAEGMVKEARELAKLADNIVIKIPMTKDGMKAVKILSAEGIKTNVTLVFSPLQALVAAKAGATYVSPFVGRLDDIGHVGMKLIEDVVKIYKNYDIKTEVIVASVRHPWHVLEAAKIGADIATMPPAVMDKLFNHPLTDIGLERFLKDWDEYLKSRK

SEQ ID NO: 11054 - protein, 524 aa, Methanocaldococcus jannaschii DSM 2661
MVKILVTDPLHEDAIKILEEVGEVEVATGLTKEELLEKIKDADVLVVRSGTKVTRDVIEKAEKLKVIGRAGVGVDNIDVEAATEKGIIVVNAPDASSISVAELTMGLMLAAARNIPQATASLKRGEWDRKRFKGIELYGKTLGVIGLGRIGQQVVKRAKAFGMNIIGYDPYIPKEVAESMGVELVDDINELCKRADFITLHVPLTPKTRHIIGREQIALMKKNAIIVNCARGGLIDEKALYEALKEGKIRAAALDVFEEEPPKDNPLLTLDNVIGTPHQGASTEEAQKAAGTIVAEQIKKVLRGELAENVVNMPNIPQEKLGKLKPYMLLAEMLGNIVMQVLDGSVNRVELIYSGELAKEKTDLIKRAFLKGLLSPILLAGINLVNAPIIAKNRNINVVESSTSEEKYGNAIKITAESDKKKFSIVGAIINNKPVILEVDGYEVSFIPEGVLAIIKHIDRPGTIGRVCITLGDYGINIASMQVGRKEPGGESVMLLNLDHTVPEEVIEKIKEIPNIKDVAVINL

SEQ ID NO: 11055 - protein, 516 aa, Methanocaldococcus jannaschii DSM 2661
MMCGINGIIRFGKEVIKEEINKMNKAIKHRGPDDEGIFIYNFKNYSIGLGHVRLAILDLSEKGHQPMGYNVDEDKIIYRDDELDRADIIIVYNGEIYNYLELKEKFNLETETGTDTEVILKLYNKLGFDCVKEFNGMWAFCIFDKKKGLIFCSRDRLGVKPFYYYWDGNEFIFSSELKGILAVKEINKKENINKDAVELYFALGFIPSPYSIYKNTFKLEARQNLIFDLDKREIRKYYYWELPDYKPIYDKKKLIEEGKKLLYDAVKIRMRSDVPVGAFLSGGLDSSTVVGVMREFTDLSKLHTFSIGFEGKYDETPYIKIVVDYFKTQHHHYYFKERDFEELIDKYSWIYDEPFGDYSGFPTYKVSEMARKFVTVVLSGDGGDEVFGGYMTHLNGYRMDFIRKLPKFLRVVGSKLPVKKDLNGIANLYLLKEAFRLSLINPEEFYAESIKEDAIRPEIYKKWTIEKLRYCLNKGDNKLGEALRIFDLLFNTLCDNFLVKVDRASMLTLWKLEVHF

SEQ ID NO: 11056 - protein, 544 aa, Methanocaldococcus jannaschii DSM 2661
MRDMCSISGIIVKDNQISAKYSIDMMKILKHRGRDNSGLLLDDEVIYFNDFEDVEDLEEEMIGNLSLAHNRLAIVGRYGVQPIPNEDETIWLVCNGEIYNYIELREYLKQNHEFRTDSDNEVIIHLYEEEKLEELDGDYAFAIYDKSKNVVRLARDMFGVKPLFYVDRDKYFAFASERKALWHLLINIDGCERDLDELNSKIKTLKPNSQLIYYLDDNRFEIIEGFKKLELNYMKERSYEEAKEYLDRALKNSVLKRVRGLDKVGIICSGGVDSSLIAKLASLYCEVILYAVGTENSEDLIYAERLAKDLNLKLRKKIISEEEYEEYVFKVAKAIDEVDLMKIGVGIPIYVASEMANEDGLKVVLSGQGADELFGGYARHERIYRERGEEELKKELLKDVYNLYKVNLERDDHCTMANGVELRVPFLDEEVVEIALSIPIEYKMSELSNRPYAESNISLKSEPINGLKNTNLNIKCVRSVRKKILRDVASQYLPDYIAYRPKKAAQYGSGGEKMIYKVAKKYGFSKKRINEFLDMLKRKIVSEF

SEQ ID NO: 11057 - protein, 903 aa, Methanocaldococcus jannaschii DSM 2661
MVKELKVAEAYQGDVGRGIARIDPYTMEELGLKPGDVIEIEGPKGKAYAIVYRGFLEDAGKGIIRIDGYLRQNAGVAIGDRVKVKRVEIKEAKKVVLAPTQPIRFGPGFEDFVKRKILGQVLSKGSKVTIGVLGTALTFVVVSTTPAGPVRVTDFTHVELKEEPVSEIKETKVPDVTYEDIGGLKEEVKKVREMIELPMRHPELFEKLGIEPPKGVLLVGPPGTGKTLLAKAVANEAGANFYVINGPEIMSKYVGETEENLRKIFEEAEENAPSIIFIDEIDAIAPKRDEATGEVERRLVAQLLTLMDGLKGRGQVVVIGATNRPNALDPALRRPGRFDREIVIGVPDREGRKEILQIHTRNMPLAEDVDLDYLADVTHGFVGADLAALCKEAAMRALRRVLPSIDLEAEEIPKEVLDNLKVTMDDFKEALKDVEPSAMREVLVEVPNVKWEDIGGLEEVKQELREAVEWPLKAKEVFEKIGVRPPKGVLLFGPPGTGKTLLAKAVANESGANFISVKGPEIFSKWVGESEKAIREIFRKARQSAPCIIFFDEIDAIAPKRGRDLSSAVTDKVVNQLLTELDGMEEPKDVVVIAATNRPDIIDPALLRPGRLDRVILVPVPDEKARLDIFKIHTRSMNLAEDVNLEELAKKTEGYTGADIEALCREAAMLAVRESIGKPWDIEVKLRELINYLQSISGTFRAAAVELNSVIKATKERESAEAGEFSELKNAIGKIISVLSPAKEKIEAVEKEIDKFLEVINKEELKPSEKDEAQKLAKYLKDILGKLKEMIDNIYELENKLNTLKEQVSAEEIDEIIKTTQNIIQRFTTSLDELKNILKDIESIRLKVSTKDVKIKKEHFMKALEKIKPSVSKEDMRVYEKLAQEYGRATSVEKKKEEGKEVI

SEQ ID NO: 11058 - protein, 430 aa, Methanocaldococcus jannaschii DSM 2661
MVFEEFISTELKKEKKAFTEEFKEEKEINDNSNLKNDLLKEELQEKARIAELESRILKLELEKKELERENLQLMKENEILRRELDRMRVPPLIVGTVVDKVGERKVVVKSSTGPSFLVNVSHFVNPDDLAPGKRVCLNQQTLTVVDVLPENKDYRAKAMEVDERPNVRYEDIGGLEKQMQEIREVVELPLKHPELFEKVGIEPPKGILLYGPPGTGKTLLAKAVATETNATFIRVVGSELVKKFIGEGASLVKDIFKLAKEKAPSIIFIDEIDAIAAKRTDALTGGDREVQRTLMQLLAEMDGFDARGDVKIIGATNRPDILDPAILRPGRFDRIIEVPAPDEKGRLEILKIHTRKMNLAEDVNLEEIAKMTEGCVGAELKAICTEAGMNAIRELRDYVTMDDFRKAVEKIMEKKKVKVKEPAHLDVLYR

SEQ ID NO: 11059 - protein, 132 aa, Methanocaldococcus jannaschii DSM 2661
MPGTKQVNVGSLKVGQYVMIDGVPCEIVDISVSKPGKHGGAKARVVGIGIFEKVKKEFVAPTSSKVEVPIIDRRKGQVLAIMGDMVQIMDLQTYETLELPIPEGIEGLEPGGEVEYIEAVGQYKITRVIGGK

SEQ ID NO: 11060 - protein, 257 aa, Methanocaldococcus jannaschii DSM 2661
MRDTMEILRTENIVKYFGEFKALDGVSISVNKGDVTLIIGPNGSGKSTLINVITGFLKADEGRVYFENKDITNKEPAELYHYGIVRTFQTPQPLKEMTVLENLLIGEINPGESPLNSLFYKKWIPKEEEMVEKAFKILEFLKLSHLYDRKAGELSGGQMKLVEIGRALMTNPKMIVMDEPIAGVAPGLAHDIFNHVLELKAKGITFLIIEHRLDIVLNYIDHLYVMFNGQIIAEGRGEEEIKNVLSDPKVVEIYIGE

SEQ ID NO: 11061 - protein, 345 aa, Methanocaldococcus jannaschii DSM 2661
MSIDLISMILLWFGLYYIVSLSLNMEFGYAGIPNFGKALSVLVGAIAVGGILDRLLMLYFGIGGDFITGTTYATSAINNLIASNPIVGIGILILAIILASILGFVVGAIFILPSAKLKEDYLGITLLAISEAVLLICTYNLNIIGGYYGISTPDILAFVSGEYRGWVFAWIVLFIAFLVYLFFERLLNTPFGRVLRAMRENENTVKAFGRDIMKLRIKTMAIGSAIGAIAGVLYSLYTVNIIANAFTRVDWTFFPFLMVLLGGKGNNKGVALGVLCYVIVKVLLDIYKYNIKYALGIPFEPVWLSYMLFGVLMLLILYYKPSGLIPEKPIITPPMKKKIMEISGK

SEQ ID NO: 11062 - protein, 420 aa, Methanocaldococcus jannaschii DSM 2661
MWGENIATADLFANATDIHSIVQALTTLANASDVFFLVVMGVLVFMMQWGFAMLEGGQVRKKNVNNVMMKNMVDWLIGCVAWLFIGGILCSKGFDLSAFIDWWKQILGTNWPNNGLDLASWFFGLVFCATAATIVSGGVAERIKFSAYVLISLIITGLLYPLFVYLGPWGASIVPWHDYAGSLVVHGLGGFLALGAIAALGPRIGRFVDGRPVPILGHNIPMAVFGAFALAIGWYGFNVGSSLALGDISGLVCATTTMAMAGGGIGALIASRNDVLFTANGIVAGLVAICSGTDVVSPIGGLIIGLIAGLQVPIVYKLVEKAGLDDVCGVVPVHGTAGVIGAILTGILGLKIFGGAGGVSLIDQIIGAVFCIIYGTGLGYILAKIVGIALGGLRVSEEEEKMGLDMAEHKMPAYPEETVI

SEQ ID NO: 11063 - protein, 510 aa, Methanocaldococcus jannaschii DSM 2661
MIPSYVPPKYKVEVDPNRCMLCERCTIECSWGVYRREGDRIISYSNRCGACHRCVVMCPRDAITIKENAISWRSHPLWDVDARVDIYNQAKTGCILLSGMGNAKEHPIYFDKIVLDACQVTNPSIDPLREPMELRTYIGKKPKQLEFEFVEEEIDGKKIKKAKLKTKIAPNLKLDTPIMIAHMSYGALSLNAHLSFAKAVKECGTFMGTGEGGLPKALYPYADHIITQVASGRFGVNEEYLMKGSAIEIKIGQGAKPGIGGHLPGEKVTAEISATRMIPEGSDAISPAPHHDIYSIEDLAQLVRSLKEATRWKKPVFVKIAAVHNAPAIAVGIATSDADAVVIDGYKGGTGAAPKVFRDHVGIPIEMAIAAVDQRLREEGLRNEISIIASGGIRCSADVFKAIALGADAVYIGTAAMVALGCRVCGRCYTGLCAWGIATQRPELVKRLDPEVGARRVANLIKAWTHEIKELLGAAGINSIESLRGNRDRLRGVGLNEKELEVLGIKAAGE

SEQ ID NO: 11064 - protein, 553 aa, Methanocaldococcus jannaschii DSM 2661
MEEKILPIALRNAIKYNGKANPKAVLGIFLSENPEYRSKAKEVMPIVEKVVEEVNKLSLDEIKKKLEELGEDVKKKEKKEKGLELPNVKDKVVMRFAPNPSGPLHIGHARAAVLNDYFVKKYGGKLILRLEDTDPKRVLPEAYDMIKEDLDWLGVKVDEVVIQSDRIELYYEYGRKLIEMGHAYVCDCNPEEFRELRNKGVPCKCRDRAIEDNLELWEKMLNGELENVAVRLKTDIKHKNPSIRDFPIFRVEKTPHPRTGDKYCVYPLMNFSVPVDDHLLGMTHVLRGKDHIVNTEKQAYIYKYFGWEMPEFIHYGILKIEDIVLSTSSMYKGIKEGLYSGWDDVRLGTLRALRRRGIKPEAIYEIMKRIGIKQADVKFSWENLYAINKELIDKDARRFFFVWNPKKLIIEGAEKKVLKLRMHPDRPEFGERELIFDGEVYVVGDELEENKMYRLMELFNIVVEKVDDIALAKYHSDDFKIARKNKAKIIHWIPVKDSVKVKVLMPDGEIKEGFAEKDFAKVEVDDIIQFERFGFVRIDKKDNDGFVCCYAHR

SEQ ID NO: 11065 - protein, 350 aa, Methanocaldococcus jannaschii DSM 2661
MSREANPFKKMPTILMPDELMAKALRRGEKVANEMRQKELPWLLKARFVEEHKVRTIASVVADNLQKVIDKTPPVRKLPKFYQEMVEVLVGIDDFKKSMGAFKWASELVRKLGNEYARKIRKARTPQQAGKLRKEFVGRVKSILEQIHPEMAFVAVAREKLKDLPTFKDLPTVVIAGYPNVGKSTLLKKLTGADVEINSYPFTTKGINVGYIGEIQMVDTPGLLDRPLYERNDIELQAILALNYLANLILFIIDASEFCGYTIEEQINLLKEIKDLFKAPIVVAINKIDLVDEERVKEIEEKLKEVGIEEILKISADKDIGLDELKERLKKIAIKEFLKDKDAENKELEC

SEQ ID NO: 11066 - protein, 432 aa, Methanocaldococcus jannaschii DSM 2661
MRNPIIDVGAKELSYEIREIVDVAKKIEEFGINITWENIGDPVAKGEKIPDWIKDIIAEIVKNDCSYAYCPTKGLLETREFLAEQVNKRGGVQITAEDIIFFNGLGDAIAKIYGLLKRQVRVINPSPSYSTHSSAEASHAGSPPVTYFLDPYNYWYPDIDDLEKRIKYNPAVSGILVINPDNPTGAVYPKKILNEIVDLANEYDLFIICDEIYCNLVYNGKKQHLLCEVIDDVCGLSLKGISKELPWPGARCGWIEIYNADKDEEFKKYVESIYKAKLIEVCSTTLPQMAIPRIMGHRNYKKYLEERNRFFEKRSNTAYKKLKDLDGVIANKANGAFYMSVVFEDNYLNGNNSIKIENEKLKEFIEHQIKDASIDKKFVYYLLASTGICVVPLTSFCSQLNGFRVTLLERDDEKFEWIFDTLAEKIDEFLKT

SEQ ID NO: 11067 - protein, 323 aa, Triticum aestivum
MDMDKEYYKACMGMEAPPMSPAGLSAVTTEVAMAAATASEDEGDLKRGPWTAEEDMLLVDYISKHGEGRWNSLARCAGLRRTGKSCRLRWLNYLRPDVRRGNITPEEQLLILDLHSRWGNRWSKIAQRLPGRTDNEVKNYWRTRVQKHAKQLHCDVNSDRFRDVVRQVWMPRLLERIQAESSSSAAAAAGVGVPALTRAMSSPAGASQYHCFDHASSGEPSRKVAVTMSPDTSSTLRSSLSPAETSHGAHFPAWGAATTTANVDGSMMQCAGPEAGAIGGDHYVIHGDSLSGSWSELLAATDIPDFEFGNFDDNLWSLEDIYC

SEQ ID NO: 11068 - protein, 509 aa, Phaseolus vulgaris
MCLQILTKIFLTHSSHQYQQQTLSFGSAIKTNPSHHHQGLGMEAHSIDGVSSQTDSKFYDDDGHVKRTGNLWTTSSHIITAVVGSGVLSLAWAMAQMGWVVGPAVMIFFSVVTLYTTALLADCYRSGDPISGKRNYTFMDAVQTILGRHYDTFCGVIQYSNLYGTAVGYTIAASISMMAIKKSNCFHSSGRDGPCQISSNPFMIGFGIIQIVFSQIPDFHKTWWLSIVAAVMSFAYSIIGLSLGIAKVAETGFKGSLTGIKIGAVTETQKVWGVFQGLGDIAFAYSYSQILIEIQDTIKSPPSEAKTMKKAAKLSIGVTTTFYMLCGFMGYAAFGDTAPGNLLTGFGFYDPYWLVDIANAAIVIHLVGAYQVYSQPLFAFVEKWVSKRWPNVDKEYKVPIPGFAPYNLSPFRLVWRTGFVIITTIVAMLIPFFNDILGLLGALGFWPLSVYFPVEMSIKQKKIPKWSQRWIGMQILSFVCLVVSVAAAIGSIASIVVDLQKYKPFHVDY

SEQ ID NO: 11069 - protein, 269 aa, Humulus lupulus
MDGPMGDQLYGSVITSTHHQLSSEEDHQLDLRKGPWTVEEDNKLFNYVSIHGEGRWNSLARHAGLKRTGKSCRLRWLNYLRPSVRRGNITLQEQLLILELHSRWGNRWSKIAQYLPGRTDNEIKNYWRTRVQKQAKQLKCDVNSKQFQDAMRYVWIPRLVERIQSGRPDSSSAVQPISTGVSTWGSSSANPKPMPDVSGSSSDTSEAQHSTVSDLTDCGQPMEIGSGGSLQYGSDIQGNAQSDTWLSGGDSLENWWSEEDLQFLETALL

SEQ ID NO: 11070 - protein, 695 aa, Lactococcus lactis subsp. lactis Il1403
MNNNKQPKQGNFVKNILMWVILAIVVVVGFNFFFSSNQSSVDKISYSQLMTKLDGNKIENVTMQPSDSLITVTGEYKEPVKVKGTNNFPLLGNSSSEVKNFQAYIIPTDSVVKDIQNAAKSNDVKLSVVQASSSGMWVQILSYIIPMLLFVGIFWLMMGGMGARGGGGGGNPMSFGKSRAKQQDGKTSKVRFADVAGSEEEKQELVEVVDFLKNPKKYHDLGARIPAGVLLEGPPGTGKTLLAKAVAGEAGVPFYSISGSDFVEMFVGVGASRVRDLFENAKKTAPSIIFIDEIDAVGRQRGAGLGGGNDEREQTLNQLLVEMDGFQDDGNSVIVIAATNRSDVLDPALLRPGRFDRKVLVGAPDVKGREAVLKVHAKNKPLASDVDLHNVATQTPGYVGADLENVLNEAALVAARQNKKEINAADIDEGMDRAMAGPAKKDRIQSMREREIVAYHEAGHAIVGLVLENGSTVRKVTVVPRGRIGGYMLALPDEEIMQPTNFHLQDQLASLMGGRLGEEIVFGVATPGASNDIEKATHIARSMVTEYGMSKKLGMVSYEGDHQVFIGRDYGQTKTYSEATAVMIDDEVRRILGEAYDRAKEAIETHREQHKAIAEALLKYETLDAKQIMSLFKTGKMPDEAAAAEVPEPKTFEESLKDANANVDDFSNINIYNGDEKTDSKPEENKEKSEDETAE

SEQ ID NO: 11071 - protein, 460 aa, Lactococcus lactis subsp. lactis Il1403
MAAILISLIGKYGMNGIFIATFMAGIFLLLAGIFRLGNLISLIPSPVITGFTSGIAIIIASGQIKNFFGIEHFTGSFFDLMKFISGLHIDYPSTIIGLLTILLMIFYPKSWGKKFPASLLAILLSTLAVLALKLDIPLVGKIPTTLIPQAHLRLTELNPQDMKTLLIPAISITVLGMTESLLCGASAGRATNHPMDNNQELVAQGIGNIFIPFFGGIPATAAIARTSVAIKAGAQTRLTGIIHALILLLSMFLFAPFMTHIPLSALAGVLIMTAVRMNEWEAIRFLFKNKLKSGIIEFFVTMIITVIFDLSTAILAGIVVGFLLFIVKISQIEINSSQIEPERISQNHHEVFTDWTVIYISGPLFFLNSSKLKQAIDELPANTNAVLSLRGVPMIDVTSIKLLIDIYSIFHKEERQIVFASMNPKLKESFKRTGLISMVGEEAIYPSVNEFLLDLVDKNK

SEQ ID NO: 11072 - protein, 391 aa, Lactococcus lactis subsp. lactis Il1403
MDLLKKFNPNLDKIEISLIRQFDQQVSSIPDVIKLTLGEPDFYTPEHVKQAGIVAIENNQSHYTGMAGLLELRQAASEFMNKKYGLSYAAEDEILVTVGVTEAISSVLLSILVAGDEVLIPAPAYPGYEPLITLAGGSLVEIDTRANDFVLTPEMLEQAIVEREGKVKAVILNYPANPTGVTYNRGQIKALAEVLKKHEVFVIADEVYSELNYTDQPHVSIAEYAPEQTIVLNGLSKSHAMTGWRIGLIFAARELVAQIIKTHQYLVTSASTQSQFAAIEALKNGAYDALPMKKEYLKRRDYIIEKMSDLGFKIIEPDGAFYIFAKIPADLEQDSFKFAVDFAKENAVAIIPGIAFGQYGEGFVRLSYAASMDMIEQAMARLTDYVTKKRG

SEQ ID NO: 11073 - protein, 437 aa, Lactococcus lactis subsp. lactis Il1403
MKENKLLSPAAIFLLGVNSIIGSGIFLLSGKIYEDAGIWSLLAILCAGLSIFVIAFAYANMSKIYSKNGGAFVYAKETFGRFPGFIVGMVTWLLGTVTLATEVSVLLTAMKMILPNLNSRLIGIIIILALGIISYFGSSIIAGLDNLTSFVKIVLVLVFIFTCLWLVRGLNFSSPNLLTASSANLGGFKGFLSAYGTVFFFFTGFSFLPVNAEKMKNPAKNLPKMMSLVMLTCLAVYLIIQTITIGALGPELTKTLVPAATAFSKIVGSIGIPLFVVGICFSIFGVIVATTFNTPTILASLAQAHEDVPMFVSKNNRFGTPTWAIILTTVCGIALFLSGNYVFLSGLTVFMSFVQYLSTGLANIKKKFLLIGIGSVLFSLVLLTSFTLSVLILGLGILILLVMIYFVVKLDDDEREKWLKEHQEKSKGADVNTVKRL

SEQ ID NO: 11074 - protein, 155 aa, Lactococcus lactis subsp. lactis Il1403
MSKNYKKILVAIDGSEQAEEALKEAIVLAKRDNSQLFVLHATDKNSIYAAGNPVPVVPAPAIPVVPAVPVLEESADNEAKEVLDKALAIINNEVKFEEIRVDGSAKNEIVDFAKEHEIDMIVMGSSGKGALDRMLLGSTAVYVVKHAPCSVTIIK

SEQ ID NO: 11075 - protein, 469 aa, Lactococcus lactis subsp. lactis Il1403
MGFMRKADFELYRDADKHYNQVLTTRDFLALGVGTIISTSIFTLPGQVAAQFAGPGVVFSYLLAALVAGFVALAYAEMSTVMPFAGSAYSWISVLFGEGFGWIAGWALLAEYFIAVAFVGSGFSANLQQLLAPLGFHLPKVLANPFGTDGGVVDIISLLVILLSAIIVFRGASDAGRISQILVVLKVAAVIAFIIVGITVIKPANYHPFIPPHNPKTGFGGFSGIWSGVSMIFLAYIGFDSIAANSAEAKKPQKTMPRGIIGSLLIAVVLFAAVTLVLVGMHPYSAYAGNAAPVGWALQQSGYSVLSEVVTAIALAGMFIALLGMVLAGSRLLYAFGRDGLLPKGLGKMNARNLPANGVWTLAIVAIVIGAFFPFAFLAQLISAGTLIAFMFVTLGIYSLRRRQGKDLPEATYKMPFYPVLPALGFIGSLFVFWGLDVQAKLYSGIWFLIGILIYFAYGNRRSRKSEEK

SEQ ID NO: 11076 - protein, 65 aa, Lactococcus lactis subsp. lactis Il1403
MAQGTVKWFNATKGFGFITTEEGNDVFAHFSAIQTDGFKTLDEGQKVTFDVEDGPRGPQAVNIQK

SEQ ID NO: 11077 - protein, 381 aa, Lactococcus lactis subsp. lactis Il1403
MYCIGCGAKIQTEAKNALGFLPAGALKKKIAERDQMEAVQAGDEGSEASIKTEDLYCQRCFRLRHYNEIAPTSLTDADFLRLLKEIGQHDALIVNVVDIFDFNGSLIPNLHKLTGGNDLLMVANKRDVLPKSLKVGKLTAWLREQAASRSLKPKDILVTSAQNKDDVAELMEAIEYYRRGRDVYVVGVTNVGKSTLINAIIKSASGSEDVITTSRFPGTTLDKIEIPLDEDSALIDTPGIIHRGQIAHYLEPEDLKYVSPRKEIKPKTYQLDPEQTLFFGGLARFDFISGERQGMTAYFDNEINVHRTKLEGATEFYEKHKGELLAPALVGAKLVRREFKITDKSDIVFSGLGWVRVPQKAVVAAWVPEGVDVVVRKALIG

SEQ ID NO: 11078 - protein, 303 aa, Lactococcus lactis subsp. lactis Il1403
MTNNKFKSGFVAILGRPNVGKSTFMNHVMGQKIAIMSDKPQTTRNKIQGIYTTENEQIVFIDTPGIHKPHNALGDFMVQSAYSTLRECDVVLFMVAADEPRSTGENMIIERLKKAEVPVILVVNKIDKIHPDRLFEIVADYTSQMEFSEVVPISAKQGNNTERLIDTLSEKLDEGPQYFPEDQITDHPERFLVSEMIREKILLLTREEVPHSIAVTTDQMTRDEETGKIHIMATIIVERKSQKGIILGKGGDMIRKIGKMARRDIEIMLGDKVYLETWVKIKNDWRDRKMDLADFGYNRDDYM

SEQ ID NO: 11079 - protein, 530 aa, Lactococcus lactis subsp. lactis Il1403
MCGFLFMETSDLTIEEFKSNLELIEHRGPDDQQHVRDTLGNDFGFCRLSIMDLSDLGRQPFGLNGKRVMCNGEIYNFLSLRKFLETKGYKFTGDSDCEVLLPLFETTGIETMVKMLDAEFAFVLVDENTAEIFAARDPFGIRPLFYGYNKVTGKISFSSEAKALISTCNDVTPFPPGYYYANGEFHVFNDIAEVSTIVEEPLAEISGHIRRKLERAVKKRLHADAPMGYLLSGGLDSSLVCAIAAKELESPIKTFAIGMETDPIDLKYAREVADFLRTDHTEILMTKEDVLSAVREVIWHLETWDITTIRASIGMYLICKYIHENTELKVLMTGEVSDEMFGYKYTDFAPSAGAFQKEAQKRVHELYMYDVLRADRCLAAHSLEARVPFADLDFAAYVMSINPSRKLNTYGKGKYLLRHAFEGTELLPDEILFREKAAFSDAVGHSMVDYLKEFADEKYSDEDLAKASEKYPKHTPFTKESLMYREIFEEFYPGYEDWILDFWMPNRDWVGAEVTDPSARVLSNYGDSGK

SEQ ID NO: 11080 - protein, 381 aa, Lactococcus lactis subsp. lactis Il1403
MIYFDNSATTAVNPMVLRTYTDVATKIMGNPSSLHGLGTTATRLLEASRRQIAELLGVDSQEIFFTSGGTEGDNWILKGVAFEKRPYGNHIIVSNVEHPAVKNTAEWLKTQGFEVDFAPVDGDGFVIVSELEKLIRDETILISIMAVNNEVGTIQPIGEISDLLADKPTISFHVDAVQAIGKIPLEAWLTERVDFAVLSAHKFHGPRGVGIVVAKKGKRLTPLLHGGGQEHNWRSTTENLAGIAATSKALRLALDDDDFKRQKVRAMKQVILEELEKHRKVHVFSKVENFAPNILTFGIRGVRGEVVVHAFEQHEIYISTTSACSSKKNAAAGTLVAMNVPSKLATSAVRISLDSTNNMAEVEQFLTVFRQIYQELEKVSG

SEQ ID NO: 11081 - protein, 584 aa, Lactococcus lactis subsp. lactis Il1403
MANRIEGKAVDKTSIKHFIKLIRAAKPRYLFFIIGILAGIVGTLIQLQVPKMVQPLVNSFGHGVNGGKVALVIALYIGSAAVSAIAAIVLGIFGESVVKNLRTRVWDKMIHLPVKYFDEVKTGEMSSRLANDTTQVKNLIANSIPQAFTSILLLVGSIVFMLQMQWRLTLAMIIAVPVVMLIMFPIMTFGQKIGRTRQDSLANFQGIASESLSEIRLVKSSNAEKQASKKAENDVNALYKIGVKEAIFDGLMSPVMMLSMMLMIFGLLAYGIYLISTGVMSLGTLLGMMMYLMNLIGAVPTVATFFTELAKASGSTGRLTELLDEEQEVLHQGESLDLEGKTLSARHVDFAYDDSEQILRDISFEAQPNSIIAFAGPSGGGKSTIFSLLERFYQPTAGEITIDGQPIDNISLENWRSQIGFVSQDSAIMAGTIRENLTYGLEGDYTDEDLWQVLDLAFARSFVENMPDQLNTEVGERGVKISGGQRQRLAIARAFLRNPKILMLDEATASLDSESESMVQKALDSLMKGRTTLVIAHRLSTIVDADKIYFIEKGQITGSGKHNELVATHPLYAKYVSEQLTVGQ

SEQ ID NO: 11082 - protein, 450 aa, Lactococcus lactis subsp. lactis Il1403
MKVAKFGGSSLASASQIKKVFDIVQADKQRKFIVVSAPGKRSGADTKVTDALIAYYKAYKSADEKGIHYYQNWIIERFREIYDELGLKSPVINQIAENINHLAQLDLDNVFTYDTFLAAGENNNAKLVADFFNHSGLPSRYVHPSDAGIMVSSDPGNARLLGGAYEHIKYLNELEETLIIPGFFGITKEGEVCTFSRGGSDITGSIIAAGVRAELYENFTDVNGIFAAHPGIVKNPAYISELTYREMRELAYSGFSVLHDEALVPAYRAHVPLVIKNTNNPDHPGTKIVVQRETKGSPVVGIASSSAFSSLYVSKYLMNREVGFGRKVLSVLENLGVRFEHMPTGIDDMSIIIRSRYLTQPISKALISNLTESLHPDEVYIDRDFSIITIVGEDMKEHVGVTARATAALSKQGISIAMLSQGSSEVSVMFIVKEKYEKEALKAIYSAFFD

SEQ ID NO: 11083 - protein, 324 aa, Lactococcus lactis subsp. lactis Il1403
MSYSNLKLFSLSSNHELAQKVAKEIGIELGKVSVGAHSDGETVVHIDESVRGDHVFILQSTSDPVNDNLMELLIMMDALRRASAASINIVLPYYGYARQDRKARAREPITSKLVANMLQIAGADRLITFDLHAPQIQGFFNIPVDHLMGSPLIAEYFRRQLVSAGDDIVVVSPDHGGVGRARKLANFLKAPLSIIDKRRPRANVAEIMNIIGDVQGKKCILIDDMIDTAGTITLAANALKELGATEVYASCTHAVLSGPAIERINNSAITKLVVLDTIEMPEERQSEKIVQLSIAHLLADAIIRIHERRPLSPLFELHLPSEQI

SEQ ID NO: 11084 - protein, 264 aa, Lactococcus lactis subsp. lactis Il1403
MMNPAEILSATIHHGQEKIKRPFLEKAVLGFIGGAMISFGYLLYIRVVASVAEELGSLASLIGASVFPIGLIVILLGGGELITSNMTAVSTSLFAKKVSLSDLLKNWLIITLFNVIGAIFVAFVFGHLVGLTGTGDYKTELLSLAQAKINASWSQEFLSGIGCNWFVGLAMWMCYGAKDAAGKILAVWFPVMAFVAIGFQHSIANAFVIPAAIFENGASWLDFAHNFLFVYLGNLLGGSIFVAGFYSLGYRRQAREQEGLKNQE

SEQ ID NO: 11085 - protein, 104 aa, Lactococcus lactis subsp. lactis Il1403
MSNYAIIKTGGKQLKVEEGSVIYVEKLNVEAGQTVTFDEVIFVGGETTKVGAPLVEGATVVGEVEKHGKQKKVVTFQYKPKKHSHRKQGHRQPYTKVVIKSVNA

SEQ ID NO: 11086 - protein, 554 aa, Lactococcus lactis subsp. lactis Il1403
MSEKQFGANLVVDSLINHKVKYVFGIPGAKIDRVFDLLENEEGPQMVVTRHEQGAAFMAQAVGRLTGEPGVVVVTSGPGVSNLATPLLTATSEGDAILAIGGQVKRSDRLKRAHQSMDNAGMMQSATKYSAEVLDPNTLSESIANAYRIAKSGHPGATFLSIPQDVTDAEVSIKAIQPLSDPKMGNASIDDINYLAQAIKNAVLPVILVGAGASDAKVASSLRNLLTHVNIPVVETFQGAGVISHDLEHTFYGRIGLFRNQPGDMLLKRSDLVIAVGYDPIEYEARNWNAEIDSRIIVIDNAIAEIDTYYQPERELIGDIAATLDNLLPAVRGYKIPKGTKDYLDGLHEVAEQHEFDTENTEEGRMHPLDLVSTFQEIVKDDETVTVDVGSLYIWMARHFKSYEPRHLLFSNGMQTLGVALPWAITAALLRPGKKVYSHSGDGGFLFTGQELETAVRLNLPIVQIIWNDGHYDMVKFQEEMKYGRSAAVDFGYVDYVKYAEAMRAKGYRAHSKEELAEILKSIPDTTGPVVIDVPLDYSDNIKLAEKLLPEEFY

SEQ ID NO: 11087 - protein, 540 aa, Lactococcus lactis subsp. lactis Il1403
MLPLYDAIHNFEGIQHILARHEQGATHEAEGYAKSSGKVGVVVVTSGPGATNAVTGIADAYLDSVPLLVFTGQVGPLSIGKDAFQEADTVGITAPITKYNYQIRETADIPRIVTEAYYLARTGRPGPVEIDLPKDVSTLEVTEINDPSLNLPHYHESEKATDEQLQELLTELSVSKKPVIIAGGGINYSGSVDIFRAFVEKYQIPVVSTLLGLGTLPISHELQLGMAGMHGSYAANMALVEADYIINLGSRFDDRVVSNPAKVAKNAVVAHIDIDAAELGKIVKTDIPILSDLKAALSRLLQLNKVRTDFNDWIKTVTKNKEKAPFTYEPQNHDIRPQETIKLIGEYTQGDAIIVTDVGQHQMWVAQYYPYKNARQLITSGGMGTMGFGIPAAIGAKLAQPNKNVIVFVGDGGFQMTNQELALLNGYGIAIKVVLINNHSLGMVRQWQESFYEERRSQSVFDVEPNFQLLAEAYGIKHVKLDNPKTLADDLKIITEDEPMLIEVLISKSEHVLPMIPAGLHSDEMIGLHFTDENEEVDNA

SEQ ID NO: 11088 - protein, 1486 aa, Lactococcus lactis subsp. lactis Il1403
MNKKAKQAMKTTLWQPDFESDACGMGFIAQIDGKASHLLVERALTMLTRMNHRGGTGAEPETGDGAGILLALPDEFFRKIAKEHDVELPKLGDYAVGQFFLSRKENKKHQELEAIKAAVKAQGYEVLFTRTVPFNFEACGATAQGIMPSFVQVFIEKKSSEKAVSEISNFENDLFIIRRNLEKRFDEEELYICSLSSQTVVYKGMLHAYQVKLFYPDLSDEDFKSHIALTHSRFSTNTFPSWNRAQPFRFLAHNGEINTLRGAENWMKVNDIEMYNEENSDSAKLENCMEYFYRNGRELPESLLTMIPEAWGEQTGLSPELKAFYEYSTAHIAPWDGPAALVFTDGKTVGARLDRNGLRPSRYLVTKDNSIILSSESGVVDIPADEIIEKSVLGPGNMLLVNTDEGKIIRNEEVKSYYANKYPYQEFLSAGLKKLSALTESEKTNPIPSAKMNTLWKLFGYTDEVIRTVLLPMAESANEPTISMGFDAPLAVLSDQAQSLYNFFKQQFAQVTNPPIDAIREQIVIGTETYLGEDGNPAKITGENVRKLKLDSPVLSTADFEKILALKEEHYHTEIISTLYDKDDLLENALNKLFYKAESLINQGTTIIVLSDRDFAENKVPMPILLALSGLYHYMLGRHNASKFAIIVDTAEVCEVHQFAALVGYGVSGIHPYGAYATLSDWGMGAPEQLENFRHAAEKGIVKVMSRMGISTIVGYKGAQLFEAIGLSKEVVDKYFTGTSTRIGGLSLAQIEDEYRLRYEKAYGHRAQDLLETGGSFQYRADEGEHHIYDPQMIYQIQNAVRQNDFEKYKKYSQYLNDIALKTPTSLRHTWKIKSDRKSIQMSEVEPAREIVKRFKIGAMSFGSLSQEAHECIAQAMNSIGAKSNSGEGGENAKRYGTINNSKIKQVASGRFGVSAAYLMSAEEIQIKISQGAKPGEGGQLPGKKAFPWVAEVRNSTPGVSLISPPPHHDIYSIEDLSQLIFDLKKINPYAKINVKLVSSTGVGTIATGCVKAGADKVVISGYDGGTGASPRNSIRDAGLPWEMGLAEAHQTLSLNNLRDRMILETDGKVVTGRDIAIAAMLGAEEYSFGSLALVAIGCIMTRNCHLNTCPVGIATQNPRLRANFAGNPEHIVRLMEFMAEEVRELLAELGFRTINELVGHAELLQAKEDLPAKMRGLDFSRMLGHALPIATRHSDPFANPRAWKELDQFTEATLNNGSQATVHGTIKNINRTTTARMAGWIAERYGNFGLKDASVCYEYEGVAGQSFGSYATAGMEVTLIGEANDYIGKSLSGGRLIVKPPLDAAYDIENTSIVGNVSLFGAIGGEAYFRGRAGERCGVRNSGAHFVVEGTGDHGCEYMTGGIAVVLGTTGRNFAAGMSGGIAYVYDVAGNFENKVNREMVDLYALDETSGDEVLEELLKKHLNYTDSEKAKFILEHWQTEREKFVKVYPREYHHIKNVEEDLAKTGLSGEALTMTTFKKVTEVS

SEQ ID NO: 11089 - protein, 457 aa, Lactococcus lactis subsp. lactis Il1403
MYTVGDYLLDRLHELGIEEIFGVPGDYNLQFLDQIISRKDMKWVGNANELNASYMADGYARTKKAAAFLTTFGVGELSAVNGLAGSYAENLPVVEIVGSPTSKVQNEGKFVHHTLADGDFKHFMKMHEPVTAARTLLTAENATVEIDRVLSALLKERKPVYINLPVDVAAAKAEKPSLPLKKENPTSNTSDQEILNKIQESLKNAKKPIVITGHEIISFGLEKTVTQFISKTKLPITTLNFGKSSVDETLPSFLGIYNGKLSEPNLKEFVESADFILMLGVKLTDSSTGAFTHHLNENKMISLNINEGKIFNERIQNFDFESLISSLLDLSGIEYKGKYIDKKQEDFVPSNALLSQDRLWQAVENLTQSNETIVAEQGTSFFGASSIFLKPKSHFIGQPLWGSIGYTFPAALGSQIADKESRHLLFIGDGSLQLTVQERKLQVQVSQPSSSHMNSYS

SEQ ID NO: 11090 - protein, 867 aa, Lactococcus lactis subsp. lactis Il1403
MDIEKMTTTMQEALGSAQQIAQVRHHQVIEVPHLWRIFVQPNSFGANFYKDLGIDLDDYTNLIEKEIDKINSVEGSNITYGQNLSPDLFQIFTEADKIAQKMGDEYLSTEIILLALFELKQNPLTSYLVSHGLTKAKAQAAIEKLRGGDKVTSQNAEETYKALEKYGVDLVAQVKSGKQDPVIGRDEEIRDVIRVLSRKTKNNPVLIGEPGVGKTAIVEGLAQRIVRKDVPENLKDKTIFSLDMGALIAGAKYRGEFEERLKAVLNEVKKSDGQIILFIDELHTIVGAGKTEGSMDAGNLLKPMLARGELHLIGATTLDEYRKYMETDKALERRFQKVLVTEPTVEDTISILRGLKERFEIHHGVTIHDNALVAAATLSNRYITDRFLPDKAIDLVDEASATIRVEMNSLPTELDQANRRLMQLEIEEAALKKERDDASKKRLEIIRGEIAELREENNQLKAQWEAEKKEVGNISEKRNELEHARHELEEAQNEGNLEKAAALRYGKIPEIEKELKAIEEKAKSDDLSLVQESVTEEQITEVVGRMTGIPITKLVEGEREKLLHLPETLHQRVVGQDEAVEAVSDAIIRARAGIQDPNRPLGSFLFLGPTGVGKTELAKALAENLFDSEEHMVRIDMSEYMEKHSVSRLVGAPPGYVGYDEGGQLTEAVRRNPYTIILLDEIEKAHPDVFNILLQVLDDGRLTDSKGVLVDFKNTVLIMTSNVGSQYLLDNVGENGEISEETTENVMSQLRAHFKPEFLNRIDDTILFKPLALEDIKNIIVKMTSQLSHRLEEMDVQLELSEEVKVWIAENAYEPAYGARPLKRYLTKVIENPLAKLIIGGKIPPKSKVIVTLVENKIDFDIQTIAE

SEQ ID NO: 11091 - protein, 358 aa, Lactococcus lactis subsp. lactis Il1403
MNISEEVRPGANRYVSGQGILQDLESYLASFNKLAIITGEKSFQVFQDFYPKDLSYPVFHYDGSASIENGKKLAKEIGQSDGLLAIGGGRLIDTCKVVAQELNCELIIIPTLVSNCAPYTPVAALYHPDHTFDKVGYLNKVSYLTLVDYDFLLATPHDYFVAGIGDTLAKWYEMEGIVRQVSQEELSASVRLGFASAKEIFKILFADSKAALNDLAEQKVTPAFGRIVDTIIELSGTVGGFAGTYGRMSGAHALHNGLSLCSETHPILHGSKVAYGVLVQLAYTGDTSEIEKLLPFYKENHLPASLAEINLPFDLEKLQAVAKFAASPVESYRLIDSKVTDEKIISAIKALEALVSKK

SEQ ID NO: 11092 - protein, 379 aa, Lactococcus lactis subsp. lactis Il1403
MKEIVIIDALRTPVGRYDGALAEYSAAELGTHVVSNLLSKHENIKSDVEQVIFGNVLQAGNGQNIARQIAIHSGLSNTVPASTINEVCGSGMKAVILAKQLLQLGEAEVVIAGGTESMSNAPIIKNRKTQEETLSMLNDGLVDAFSGISMGIIGETIAEQFDISRADQDAFAQNSQEKAVAASQAGIFKEEIVAIGEVGVDETPRPSSSLEKLATLRTAFKENGTVTAGNSSPVNDGASAVILATKDYAEKHGIPYLAELVDSTEVGIDPAIMGVSPIEAIKKLINRSELELSDIDLFEINEAFAASSLAVNRELGLNESQVNIYGGAIALGHAIGSSGSKILTTLSYALKREQKRYGIASLCIGGGLGLAVLLKNPNL

SEQ ID NO: 11093 - protein, 413 aa, Lactococcus lactis subsp. lactis Il1403
MDTGSIAFILICAALVFLMTPALAFFYGGLGRRKNVLNTMMMSLAPMALASILWIIIGFSFSFSGSNSWIGDFHHLFMNGVDMAKNSLFPANHIPDGLFSGFQMMFSIITVALITGSVVGRMRFTPILIFMTAWLILVYYPLAHMVWGGGFLAQIHAIDFAGGDVVHISSGVTGLGLALVLGKRRDYERLDYRPHNIPFVVLGAGLLWFGWFGFNAGSALAANGVAINAFMTTNTAAAAAMFSWMIVEKILIGKPSIVGACSGAVVGLVAITPGAGFVSLWSSLIIGLLVSPLSYFMISVVKKKLGYDDALDAFGCHGIGGMFGGIMTGIFATPALAPEKGYAGLIYGSGKLLLANVSAVVFTVIFTALVSWIIIKVIALFMPIRVSDRAEAIGLDDSEHEETAYPTFLGLDS

SEQ ID NO: 11094 - protein, 326 aa, Lactococcus lactis subsp. lactis Il1403
MELFESLKQKISGKGLKIVFPEGTDARILGAANRLNADGLITPVFIGNVKEVTETLISRGINPEGFEIYDPENCGRFETMTETFVERRKGKVTEEQAKELLKDPNYFGTMLVYMKIADGMVSGAIHSTADTVRPALQIIKTKPGVKSVSGAFIMVRGRDDNEKYIFGDCAINIKPDAPTLADIAVASAETAALFDIDPKVAMLSFSTKGSGKSEDVDKVVEATKLVKEDYPEIEIDGELQFDAAFVPAVARQKAPDSTVAGRANVFIFPDIQSGNIGYKIAQRLGNFEAIGPILQGLNAPVSDLSRGSNEEDVYKLAIITAAQALK

SEQ ID NO: 11095 - protein, 256 aa, Lactococcus lactis subsp. lactis Il1403
MATLEIKNLHVAIEDKEILKGVNLVINTNEIHAIMGPNGTGKSTLSAAIMGNPNYSVTQGEVLFDGQNVLEMSVDERARLGLFLAMQYPSEIPGITNAEFLRAAMNAKRAEDDKVSVMEFIKKLDKNMEVLSMKEEMAERYLNEGFSGGEKKRNEILQLLMLEPTFAILDEIDSGLDIDALKVVAKGVNSMRGEKFGALIITHYQRLLDYITPDVVHIMMDGRVVKTGGAELAKRLETEGYVNIAEELGLEYKEEV

SEQ ID NO: 11096 - protein, 393 aa, Lactococcus lactis subsp. lactis Il1403
MKKNSDFVLKMDESVTLAAANRAKALKAQGRDIIDLTLGQPDFPTPKIIGQAAIEAIDNGKASFYTQAGGLPELKNAVQHYWTRFYNYEIQPNEILITAGAKFALYAYFMATVDPDDEVIIPAPYWVSYVDQVKMAGGNPVIVEAKQENNFKVTVEQLEEARTSKSKILLLNSPSNPTGMIYSKEELTAIGEWALAHDLLILADDIYHRLVYNGAEFTAISSLSDEIRKRTTVINGVSKTFAMTGWRIGLAVGDPEIISAMTKIASQTTSNPTAVAQYAAIEAFEERDNSFEIMHAAFEERLNIIYGQLSEVPGFELVKPNGAFYLFPKVTKAMAMKGYSDVTDFTTAILEEAGVALVTGAGFGSPENVRLSYATSLKNLEVAVARLKDWMNE

SEQ ID NO: 11097 - protein, 321 aa, Lactococcus lactis subsp. lactis Il1403
MVYSDSHLKLFALNSNPGLAEKISQFTGVPLGKLSSKQFSDGEIMINMEESVRSQDIFIVQSTSCPVNDHLWELLIMIDACKRASARTINVVIPYFGYARQDRTATSREPITAKLVADMIVKAGADRLLTLDIHAVQVQGFFDIPVDNLFTVPLFADYYRKSGLFGDDVIVVAPKNSGIKRARSLAEYLESAIAIVDYEDDDKNRENGYVIGNVSGKKVILIDDILNTGVTFANAANVVREAGASEIYAVASHGLFTSGAADVLEKVDIKEILVTDSVVTNHRKPLNVKYLSAAEYLASAILRIHEGRPVSPLFEHEKPQD

SEQ ID NO: 11098 - protein, 375 aa, Lactococcus lactis subsp. lactis Il1403
MIYLDNAATTPLLPDVITAISESLSANFGNPSSIHSLGRASSQIVRKARETVANALEVPSRNIIFTSGASEANNQALIGYALANKDKGNHIITTAIEHPSVLNTVQYLHDRYGFDVSFVKPKADGTFPASLIEENLRPDTILVSMMWANNETGQLLPVKEVGELLKQHQAVFHVDATQVMGKISVHPLDVSADFLSASAHKFHGPKGVGFLYYNEKLHFDALIHGGEQEEKRRAGTENLHSLVGLAKALELALESIESNYQAVEKLNETLLTKLEEQKISFYKNNFGPSMPHVLNLAFPNENHDLLLTKLDLAGFAISTGSACTAGTIEPSHVLEAVYGKNSEKLKENIRISFSEMNTIDEVNLFVEKLSSILKK

SEQ ID NO: 11099 - protein, 395 aa, Lactococcus lactis subsp. lactis Il1403
MEKTLAVNAGSSSLKWQLYEMPEETVIAKGIFERIGLSGSISTTKFNNEEHFRKQEIVDHRQAVLLLMDELIHFKLIHEFREITGIGHRVVAGGEFFKTSTVISPEVLAEIKNLSTLAPLHNPANVLGIEAFQRLLPDALAVAVFDTAFHSTLPEKAYRYPIPTKYYEDYSIRKYGAHGTSHMYVAQEAEKVLGKPLEDLKLITAHIGNGASITAIEAGKSVDTSMGFTPLAGVMMGTRAGEMDASVIPYMLESDPSLRNAQDVIDILNKDSGVLGVSELSSDMRDLSEAVAKGNPKAILAYEMYVDRLKKFIAQYFGVLNGADALIFTAGVGENDTAVRTDVVNGLSWFGMEIDESKNVRGAFGIISKPESKVKVLVVPTNEELVIARDVEAAK

SEQ ID NO: 11100 - protein, 395 aa, Lactococcus lactis subsp. lactis Il1403
MTKTLAVNAGSSSMKWQMYEMPEEKVLAKGLIERIGLKDSIVTVKFGEQKEERVFDIPNHTEAVEVLLEDLKRLKIVEEFTEITGVGHRVVAGGEIFQKSTVVTPEVLQQVKDLSALAPLHNPANAAGIEAFLNLLPDATSVVVFDTAFHTTMPEKAFRYPLPKKYYTDYAVRKYGAHGTSHMYVSQEAAKLLGKPIEETKIITAHIGNGASLTAVKGGKSIDTSMGFTPLAGVMMGTRTGEMDPSVFPYLIENDSELKDAQGVVDMMNKESGLYGVSGISSDMRDIIAAKDTDTDAKLAFEMYVDRIQKFIGQYLAVLNGADALVFTAGIGENSVPVREAILSGLTWFGIEVDPEKNVFGVEGEISTPHSRVKVFVIPTDEELVIARDVEALKK

SEQ ID NO: 11101 - protein, 293 aa, Lactococcus lactis subsp. lactis Il1403
MSKIAFIGTGVMGAAMAGHLMDAGHDLIVYNRTKSKTDGLVARGATYAENPQKAAAQAEFMITIVGYPKDVREVYFGAEGIFKNDCSGKVLIDMTTTEPTLAQEIYQEAKKVGAFALDAPVSGGDLGAKNATLTIMVGGDSETYEKALPLFEKMGKTITHQGAVGSGQHTKMANQICIAGTMTGMTELLAYAQKAGLDLDKVLNTVGGGSGATWSLANYGPRILREDYSAGFFVKHFIKDLGIALSEAEKMNLKLPATKGAKELYEQLADKGFENDGTQALIKLWWPNGHRPE

SEQ ID NO: 11102 - protein, 625 aa, Lactococcus lactis subsp. lactis Il1403
MCGIVGFIDRMNQNDKSKTLEEMMNTIGHRGPSSSGEFIDEGAAIGFRRLSIIDLEGGDQPIFNEDKSKLITFNGEIYNFRELREDLIAKGHDFTTHADTEVLLHGYEEYGVELLQKLRGMFAFVIWDREKQELFGARDHFGIKPLYYTQMGGTFMYGSEIKSFLKHPNFKKELNKEALKPYMTFQYSALDETFFKNVFRIKEGHYFTYKDGVLDIKPYWDMKVDEKDMSLEESIDLIDKTVLGSVDAHKFADVEVGAFVSSGVDSSYVASTLRPEHTYSIGFGQGTFNESKQAKQLTDMIGLNNTSREIHGDEAFKYFPQIQYYLDEPDSNPSCVPLFFLAELAARDVRVVMSGEGADELFAGYESYGFSTNSRAVRVFAEGLKKLPKSLRFSIARGIENKHFKGQKHLYESLAPAEDFFIGQAKVFDESESVELLKEEFKAAPTVKDIVGKTYKKAPEGSELRKMQYLDMHQWMPGDILLKADKMAMAHSLELRVPLLDIELMHTAEQIPTKYLLNEHNTKYAFRQAARRHLPEEWSNRKKLGFPVPIKDWLREEKYYKVVRQLFEQDFVAEFFDQEKLLKMLDDNFADKNDARRKLWTIYSFLTWYDVYFINNGEKPAVVNF

SEQ ID NO: 11103 - protein, 463 aa, Streptococcus pyogenes M1 GAS
MTIFRKKKKYSNKTEMQRHFKVIDLVFLGLGSMVGTGIFTVTGIGAAKYAGPALTISIIISAIAIGILALFYAEFASRMPSNGGAYSYVYATLGEFPAWLVGWYIIMEFLTAISSVAVGWGSYLKGLLANYNIVLPNALNGTFNLKNGTYIDILPVLVMFFVTGIVLMNSKLALRFNSFLVILKFSALALFIFVGIFFIDHNNWSHFAPYGVGQITGGKTGIFAGASVMFFAFLGFESISMAVDEVKEPQKTIPKGIILSLIIVTALYIVVTTILTGIVHYTKLNVPDAVAFALRNIRLYWAADYVSIVAILTLITVCISMTYALARTIYSISRDGLLPKSLYTLTKKNKVPQNATLVTGLLAMICAGIFPLSSLAEFVNICTLAYLIILSGAIIKLRRIEGEPKANEFKTPLVPFLPMLAIIICLSFMSQYKAFTWIAFAIATIIGTLIYLAYGYTHSIENK

SEQ ID NO: 11104 - protein, 320 aa, Streptococcus pyogenes M1 GAS
MSYSDLKLFALSSNKELAEKVASAMGIQLGKSTVRQFSDGEIQVNIEESIRGHHVFILQSTSSPVNDNLMEILIMVDALKRASAEKISVVMPYYGYARQDRKARSREPITSKLVANMLEVAGVDRLLTVDLHAAQIQGFFDIPVDHLMGAPLIADYFDRHGLVGEDVVVVSPDHGGVTRARKLAQFLQTPIAIIDKRRSVDKMNTSEVMNIIGNVSGKKCILIDDMIDTAGTICHAADALAEAGATAVYASCTHPVLSGPALDNIQRSAIEKLIVLDTIYLPKERLIDKIEQISIADLVAEAIIRIHEKRPLSPLFEMGN

SEQ ID NO: 11105 - protein, 398 aa, Streptococcus pyogenes M1 GAS
MSKTIAINAGSSSLKWQLYQMPEEAVLAQGIIERIGLKDSISTVKYDGKKEEQILDIHDHTEAVKILLNDLIHFGIIAAYDEITGVGHRVVAGGELFKESVVVNDKVLEQIEELSVLAPLHNPGAAAGIRAFRDILPDITSVCVFDTSFHTSMAKHTYLYPIPQKYYTDYKVRKYGAHGTSHKYVAQEAAKMLGRPLEELKLITAHIGNGVSITANYHGKSVDTSMGFTPLAGPMMGTRSGDIDPAIIPYLIEQDPELKDAADVVNMLNKKSGLSGVSGISSDMRDIEAGLQEDNPDAVLAYNIFIDRIKKCIGQYFAVLNGADALVFTAGMGENAPLMRQDVIGGLTWFGMDIDPEKNVFGYRGDISTPESKVKVLVISTDEELCIARDVERLKNTK

SEQ ID NO: 11106 - protein, 394 aa, Streptococcus pyogenes M1 GAS
MTKEVVITSAYRTPIGNFGGVFKSLSAVDLGVTVVTKILADTGLKSDAIDEVIFGNVLHAGLGQNVARQVALNAGLSYDTPAFTIDMVCGSGLKAVELGAQKIQTGNADIVLVGGTENMSQAPYVLQGQRWGSRMGDSKVVDTMLKDGLSDAFAGYHMGITAENIVQQYGLTREEQDAFAADSQRKAQLAIEKGRFKEEIAPVTIPQRKGEPLLVDQDEYPKFGTTVDKLAKLRPAFIKDEGTVTAGNASGINDGAAAILLMSKEKAEELGLPILAKITSYASAGVDPSIMGCGPIPATKKALAKAQLTIDDIDLIEANEAFAAQALAVSRDLGFDNEKVNVNGGAIALGHPIGASGARILVTLLAEMAKRDVRHGLATLCIGGGQGQSIIVTR

SEQ ID NO: 11107 - protein, 256 aa, Streptococcus pyogenes M1 GAS
MSILEINNLHVSIEGKEILKGVNLTLKTGEVAAIMGPNGTGKSTLSAAIMGNPNYEVTQGQILLDGVNILDLEVDERARLGLFLAMQYPSEIPGITNAEFMRAAMNAGKADEDKISVRDFITKLDEKMALLGMKEEMAERYLNEGFSGGEKKRNEILQLLMLEPKFALLDEIDSGLDIDALKVVSKGVNEMRGKDFGAMIITHYQRLLNYITPDLVHVMMDGRIVLSGDAALATRLEKEGYAGIAQDLGIEYKEES

SEQ ID NO: 11108 - protein, 372 aa, Streptococcus pyogenes M1 GAS
MEELFCIGCGIQIQTEDKEKAGFTPAAALKKGMETGELYCQRCFRLRHYNEITDVHITDDEFLRLLHEVGDSDALVVNVIDIFDFNGSIIPGLSRFISGNDVLLVGNKKDILPKSVKDGKVTQWLTERAHEEGLRPLDVMLTSAQNKYAIKDLIGRINELRNGRDVYVVGVTNVGKSTLINAIIQEITGNKDVITTSRFPGTTLDKIEIPLDDGTFIFDTPGIIHRHQMAHYLSPKELKIVSPKKEIKPKTYQLNPEQTLFLGGLARFDFINGERQGFTAFFDNQLELHRTKLAGADAFYDKHVGTLLTPPDKKELTAFPKLVRHEFTIDQKMDIVFSGLGWIRVNGQKDSKAIVAAWAPEGVAVIVRKAII

SEQ ID NO: 11109 - protein, 298 aa, Streptococcus pyogenes M1 GAS
MFKSGFVAILGRPNVGKSTFLNHVMGQKIAIMSDKAQTTRNKIMGIYTTETEQIVFIDTPGIHKPKTALGDFMVESAYSTLREVETVLFMVPADEKRGKGDDMIIERLKAAKIPVILVINKIDKVHPDQLLEQIDDFHSQMDFKEVVPISALEGNNVPTLIKLLTDNLEEGFQYFPEDQITDHPERFLVSEMVREKVLHLTQQEVPHSVAVVVESMKRDEETDKVHIRATIMVERDSQKGIIIGKQGAMLKKIGKMARRDIELMLGDKVYLETWVKVKKNWRDKKLDLADFGYNEKEY

SEQ ID NO: 11110 - protein, 397 aa, Streptococcus pyogenes M1 GAS
MPKLSKRVLEMKESVTLAAGARAKALKAQGRDVLNLTLGEPDFFTPKHIQDKAIESIQNGTASFYTNASGLPELKAAIATYLKNQYGYHLSPDQIVAGTGAKFILYAFFMAVLNPGDQVLIPTPYWVSYSDQVKMAEGQPIFVQGLEENQFKVTVDQLERARTSKTKVVLINSPSNPTGMIYGAEELRAIGEWAVHNDILILADDIYGSLVYNGNQFVPISTLSEAIRRQTITVNGVAKSYAMTGWRVGFAAGEPEIISAMSKIIGQTTSNLTTVSQYAAIEAFCGSQSSLEEMRLAFEERLNITYPLLCQVPGFEVVKPQGAFYFFPNVKKAMEMTGFSDVTSFANAILEEVGLAVVSGAGFGAPENVRLSYATDIETLKEAVRRLHVFMESNEIN

SEQ ID NO: 11111 - protein, 270 aa, Streptococcus pyogenes M1 GAS
MNFKKIRFGFLLCLLLYPLAACNKSEQLNHYERIKKTRKLVVAVSPDYAPFEFKALVNGKDTIVGADVQLAQAIADELDVDLELSPMSFDNVLSSLQTGKADLAISGISHTKERAKVYDFSIPYYQAENAIVMRASDAKVTKNISDLNGKKVAAQKGSIEEGLVKIQLPKANLISLTAMGEAINELKAGQVYAVTLEAPVAAGFLAQHKDLALAPFSLKTSDGDAKAVALPKNSGDLTKAVNKVIAKLDEQERYKSFIAETIALTKNTMK

SEQ ID NO: 11112 - protein, 373 aa, Streptococcus pyogenes M1 GAS
MIYFDNAATTIPYGEALKTYQEVATKIYGNPSSLHQLGTNASRILEASRKQIAGLLGVKSEEIFFTSGGTESANWAIKGIAFEKNAFGKHIIISAIEHPAVSESVKWLLTQGFEVSYAPVTTQGVVDVNALAELIRPDTILISIMAVNNEMGAIQPIRAISNLLANQPTITFHVDAVQAIGKIPLCDYMTNRVDLASFSGHKFHSVRGVGFLYKKAGKRLNPLLSGGGQEQELRSTTENVAGIASMAKALRIVTEKQVSVLPKLTAMRDVIYKSLSAYPDVTVFSAQEGFAPNILTFGIRGVRGEVIVHAFEKYEIYISTTSACSSKAGEPAGSLVAMGIPVKTAQTAVRISLDDDNDMGQVEQFLTIFQTDL

SEQ ID NO: 11113 - protein, 104 aa, Streptococcus pyogenes M1 GAS
MSTYAIIKTGGKQVKVEVGQAIYVEKIDAEAGAEVTFNEVVLVGGDKTVVGTPVVEGATVVGTVEKQGKQKKVVTFKYKPKKGSHRKQGHRQPYTKVVINAINA

SEQ ID NO: 11114 - protein, 375 aa, Streptococcus pyogenes M1 GAS
MTYFDNAATTPLSPNVIRAMTAAMQDNFGNPSSIHFYGRRANKILRECRQAIARNLGASEQQIIVTSGGTESNNMAIKGYALAHQAKGKHLITTTIEHHSVLHTMAYLEERFGFEVTYLPCQNGQINLSDLKQALRDDTILVSIMYANNETGDLLPIKDIGNLLKDHQAAFHVDAVQAVGKLKIIPSELGIDFLSASAHKFHGPKGCGFLYSNGQPIDPLLHGGDQEGKRRASTENMLGIIGMAQALTDAMTCLDQSTDHIISLRHHLISLLEGLPYYINQGTHYLPHVLNIGFLGYQNTILLTQLDLAGIAVSTGSACTAGAVNPSHVLAAYYGDDSSRLKESIRISFSDQNSIEDVNQLAQTLKNILGGTDGF

SEQ ID NO: 11115 - protein, 326 aa, Streptococcus pyogenes M1 GAS
MTERYADKQIKLFSLTSNLPIAEKIAKAAGIPLGKMSSRQFSNGEIMINIEETVRGDDIYIIQSTSFPVNDNLWELLIMIDACKRASANTVNIVLPYFGYSRQDRVAKPREPITAKLVANMLTKAGIDRVVTLDLHAVQVQGFFDIPVDNLFTVPLFAERYSKLGLSGSDVVVVSPKNSGIKRARSLAEYLDSPIAIIDYAQDDSEREQGYIIGDVSGKKAILIDDILNTGKTFAEAAKILERSGATDTYAVASHGLFAGGAADVLETAPIKEIIVTDSVKTKNRVPENVTYLSASDLIAEAIIRIHERRPLSPLFSYQPKGKNNA

SEQ ID NO: 11116 - protein, 331 aa, Streptococcus pyogenes M1 GAS
MSIRSLFGGLREKILGKNMKIVFPEGNDERVVRAAARLKFEGLLEPIILGQSEEVRNLLTKLGFADQDYTIINPNEYADFDKMKEAFVEVRKGKATLEDADKMLRDVNYFGVMLVKMGLADGMVSGAIHSTADTVRPALQIIKTKPGISRTSGVFLMNRENTSERYVFADCAINIDPTAQELAEIAVNTAETAKIFDIDPKIAMLSFSTKGSGKAPQVDKVREATEIATGLNPDLALDGELQFDAAFVPETAAIKAPDSAVAGQANTFVFPDLQSGNIGYKIAQRLGMFDAIGPILQGLNKPVNDLSRGSSAEDIYKLAIITAAQAIESQG

SEQ ID NO: 11117 - protein, 612 aa, Pinus sylvestris
FLFMRNRVRMICDCYAQPVAVIQDERSPRDLSFCGSTLRAPHGCHAQYMANMGSIASLVMAVVINEKELDGDSEGQMQQKGRRLWGLVVCHHTSPRYVPFPLRYACEFLMQVFGIQLNKEVELAAQIREKQILRTQTLLCDMLLRDTPLGIVTQKPNIMDLVRCDGAALYYEENFWLLGVTPTEAQIQDIVAWLSEHHMDSTGLSTDSLVYAGYPGAESLGNAVCGIAAVRINSKDFLFWFRSHTAKEIKWGGAKHDLQERDDGKKMHPRSSFNAFLEVVKMRSLSWEDVEMDAIHSLQLILRGSRKETDGSGRNISINRQLNDLKLQEMDELNAVTNEMVRLIETATAPILAVDAYGVVNGWNRKAAELTGLSVEEVLGEPLINLVEETSAENVKRMLHLALQGVEEQNVQIELKRHGSEEDKGPVVLLVNACSSRDLKENVVGVCFVAQDVTGQKIVMDKFTRIQGDYRAIVQNPSPLIPPIFGTDECGWCSEWNSAMEKLSGWKREEIIDKMLLGEVFGTRTACCRLKGQNALTQLRIILNSSMTGQETEKFPFGFFDRHGKYVETLLSANKKLDEEGKITGVFCFLHIASPELQQALYVQHMLEQAAM

SEQ ID NO: 11118 - protein, 612 aa, Pinus sylvestris
FLFMRNRVRMICDCYAQPVAVIQDERLPRDLSFCGSTLRAPHGCHAQYMANMGSIASLVMAVVINEKELDGDSEGQMQQKGRRLWGLVVCHHTSPRYVPFPLRYACEFLMQVFGIQLNKEVELAAQIREKQILRTQTLLCDMLLRDTPLGIVTQKPNIMDLVRCDGAALYYEENFWLLGVTPTEAQIQDIVAWLSEHHMDSTGLSTDSLVYAGYPGAESLGNAVCGIAAVRINSKDFLFWFRSHTAKEIKWGGAKHDLQERDDGKKMHPRSSFNAFLEVVKMRSLSWEDVEMDAIHSLQLILRGSRKETDGSGRNISINRQLNDLKLQEMDELNAVTNEMVRLIETATAPILAVDAYGVVNGWNRKAAELTGLSVEEVLGEPLINLVEETSAENVKRMLHLALQGVEEQNVQIELKRHGSEEDKGPVVLLVNACSSRDLKENVVGVCFVAQDVTGQKIVMDKFTRIQGDYRAIVQNPSPLIPPIFGTDECGWCSEWNSAMEKLSGWKREEIIDKMLLGEVFGTRTACCRLKGQNALTQLRIILNSSMTGQETEKFPFGFFDRHGKYVETLLSANKKLDEEGKITGVFCFLHIASPELQQALYVQHMLEQAAM

SEQ ID NO: 11119 - protein, 612 aa, Pinus sylvestris
FLFMRNRVRMICDCYAQPVAVIQDERLPRDLSFCGSTLRAPHGCHAQYMANMGSIASLVMAVVINEKKLDGDSEGQMQQKGRRLWGLVVCHHTSPRYVPFPLRYACEFLMQVFGIQLNKEVELAAQIREKQILRTQTLLCDMLLRDTPLGIVTQKPNIMDLVRCDGAALYYEENFWLLGVTPTEAQIQDIVAWLSEHHMDSTGLSTDSLVYAGYPGAESLGNAVCGIAAVRINSKDFLFWFRSHTAKEIKWGGAKHDLQERDDGKKMHPRSSFNAFLEVVKMRSLSWEDVEMDAIHSLQLILRGSRKETDGSGRNISINRQLNDLKLQEMDELNAVTNEMVRLIETATAPILAVDAYGVVNGWNRKAAELTGLSVEEVLGEPLINLVEETSAENVKRMLHLALQGVEEQNVQIELKRHGSEEDKGPVVLLVNACSSRDLKENVVGVCFVAQDVTGQKIVMDKFTRIQGDYRAIVQNPSPLIPPIFGTDECGWCSEWNSAMEKLSGWKREEIIDKMLLGEVFGTRTACCRLKGQNALTQLRIILNSSMTGQETEKFPFGFFDRHGKYVETLLSANKKLDEEGKITGVFCFLHIASPELQQALYVQHMLEQAAM

SEQ ID NO: 11120 - protein, 612 aa, Pinus sylvestris
FLFMRNRVRMICDCYAQPVAVIQDERLPRDLSFCGSTLRAPHGCHAQYMANMGSIASLVMAVVINEKELDGDSEGQMQQKGRRLWGLVVCHHTSPRYVPFPLRYACEFLMQVFGIQLNKEVELAAQIREKQILRTQTLLCDMLLRDTPLGIVTQKPNIMDLVRCDGAALYYEENFWLLGITPTEAQIQDIVAWLSEHHMDSTGLSTDSLVYAGYPGAESLGNAVCGIAAVRINSKDFLFWFRSHTAKEIKWGGAKHDLQERDDGKKMHPRSSFNAFLEVVKMRSLSWEDVEMDAIHSLQLILRGSRKETDGSGRNISINRQLNDLKLQEMDELNAVTNEMVRLIETATAPILAVDAYGVVNGWNRKAAELTGLSVEEVLGEPLINLVEETSAENVKRMLHLALQGVEEQNVQIELKRHGSEEDKGPVVLLVNACSSRDLKENVVGVCFVAQDVTGQKIVMDKFTRIQGDYRAIVQNPSPLIPPIFGTDECGWCSEWNSAMEKLSGWKREEIIDKMLLGEVFGTRTACCRLKGQNALTQLRIILNSSMTGQETEKFPFGFFDRHGKYVETLLSANKKLDEEGKITGVFCFLHIASPELQQALYVQHMLEQAAM

SEQ ID NO: 11121 - protein, 612 aa, Pinus sylvestris
FLFMRNRVRMICDCYAQPVAVIQDERLPRDLSFCGSTLRAPHGCHAQYMANMGSIASLVMAVVINEKELDGDSEGQMQQKGRRLWGLVVCHHTSPRYVPFPLRYACEFLMQVFGIQLNKEVELAAQIREKQILRTQTLLCDMLLRDTPLGIVTQKPNIMDLVRCDGAALYYEENFWLLGVTPTEAQIQDIVAWLSEHHMDSTGLSTDSLVYAGYPGAESLGNAVCGIAAVRINSKDFLFWFRSHTAKEIKWGGAKHDLQERDDGKKMHPRSSFNAFLEVVKMRSLSWEDVEMDAIHSLQLILRGSRKETDGSGRNISINRQLNDLKLQEMDELNAVTNEMVRLIETATAPILAVDAYGVVNGWNRKAAELTGLSVEEVLGEPLINLVEETSAENVKRMLHLALQGVEEQNVQIELKRHGSEEDKGPVVLLVNACSSRDLKENVVGVCFVAQDVTGQKIVMDKFTRIQGDYRAIVQNPSPLIPPIFGTDECGWCSEWNSAMEKLSGWKREEIIDKMLLGEVFGTRTACCRLKGQNALTQLRIILNSSMTGQGTEKFPFGFFDRHGKYVETLLSANKKLDEEGKITGVFCFLHIASPELQQALYVQHMLEQAAM

SEQ ID NO: 11122 - protein, 612 aa, Pinus pinaster
FLFMRNRVRMICDCYAQPVAVIQDERLPRDLSFCGSTLRAPHGCHAQYMANMGSIASLVMAVVINEKELDGDSEGQMQQKGRRLWGLVVCHHTSPRYVPFPLRYACEFLMQVFGIQLNKEVELAAQMREKRILRTQTLLCDMLLRDTPLGIVTQKPNIMDLVRCDGAALYYEGNFWLLGATPTEAQIQDIVAWLSEHHMDSTGLSTDSLVYAGYPGAESLGNAVCGIAAVRINSKDFLFWFRSHTAKEIKWGGAKHDLQERDDGKKMHPRSSFNAFLEVVKMRSLSWEDVEMDAIHSLQLILRGSCKETDGSGRNISINRQLNDLKLQEMDELNAVTNEMVRLIETATAPILAVDAYGVVNGWNRKAAELTGLSVEEVLGEPLINLVEETSAENVKRMLHLALQGVEEQNVQIELKRHGSEEDKGPVVLLVNACSSRDLKENVVGVCFVAQDVTGQKTVMDKFTRIQGDYRAIVQNPSPLIPPIFGTDECGWCSEWNSAMEKLSGWKREEIIDKMLLGEVFGTRTACCRLKGQNALTQLRIILNSSMAGQETEKFPFGFFDRHGKYVETLLSANKKLDEEGKITGVFCFLHIASPELQQALYVQHMLEQAAM

SEQ ID NO: 11123 - protein, 736 aa, Pinus sylvestris
VPSMEKPQQDVLTIGTDVRTLFTAASAHSLEKAAVAQEISLMNPIWVHCKNSRKPFYAIVHRIDVGMVIDLEPLRTGDAFMSAAGAVQSQKLAVRAISRLQSLPCGDVGLLCDTVVENVRELTGYDRVMVYKFHEDEHGEVVAEIRRSDLEPYLGLHYPATDIPQASRFLFMQNRVRMICDCMATPVKVIQSEELMQPLCLVGSTLRAPHGCHAQYMANMGSIASLVMAVIINGNDDEGGGSGRNSMKLWGLVVCHHTSPRAVPFPLRYACEFLMQALGLQLNMELQLAAQLTEKHILRTQTLLCDMLLRDAPMGIVTQSPSIKDLVKCDGAALYYGGMCWMLGVTPTEAQIKDIADWLLEHHGDSTGLSTDSLADAGYPGAASLGDAVCGMASARITSKDFLFWFRSHTAKEMKWGGAKHHPDDKDDARRMHPRSSFKAFLEVVKRRSLPWDNVEIDAIHSLQLILRGSFRDIDDSGTKTMVHSRLNDLRLQGIDELSSVASEMVRLIETATAPILAVDYNGLVNGWNAKVAELTGLPVGEAMGMSLVQDLVFEQSVERVEKMLHNALRGEEEKNVEMMLKTFGPQKEKEAVILVVNACSSRDFTDNIVGVCFVGQDVTSQKVVMDKFIRIQGDYRSIVQSPNPLIPPIFASDEYACCSEWNAAMEKVTGWTHDEVIGKMLVGEIFGGCCRLKGQDAVTKFTIVLHSAIDGQEIEKFPFAFFDKQGKYVEALLTA

SEQ ID NO: 11124 - protein, 736 aa, Pinus sylvestris
VPSMEKPQQDVLTIGTDVRTLFTAASAHSLEKAAVAQEISLMNPIWVHCKNSRKPFYAIVHRIDVGMVIDLEPLRTGDAFMSAAGAVQSQKLAVRAISRLQSLPCGDVGLLCDTVVENVRELTGYDRVMVYKFHEDEHGEVVAEIRRSDLEPYLGLHYPATDIPQASRFLFMQNRVRMICDCMATPVKVIQSEELMQPLCLVGSTLRAPHGCHAQYMANMGSIASLVMAVIINGNDDEGGGSGRNSMKLWGLVVCHHTSPRAVPFPLRYACEFLMQALGLQLNMELQLAAQLTEKHILRTQTLLCDMLLRDAPMGIVTQSPSIKDLVKCDGAALYYGGMCWMLGVTPTEAQIKDIADWLLEHHGDSTGLSTDSLADAGYPGAASLGDAVCGMASARITSKDFLFWFRSHTAKEMKWGGAKHHPDDKDDARRMHPRSSFKAFLEVVKRRSLPWDNVEIDAIHSLQLILRGSFRDIDDSGTKTMVHSRLNDLRLQGIDELSSVASEMVRLIETATAPILAVDYNGLVNGWNAKVAELTGLPVAEAMGMSLVQDLVFEQSVERVEKMLHNALRGEEEKNVEMMLKTFGPQKEKEAVILVVNACSSRDFTDNIVGVCFVGQDVTSQKVVMDKFIRIQGDYRSIVQSPNPLIPPIFASDEYACCSEWNAAMEKVTGWTHDEVIGKMLVGEIFGGCCRLKGQDAVTKFTIVLHSAIDGQEIEKFPFAFFDKQGKYVEALLTA

SEQ ID NO: 11125 - protein, 736 aa, Pinus sylvestris
VPSMEKPQQDVLTIGTDVRTLFTAASAHSLEKAAVAQEISLMNPIWVHCKNSRKPFYAIVHRIDVGMVIDLEPLRTGDAFMSAAGAVQSQKLAVRAISRLQSLPCGDVGLLCDTVVENVRELTGYDRVMVYKFHEDEHGEVVAEIRRSDLEPYLGLHYPATDIPQASRFLFMQNRVRMICDCMATPVKVIQSEELMQPLCLVGSTLRAPHGCHAQYMANMGSIASLVMAVIINGNDDEGGGSGRNSMKLWGLVVCHHTSPRAVPFPLRYACEFLMQALGLQLNMELQLAAQLTEKHILRTQTLLCDMLLRDAPMGIVTQSPSIMDLVKCDGAALYYGGMCWLLGVTPTEAQIKDIADWLLEHHGDSTGLSTDSLADAGYPGAASLGDAVCGMASARITSKDFLFWFRSHTAKEMKWGGAKHHPDDKDDARRMHPRSSFKAFLEVVKRRSLPWDNVEIDAIHSLQLILRGSFQDIDDSGTKTMVHSRLNDLRLQGIDELSSVASEMVRLIETATAPILAVDYNGLVNGWNAKVAELTGLPVGEAMGMSLVQDLVFEQSVERVEKMLHNALRGEEEKNVEMMLKTFGPQKEKEAVILVVNACSSRDFTDNIVGVCFVGQDVTSQKVVMDKFIRIQGDYRSIVQSPNPLIPPIFASDEYACCSEWNAAMEKVTGWTHDEVIGKMLVGEIFGGCCRLKGQDAVTKFTIVLHSAIDGQEIEKFPFAFFDKQGKYVEALLTA

SEQ ID NO: 11126 - protein, 259 aa, Streptococcus pyogenes M1 GAS
MKTPEQILEATIHIGEHKVTKTFLAKSILGFIGGAMISLGYLLYVRIAASGLETFGAFSSIVGACAFPIGLIIILMAGGELITGNMMAVSAALLAKKIKFSELAKNWLIITLFNVIGAVFVAFVFGHFLGLTSAGIFKEEVIEVAHAKIAASPLQALVSGIGCNWFVGLALWLCYGANDAAGKFLGTWFPVMTFVALGFQHSVANAFVIPAAIFEGGATWLDFVTNFIFVYSGNIIGGAIFVSFLYFKVYYHPQKSKTQ

SEQ ID NO: 11127 - protein, 330 aa, Streptococcus pyogenes M1 GAS
MKKSFIHQQEEISFVKNTFTQYLIAKLDVVEVQGPILSRVGDGMQDNLSGTENPVSVNVLKIPNATFEVVHSLAKWKRHTLARFGFNEGEGLVVNMKALRPDEDSLDQTHSVYVDQWDWEKVIPDGKRNLAYLKETVETIYKVIRLTELAVEARYDIEAVLPKKITFIHTEELVAKYPDLTPKERENAITKEFGAVFLIGIGGVLPDGKPHDGRAPDYDDWTTETENGYHGLNGDILVWNDQLGSAFELSSMGIRVDEEALKRQVEMTGDQDRLGFDWHKSLLNGLFPLTIGGGIGQSRMVMFLLRKQHIGEVQTSVWPQEVRDSYDNIL

SEQ ID NO: 11128 - protein, 226 aa, Streptococcus pyogenes M1 GAS
MIRREDYQYLRKLNDFRYFSIEQFDKIVGQMEFRKAKKDHILFFEGDKRDKLFLVTSGYFKVEQSDQSGTFMYTDFIRHGTIFPYGGLFTDDYYHFSVVAMTDVTYFYFPVDLFEDYSLENRLQMKHLYSKMSKLLELHELRVRNLITSSASSRVIQSLAILLVEMGKDSDTLPFQLTTTDIAQISGTTRETVSHVLRDLKKQELITIKGKYLTYLDKDYFLQYTK

SEQ ID NO: 11129 - protein, 395 aa, Streptococcus pyogenes M1 GAS
MKNIVIVEALRTPIGAFGGSFKSVSAVELGTTVLKKILDKTQVKPEMVDEVILGNVLHAGLGQNVARQVAVHSGIPEDKTAFTLDMVCGSGLKAIQLAAQSIMLGDADIVIAGGVENMSQATYVSTQHRFGQRLGNSQLIDTLVHDGLTDAFNNYHMGITAENVAQKYGISREEQDQFALESQEKAAKALENHRFADEIVPVSVPQRRKDPLIVTTDEYPKVDTSLEKLQQLRPAFLPKEGTVTAGNASGINDGAALLMLMTEEKALELGLTPLVTIESYASAGVAPELMGTGPIPATQKALKKAGLTISDLDLVESNEAFAAQSLAVLKDLKLNPEIVNVNGGAIALGHPIGASGARILVTLIHEMKKRQVTRGLATLCIGGGQGTAVIVKNNT

SEQ ID NO: 11130 - protein, 214 aa, Streptococcus pyogenes M1 GAS
MKFFLDTANVAAIKAINELGVVDGVTTNPTIISREGRDFETVIKEICDIVDGPISAEVTGLTADAMVEEARSIAKWHDNVVVKIPMTTEGLKATNILSKEGIKTNVTLIFTVSQGLMAMKAGATYISPFIGRLEDIGTDAYQLISDLREIIDLYDFQAEIIAASIRTTAHVEAVAKLGAHIATIPDPLFAKMTQHPLTTNGLKTFMEDWASFKK

SEQ ID NO: 11131 - protein, 404 aa, Streptococcus pyogenes M1 GAS
MKIIEKSSKLEHVAYDIRGPVLDEANRMIASGEKILRLNTGNPAAFGFEAPDEVIRDLIVNARLSEGYSDSKGIFSARKAIMQYCQLKGFPDVDIEDIYLGNGVSELISISLQALLDNGDEVLVPMPDYPLWTACVSLGGGKAVHYLCDEEAGWYPDIADIKSKITSRTKAIVVINPNNPTGALYPKEILEDIVALAREHQLIIFADEIYDRLVMDGKEHIAIASLAPDVFCVSMNGLSKSHRIAGFRVGWMVLSGPKDHVKGYIEGLNMLANMRLCSNVLAQQVVQTSLGGHQSVDALLLPGGRIFEQRNFIYEAINAIPGLSAVKPEAGLYLFPKIDRQMYRIDDDEEFVLQLLKQEKVMLVHGRGFNWKDPDHFRIVYLPSVEELEDVQEKITRVLYQYRR

SEQ ID NO: 11132 - protein, 362 aa, Streptococcus pyogenes M1 GAS
MKVFASPSRYIQGKNALFTNVKTLKQLGDSPILLCDDVVYGIVGERFESYLIDNGMTPVHVAFNGEASDNEISRVVAIAKENGNDVIIGLGGGKTIDSAKAIADLLAVPVIIAPTIASTDAPTSALSVIYTDEGAFEKYIFYSKNPDLVLVDTQVICQAPKRLLASGIADGLATWVEARAVMQKNGDTMAGGNQTLAGVAIAKACEQTLFADGLKAMASCDRQVVTPALENVIEANTLLSGLGFESAGLAAAHAIHNGFTALTGAIHHLTHGEKVAYGTLTQLFLENRSREEIDRYIDFYQAIGMPTTLKEMHLDTATQEDFLKIGRQATMAGETIHQMPFVISPEDVAAALVAVDAYVTSR

SEQ ID NO: 11133 - protein, 222 aa, Streptococcus pyogenes M1 GAS
MEYMLDTLDLEAIKKWHHILPLAGVTSNPSIAKKEGEIDFFERIREVRAIIGDKASIHVQVIAQDYEGILKDAAEIRRQCGDSVYVKVPVTTEGLAAIKTLKAEGYHITATAIYTTFQGLLAIEAGADYLAPYYNRMENLNIDPEAVIEQLAEAINRENANSKILAASFKNVAQVNKSFALGAQAITAGPDVFEAGFAMPSIQKAVDDFGKDWEAIHHRKSI

SEQ ID NO: 11134 - protein, 67 aa, Streptococcus pyogenes M1 GAS
MAQGTVKWFNAEKGFGFISTENGQDVFAHFSAIQTNGFKTLEEGQKVAFDVEEGQRGPQAVNITKLA

SEQ ID NO: 11135 - protein, 299 aa, Streptococcus pyogenes M1 GAS
MAKIVECIPNFSEGQNQAVIDGLVATAKSIPGVTLLDYSSDASHNRSVFTLVGDDQSIQEAAFQLVKYASENIDMTKHHGEHPRMGATDVCPFVPIKDITTQECVEISKQVAERINRELGIPIFLYEDSATRPERQNLAKVRKGQFEGMPEKLLEEDWAPDYGDRKIHPTAGVTAVGARMPLVAFNVNLDTDNIDIAHKIAKIIRGSGGGYKYCKAIGVMLEDRHIAQVSMNMVNFEKCSLYRTFETIKFEARRYGVNVIGSEVIGLAPAKALIDVAEYYLQVEDFDYHKQILENHLLG

SEQ ID NO: 11136 - protein, 447 aa, Streptococcus pyogenes M1 GAS
MASNHMNEQEREQAKFSLSGATLYGINAVIGSGIFLLPRAIYKGLGPASIAVMFGTAILTIMLAVCFAEVSGYFGKNGGAFQYSKRAFGDFIGFNVGFLGWTVTIFAWAAMAAGFARMFIITFPAFEGWHIPLSIGLIILLSLMNIAGLKTSKIVTITATIAKLIPIVAFCACTLFFIKNGLPNFTPFVQLEPGTNLLGAISNTAVYIFYGFIGFETLSIVAGEMRDPEKNVPRALLGSISIVSVLYMLIIGGTIAMLGSQIMMTNAPVQDAFVKMIGPAGAWMVSIGALISITGLNMGESIMVPRYGAAIADEGLLPAAIAKQNQNGAPLVAILVSGAIAIVLLLTGSFESLAKLSVVFRFFQYIPTALAVMKLRKDDPDANVIFRVPFGPIIPILAVIVSLVMIWGDNPMNFVYGAVGVIIASSVYYLMHGRNHQMDQMPPKEQI

SEQ ID NO: 11137 - protein, 328 aa, Streptococcus pyogenes M1 GAS
MLEDYYPSTTSYYHGGIDDDLYTAKWGMVMTFLDLNDSSLTPFEGTHFALIGFKSDKGVYINNGRVGAVESPAAIRTQLAKFPWHLGNQVMVYDVGNIDGPNRSLEQLQNSLSKAIKRMCDLNLKPIVLGGGHETAYGHYLGLRQSLSPSDDLAVINMDAHFDLRPYDQTGPNSGTGFRQMFDDAVADKRLFKYFVLGIQEHNNNLFLFDFVAKSKGIQFLTGQDIYQMGHQKVCRAIDRFLEGQERVYLTIDMDCFSVGAAPGVSAIQSLGVDPNLAVLVLQHIAASGKLVGFDVVEVSPPHDIDNHTANLAATFIFYLVQIMAQHS

SEQ ID NO: 11138 - protein, 317 aa, Neisseria meningitidis MC58
MNHKKIVVLDADTLPGRVFHFDFPHELAVYGTTGADETAERVRDAHIVITNKVMISADIIAANPQLELIAVSATGVNNVDIGAAKAAGVAVCNVRAYGNESVAEHAFMLMIALMRNLPAYQRDVAAGLWEKSPFFCHYGAPIRDLNGKTLAVFGRGNIGRTLAGYAQAFGMGVVFAEHKHASAVREGYVSFEDAVRAADVLSLHCPLNAQTENMIGENELRQMKPGAVLINCGRGGLVDENALLAALKYGQIGGAGVDVLTNEPPKNGNPLLNARLPNLIVTPHTAWASREALDRLFDILLANIHAFVKGEAQNRVV

SEQ ID NO: 11139 - protein, 404 aa, Neisseria meningitidis MC58
MEWEFNSYYTLIAATLVLLVGKFLVQKIKFLRDFNIPEPVAGGLIAAIVLFALHEAYGVSFKFEKPLQNAFMLIFFTSIGLSADFSRLKAGGLPLVVFTAIVGGFILVQNFVGVGLATALGLDPLIGLITGSVSLTGGHGTSGAWGPNFETQYGLVGATGLGIASATFGLVFGGLIGGPVARRLINKMGRKPVENKKQDQDDNADDVFEQAKRTRLITAESAVETLAMFAACLAFAEIMDGFDKEYLFDLPKFVWCLFGGVVIRNILTAAFKVNMFDRAIDVFGNASLSLFLAMALLNLKLWELTGLAGPVTVILAVQTVVMVLYATFVTYVFMGRDYDAAVLAAGHCGFGLGATPTAVANMQSVTHTFGASHKAFLIVPMVGAFFVDLINAAILTGFVNFFKG

SEQ ID NO: 11140 - protein, 102 aa, Neisseria meningitidis MC58
MYAVVKTGGKQYKVSVGEKLKVEQIPAELDSQIELTEVLMIADGESVKVGAPFIEGAKVTAKVVAHGRGEKVRIFKMRRRKHYQKRQGHRQNFTQIEIVAIA

SEQ ID NO: 11141 - protein, 324 aa, Neisseria meningitidis MC58
MAENGKYLDWAREVLHAEAEGLREIAAELDKNFVLAADALLHCKGRVVITGMGKSGHIGRKMAATMASTGTPAFFVHPAEAAHGDLGMIVDNDVVVAISNSGESDEIAAIIPALKRKDITLVCITARPDSTMARHADIHITASVSKEACPLGLAPTTSTTAVMALGDALAVVLLRARAFTPDDFALSHPAGSLGKRLLLRVADIMHKGGGLPAVRLGTPLKEAIVSMSEKGLGMLAVTDGQGRLKGVFTDGDLRRLFQECDNFTGLSIDEVMHTHPKTISAERLATEALKVMQANHVNGLLVTDADGVLIGALNMHDLLAARIV

SEQ ID NO: 11142 - protein, 399 aa, Neisseria meningitidis MC58
MSDQLILVLNCGSSSLKGAVIDRKSGSVVLSCLGERLTTPEAVITFNKDGNKRQVPLSGRNCHAGAVGMLLNELEKHGLHDRIKAIGHRIAHGGEKYSESVLIDQAVMDELNACIPLAPLHNPANISGILAAQEHFPGLPNVGVMDTSFHQTMPERAYTYAVPRELRKKYAFRRYGFHGTSMRYVAPEAARILGKPLEDIRMIIAHLGNGASITAIKNGKSVDTSMGFTPIEGLVMGTRCGDIDPGVYSYLTSHAGMDVAQVDEMLNKKSGLLGISELSNDCRTLEIAADEGHEGARLALEVMTYRLAKYIASMAVGCGGVDALVFTGGIGENSRNIRAKTVSYLDFLGLHIDTKANMEKRYGNSGIISPTDSSPAVLVVPTNEELMIACDTAELAGIL

SEQ ID NO: 11143 - protein, 307 aa, Neisseria meningitidis MC58
MQYSTLAGQTDNSLVSNNFGFLRLPLNFMPYESHADWVITGVPYDMAVSGRSGARFGPEAIRRASVNLAWEHRRFPWTFDVRERLNIIDCGDLVFSFGDSRDFVEKMEAHAGKLLSSGKRCLSLGGDHFITLPLLRAHARYFGKLALIHFDAHTDTYDNGSEYDHGTMFYTAPKEGLIDPSRSVQIGIRTEHSKKLPFTVLSAPKVNEDSVEETVRKIKETVGNMPVYLTFDIDCLDPSFAPGTGTPVCGGLSSDRALKILRGLTDLDIVGMDVVEVAPSYDQSDITALAGATIALEMLYLQGAKKD

SEQ ID NO: 11144 - protein, 363 aa, Nicotiana tabacum
MCSLPNESFSIELQQLDADDGRNQRTQWLLNSPAPPSFCNEIINSVTETVLPQKNNNFSSNSKQYGGGAVSSFLQGLFPILSWGRNYKVKMFKHDLLAGLTLASLCIPQSIGYANLANLEPQYGLYTSVVPPLIYAVMGSSRELAIGPVAVVSLLLSAMITEIVDPAVDPIAYTSLVFTVTFFAGTFQAAFGLLRLGFLVDFLSHAAIVGFMGGAAIVIGLQQLKGFIGISHFTTKTDVVSVLKAVFTSFHNETLSPLNFVLGCSFLIFILATRFIGKRNKKLFWLPAIAPLLSVLLSTLMVYLTKADRHGVKIVKHFKGGLNPSSVHQLQFNGPHLGEVAKIGLICALVALTVSIILFVISF

SEQ ID NO: 11145 - protein, 642 aa, Neisseria meningitidis MC58
MAKVIGIDLGTTNSCLAISENGQTKVIENAEGARTTPSVIAYLDGGEILVGAPAKRQAVTNAKNTIYAAKRLIGHKFEDKEVQRDIESMPFEIIKANNGDAWVKAQGKELSPPQISAEVLRKMKEAAEAYLGEKVTEAVITVPAYFNDSQRQATKDAGRIAGLDVKRIINEPTAAALAFGMDKGDNKDRKVAVYDLGGGTFDISIIEIANLDGDKQFEVLATNGDTFLGGEDFDQRLIDHIIAEFKKEQGIDLKQDVMALQRLKEAAEKAKIELSSGQQTEINLPYITMDATGPKHLAMKITRAKFESLVEDLITRSIEPCKIALKDAGLSTGDIDDVILVGGQSRMPKVQEAVKAFFGKEPRKDVNPDEAVAVGAAIQGEVLSGGRSDVLLLDVTPLSLGIETMGGVMTKLIQKNTTIPTKASQVFSTAEDNQSAVTIHVLQGERERASANKSLGQFNLGDIAPAPRGMPQIEVTFDIDANGILHVSAKDKGTGKAANITIQGSSGLSEEEIERMVKDAEANAEEDKKLTELVASRNQAEALIHSVKKSLADYGDKLDAAEKEKIEAALKEAEEAVKGDDKAAIDAKTEALGAASQKLGEMVYAQAQAEAQAGESEQANASAKKDDDVVDADFEEVKDDKK

SEQ ID NO: 11146 - protein, 405 aa, Neisseria meningitidis MC58
MEIILGIVMFTVIVLVLALMILFAKSKLVSEGDITIKVNGEKELTMPAGGKLLGALANEGIFIPSACGGGGSCGQCRVVVKSGGGDILPTELSHISKREAREGCRLSCQVNVKTDMDIEVPEEVFGVKKWECTVISNDNKATFIKELKLAIPEGEEVPFRAGGYIQIEAPPHTVAYKDFDIPKEYHEDWDKYNLWQYVSKVDEPILRAYSMASYPEEKGIIMLNVRIATPPPRVPDAPPGQMSSYIWSLKPGDKVTISGPFGEFFAKDTDAEMVFIGGGAGMAPMRSHIFDQLKRLNSKRKITFWYGARSKREMFYVEDFDQLAAEFPNFTWHVALSDPLPEDNWDGYTGFIHNVVYENHLKNHEAPEDCEFYMCGPPIMNQSVIKMLKDLGVEDENILLDDFGG

SEQ ID NO: 11147 - protein, 500 aa, Neisseria meningitidis MC58
MAKVLIVPVSAGLDASAAAQAFAKALDAQIFQAVDATAETLLAQGKSDDWFDALVGKVAALDAANLVIEGIAPDADKIYLAGKNVELALSLDAAAVFAVRSDNADADELANRVNLAKQFFAAAPGVLEGFVVDGAAASVAEAAAEKTGLTFFGSSDALKDVSVLAGREAKRLSPAQFRYNLIDFARQADKRIVLPEGAEPRTVQAAAICHEKGIARCVLLAKREEVEAVAKERGISLPDSLEIIDPASLVEQYVEPMCELRKSKGLTPEDARKQLQDTVVLGTMMMAQNDVDGLVSGAVHTTANTIRPALQLIKTAPGASLVSSVFFMLLPNQVLVFGDCAVNPNPTAQQLADIAIQSADSAKAFGIDPKVAMISYSTVNSGSGPDVDTVIEATKLAREKRPDLAIDGPLQYDAATVPGVGKSKAPGSPVAGQATVLVFPDLNTGNCTYKAVQRNANVLSVGPLLQGLRKPVNDLSRGALVEDIVFTIALTAVQAKQMEG

SEQ ID NO: 11148 - protein, 324 aa, Neisseria meningitidis MC58
MRRRVNMPSEHMDTKANMDIETFLAGERAAGGYRCGFVAIVGRPNVGKSTLMNHLIGQKISITSKKAQTTRNRVTGIYTDDTAQFVFVDTPGFQTDHRNALNDRLNQNVTEALGGVDVVVFVVEAMRFTDADRVVLKQLPKHTPVILVVNKIDKDKAKDRYALEAFVAQVRAEFEFAAAEAVSAKHGLRIANLLELIKPYLPESVPMYPEDMVTDKSARFLAMEIVREKLFRYLGEELPYAMNVEVEQFEEEDGLNRIYIAVLVDKESQKAILIGKGGERLKKISTEARLDMEKLFDTKVFLKVWVKVKSGWADDIRFLRELGL

SEQ ID NO: 11149 - protein, 103 aa, Neisseria meningitidis MC58
MASIHDQIKEVVTTHRVVLFMKGTKQFPQCGFSSRAVQILNAAGCTDYVTVNVLENPEVRQGIKEYSDWPTIPQLYVNGEFVGGSDILMEMYEAGELQELLKA

SEQ ID NO: 11150 - protein, 655 aa, Neisseria meningitidis MC58
MGNTFKSILVWVALGIGLMAAFNALDGKKEDNGQIEYSQFIQQVNNGEVSGVNIEGSVVSGYLIKGERTDKSTFFTNAPLDDNLIKTLLDKNVRVKVTPEEKPSALAALFYSLLPVLLLIGAWFYFMRMQTGGGGKGGAFSFGKSRARLLDKDANKVTFADVAGCDEAKEEVQEIVDYLKAPNRYQSLGGRVPRGILLAGSPGTGKTLLAKAIAGEAGVPFFSISGSDFVEMFVGVGASRVRDMFEQAKKNAPCIIFIDEIDAVGRQRGAGLGGGNDEREQTLNQLLVEMDGFESNQTVIVIAATNRPDVLDPALQRPGRFDRQVVVPLPDIRGREQILNVHSKKVPLDESVDLLSLARGTPGFSGADLANLVNEAALFAGRRNKVKVDQSDFEDAKDKIYMGPERRSMVMHEDEKRATAYHESGHAIVAESLPFTDPVHKVTIMPRGRALGLTWQLPERDRISMYKDQMLSQLSILFGGRIAEDIFVGRISTGASNDFERATQMAREMVTRYGMSDKMGVMVYAENEGEVFLGRSVTRSQNISEKTQQDIDAEIRRILDEQYQVAYKILDENRDKMETMCKALMEWETIDRDQVLEIMAGKQPSPPKDYSHNLRENADAAEDNAPHAPTREETEAPAPADTASTESEQQPENKA

SEQ ID NO: 11151 - protein, 584 aa, Phaseolus vulgaris; identical to SEQ ID NO: 591

SEQ ID NO: 11152 - protein, 67 aa, Neisseria meningitidis MC58
MATGIVKWFNDAKGFGFITPDEGGEDLFAHFSAINMEGFKTLKEGQRVSFDVTTGPKGKQAANIQAA

SEQ ID NO: 11153 - protein, 327 aa, Neisseria meningitidis MC58
MAAYDSLMVFTGNANPELAQRVVRHLDISLGNASVSKFSDGEVAVELLENVRGRDVFILQPTCAPTNDNLMEILTMADALKRASAGRITTAIPYFGYARQDRRPRSVRVPISAKLVANMLYSAGIDRVLTVDLHADQIQGFFDIPVDNIYATPILLNDIKQQRIENLTVVSPDIGGVVRARAVAKSLNADLAIIDKRRPKANVAEVMNIIGDIQGRTCLIVDDMIDTANTLCKAAVALKERGAERVLAYASHAVFSGEAVSRIASSEIDQVVVTDTIPLSEAAKNCDRIRQVTIAGLLAETVRRISNEESVSYLFNEEVMTGSMLLP

SEQ ID NO: 11154 - protein, 513 aa, Neisseria meningitidis MC58
MKIGIPRESLSGETRVACTPATVALLGKLGFETVVESGAGLAASLDDAAYQTAGATVADKAAVWVCPLIYKVNAPSEQELPLLNEGQTIVSFLWPRQNEALVEALRAKKVNALAMDMVPRISRAQALDALSSMANISGYRAVIEAANAFGRFFTGQITAAGKVPPAQVLVIGAGVAGLAAIGTANSLGAVVRAFDTRLEVAEQIESMGGKFLKLDFPQESGGSGDGYAKVMSDEFIAAEMKLFAEQAKEVDIIITTAAIPGKPAPKLITKEMVESMKSGSVIVDLAAATGGNCELTRPGELSVTGNGVKIIGYTDMANRLAGQSSQLYATNLVNLTKLLSPNKDGEITLDFEDVIIRNMTVTHDGEITFPPPPIQVSAQPQQTPSEKAVPAAKPEPKPVPLWKKLAPAVIAAVLVLWVGAVAPAAFLNHFIVFVLACVIGYYVVWNVSHSLHTPLMSVTNAISGIIVVGALLQIGQGNGFVSLLSFVAILIAGINIFGGFAVTRRMLNMFKKG

SEQ ID NO: 11155 - protein, 563 aa, Neisseria meningitidis MC58
MSASQLLSRLTQTVGEKYIITDPAKTEQYRQGYRFGEGKALAVVRPGSILEMWKILQACVEADVIVITQAANTGLTGGSTPDGNDYDRDIVIVNTMRMNIIQTINNNEQVVCLPGSTLNQLELLLKPLGREPHSVIGSSCIGASVLGGVCNNSGGALVQRGPAYTEMALFAQINEEGRLELVNHLGIDLGNTPEEILTNLQGHHYQNKDITQDAGKGHDHAYCEHVRQVDEPTAARFNADPARHYEASGCAGKLMVFAVRLDTFPQEKQTAVFYIGTNDINELTDIRRAALGEFESLPVSGEYIHRHAFDIADVYGKDTFYVIKKFGTHQLPKLFDLKARVDRFGKKVSFLPKHFSDKAMQFVSKFLPDHLPKSMRDYRDKYEHHLILKMGGKGVDEARAFLKEYFAHHGGAFFECNAEETQAAMLHRFAVASAAIRYRAVHDDEVEDLVALDIALRRDDRDWFEKLPPEIDNKIIHKLYYGHFMCHVFHQDYIIKKGNDCMALEHEMLHLLDQRGAQYPAEHNVGHLYEAKPALKQFYRKLDPTNSFNPGVGKTSKKKNWAE

SEQ ID NO: 11156 - protein, 675 aa, Neisseria meningitidis MC58
MSLSEFIERRTSFNPMVILTTLFFVCVLVVLVLTVPDQVQMWLDRAKEVIFTEFSWFYVLTFSIFLGFLLILSVSSLGNIRLGRDEDVPEFGFLSWLAMLFAAGMGVGLMFFGVAEPLMHYFSDITAGTPEHRQQQALLHTVFHWGVHAWSVYGTIALALAYFGFRYKLPLALRSCFYPLLKEKISGRFGDAIDIMALLATFFGIITTLGFGASQLGAGLQEMGWIAENSFSVQVLIIAAVMSLAVVSAISGVGKGVKVLSELNLGLAFLLLFFVLAAGPTVYLLSAFGDNIGNYLGNLVRLSFKTYAYEREHKPWFESWTVLYWAWWCSWAPFVGLFIARISKGRTIREFVFGVLLIPGLFGVLWFTVFGNTAIWLNDGVAGGMLEKMTSSPETLLFKFFNYLPLPELTSIVSLLVISLFFVTSADSGIYVLNNITSRDKGLSAPRWQAVMWGVLMSAVAVLLMRSGGLGNLQSMTLIVSLPFALLMLIMCFSLWKGLSADKKYFETRVNPTSVFWTGGKWKERLVQIMSQTQEQDILKFLKQTASPAMHELQRELSEEYGLSVRVDKMFHRDEPAIEFVIRKETMRDFMYGIKSVGQDVSDQLINDGKLPHIRHQTTYKPYAYFFDGRVGYDVQYMNKDELIADILKNYERYLMLLDDVGQELMAHEQVELAE

SEQ ID NO: 11157 - protein, 127 aa, Neisseria meningitidis MC58
MFRTMLGGKIHRATVTEADLNYVGSITVDQDLLDAAGIYPNEKVAIVNNNNGERFETYTIAGKRGSGVICLNGAAARLVQKGDIVIIMSYVQLSEPEIAAHEPKVVLVDGNNKIRDIISYEPPHTVL

SEQ ID NO: 11158 - protein, 404 aa, Neisseria meningitidis MC58
MTVKTPVYLDYAATPPVDKRVAEKMIPYLTETFGNPASNSHSFGWEAEEAVEKARADIAALINADSKEIVFTSGATESNNLAIKGAAHFYKSKGNHLITVKTEHKAVLDTMRELERQGYEVTYLDVQENGLVDLDVLKAAIREDTILVSVMWVNNEIGVVQDIPAIGEICRERKIIFHVDAAQACGKVPVDVEAAKVDLLSMSGHKVYGPKGIGALYVRRKPRVRLEAQMHGGGHERGFRSGTLPTHQIVGMGEAFRIAKEELAQDTAHYLKLRDIFLKGIEGIEEVYINGDLEHRVPNNLNVSFNFVEGESLIMAVKELAVSSGSACTSASLEPSYVLRALGRNDELAHSSLRITFGRMTTEEEVQFAAELIKSKIGKLRELSPLWEMFKDGIDLNSIEWAAH

SEQ ID NO: 11159 - protein, 859 aa, Neisseria meningitidis MC58
MRYDKLTAKFQQALAEAQSLALAADGSYLEAGFVLKALLDDQNSGAAALLAHAGVNVPQVKQRLQQHLNSLPKVSGQGGDILPSRELQAVLNLMDKAATKRSDAYIASELFLLALVQQNDATGKILKEAGATEQNINAAIDAVRGGQNVNDANAEDQRDALKKYTLDLTQRARDGKLDPVIGRDDEIRRAIQVLQRRTKNNPVLIGEPGVGKTAIVEGLAQRIVNGEVPESLRNKRLLVLDLAALIAGAKYRGEFEERLKGVLNDLAKDDGNTLIFIDEIHTLVGAGKTDGAMDAGNMLKPALARGELHCIGATTLDEYRQYIEKDAALERRFQKVLVGEPSVEDTIAILRGLQERYEIHHGIDITDPAIVAAAELSDRYITDRFLPDKAIDLIDEAASRVKMEKETKPEAMDKIDRRLIQLRMEKAHVEKEKDDASKKRLELIDEEINGLQKEYADLDEIWKAEKAISDGAANIKKQIDEVKIKIEQAKRQGDLALASKLMYEDLEHLEKQRAAAERADTDSTKPANKLLRNNVGAEEIAEVVSRMTGIPVSKMMEGERDKLLKMEEVLHRRVVGQDEAVRAVSDAIRRSRSGLADPNKPYGSFLFLGPTGVGKTELCKALAGFLFDSEDHLIRIDMSEYMEKHAVARLIGAPPGYVGYEEGGYLTEQVRRKPYSVILLDEVEKAHPDVFNILLQVLDDGRLTDGQGRTVDFKNTVIVMTSNIGSQHIQQMGIQDYEAVKEVVMEDVKEHFRPEMINRIDEVVVFHGLDQDNIRNIAKIQLKGLEKRLEKQNLRLAVSDAALDIIAKAGFDPIYGARPLKRAIQSEIENPLAKALLAGNYAPESEIRVEADGDRLKFA

SEQ ID NO: 11160 - protein, 405 aa, Neisseria meningitidis MC58
MALIVHKYGGTSVGSPERIKNVAKRVAKARAEGHDIVVVVSAMSGETNRLVALAHEMQEHPDPRELDVVLATGEQVTIGLLAMALKDIGVDAKSYTGWQVALKTDTAHTKARIESIDDEKMRADLTAGKVVIVAGFQGISSEGDISTLGRGGSDTSAVALAAALKADECQIYTDVDGVYTTDPRVVPEARRMDTVTFEEMIELASLGSKVLQIRSVEFAGKYKVRLRVLSSLQDGGNGTLITFEEDDNMERAAVTGIAFDKNQARINVRGVPDKPGVAYQILGAVADANIEVDMIIQNVGSEGTTDFSFTVPRGDYKQTLEILSERQDSIGAASIDGDDTVCKVSAVGLGMRSHVGVAAKIFRTLAEEGINIQMISTSEIKVSVLIDEKYMELATRVLHKAFNLG

SEQ ID NO: 11161 - protein, 398 aa, Neisseria meningitidis MC58
MSQKLILVLNCGSSSLKGAVLDNGSGEVLLSCLAEKLNLPDAYITFKVNGEKHKVDLSAHPDHTGAVEALMEELKAHGLDSRIGAIGHRVVSGGELYSESILVDDEVIAGIEKCIPLAPLHNPAHLLGLRAAQSIFKGLPNVVVFDTSFHQTMPEVAYKYAVPQELYEKYGLRRYGAHGTSYRFVADETARFLGKDKKDLRMVIAHLGNGASITAVANGESRDTSMGLTPLEGLVMGTRSGDIDPSVFGFLAENANMTIAQITEMLNKKSGLLGISGLSNDCRTIEEEAAKGHKGAKLALDMFIYRLAKYIGSMAVAAGGLDALVFTGGIGENSDIIRERVIGYLGFLGLNIDQEANLKARFGNAGVITTADSKAVAVVIPTNEELMIAHDTARLSGL

SEQ ID NO: 11162 - protein, 575 aa, Neisseria meningitidis MC58
MQLSGAQIIVQSLKAEGVEYVFGYPGGAVIEIYDALFQLNKFKHILTRHEQAAVHAADAYARVSGKVGVALVTSGPGVTNALTGIATAYTDSIPMVVISGQVGNSLIGTDAFQEVDTVGITRPCVKHNFLVTDINELAETIKKAFQIAASGRPGPVVVDVPKDVTQAMAKFSYPQEDIFIRSYQPVVQGHIGQIKKAVQMLASAKRPVVYFGGGVVLGNASEELTRFVRMTGAPCTGTLMGLGAYPSGDRQFLGMLGMHGTYEANLAMQNADVVLAVGARFDDRVVSVPSKFFEKAKKVIHIDVDPSSIAKRVKVDIPIVGDVKNVLSEMVALWQKQESVPSEDALGKWWKTIEEWRSRDCLWFDNGSEIIKPQYVIQKLAEITGNSAIITSDVGQHQMFAAQYYPFERPRQWLNSGGLGTMGVGLPYAIGAKLAAPDQDVFCITGDGSIQMNIQELSTCFQYRIPVNVITLNNGYLGMVRQWQEIYYGGRESETYFDSLPDFVKLAEAYGHIGIRVDKKSDVEGALLEALNQKDRLVFIDFLTDQKQNVMPMVGNGKGLDEMVLPPHMRADGKA

SEQ ID NO: 11163 - protein, 289 aa, Neisseria meningitidis MC58
MSANEYAQIGWIGLGQMGLPMVTRLLDGGIEVGVYNRSPDKTAPISAKGAKVYGNTAELVRDYPVIFLMVSDYAAVCDILNGVRDGLAGKIIVNMSTISPTENLAVKALVEAAGGQFAEAPVSGSVGPATNGTLLILFGGSEAVLNPLQKIFSLVGKKTFHFGDVGKGSGAKLVLNSLLGIFGEAYSEAMLMARQFGIDTDTIVEAIGGSAMDSPMFQTKKSLWANREFPPAFALKHASKDLNLAVKELEQAGNTLPAVETVAASYRKAVEAGYGEQDVSGVYLKLAEH

SEQ ID NO: 11164 - protein, 545 aa, Neisseria meningitidis MC58
MDFKRLTAFFAIALVIMIGWEKMFPTPKPVPAPQQAAQQQAVTASAEAALAPATPITVTTDTVQAVIDEKSGDLRRLTLLKYKATGDENKPFILFGDGKEYTYVAQSELLDAQGNNILKGIGFSAPKKQYSLEGDKVEVRLSAPETRGLKIDKVYTFTKGSYLVNVRFDIANGSGQTANLSADYRIVRDHSEPEGQGYFTHSYVGPVVYTPEGNFQKVSFSDLDDDAKSGKSEAEYIRKTPTGWLGMIEHHFMSTWILQPKGRQSVCAAGECNIDIKRRNDKLYSTSVSVPLAAIQNGAKAEASINLYAGPQTTSVIANIADNLQLAKDYGKVHWFASPLFWLLNQLHNIIGNWGWAIIVLTIIVKAVLYPLTNASYRSMAKMRAAAPKLQAIKEKYGDDRMAQQQAMMQLYTDEKINPLGGCLPMLLQIPVFIGLYWALFASVELRQAPWLGWITDLSRADPYYILPIIMAATMFAQTYLNPPPTDPMQAKMMKIMPLVFSVMFFFFPAGLVLYWVVNNLLTIAQQWHINRSIEKQRAQGEVVS

SEQ ID NO: 11165 - protein, 187 aa, Neisseria meningitidis MC58
MKLIILDRDGVINQDRDDFVKSVDEWIPVEGSMDAVAFLTQAGYTVAVATNQSGIGRKYFTVQNLTEMHAKMHRLVRQAGGEINGIWFCPHTDADNCNCRKPKPGMIEDIIGRFNAQASETWLVGDSLRDLQAIDAVGGKPALVLTGKGKKTLSQHGHELPEHTQVFDTLLDFSQYIMQENTAPQAD

SEQ ID NO: 11166 - protein, 384 aa, Neisseria meningitidis MC58
MKFIDEAKIEVAAGKGGNGATSFRREKFVPRGGPDGGDGGKGGSVWAEADENTNTLVEYRFVKRYQAKNGEKGHGSDRYGAGADDIVLKMPVGTLIRDLDTGETVADLTYHGQRVCLAKGGKGGLGNIHFKSSVNRAPKQSTPGEEGEARSLQLELKVLADVGLLGMPNAGKSTLITAVSAARPKIANYPFTTLHPNLGVVRIDENHSFVMADIPGLIEGAAEGAGLGHRFLKHLSRTGLLLHVVDLAPFDETVNPAEEALAIINELRKYDEELYGKPRWLVLNKLDMLDEEEAQTRTAAFLEAVGWDYPKPDDRFQFDMETPRLFQISALTHQGTQELVHQINQYLTEKKRIEAEKAEAEKAAANVEIIEQQPKTDTGVFKPE

SEQ ID NO: 11167 - protein, 447 aa, Neisseria meningitidis MC58
MSQNHTILQSLPVGQKVGIAFSGGLDTSAALLWMKLKGALPYAYTANLGQPDEDDYNAIPKKAMEYGAENARLIDCRAQLAHEGIAAIQCGAFHVSTGGIAYFNTTPLGRAVTGTMLVSAMKEDDVNIWGDGSTYKGNDIERFYRYGLLTNPALKIYKPWLDQQFIDELGGRHEMSEFLIANGFNYKMSVEKAYSTDSNMLGATHEAKDLEFLNSGIKIVKPIMGVAFWDENVEVSPEEVSVRFEEGVPVALNGKEYADPVELFLEANRIGGRHGLGMSDQIENRIIEAKSRGIYEAPGMALFHIAYERLVTGIHNEDTIEQYRINGLRLGRLLYQGRWFDSQALMLRETAQRWVAKAVTGEVTLELRRGNDYSILNTESPNLTYQPERLSMEKVEDAAFTPLDRIGQLTMRNLDITDTRVKLGIYSQSGLLSLGEGSVLPQLGNKQ

SEQ ID NO: 11168 - protein, 553 aa, Methanothermobacter thermautotrophicus str. Delta H
MVPVEDLVYRYALLNAVKHRGRANPGAVMGAVMSNEPELRKMAPQVKEAVEAAVERVNSLSPEEQQQEMERLGLEITERKQKKRKGLRELAGVKGEVVLRFAPNPSGPLHIGHARAAILNHEYARKYDGRLILRIEDTDPRRVDPEAYDMIPADLEWLGVEWDETVIQSDRMETYYEYTEKLIERGGAYVCTCRPEEFRELKNRGEACHCRSLGFRENLQRWREMFEMKEGSAVVRVKTDLNHPNPAIRDWVSMRIVEAEHPRTGTRYRVYPMMNFSVAVDDHLLGVTHVLRGKDHLANREKQEYLYRHLGWEPPEFIHYGRLKMDDVALSTSGAREGILRGEYSGWDDPRLGTLRAIARRGIRPEAIRKLMVEIGVKIADSTMSWKKIYGLNRSILEEEARRYFFAADPVKLEVVGLPGPVRVERPLHPDHPEIGNRVLELRGEVYLPGDDLGEGPLRLIDAVNVIYSGGELRYHSEGIEEARELGASMIHWVPAESALEAEVIMPDASRVRGVIEADASELEVDDVVQLERFGFARLDSAGPGMVFYYAHK

SEQ ID NO: 11169 - protein, 622 aa, Methanothermobacter thermautotrophicus str. Delta H
MIHMVQILLTEPEKCDGCNKCLEACESVLGRSAIFLNKMDTGYHAIVCQQCVDPSCARGCFRDAIRRENGAVKIDQESCVGCKLCMLMCPIGAITYTDEGMVKCDQQCIEKPGDTPACVAACEQGCLEALDVMEYVNDIQRGFEIKTPSTGSITPSSPSSDLAAATQGLCVFCGTCEIVCPTDAIKIVEDHAEIDKTKCIMCGSCLAACPVLIPTGAGSIWDPRTIADIRYTSKAGKYVLRGFGTERRLPNFDDIIILPAQASIPPVDKYREPCNTSVVLGDRFAEEPLVLQTPVLIAGMSFGALSKESKLAMAKGSSMVGSCANTGEGGMLPEERELADNLMVQYSSGRFGVSSDYLNVADAIEVKIGQGAKPGMGGHLLAEKVSPEVAKIRGIPEGTDALSPARFLDATREGDLAKHIELLREVTDWRVPIVVKLGPGRVYEDVQIAAEAGADVISVDGMEGGTGAAPEVVIEHTGVPTLAALVQAVNGLNDIGLKDEVDLIITGGIRSGADVAKAMAMGADAVYIGTGAMIAMGCRACRMCYTGKCPVGVATQDPVLRERMDVDLAARRVANYIKSMTEEAKMLAQLAGHDDIRKFSPEDLRALDTNTAAITGLKLINQ

SEQ ID NO: 11170 - protein, 499 aa, Methanothermobacter thermautotrophicus str. Delta H
MPFKVERKEEVCKRNFDRPGCCWYMCDNRDESLCANCYSCYNNCPHDVYEIINGEPVPVRHENCVGCRICEEMCPNNAIEVNAVPEDRRNVWSFADLLEIERKSREGSYKVRGCGAVRRIPTFDDLVIIPAQVSRPPIDKYREPCNTRVVIGDRYAENPLELDTPIMIAAMSFGALSKEAKIALAMGASLAGTATNTGEGGMLPEERRYASKLIAQYASGRFGVSAEYLNNSEAIEIKIGQGAKSGMGGHLLAEKVTAEVSRIRMIPEGTDALSPARHMDIVGPEDLSMKISQLREITDWKVPIMVKFTSGRVADDVKIAAKAGADAVVVDGMQGGTGAGPDVVTEHSGIPTIAAIVEADEALKEVNLRDEVSLIAAGGIRSGADVAKAIALGADAVYIGTAALVSIGCRVCQMCYTGTCRKGIATQDPRLRKRLDYVEAGKNVARYIEAMTEEVCMLTQQAGNTDVSKLEKDDLRALTVEASALTGVKLAGMESPARF

SEQ ID NO: 11171 - protein, 469 aa, Methanothermobacter thermautotrophicus str. Delta H
MTAMCAIAGFRGDDAPVKVQEMLDVLRHRGPDATGIYHDSRIVIRTATGEDVKEAPQSAEIAVGHNLLSIVGGPQPVSGDGVLVFNGEIYNQEELNWTGSDSELILDLIEGHGGDLEDALRFTVNKIDGDYAFAYTDGENLASRQDPVGVKPLYHSGEAFASEKKALWRIGLRNVETLPPGHAMINGVKVKLRGLPRAEPSDAEPEELRENLKSALRESVERRVRGLDEAALVFSGGVDSTLLAVLLDEHIDVRLYTVGLPGSSDPQFASRAAADLGMELEVLEVTEDTIREALPHVLGAIEEYNLMKIGVAMPLYLASEAASADGYRVMFSGQGADELFAGYHRYRRLLAEGRLEDALRHDLENIHHVNLERDDAVTMANSVELRVPFLDLQLIGVALTIPADLKIRGPEDELRKRILREAALEMGVPEYIAMRPKKAAQYGSGIDKVLRRKVLPGFDHETFLRRLMF

SEQ ID NO: 11172 - protein, 553 aa, Methanothermobacter thermautotrophicus str. Delta H
MADFRCTVCNYIFHEEADGEFDSLPADWRCPVCNAPRTAFVRVPSTLEEGGRTVSEVFISQLAAWGLKYVFGIPGTSTLGLVDALRRNDEIRYIQVRHEAAAAFMASSYGKLTGQPAVCMAVAGPRASNLITGLLDAALDRAPVLAVTGHVETYRIGTGASQEIDQHSLFESFSVYNMTLVSPDEAAEIAREAVKHAILERGVSHVDVPRDVQTMECTAPVKPLRGMMAEAAVTPPRNRLRAAADLINRAERPVIIAGFGALEAADSVVELAERIGAAIVSTFRGKGIVDNDYPLYLGCHGSLGSAAAAEAVRKADLLLVIGSSFSDLTRIPPRRTLQVDIDPMMVARRHPVEQGLTGRSSLIVQELISMVEEKERGPYLAELGELRDEWLGLLESEADPSLRPIRPQYIISVLNRELDDDAIITLDVGENGWWFGRNFQMKSTRGFSFQVTWGSMGFGLPAAIAAQLEFPDRQVVCINNRNLAMIMQEQRVEGFPVWQTELQDCDFAGFAENCGGRGLRVDDPGELEDSVREALGTDGPVLVDIETDPRRFI

SEQ ID NO: 11173 - protein, 424 aa, Methanothermobacter thermautotrophicus str. Delta H
MKPNLRRELGLFDAVNLVVGTIVGADIYIVAAYGAGSLGPASILAWLLAGLMALIIALVFSEASAMLPRTGGPYVYAGEALGRFTGFITGWSLWVSSWVAIAVFPLAFIYYLEYFIPLDPPAEAVIKVLFILSLTIINIAGVGRAGKVNDILTILKVAPVLLFAVLGAIHLALNPGLLVSNYTPAAPMGLGALGTVTVLVFWAYVGFELVTVPADEVRDPERTIPLSITLGMIFVTLFYILTNAVILGLVPWRVLASSTAPLTVAGYSLMGGIGALILTAGAVFSIAGSEEAGMLTTARLLFAMSEDGFLPGFLSRVHRRFGTPHMSILVQNLTALLAALTGTVSGLIELSVVTLLLPYAVTCISLAILRRRDGSGIPLKSVLGVLVCIYLLMNTTPSTTAWGLLLILSGAPLYLIFGFKRLRR

SEQ ID NO: 11174 - protein, 347 aa, Methanothermobacter thermautotrophicus str. Delta H
MDPRKIQLPREIYTGPGVIEDTGRICRDLRFEGRAMVVTGPRTLQIAGEAAIESLQAEGFEVDQVTVDDATMASVRNVQDGLDGVSVVLGVGGGKVIDVAKMSATLEGLHFISVPTAASHDGIASPRASIRNGEGTASLEASSPIGVIADTEIISRAPFRLLASGCADIISNYTAIMDWKLAHRLLNERYSESAAALSLMTAKMIIKSADAIKEGLEESARLAVKSLISSGIAISIAGSSRPASGSEHKFSHALDMIAPKPALHGEQCGVGTIMMMHLHGGDWQFIRDALARINAPTTAAELGIDPEYIIEALTMAHNIRRERYTILGDRGLTREAAERLAKITEVI

SEQ ID NO: 11175 - protein, 412 aa, Methanothermobacter thermautotrophicus str. Delta H
MEMTLMDAVLNSGDTAWMLVSTALVMLMTVPGVALFYGGLTKKENVLNTMFLSLIAFAVTSIIWVLYGYQFAFGADIMGFIGSPVNLLMNGVGVNTAAALAPTIPDFLYIAFQLTFAAITVALISGAVVERMKFSAWLAFIVLWVSLVYVPVAHWVWGGGFLAQLGALDFAGGTVVHINSGVAALALVYLLGKRKDTRLLPHNLGYSVIGASLLWFGWFGFNAGSALTAGGLAASAFLVTNTAAAAGMVSWVIMDYLKVGKPTVLGGISGAVAGLVAITPAAGFVTVPAALIIGLVTSVISYLAVSYLKPRLGYDDALDVFGIHGMSGIWGSVATGLFAAPFINELGTGLIYGNPGQLTAQVIAVAVVAAYSFVVTLIIGKLLDFTVGLRVSGKEEMEGLDTHLHEETGYRI

SEQ ID NO: 11176 - protein, 204 aa, Eustoma grandiflorum
LTVLCDAEVALIIFSNRGKLYEFCSSSSMLKTLERYQKCNYGAPEPNMSTREALELSSQQEYLKLKARYEALQRSQRNLLGEELGPLNSKELESLERQLDMSLKQIRSTRTQVMLDQLTDLQRKEHALNEANTTLKHRLMELNLQWNPNAQDVGYGRQPQTQADAFFQPLDGEPTLHIGYPNDPMAVAAAGPSVNNYMAGWLPL

SEQ ID NO: 11177 - protein, 410 aa, Methanothermobacter thermautotrophicus str. Delta H
MENNSQNVLKKIEDLKKEVRMLKEENSKTKRNLMWKIRKLEKDKLLIENERTRLDREVKSLRGEIERFRTPPLVIATVTEVLDDHRVAVKSTTGPHFVINYSRFIDRKQLEPGARVALNQQTFSIVDVLPSEKDPVVTGMEVEEKPDVSYEQIGGLEEQVREVKETVELPLKKPELFEKIGIEPPKGVLLYGPPGTGKTLLAKAVAHETNATFIKIVASEFVRKYIGEGARLVRGVFELAKEKSPSIIFIDEIDAVAAKRLKSSTSGDREVQRTLMQLLAELDGFESRGNVGIVAATNRPDILDPALLRPGRFDRFIEVPLPNEDGRREILKIHTSGMALAEEVDIELLARITDGASGADLKAICTEAGMFAIRDERDEVTMADFMDAVDKIMGVEKEEEYKQETGVMFG

SEQ ID NO: 11178 - protein, 285 aa, Methanothermobacter thermautotrophicus str. Delta H
MIIGCSASQKLAASVADLLDEPLCPVETRKFPDGERYIRVKEEVEGEVTVVQSTGYPQDENLMELLFMIENLKDLGADYVRAAIPYFGYGRQERRFKSGEAVSAKIVAHLLEAAGADEIVTVNLHENCLSEFFRVPVRELSAMPLIAEHISFLDDPVIIAPDKGALGHAREVSDILGCECDYMEKVRISPEVVETRVSDLDVEGKDAVVVDDIISTGGTIVNAAGILGKCGASSITVCCVHPVLVEDALLKIFSAGVERVIATDTLKSDVSEISVAPLIADVMKD

SEQ ID NO: 11179 - protein, 406 aa, Methanothermobacter thermautotrophicus str. Delta H
MELIVAKFGGTSIGNGRRIKKAARSVVKEYMKGRKVVVVVSAINKTTDELLQIVDEAMEDAVTEKQLAEIVSMGEMTSVRIFSSAIEALGVKSEYIDPFMDEWPIITDSNLLNAKVDFEATEEKSRELLKLLDQGIIPVVCGFLGRDPNGYITTLGRGGSDITAFLLGHCLKADEVIIVTDVGGVMSTDPNKLQGAKKLDKISVEEMRDLATHGAQVLHPHALKYKDPDIKAKIIGFEHGDLSAPGTEIIGPSKNKMVKTTTLNPDPISVVAVVGEKILNKPGILARLTSRLAENSINIIGISTGQNSVTIFVDKKDADEAHRLLHDVVIADDDLSSLSLGRDIAMITISSPDFIDTPGIISEITKPLRDNDLNIVEISSSQTSVVIFVDWNDGKKAYELVRGVLE

SEQ ID NO: 11180 - protein, 286 aa, Methanothermobacter thermautotrophicus str. Delta H
MLIHTHEPLKFAFSTTDHERIPELSFGIMGVPFDSTTSYVPGARFGPMAVREASYSFEAYNLRFSENVKVKSFDFGDLEVSPGNFMKTAGFIGDSVSEVLDMGLKPLIIGGEHTVTLPVIENLPEHDSLTVVHLDAHMDLADTYAGERYSHATVMRRVHELGAEIIQIGIRSASSEEAEFAGEEGVRFCMAHEVMGDPAGAIELIDGIRGPVYISVDMDVLDPAYAPSVGNPAPAGLTPHIMEELVLALSGKDVVGLDVVEVASGGMADPTSVNAAKIIYDILTLL

SEQ ID NO: 11181 - protein, 921 aa, Solanum lycopersicum
MSPASDNSLSDSQTQRLNDLSIVSPEEATVEPDEVLSVIESLKRKIASERADYIKKRVEGNTQKLENLTKDLYNLATERKCLEIFDAGGKIDLLSKRQKDALDMQNGIDTSNGDDDSNSSEDDGYATSAILLGSSIAVKNAVRPIKLPEVKRIPPYTSWIFLDRNQRMTEDQSVVGRRRIYYDQNGGETLICSDSDEEVLEEEEEKKVFAESEDYMLRMTIKEVGLSDIVLDLLGHCLSRKPSEVKARYEALVKADDVGTSKNEFTESSLDLYLAKDLDAALDSFDNLFCRRCLVFDCRLHGCSQDLIFPAEKQSPWYCSNADMEPCGPNCFSLAKKFESNATVISPQCASHGEKSILPSDVANNTQMPGRKHVSRRSKSSKGEGAPNAKNISESSDSDIRPVNDITSNERSSSPSKSKSDNKDGSNKRNSKRIAEHVLVAIKKRQKKMAVLESDTVASESLGFKDLNLHSISRKENEDASPSSQKAQCHSTKRSRRKNSPVLDSKNSLQGKAFGCKVMEVNSEKPVANCDDTLGKNEKVGENNCKQEVDGTKSWRPIEKALFEKGLEMFGRSSCLIARNLMNGLKTCWEVFQYMNNSGNKLFSGTGDGMDDILEGGCNGDGQEIMGEPRRRSRFLRRRGRVRRLKYTWKSTGYHAIRKRISERKDQPCRQFNPCGCQGPCGKECPCIVNGTCCEKYCGCPKGCKNRFRGCHCAKSQCRSRQCPCFAAGRECDPDVCRNCWISCGDGTLGVPPQRGDSHECRNMKLLLKQQQKVLLGRSDVSGWGAFLKNTVGKHEYLGEYTGELISHREADKRGKIYDRENSSFLFNLNDQFVLDAHRKGDKLKFANHSPVPNCYAKVMMVAGDHRVGIFANERICAGEELFYDYRYEPDSAPAWARKPEASGTRKEDAAPSSGRARKHT

SEQ ID NO: 11182 - protein, 525 aa, Methanothermobacter thermautotrophicus str. Delta H
MSRMKVLIADSINEKGISELEEVAEVVVNTTITPEELLDAIKDFDAIVVRSRTKVTREVIEAAPRLKIIARAGVGVDNVDVKAATDRGIMVINAPESTSITVAEHSIGLMLALARKIAIADRSVKEGKWEKNRFMGIELNGKTLGIIGMGRIGSQVVVRTKAFGMDIMVYDPYISKEAAEEMGVTVTDLETLLRESDIVTIHVPLTPETRHLISEDEFKLMKDTAFIVNCARGGIIDEDALYRALKDGEIAGAALDVFEEEPPEGSPLLELENVVLTPHIGASTSEAQRDAAIIVANEIKTVFQGGAPRNVLNMPVMDSETYKSLKPYIELAEKMGAIIAQALPGNIEKLDVTYCGELAEMQFDILTRTMLQAILNPILTEPVNLINAPSIAKKRGIMVTEARRSESDGYRSIIIATAESDRGGFSVEATHIKEPTIIGINGYRVDVKPEGTMIIARYRDLPGTIGAIGTKLGQHGINIATMQVGRKEIGGEAVMVLKVDQSVPAEVIEEVKKLDNVDDAVAIEI

SEQ ID NO: 11183 - protein, 246 aa, Methanothermobacter thermautotrophicus str. Delta H
MAGHSMREHEVYSKLRAPPSSRMILRLDGRGFHRLTESLDFDRPYDEAFRDLMIRTCLDLMEEFSPSLIYTFSDEINVLLDSVPFAGRVEKLDSVFSGFASSSFTRGALEAGFSPVKPVSFDCRVIPISSDIVPEYFRSRQDESWRNCLNSYAYWTLRREVGARRAAERLRGLKSDSLHDLLFERGVNISRVPAWQRRGVGVYRVPHRVRGYNPIRDEEVSAVRMRVKVDLELPLFTDEFFEGLMR

SEQ ID NO: 11184 - protein, 251 aa, Methanothermobacter thermautotrophicus str. Delta H
MLLEITDLAVEVSGKQVLKDIDLYIDRGETHVLLGPNGSGKSTLFMTILGFPKYRVTNGQIIFKGEDITDLSTTERVRMGIGVSFQNPPAIRGVKLMDLLKVESGLETEDELTPELRGLAAKMKFDESFLERDVNLGFSGGEVKRSEILQLLAQKPDFIMFDEPDSGVDIENVELLAEEINVLLDKDKKPGLRKKAGLLITHLGYILNFVSADTAHVLMDGRIACSGNPQEIIEDIRKDGFKGCVECCGIH

SEQ ID NO: 11185 - protein, 423 aa, Methanothermobacter thermautotrophicus str. Delta H
MNIGLIGFGTIGAGVVEIFNTNPDIIMKKTGMELRLRRVVDLDIETDRGVEIDPGILSTDADDILEDPEIDIVIELIGGYEPARSFILKAIENGKHVVTANKALLARHWDEIMDAAREHGVRVAFEASVGGGIPVLRALNESLAANRIESIYGIINGTANYILTRMASEGMEFDDVLREAQRLGYAERDPTFDIEGHDTAQKLIILTLLGFGVHVPEDELHVEGISSIRRDDIEYATAELGCSVKLLATARLNDGELELGVTPTLVPHHHLLSSVNGVFNGIYITGDFTGPVMFYGKGAGRRATASAVVADCMDIAVNPEGSMPTGPGIRVVESVRDFSRTSSRYYIRLDAVDRAGVLHEIAGAFSRHGISIESVTQKGAHEGETVPIYIVTHEASEGAIQGALSEISEIRWVRGEPLRLRIL

SEQ ID NO: 11186 - protein, 399 aa, Methanothermobacter thermautotrophicus str. Delta H
MKVIAVDKVVLAFSGGLDTSVCIKLLEEKYNMEVITACVDVGQPRDEIERPAMVAKELGNYRHYTVDARREFAEDYIFPAIKANAVYEGYPLSTALARPLIAKKIVEVAEKEGASAIAHGCTGKGNDQFRFEAVIRSTTDLDVIAPIRDLNLTRTEEMEYARSCGIPLPSDKLYSIDENLWGRAIEGDILEDPMVEPPEDAFEWTKPIHETPEDPEVIEIGFHGGVPVALNGEELEPVELIGLANEVAGKHGIGRVDIMEDRIIGMKSREIYETPAAFLLLEAHRGLEQLTLTRSELRFADIISSTYAELVYSGLWHDPLREDLDMAVNHMQRRVTGTVRVKLHRGSMRVIGRESPYSLYSEEIVSFEDKTLDQREMAGMVKNYALQAAIYSRVCRKEN

SEQ ID NO: 11187 - protein, 577 aa, Methanothermobacter thermautotrophicus str. Delta H
MFPMKGGQAIIRSLLDQGADTVFGYPGGQLLPLYDMLYDSELKHILVRHEQCAAHAADGYARASGRVGVCIATSGPGATNLVTGIATAYMDSAPIVAIAGQVPTHLIGNDAFQEVDMIGITMPITKHSFQPSDASEIPAIVRASFHIAKTGRPGPVVIDLPKDIQEQEIMEEVDDLELPGYRPNVKGHPLQIKRAAELIRRSEKPVILAGGGVIISGASREIKELSDLIKAPVTTTLLGKGSFPEDHPSAMGMLGMHGRKVANLTVDECDCLIAVGCRFSDRTTGNVAEFAPNARIIHVDIDPAEIGKNVGVDVPIVGDARNVLRELIAKLKKYEKRDSQWLESVQKFRADCMPRMSYDEVPLKPQQVIKEISQVLDDETVVTTDVGQNQMWMAHFYTSRAPRKFISSGGLGTMGFGFPAAIGAKVALPDSDVVAVCGDGGFLMVCQDLATIREYDIPVVICIMDNRHLGMVAQWQRLFYDERMSHTHLGEVPDFVKLAESFGVEAERIEEPGETSEALSRAIRSGEPALLDIVIDPDEILPMVPPGCGLTEIVGEYRVEREDPQEIKYSPGKADGD

SEQ ID NO: 11188 - protein, 524 aa, Methanothermobacter thermautotrophicus str. Delta H
MKMCAEVLAGILEEAGFTHIFGHPGEQILPLYEALRKSGLEHVLMRHEQGAVHAADGYARASGGPGVCVATGGPGALNLVMGVAAASTDSVPLIAMTGDLPRGGGPGRFQEVDLEAVFRALTRMSMTPGSGDEASMMLADSISSLRRGLTGVIHINLPRDVLEEDACPPVGPSEVFRELPDMSRALELLGSARRPLILAGGGVIWGNAVGEFREFIENARIPVVTTYSARGVIPEDHPLCLGMTGTRGTPAANHAAGNCDVLLVLGARLSERTLAATGNPRVIHVNTDPSVLRGDVVLEMDVGDFLRELPELKGPEGWFKELAAYRRDNPPISELQPPGGGAFVTSSAVRGILDAAPDATIVNDAGSHTTWVTLHRRVLRERSLIFSGGFGPMGYGLPAAIGAKLADPSRDVIMIAGDGGFQMTIQELGTVAELELPITMCILNNQKLDVIRQWQEMNYGTSYSVELKNPDFIRLADAYGIGAERILRLEDVSGAVERALESGEPRLLEFMVEGEDIPLPGVRP

SEQ ID NO: 11189 - protein, 732 aa, Methanothermobacter thermautotrophicus str. Delta H
MGCMTKKEIKLKVAEALAQQDVGRGIARVDPACMEKLGLSDGDIIEIEGKKLTAATVVSSQSDIGLGIIRIDGYLRKNAGASIGEEVTVRRADVKDAQKVVLAPVDQEVIIRGDIRSAFLNRVLVKGDIIVSGIRQHISGGGLFDEFFRDFMDISPLGEIKLAVVSTSPAGVVRVTPSTQVEMQQKPVDVSKLEGVKNLVDVTYEDIGGLKEEVKKVREMIEIPLKRPELFERLGITPPKGVLMHGPPGTGKTLLAKAVANESDAHFIAINGPEIMSKYVGGSEERLREFFEEAEENAPSIIFIDEIDAIAPKREDVSGEVERRIVAQLLTLMDGLKSRGQVVVIGATNRPDALDPALRRPGRFDREIEIGVPDREERKEILQIHTRGMPLADDVDLDELAEITHGFVGADLESLCKESAMRVLRRVLPEIKADEEIPKEVLKKMVVTRADFKDALKEIQPSALREVLVQVPNVSWDDIGGLEGAKQELREAVEWPLKYPDRFKKFGIRPPKGILLHGSPGTGKTLLAKAVANESQANFIAVKGPELLSKWVGESEKGVREVFRKARQTAPTVIFFDEIDSIASVRSGSTADSGVTQRVVNQLLTEIDGLEELQDVAVIAATNRPDILDPALLRPGRFDRHVKVEDPDKEARLAIFRVHTKDMPLADDVDLEKLAEKTEGYVGADIEAVCREAAMLTLRDNMDAEEVSMKYFLEAMEKVKPKGGVEEQVQYH

SEQ ID NO: 11190 - protein, 360 aa, Methanothermobacter thermautotrophicus str. Delta H
MIFQGESMRIVEEDEKNGVIELVPETLDDLWHLSHIIEEGDLLSARTTRRIQDTSGEKIRSDRGVKKTFYLGIRVETVSFHIYTGRLRATGVIERGPEDLVPMGSHHTLEVKLNTPLRIQKEHWSRWTLKRLRMAVRASKNLKAIILVMEDDVAELGLIRQYGVEYRGPITGHIPGKRIQQRDRGKLRREFYESIVESLQKYGDLETIIIAGPGFYKSDFYDYLMERYPEIAKKAVLENTGTGGRAGISEVLRKGTVERVSSEKRIASEIRNVNEFLEKLARDPDSVVYGKVEVMDAINMGAVEKLLVLDRVVSREDIEGYLDMVESMGGSVVLISSEHEGGKQLESLGGLAGILRFKIQ

SEQ ID NO: 11191 - protein, 383 aa, Methanothermobacter thermautotrophicus str. Delta H
MRRQRRSEDDREYLKIVQIKRIAHSGEVPVESMGSEKRLPLGLDDLHFLPAQVSKIPLNAEDPVKTDVIIGPESKRPLRLKSPIIISGMSYGAVSEKTRIAIASVADRLKIGFNSGEGGVLQRELEKAGDYLIIQYSTGRFGITEDVLRGAAAIEIRFGQGAYPGKGSYLPPDKISPDVARVRGLAPGEGSYSPAHHHDIRDQMELEEKVKELRKMSGGAPIGAKIGCGNVEDDVKALLDAGVDFISLDGFGGGTGAVNPHIRDNTGIPLIAAIPRAVKTVINEGHGDRVSLIAGGGLRTAADMAKCLALGADAVYTGTAALIALNCQQHRLCHTGKCPTGITTHDPDLLKHMDLERAIEGLENFIRVSTAEIADFCQDHRKG

SEQ ID NO: 11192 - protein, 496 aa, Methanothermobacter thermautotrophicus str. Delta H
MSELQKRAMRFLEDKNPVIVSNRGPVEFFKENDETVMKRGAGGLVSTLLPLVERFSGVWISSAMTVEDARVASGYPENRVPLPEDDPRFTVSFVIVDRERYESYYSIISNPLLWFVQHYMWNTPYDPQIDDKVYRAWEDGYVHVNKKFGDKVISEIERNEKDSLIMLQDYHLYLCPFFIKKEIGDVFLSHFIHIPWPQRDYFNILPERMRADIIGGLLSNTILGFHIERYCANFFECCEDLGYEVDGDRGIVRNGDEKTLVKSYPISVDPESMERTVSSPTFMEKDEFVRKLKGNMFLIYRTDRADLSKNIIRGFRAYELFLRDHPEFHGKVKFLATGKPTRQQIREYRNYSEEVKDTVEEINEKYGTDEWKPIEYIYRADYELVAAAFKNYDCLIVNPIADGMNIVPKEAAIINREDGALILSERAGCYDELAEHVIGVNPFDIKETADAIYSAMKMSPGKRKKLSEGLKSRVLKRTIYHWINEQFDDFEDLWES

SEQ ID NO: 11193 - protein, 526 aa, Methanothermobacter thermautotrophicus str. Delta H
MDLLVLGIVVLIYFLLVGYVGYVAWRRTETSEDYMVAGRRTHPYIMAMSYGATFISTAAIVGFGGMAGVFGMGILWLVFLNILVGIFIAFVFFGKRTMKMGHNMSALTFPEFLGRRFNSRFLQYFGGAIIFLGMPLYASVVLIGAARFIETTLGLDFSIALILMAVIVAVYVVLGGIRGVMYTDALQGTIMFLGMIFLVVSTYYLLGGVVDAHQALTNISHLIPAKARAIGATGWTSMPLYGSPYWWTLLSTIILGVGVGVLAQPQLIVRFMTVKSNRELNRGVLIGALFIFVMTWSAYVVGALSNVYFFRKMGMIAVQAAGGNADKIIPFFIKSAMPEWFSYIFMLTLLSAAMSTLSAQFHVQGTAIGRDVYETVRRRKGDRSVLITRGGIIIAVLIAVVLGYLLPGSIVAQGTALFFGICAASFLSVYVAAIFWKRATRQGAIAGMVSGAIVSLFWLLFEYKKTAEALGIAKALFGGPVIASMPWPVVDPILVGVPVSAIFMVAVSLLTEPPSDEHIQKCFNGV

SEQ ID NO: 11194 - protein, 374 aa, Methanothermobacter thermautotrophicus str. Delta H
MIMRKFASRVKDIQLSEIRKIFEVADEDTINLGIGEPDFSVPDHVREAVKDAVDEGLTHYTSNMGMEELREAIADKLKSENRVHAEPESIIVTVGASEAIFMCTQALLDIGDHALIPDPGFLSYDACVRLSGAVSIPVPLSMDEGFSMSPERVESLITQDTRVIIMNSPSNPTGSVMGKDDVKGIAEIAEDNDLIIISDEIYEKIIYDGKHYSPAQFTDNALIVNGFSKTYAMTGLRIGYVAGCEDIIEELLKVHQYNTACAPSISQYAALAAIRGPQNCVKDMVDEFRRRRDLMFRSLTDMGLECVLPGGAFYMFPYAGDSEEFTKLSLEAGVAVVPGSAFGNEGKGYIRMSYATSYELIEEAMERLKTVCGV

SEQ ID NO: 11195 - protein, 360 aa, Pisum sativum
MDFSTNGSEESELYHAQIHLYKHVYNFVSSMALKSAMELGIADAIHNHGKPMTLPELSSSLKLHPSKVNILYRFLRLLTHNGFFAKTTVKSNEGEEETAYVLTPSSKLLVSGKSTCLSSLVKGALHPSSLDMWGVSKKWFHEDKEQTLFECATGENYWDFLNKDSDSLSMFQDAMAADSRLFKLAIQENKHVFEGLESLVDVAGGTGGVAKLIHEAFPHIKCTVFDQPQVVGNLTGNENLNFVGGDMFKSVPSADAVLLKWVLHDWNDELSLKILKNSKEAISHKGKDGKVIIIDISIDENSDDRGLTELQLEYDVVMLTMFLGKERTKKEWEKLIYDAGFSRYKITPICGFKSLIEVYP

SEQ ID NO: 11196 - protein, 101 aa, Solanum tuberosum
MADKVQRMSSEHGVMIFSKSTCCLCYAVTILFRDLGVDPYVHELDHDSDGKDMEKALMRMGCNASVPAVFIGGKLVGSTNEVMSLHLKGSLIQLLKPYLPD

SEQ ID NO: 11197 - protein, 125 aa, Solanum tuberosum
MGSMFSSPQFTKEQMEIAITKAKQIVSSNPVVVFSKTYCGYCTRVKQLLSQLGATFKVIELDQESDGDEVQQALLEWTRQRTVPNVFIGGEHVGGCDSVLEKHQQGKLLPMLKDAAAIPNNPAKV

SEQ ID NO: 11198 - protein, 108 aa, Solanum tuberosum
MSLAKAKEIVSGNPVAVFSKTYCPFCVSVKDLLSKLGATFKAVELDSEKDGSEIQAALAEWTGQRTVPNVFIGGKHIGGCDATTALHREGKLVPLLTEAGALAKTSTA

SEQ ID NO: 11199 - protein, 192 aa, Nicotiana langsdorffii x Nicotiana sanderae
MDKKPCNSQDVEVRKGPWTMEEDLILINYIANHGEGVWNSLAKSAGLKRTGKSCRLRWLNYLRPDVRRGNITPEEQLLIMELHAKWGNRWSKIAKHLPGRTDNEIKNYWRTRIQKHIKQAENMNGQAANSEQNDHQEGSSSHMSSAGPTEAYSPTSYSANIDTTFQGPFLTETNDNIWSMEDIWSMQLLNGD

SEQ ID NO: 11200 - protein, 192 aa, Nicotiana langsdorffii x Nicotiana sanderae
MDKKPCNSQDVEVRKGPWTMEEDLILINYIANHGEGVWNSLAKSAGLKRTGKSCRLRWLNYLRPDVRRGNITPEEQLLIMELHAKWGNRWSKIAKHLPGRTDNEIKNYWRTRIQKHIKQAENMNGQAANSEQNDHQEGSSSHMSSAGPTETYSPTSYSANIDTTFQGPFLTETNDNIWSMEDIWSMQLLNGD

SEQ ID NO: 11201 - protein, 480 aa, Escherichia coli
MAISTPMLVTFCVYIFGMILIGFIAWRSTKNFDDYILGGRSLGPFVTALSAGASDMSGWLLMGLPGAVFLSGISESWIAIGLTLGAWINWKLVAGRLRVHTEYNNNALTLPDYFTGRFEDKSRILRIISALVILLFFTIYCASGIVAGARLFESTFGMSYETALWAGAAATILYTFIGGFLAVSWTDTVQASLMIFSLILTPVIVIISVGGFGDSLEVIKQKSIENVDMLKGLNFVAIISLMGWGLGYFGQPHILARFMAADSHHSIVHARRISMTWMILCLAGAVAVGFFGIAYFNEHPAVAGAVNQNAERVFIELAQILFNPWIAGILLSAILAAVMSTLSCQLLVCSSAITEDLYKAFLRKQASQKELVWVGRVMVLVVALVAIALAANPENRVLGLVSYAWAGFGAAFGPVVLFSVMWSRMTRNGALAGMIIGALTVIVWKQFGWLGLYEIIPGFIFGSIGIVVFSLLGKAPSAAM

SEQ ID NO: 11202 - protein, 782 aa, Triticum aestivum
MGSSGCPEIVELVDEAKDARPGGVTHLRVRVKPVGQEHGGRSCSVEDDLDRLLRSFNVRTSARASGQTSTDKRLIALGKAPMSSSEIVESVSLKQALRKMCISQASEMAAMKRTSKPAAVSNTPESGAIKKLYASVVVPTDEDQDGKSKVEKAVALPDKVVVSSPVKLVEASKKVHSKGSANKHVRSASPTKAKVQKTSIQDVISNKSLEASEDPSAGRAVAKQRKGKSPKASSPRAVPVGGSRLVFRSKSSTKKKVKPEPAAAVASQKHCEAKGSGSHSKKQQEALQDEPKTPAPNNKKGADGSLGPEGVDFGKGCYVSGIPSSQPGELSRSKEKGESSQSSKSSIGDYSTSTSISEDSYGSFSANGSRPHMSKDVRWEAMKRIAIQQGTLGLKNFKLLKQLGCGDIGTVYLAELVGSDCMFALKVMDIEYLISRKKMLRAQTEREILQMLDHPFLPTLYSYFTTDNLSCLVMEYCPGGDLHVLRQKQPTRCFSEAAARFYVAEVLLALEYLHMLGVIYRDLKPENILVREDGHIMLSDFDLSLRCSVNPVLVRCSSVGRDEPPRPSGPCAESCIDPLCIQPSWANSSCFTPRLVSSTPSRTRRAEPLKKPSLPQLVVEPTDARSNSFVGTHEYLAPEIIRGDGHGSSVDWWTLGIFLYELLYGKTPFRGPGNDETLTNVVSQGLKFPDSPAVSYQARDLIRGLLVKEPELRLGSRKGAAEIKRHPFFQGLNWALIRWTAPPETPKSVDASTLTAAVARKKKEGKCLEFRMNGDDIEFELF

SEQ ID NO: 11203 - protein, 325 aa, Nicotiana langsdorffii x Nicotiana sanderae
ICTTLNKVCSSGLKATMIAAQTIQSGSNDIVVTGGMESMSNVPKYLPQARKGLRLGHDTIVDGMLKDGLWDVYNDFGMGVCAELCADQYKITREEQDSYAIQSFERGIAAQRSGAFAWEIVPVEISGGRGRPSTVVDKDEGLIKFDASKLKKLRPSFKENGGSVTAGNASIISDGAAALVLVSGQKALELGLQVIGRIRGFADAAQAPELFTTAPALAIPKAIKNSGLESSQIDYYEINEAFSVVALANQRLLNLNSGKLNAHGGAVSLGHPLWCSGARILVSLLGVLKHKNGKFGVAGICNGGGGASALVVELMPIRMVARSSL

SEQ ID NO: 11204 - protein, 497 aa, Oryza sativa
MATCLDSLGPLLGGAANSTDAANYICNRFTDTSSAVDATYLLFSAYLVFAMQLGFAMLCAGSVRAKNSMNIMLTNVFDAAAGALFYYLFGFASRRTPSKGFIGKQFFGLKHMPQTGYDYDFFLFQWAFAIAAAGITSGSIAERTRFSAYLIYSAFLTGFVYPVVSHWFWSTDGWASAGRLTGPLLFKSGVIDFAGSGVVHLVGGIAGLWGAFIEGPRIGRFDAAGRTVAMKGHSASLVVLGTFLLWFGWFGFNPGSFTTISKIYGESGTIDGQWSAVGRTAVTTSLAGSVAALNHAVRQEMADGALERDRRLQRSPRRVRAITAGCSVVDPWASVICGFVSAWVLIGCNKLALMLKFDDPLEATQLHGGCGAWGIIFTALFARKEYVELIYGVPGRPYGLFMGGGGRLLAAHIVQILVIVGWVSATMGTLFYVLHRFGLLRVSTSTEMEGMDPSCHGGFGYVDEDEGQRRVRAKSAAETARVEPRKSPEQAAAGQLV

SEQ ID NO: 11205 - protein, 495 aa, Oryza sativa
MATCADTLGPLLGTAAANATDYLCNQFADTTSAVDSTYLLFSAYLVFAMQLGFAMLCAGSVRAKNTMNIMLTNVLDAAAGALFYYLFGFAFAFGAPSNGFIGKHFFGLKQVPQVGFDYSFFLFQWAFAIAAAGITSGSIAERTQFVAYLIYSAFLTGFVYPVVSHWIWSADGWASASRTSGSLLFGSGVIDFAGSGVVHMVAACRTLGRPHRGPPHWRFDHAGRSVALRGHSASLVVLGSFLLWFGWYGFNPGSFLTILKSYGPPGSIHGQWSAVGRTAVTTTLAGSTAALTTLFGKRLQTGHWNVIDVCNGLLGGFAAITAGCSVVDPWAAIICGFVSAWVLIGLNALAARLKFDDPLEAAQLHGGCGAWGVIFTALFARKEYVDQIFGQPGRPYGLFMGGGGRLLGAHIVVILVIAAWVSFTMAPLFLVLNKLGLLRISAEDEMAGMDQTRHGGFAYAYHDDDASGKPDRSFGGFMLKSAHGTQVAAEMGGHV

SEQ ID NO: 11206 - protein, 578 aa, Physcomitrella patens
MGNISGRPRKNRGHGTKGMNLGRPTDPRQKNESERPMYEGSTQRSSAVASSYGGGTQHKQDGSTRPATTGSTHAEGGHAARPSSGATPSERPPGPMSAPMPRPRPTSYSANGVLGKPLVDIRQTYSLGRELGRGQFGVTYLCTHKTTGEILACKSIAKRKLTTKEDVEDVKREVQIMHHLSGTPNIVDLKGVYEDRHSVHLVMELCAGGELFDRIIAKGHYSERAAADLCRVIVNVVHRCHTLGVFHRDLKPENFLLSSEAEDAQLKATDFGLSTFFKPGEVFHDIVGSAYYVAPEVLRRNYGPEADVWSAGVIVYILLCGVPPFWAETEQGIFDAVLRGHIDFVSDPWPKISSGAKDLVRKMLNMNVKERLTAYQVLNHPWMEEGGDASDTPLDNAVLTRLKNFSTANKMKKLALKVIAKNLSEEEIVGLRELFKSMDTDNSGMVTFEELKDGLLRQGSKLRESDIRELMEAADVDGNGKIDFNEFISATMHMNKLEMEDHLFAAFSHFDTDGSGYITIDELQEAMEKNGMGDPQTIQEIINEVDTDRDGRIDYDEFVAMMRKGNPITEDGGKHRHR

SEQ ID NO: 11207 - protein, 545 aa, Physcomitrella patens
MGNQCVGAIGGPYKQEKAHHHVGHGRDGGVRGVGHGQGQNQQHYRQQNVQERGVETTTTRTAPPVTMPKPRPVNVAAGTVLGKPLSDVRSVYTLGKELGRGQFGVTYACTNIKTGEHLACKSIAKRKLISKEDIEDVRREVQIMHHLSGTPNVVELKGVFEDKHHVHIVMELCAGGELFDRIIAKGHYSERAAAALCRTIVSVVHRCHSLNVFHRDLKPENFLLANKAENSSLKATDFGLSVFFKPGEVFHEIVGSAYYVAPEVLRRNYGPEADVWSAGVIVYILLCGVPPFWAESEQGIFDAVLKGYIDFKSDPWPKVSAAAKDLVSKMLKQDPKERLTAQEVLKHPWMKEDGDAPDEPLDNAVLTRLKNFSSANKMKKLALQVIAQSLSEDEIMGLKEMFKAMDTDNSGTITFDELKEGLHRQGSKLVESDVKKLMEAADVDGNGKIDFSEFISATMHMNKVEKEDHLAEAFQHFDTDGSGYITVEELQEAMAKNGMGDPETINEIIREVDTDNDGRIDYDEFVAMMRKGNEVPQMTTRRHRR

SEQ ID NO: 11208 - protein, 628 aa, Physcomitrella patens
MGNVSGRQSKNRGQQGGMSQEGSADTRFKSESERPRAEGSNQRSSATSSSRGASTHPNQGGSARPASTGSAHTGSAHNASTHHNQGGSTRPASTGSTHTGSSHNASTHSNQGGSTRPASTGSSHGESGHSARPSSGTAPAERPRVPMAAPRPRSVSNVGVLGKPLVDIRQTYSLGKELGRGQFGVTYLCTHKETGEKLACKSIAKRKLIAKEDIEDVKREVQIMHHLSGTPNIVDLKGVYEDRHSVHLVMELCAGGELFDRIIAKGHYSERAAADLCRVIVNVVHRCHSLGVFHRDLKPENFLFASKDEDAPLQATDFGLSTFFKLGEVFRDIVGSAYYVAPEVLKRNYGPEADVWSAGVIVYILLCGVPPFWAESEQGIFDAVLKGHIDFESEPWPRISSGAVDLVRNMLNPNVKERLTAYQVLNHPWMQEGGDASDEPLDNAVLDRLKNFSAANKMKKLALKVIANSLSEEEIVGLRELFKSMDTDNSGMVTFEELKQGLIRQGTGLKEADIRKLMEAADVDGNGKIDFHEFISATMHMNKTEKEDHLWAAFKHFDTDNSGYITHEELQEALENSGMGDPQAIQEIIREVDTDNDGKIDYDEFVAMMRKGNPDTEDGVMVVPPRHR

SEQ ID NO: 11209 - protein, 167 aa, Noctiluca scintillans
MSHDDETFESTESGAALVFPQQAGEIRRGSHIMIKGHPCKVAEVSTSKTGKHGHAKAHIVALDLFTNKKYEDLCPTSHNVEVPFVNKTEYQLLSADGDTGEVQLLTESGETKDDISLPTFVKIGEPTDEDKKTTAEILAAVDNGKENTCIVLSACGQEKIIQLRIGN

SEQ ID NO: 11210 - protein, 170 aa, Oxyrrhis marina
MGDDIETFEATDAGASLTKPISCGDLKKGYHVVIKGHPCKISDISFSKTGKHGSAKGHMFGIDIFTGRKYEDVQPGHAAMEEPFVTREIYQLINVDEDAGSVSLLLPDGTTKDDLNLPDVPIPGQAEPSDDDRDRTEKIKTMFNDGKSILVVVIGALGMEKIMDVQEGRD

SEQ ID NO: 11211 - protein, 894 aa, Marchantia polymorpha
MRRSSCLVGLGSKKPRMAGTGLRREVNGSGKLFSLYTVVSLASVWLLSVGVVDGQASSTVQTNDTASFIPATNVWINCGGTSNASVPNVGLFLTDTTGYISEGILATNSVPTNNDNNPYPDLLNTARIFAGQSAYKIPVVPGNVWIRLWFYPVTYQTYKPSNGLFSVTANEYTLLMNLTQTDGVFIYKEYMIQAKTNILTLTFIPAALDKFAYVNGLAVVSAPATLLPSNVYLVPKQAVTFSMDNNGVETMYRLNVGGGTVSPSNDSFLTRQWEGDQKYLYGAAQGVALSPVAPNLIVYPNDVPRWMAPASVYATARVLGTSGVAAALANITWIFDIDPGYAYYVRLHFAELQHNSIGQRVFNVFLNNGSAFPFFDVVAYGGGNPETAVFLDYVLTMYDFTVDKLWVQIGPAKDSSQFADCILNGLEIFKINNTNSSLAGTAIHIPLASDSGGGKSSNIGTIIGAAVGGGVALMAILGAIFFFCCAPAKGGVKKQSSPAWLPLPLHGGNSESTASKISTTASHKSGTGSYVSSAASNLGRYFTFAELQEGTNNFDEELLLGVGGFGKVYKAEIDDGVKVAVKRGNPRSEQGLTEFQTEIELLSKLRHRHLVSLIGYCEEHCEMILVYDYMANGPLRGHLYGTDLPPLTWKQRLEICIGAARGLHYLHTGAAQGIIHRDVKTTNILLDENFVAKVADFGLSKTGPSLDRTHVSTAVKGSFGYLDPEYFRRQQLTEKSDVYSFGVVLMEVVCARPAINPALPREQVNIAEWAMQWQKMGMLEQIIDPKLVGYINPESLRKFGETAEKCLAEQGIDRPAMGDVLWNLEYALQLQENSMENRLMEGSTNHSIELRPLRTPEPEEADLTTTNHSIDSEEESEDATASAVFSQLVNPQGR

SEQ ID NO: 11212 - protein, 852 aa, Marchantia polymorpha
MARSRCTAGLVLVLAITAATLSLTFCSLEEGVALHNMMTKWNVNIPSWTPGSDPCDGWELILCTNGRVTSLNLTLAGISGELPEEIGVLTELETLDLSENDFRGSFPDSLANCQKLRVLDVQECNWNVPFPSVFLKLSNLEYLSAASSGLSGRLPEEFYAMKSLKYIYLGNNTQLTGNLESFTLMSNLVNLTVWSIKFDDYVLPEKLSTLKNLQYFNCHDCNLHGGLPESYGDLTNLIEFNVRRNYLTGGIPESFKKLTKMENFRVDTNSLLGPFPNWMFSAWPKLSSLYISRNQFYGTPYNISYLETRFNLTSRFKILRWDCNYLEGNQPCGNAGGNNCSIETVANTVGEVVEILKFAFNPNCYDDVPTDIISQVGYCNAHTLTCDAFYNEVVNQKVCPACPSSQTLAAGSTVDSGCLCHAKGSDSGSGFPVNAVVGLVVGLSSLFIIILGLVIWKRRKHFSFFDIFSNKEDAFDEEWEMPASVHRFSVEELARITEDFNDSHIIGHGGFGKVYAGTLDDGRMVAIKRASAGSLQGVKEFRNEVTLLSRLHHRHLVRLEGFCAEKEFQVLVYEFMKKGNLATHLYGDHAKFGEKTKLGSPLPWYKRLEIAYGVAQGLEYLHSFADPPVIHRDVKPSNILLDEHMMAKLADFGISKESPELDTHISTRPAGTAGYLDPEYFLRRQLTTASDVYAYGVVLLELVTGQVAIDHTRDDEYNLVEWAKKRFRTAGIISIIDPSIADDYSKDAFTQITELALRCSSFSKNERPTMKEVIEALDPLIVPKSTKSSSSRTESSSFTEKDWLLAKKDLFRKLHVTLDSTKYSSDSSLPSTGSDVARTFNVMDMSQDFAPR

SEQ ID NO: 11213 - protein, 632 aa, Marchantia polymorpha
MQIGQLHSRLVFSFRLRDSSRQSRLTGITPSNVFYLLLIVLLFSPCAALTTYQQTTVDALLAFKNGVKNPPVLSSWIIGDPCKGKWKGVECSTIGKTRVITSLKLSNFGLDGTITPRLGDLITLTTLWLDSNSLRGPIPSDLGKLENLTSLRLANNSLNGSIPPSLTSLSNLRELYLSNNDLSGTVPFNASTAGVINIVVDGNNELCTLTPGFDLPVCGPSLAPALIFGPVASIPKSSKRGVHVAAIAGGVAGALALVIATIVLVSCCLLRAKSWPSATSDTGSSDPSAQVDWAKGPEGPIARSVAPESDTSKARYFSLEELEHATKKFSANNKIGRGGFGEVYKGLLEDGTIVAVKGRQGAATQDFQAAVEFLSRMRHKHLVNVLGFCQENDQQIVVYDYLPNGSVCGHLYDDNGAPVGKLDFRQRLAIALGAAKGLEYLHTTTPKLIHRDFKTSNVLLDAYLVAKVTDFGLSLLLAEGPHPQEGPVLSSLNGDGTAGFLDPEYYTTQRLTEKSDVYSFGVFLLELVSGREAISQDRPRSEWSLVEWGRSLLQAGDLGALVDRTLGSSFMEVAMRKMVEVGFHCVEETGDRRPSMAEVVKELEEALEKERGLTSGGGEGATTVTLGSELFT

SEQ ID NO: 11214 - protein, 974 aa, Marchantia polymorpha
MELRGSASYSIGLTLALLCLICAVPTTAQPGQLNIDCGHLKNYSDYYFNWVTDTGYISTGYTSGQVWASGQWTDFRFFNDTRKKHCYTLPTLPDTTYLVRASFLYGNFSELYGNVSFDLTINSTYWTTINIAPVVDWYAENLGVEVILRRDVIVRSSGTSLFLCLVRKMGLPFITSIQLRKLADNMYEETKQDQILAVEARWAASSYDEVRFPDDPYDRIWQAVDTNTGVSSDQPVDVYGRHDQNLKIENTTEIPTSSGINRPPSKVMQNAYMWNETTDFAWFYLTNLSDLSGQYYTALYFQEIDELANATSTSGSRTISVSLDGVDSVAKDITVTSEVSMLTAVFETTDTSFNFTFTKDADSNLPPMVNALELYSVYAVDPLAFTAPEDVVALRYLQQSLSGIGNWNGDPCFPQPWDWLTCNSGRPARVVKVRLSNMWLKGTITPNITGLTALTDLWLDRNFIGGYLPDPVGMLSLRTIHVQNNSLIGSIPFGFSILPELQELLVQNNNLSGPIPPGLLAPRNGVNFSFVYDGNEFLSKCLPENGPCLPNSSPSGIGPPGADSDRKKAGMSAALIVGAVAGGVGVVLALFFFYCCCLKKTPHADLDKGLGAVGMLKADKDGSQQLQARAFNLAEITTITHNFVRKLGQGSFGPVFYGKLPDGTEVAVKVNAADSSQGTEEFVNEVVLLSRVHHKYLVSLVGYCEAPQQHILVYAFMPNGTLTEHLHGDKAKTEPLTWMERLEIALNSAQGLEYLHAFCNPPIIHRDIKPSNILLDNNLMAKVADFGMSKSAPEDSRTGFSTAVKGTLGYLDPEYLSGWRLTTKSDVYSFGIILLELITGRKPTSVIHFADGTQGNFMGWAKSAQRSGDIHSIVDPDLEGKFNTEAMWKVAEMAWASVEAQGTSRPDMGEIVRGLKEAIALENSDISSKVPGQHDLSYSSSRASYSSSAPLKSQPSYSSISTWDADMAQHHQPR

SEQ ID NO: 11215 - protein, 905 aa, Marchantia polymorpha
MMAFVAEGYRVPYLRIASALLALAVIACFPVSSAERSGLSFACGAPEGFTTNSVLWKSDKDIAPAKSKIAKIGTDYVRYFSEYSDANAHQNLHCYDKLPSITSEGPILLRVTFEYSNYDGLDAPPEFQMWVGASEVAYVNLKKDDPWVEEAVLKYSSDSSTQVLCLVAVKGAPAISFIELRPLPADAYSAGHLLRTLKRIDCGNDNATRRVRFPQDVYDRIWDVDANFPSNSDSFASKVTIDGEDVPERPPMAVLETSRVPSSGTRLAYKFDTETTGFFEIKVYTPSTIPSTLNVNGVSSTESPVVGREVQVTSVSRVPDSSGGVEVVLQGSNGLKPQINALEVFQEIDGIFSNDADAINAIKAYYNIVSNWFGDPCLPVPWNGLECSSDSRVTSLDLSGQNLIKPMNPKIKSLTRLKSLNMSFNKFDSKIPDLTGLINLQVLDLRKNDFFGNLDVLSGLSALTQLDVSFNPRLSGETPSALKRTNLQIDAQGTCVDQPAGCNLSPSPEVSSLLNKNRTGLIVGVVVAVVLAILLALVICIFLIWRRKKPRAGRGEVEGGVDLRNWTAAKVFTFKELETATNHFKKKIGEGSFGPVYLGVLSNGQKVAIKMRHDTSALGADAFANEVYLLSRVNHPNLVSLLGYCQEGKNQYQLLVYEFMPGGTLMDHLYGTMVRLDWITRLRIAIGAATGISYLHNGSDPKIIHRDVKSTNILLDNNLMAKVSDFGLSKLVTRTEATHVTTLVKGTAGYLDPEYFTTNQLTEKSDVYSFGVVLLEIICGREPLTGNRAPDEYNLIAWAKPYLLAKTYEGIVDRGLQNNYNSRSMSLVASLALRCIERDSKNRPTMLQVLRELEEALQYEDRPERTLASPSQPDSAAFDFKSTASDTPPDSAPQLANVPSFTFPR

SEQ ID NO: 11216 - protein, 1003 aa, Closterium ehrenbergii
MAAPQPNAIVHLLVVVILSGVLFSGSNVEAKTTKDEIVALEAVKGALRPLTLFASWKGDPCDGAWMGVTCDDNKPQHVVGLKLASLGVTGSISTAIGALTALQWLNLEKNSISGPLPKEVGALGSLLHLELESNRISGPVPKSIKNLNLLTHVDISKNLFTGTAPVFSPTAPLQYLSYSINDFVGPFPESTLSHSSLRLLSIGANGFFGPLPTDFSSLQFLTRLVLGQNDFSGPLPDSLGHLPRIRALDISNNNFSGPIPASYSNIRRLKIKGNKYLVLAPASASAPAPSAEAPASASASAPDSASASAPASASASAPASESAPAPASSSSFSPSSLPAPKSKRAPHSKPAPKSKRAPTSRPLPKHSPPKPSYPPPSKPTPKPSPSKPSPKAPASAPASAPGSAPGAVRVCDTCTPTQLAWSSSADGGGSCLCVYPLRFALRMSMNYSNFDEHAQTDLEMQLANIFAVNKGQVRLLAAQPGSVIASMALGPDSPATTLQPGTVERVTAILKGTSNTQLSLVGFGFIEVLTVEAPAEMLRPPPTQAPGPDGSLGNMESGSPWGTGAIIGVTVGAVAVVALLVLIIVLWRCLPKRKRVSSASPANATKAAAVAAAAAAASNKKKEAARQQLQSWSAGTPSRGPGGSTPLHVPAGSKSPSTRRVPGVVVLSLPELQMATDTFAAERSIGSDPLGTTFIGTLPSGQEIAVKRVEPSVVEGQSDDDFMAVAATMARLKHPNVVQLQGYCIDYGERILVFEHYPNGSLFDHLHHRNHDATKDHGQKLTWQTRIEIAVATARALVYLHEECVPSIIHRNISSRNILLDKRLRARVAGAGLSFLNPVGADEKSMSDQLVGGFAYNAPEYAMSGIYTAKSDVYSYGVVLLELLTGRKPVDPSKPKPESSLVRWAAPLLHDVAELEAILDQKICGPLPDTAKLTTYAEIITRCIQPEPEFRPTMSKIVNDLTRKVLQPSGSRKNGGLPPPSAGALVPTGPGSSAASDTSSMRM

SEQ ID NO: 11217 - protein, 1130 aa, Nitella axillaris
  misc_feature (298)..(298): Xaa can be any naturally occurring amino acid
  misc_feature (439)..(441): Xaa can be any naturally occurring amino acid
  misc_feature (602)..(604): Xaa can be any naturally occurring amino acid
  misc_feature (618)..(618): Xaa can be any naturally occurring amino acid
  misc_feature (624)..(624): Xaa can be any naturally occurring amino acid
  misc_feature (629)..(629): Xaa can be any naturally occurring amino acid
  unsure (1)..(1130): unsure at all Xaa locations
RDTQHVRAVIGRDPRNFQQSTWHPRLCSNELAGVVRMLSAISIGSDGTVKRRMGCSTVRRRACPLWLIPSGSSSHMENQGGLLSQCQNLMWRKRVLMLYLVLAGMVTVLGPAPAFGQQSLLGRGATDNVDPIMYNCGGPVITDDGFGRRWAQDPLIAVIKNSCTGQMVLTPDGANLSNPVYLCAIFFRNKIQYNLATVAGLRYFLRLHFSGNFADTSFNPADCAFNVTVKMGNETVVLLSNYSVYKPTVGMANPVLVIVEEFLLTGNGTPMEVSFIPYNQAKYGLISGIELAAAPLLXGDDALPAGYSGHTEKRINCGSRLTEAFPKQQEDRTMRWWGKDTQAGVDSPPYTAPLSLSDKPPFYVPQEVLLTESFPLNGSSIEYSFNLSKGSGNYLVRLYFIEQGNPQLQLGQRAMRIFTNGQAAVTNYDIFRESNGAYXXXITLKKEPLSSHPPKVNGLEIIRLWQGQTDLPDQSSIPGSVTAGTFPPLNSVPLLLSLKNNNAGNNARLTDWDAANPPCGPNPWSGVGCTYGAVTVLDLSGVEGLGGEIPAELGQLTSLRELVLSGQNFVGAIPASLGNLVGLVKLRLNGNPGLTGSIPESXXXLLTRLVQLDVMNTXLTGEVXKALLXSPTLLNFRSSPGLCPAGGAQRTRNLPRCSAANSPRFEGRVIASILGAVAATCVLIGAGVFMYFKRCRDHNFLGVMPSTNIGREKSNGGVALGGTTRKLGQVFTFAEIEQATNKFDHRRVLGTGGFGSVYKGQLVDGTLVAVKRGSAESRQGAREFQTEINTLSKLRHKHLVSLVGYCDENGEMILVYEYMANGSVRDHLYIDDEEWSMTKSSHQFTLDWRQRLLIGIGAARGLDYLHSGAQEMIIHRDVKSTNILLDENFLAKVADFGLSKLGPRMDETHVSTMVKGSFGYLDPAYFKSQQLTEKSDVYSFGVVLLEMLTAKPPISQGAPREQVSLVDWARPYLLAGRAEEIVDRRLANTYDVQSLHKVAEVALRCLSENRESRPSMSSVLPGLEDALILQDTSGSVILNMPMRPSMPHPAHHAHHLSSNSLDDHHHHHHHHHRRHLHPYGSGHHMQHLSSISTNHIIPSRGDFENDFDHMDDSLSGTSDPPSMASPLTAR

SEQ ID NO: 11218 - protein, 352 aa, Nitella axillaris
MGRLGKFAQDMPGFVWCCFCFRGVEDEKYHPPETDPEGASPLPKPKPTRPLPIQAPSYTLEEIKHATNNFETKLGEGSYGRVFHGRLNGRAAAIKQLDVSSQSDSEFLAQVSIVSRLKHPNVVELLGYCVHGQQRYLAFEFAPKGSLYDLLHGRKGVKGAQPGPPLPWLARVQIALDAARGLEYLHTRVPHPVIHRDVKSSNIMLMEDMTCKLGDFNPSQQAPDVAPRLHSTRVLGTFGYHAPEYAMTGQLTAKSDVYSFGVVLLELLTGRKPVDHTMPRGQQSLVTWAGPRLTEDKVKQCVDPRLKGEWELKSVGKYAAIASMCVQFEAESRPPISTVARRLANIVQPPAE

SEQ ID NO: 11219 - protein, 203 aa, Populus deltoides
MGRGKVELKRIENSASRQVTFSKRRNGLLKKAFELSILCEAEVSLIIFSPSGKFYQFSSHDMERSVARYRSEVGLPGTNDQRSRSLEFWRSEIEELRRTINKTEAQLRHFIGEDIAPLGLKELKQLERQLKTGVERIRSKKKRVISEHIKLLKSEQRALQEENARLQKRLHELPDANVSSRIPEPNACNAFHQQRIFLDGSHH

SEQ ID NO: 11220 - protein, 581 aa, Paenibacillus polymyxa
MSAQIPEVRSTNELREKWMKPEVITGSEILLRSLLLEGVDCVFGYPGGAVLYIYDAMYGFKDFKHVLTRHEQGAIHAADGYARASGKVGVCIATSGPGATNLVTGIATAFMDSVPLVVITGNVISSLIGTDAFQEADITGITMPITKHSYLVRDVEDLPRIIHEAFHIANTGRKGPVLIDIPKDISAAQTLFVPQTGPVTMRGYNPKVLPNKIQLDKLTQAISEAERPFILAGGGVVYSGGHEALYEFVRKTEIPITTTLLGLGGFPSGHELWTGMPGMHGTYTSNQAIQQSDLLICIGARFDDRVTGKLDGFAPQAKIVHIDIDPAEIGKNVAADIPIVGDVKAVLELLNQDVKRADRADAWRAQIQHWKNEKPYSYKDSETVLKPQWVVELLDETTKGGAIVTTDVGQHQMWAAQYYKFNQPRSWVTSGGLGTMGFGFPSAIGAQMANPDRLVISINGDGGMQMCSQELAICAINNIPVKIVIINNQVLGMVRQWQELIYNNRYSHIDLAGSPDFVKLAEAYGVKGLRATNKEEARRAWQEALDTPGPVVVEFVVSKEENVYPMVTQGSTIDQMLMGDE

SEQ ID NO: 11221 - protein, 493 aa, Mentha x piperita
MAALLVFFSVSLILLAVLFHKRKSSLSSRKRPPPSPLRLPVIGHFHLIGALSHRSFTSLSKRYGEVMLLHFGSAPVLVASSAAAAREIMKNQDVIFASRPRLSIFDRLMYSGKGVAFAPYGEHWRNARSMCMLQLLSAKRVQSFGGIREEETSAMIEKIRRSKPTTVVNLSEMFMALTNGVIHRAVLGRKGDGGDDFNRILIKVIKLLGSFNVGDYVPWLSWINRINGVDAEVEKVGTKLDGSMEGILRKYRRKKVGDDETNFVDTLLQFQRESKDTDPVEDDVIKALIFDMVSAGTDTTFAALEWTMAELIKNPRTLKTLQNEVREVSRNKGGITEDDVDKMPYLKAVSKEILRLHPPFAILLPRELTQDANMLGYDIPRGTVVLVNNWAISRDPSLWENPEEFRPERFLETSIDYKGLHFEMLPFGSGRRGCPGSTFAMALYELALSKLVNEFDFRLGNGDRAEDLDMTEAPGFVVHKKSPLLVLATPRQS

SEQ ID NO: 11222 - protein, 563 aa, Aegilops umbellulata
SILRGLKEKYEGHHGVRIQDRALVIAAQLSSRYIMGRHLPDKAIDLVDEACANVRVQLDGQPEEIDNLERKRIQLEVELHALEKEKDKASKARLVDVRKELDDLRDKLQPLQMKYRKEKERIDEIRSLKQRREELQFTLQEAERRMDLARVADLRYGALQEVDAAIAKLEGETGENLMLTETVGPDQIAEVVSRWTGIPVTRLGQNEKARLIGLADRLHQRVVGQYEAVNAVGEAVLRSRAGLGRPQQPTGSFLFLGPTGVGKTELAKALAEQLFDDENLLVRIDMSEYMEQHSVARLIGAPPGYVGHEEGGQLTEQVRRRPYSVILFDEVEKAHVAVFNTLLQVLDDGRLTDGQGRTVDFRNTVIIMTSNLGAEHLLAGMVGNSMKVARDLVMQEVRRHFRPELLNRLDEIVIFDPLSHEQLRKVARLQMKDVAVRLAERGVALAVTDAALDVILSLSYDPVYGARPIRRWIEKRIVTELSKMLIREEIDENSTVYIDAAPSKDELTYGVDKHGGLVNARTGHKSDILIQVPNGAVGGDAAHAVKKMKIMQDGGDVDDMEEE

SEQ ID NO: 11223 - protein, 563 aa, Aegilops umbellulata
SILRGLKEKYEGHHGVRIQDRALVIAAQLSSRYIMGRHLPDKAIDLVDEACANVRVQLDSQPEEIDNLERKRIQLEVELHALEKEKDKASKARLVDVRKELDDLRDKLQPLQMKYRKEKERIDEIRSLKQRREELQFTLQRPERRMDLARVADLRYGALQEVDAAIAKLEGETGENLMLTETVGPDQIAEVVSRWTGIPVTRLGQNEKARLIGLADRLHQRVVGQYEAVNAVGEAVLRSRAGLGRPQQPTGSFLFLGPTGVGKTELAKALAEQLFDDENLLVRIDMSEYMEQHSVARLIGAPPGYVGHEEGGQLTEQVRRRPYSVILFDEVEKAHVAVFNTLLQVLDDGRLTDGQGRTVDFRNTVIIMTSNLGAEHLLAGMVGNSMKVARDLVMQEVRRHFRPELLNRLDEIVIFDPLSHEQLRKVARLQMKDVAVRLAERGVALAVTDAALDVILSLSYDPVYGARPIRRWIEKRIVTELSKMLIREEIDENSTVYIDAAPSKDELTYGVDKHGGLVNARTGHKSDILIQVPNGAVGGDAAHAVKKMKIMQDGGDVDDMEEE

SEQ ID NO: 11224 - protein, 152 aa, Vitis vinifera
MKGGKSKAAEVKRADSNARLSVKKKGAAAVGKKTAKKEKAVKDPNKPKRPASAFFVFMEEFRKQYKEKHPANKSVSVVGKAGGDKWKSLSEAEKAPYVAKAEKRKTEYNKSMQAYNKRMAEGPTAAEEEESDKSRSEVNDDEEDEDESGEVN

SEQ ID NO: 11225 - protein, 264 aa, Vitis vinifera
MCDYSSNPSSDFALLESVRRHLFDDSDSRRFDAPLYCRSNSFSSLFETGGELPLKEDDSDDMVIYGFLRDAASGGWTPTLAPLFSETASHGFSTAPAVATVDPPAKLPAPAVVPAKGKHYRGVRQRPWGKFAAEIRDPAKNGARVWLGTFETAEDAALAYDRAAYRMRGSRALLNFPLRVNSGEPDPVRVTSKRSSPEPSSSSTSSSSSDNSSPKRRKKVSSLAAPAVAPATAQTGIEIGKSMEGSQAGYEVAQLTHGPQLLVR

SEQ ID NO: 11226 - protein, 489 aa, Vitis vinifera
MASIKRQLSEPEEPESKKPKAALSDSPEHKTKQRVVLNPADCDLDFNIVGDGLQGSALHDHGFAYCWSGARGNVGITGGKYCFGCKIISTQPVDMEDTPPDQQHVCRLGISRGDDAVGNLGETEHSFGFGGTGKFSVAGKFSNYGEKFGVGDTIVCAVNLETKPLASISFSKNGKWLGVAKEFDAGVKGLGVVDSPMRQLHWESALFPHVLLKNVMVQVQFSTEEGLVPEEGYKPWASALYDGNAIMGPSFSSPRDCEVMMMVGLPASGKSTWAEKWVKEHAEKRYVLLGTNLALDQMKVPGLLRKQNYGERFERLMDRATGIFNTLLSRASKTPHNYIIDQTNVYKNARKRKLKPFANFQKIAVVLFPKPEELKFRAEKRFKEMGKEVPADAVNEMIANYVLPGSKDMPGSDEDFDQVLFPELNRGEAQKCLEEMKRALGTASHLNLKSNFSPYSQESSLQSYNSSSLQNQGAPSGFCLALLHFKIGN

SEQ ID NO: 11227 - protein, 866 aa, Vitis vinifera
MASVEEIRRNAQRPRGPATILAIGTALPDNCFPQVEFPDFFFRVTKSEHLTQLKEKFKLICERTMIKKRYMHLSEKIIKENPNIGASLDARQDIANVEVPKLGKIAAVNAIGEWGQPKSRITHLVFCTTTSLHMPGADYQLAKILGLEPKVKRVMLYLQGCFGGGTVLRMAKDLAENNVVGILVGQALFGDGAAALIVGSDPDTLIERPLFQLISADQMFIPDSENAVEGHVCEMGLYIEKCMVEAFGPLGINDWNSLFFIVHPGGRAILDQIEAKLSLKKEKLEVSRHVLREYGNIVSSCGSDILVEALEREGVTHVFGYPGGASMGIHEALARSSMIRNVLPRHEQGGIFAADGYARASGRPGVCLTSSGPGATNIISGIADANFDSIPIVAITGQVPRGLMGTDAFQEVPLIDITRPITKFNYLVLDVEDIPRIVKEAFLLATSGRPGPVLIDIPRDIQKELVVPNWNKPIMLPGNASRLPKLQEKAHLEEIVRLISVSKRPVVYAGGGCMNCSEELRRFVGLTGIPVASTLMGLGIFPCTDGLSLHMLGMHGTIQANYAVDRSDLLLAFGVRFDDRVTGKVEAFARNATIVHIDIDPAEIGKNKKPHLSICTDVKLALEGINTILEKNAAKQPTAENKRGKGTKFNDNPPSYRTFGEAIPPQYAIQLLDELTNGNAIICTGVGQHQMWAAQYYKHKNPRHWLSSSGLGAMGFGLPAAMGAALAKPDAIVVDIDGDGSFMMNIQELATIRVENLPVKIMLLNNQHLGMVYQFEYEYGDGDSLHSYMGNPSNQAQVFPDMLMFAEACNITAARVTKKVELREAIEKMLKTPGPYLLDVMVPHQAQVLQLIPDGGTFKDAIKGAQ

SEQ ID NO: 11228 - protein, 493 aa, Vitis vinifera
MGMTRERPMFYWVLICMLFSFVLTEAAPQTALVTKLPGFNGTFPSKHYSGYVTIDENHGKKLFYYMVVSENNPSEDPVVLWLNGGPGCSSFDGFVYEHGPFNFEARTQGDLPQLHLNPYSWSKLSNIIYLDSPAGVGFSYSENLTDYRTGDLKTASDSHAFILKWFELYPEFLSNPFYIAGESYAGVYVPTLAYEVVKGIKGGIKPILNFKGYMVGNGVTDEEFDGNALVPFAHGMGLISDELFQDISNLCQGNYYNSLDENCESKLSKVDKASLNIYDILEPCYHEKSPETSLGNIRLPSSFQKLGETDRPFAVRKRMFGRAWPLRAPVREGLVPTWPQLLNSGSVPCTDDEVATSWLNNKAVREAIHAALESVAGKWELCTDRILYHHDAGSMIKYHKNLTSNGYRALIFSGDHDMCVPYTGSQAWTRSVGYKVVDEWRPWFFDEQVAGYVQGYENNLTFLTVKGSGHTVPEYKPREALAFYSRWLTGRPI

SEQ ID NO: 11229 - protein, 194 aa, Vitis vinifera
MVRGKIQMRRIENATSRQVTFSKRRNGLLKKAYELSVLCDAEVAVIIFSQKGRLYEFSSSNMQSAIERYREHAKQVETNNPELEQYMQNLKQDAESMAKKIELLEVSQRKLLGQGLSSCSLDEILEIDSQLEKSLKSIRARKAQIFQEQIEELKEREKQLLEENARLSQKVNLFLSLNFSSVAVSLICNFFMDS

SEQ ID NO: 11230 - protein, 356 aa, Vitis vinifera
MLDLPCLKALAALGRGAKGAVFLVEAEAGEERLALKAVSRKLVESKSKDNDKNGSNNDKESDYRRICFEQEALRRFRHPLLPRLHGIVCTDRIVGYAIDYCPGRDLNQLRKKQSEKMFSDDIIRFYAAELVLALEYLHGLGIVYRDLKPENVLIQENGHLMLRNSVRTESDSSAKSNSFVGTEEYVAPEIILGSGHDFAVDWWSLGVMLYEMLYGTTPFKGSNRKETFYRILAKAPALVGEATPLRDLIAKLLEKDPKQRIILEDIKGHDFFRGIEWDMVVEIGRPPYIPENEHVEGGFQDLDIESLVQEAFKIGDGDDNKKNSNNNNNNKEGSEKKGAWVEGLNHKSEINDFLIF

SEQ ID NO: 11231 - protein, 148 aa, Vitis vinifera
MGVHISDGAAALVLVSGKKAVELRLQVIAKIAGYGDAAQAPELFTTTPALAIPKAISNAGLKASQIDYYEINEAFAVVALANQKLLGLDPEKVNVHGGAVSLGHPIGCSGARILVTLLGILRQKNGKYGVGGICNGGGGASALVLELM

SEQ ID NO: 11232 - protein, 261 aa, Vitis vinifera
MKRLGSSESLGALMAICPTTDEHSPRNNHVYSREFQTMFDGLDEEGCVEESGQIVEKKRRLSVDQVKALEKNFEVENKLEPERKVKLAQELGLQPRQVAVWFQNRRARWKTKQLERDYGILKANYETLKLNYDAIQHDNEALLKEIRELKSKLNEEKTESNLSVKEELVVSESDEKVKVMEQSETAMVFPDMKDGSSDSDSSAILNEDNSPNAAISSSGKAYQPQFVKMEEHNFFGADESCNFFSDDQPPTLPWYCPDQWT

SEQ ID NO: 11233 - protein, 178 aa, Vitis vinifera
MERACSRGISDEEDGDTSRKKLRLSKDQSAILEENFKEHNTLNPKQKLALAKQLNLRPRQVEVWFQNRRARTKLKQTEVDCEFLKRCCENLTEENRRLQKEVNELRALKLSPQFYMQMTPPTTLTMCPSCERVAVPPPSSEARSHQMATTHHRPIPINPWATATPIPHRPFDALHPRS

SEQ ID NO: 11234 - protein, 2142 aa, Vitis vinifera
  misc_feature (153)..(2125): Xaa can be any naturally occurring amino acid
  unsure (1)..(2142): unsure at all Xaa locations
MTTKAKGKHCSYLPVTEAKAETEADHQLMRDAESGWSSKEDPQQLVSVMESPDFSPPHSDPSRPSLGFPLGTALLLIIIFSLSGIFSCCYHWDKLRSLRRSFSDDRDPEADVRESPSKTKPEYTVNLPNLNLNYRQIIDFCLVITCTLLNSLXXXXXXXXXXXXXXXXXXXXXXXXXXXXXXXXXXXXXXXXXXXXXXXXXXXXXXXXXXXXXXXXXXXXXXXXXXXXXXXXXXXXXXXXXXXXXXXXXXXXXXXXXXXXXXXXXXXXXXXXXXXXXXXXXXXXXXXXXXXXXXXXXXXXXXXXXXXXXXXXXXXXXXXXXXXXXXXXXXXXXXXXXXXXXXXXXXXXXXXXXXXXXXXXXXXXXXXXXXXXXXXXXXXXXXXXXXXXXXXXXXXXXXXXXXXXXXXXXXXXXXXXXXXXXXXXXXXXXXXXXXXXXXXXXXXXXXXXXXXXXXXXXXXXXXXXXXXXXXXXXXXXXXXXXXXXXXXXXXXXXXXXXXXXXXXXXXXXXXXXXXXXXXXXXXXXXXXXXXXXXXXXXXXXXXXXXXXXXXXXXXXXXXXXXXXXXXXXXXXXXXXXXXXXXXXXXXXXXXXXXXXXXXXXXXXXXXXXXXXXXXXXXXXXXXXXXXXXXXXXXXXXXXXXXXXXXXXXXXXXXXXXXXXXXXXXXXXXXXXXXXXXXXXXXXXXXXXXXXXXXXXXXXXXXXXXXXXXXXXXXXXXXXXXXXXXXXXXXXXXXXXXXXXXXXXXXXXXXXXXXXXXXXXXXXXXXXXXXXXXXXXXXXXXXXXXXXXXXXXXXXXXXXXXXXXXXXXXXXXXXXXXXXXXXXXXXXXXXXXXXXXXXXXXXXXXXXXXXXXXXXXXXXXXXXXXXXXXXXXXXXXXXXXXXXXXXXXXXXXXXXXXXXXXXXXXXXXXXXXXXXXXXXXXXXXXXXXXXXXXXXXXXXXXXXXXXXXXXXXXXXXXXXXXXXXXXXXXXXXXXXXXXXXXXXXXXXXXXXXXXXXXXXXXXXXXXXXXXXXXXXXXXXXXXXXXXXXXXXXXXXXXXXXXXXXXXXXXXXXXXXXXXXXXXXXXXXXXXXXXXXXXXXXXXXXXXXXXXXXXXXXXXXXXXXXXXXXXXXXXXXXXXXXXXXXXXXXXXXXXXXXXXXXXXXXXXXXXXXXXXXXXXXXXXXXXXXXXXXXXXXXXXXXXXXXXXXXXXXXXXXXXXXXXXXXXXXXXXXXXXXXXXXXXXXXXXXXXXXXXXXXXXXXXXXXXXXXXXXXXXXXXXXXXXXXXXXXXXXXXXXXXXXXXXXXXXXXXXXXXXXXXXXXXXXXXXXXXXXXXXXXXXXXXXXXXXXXXXXXXXXXXXXXXXXXXXXXXXXXXXXXXXXXXXXXXXXXXXXXXXXXXXXXXXXXXXXXXXXXXXXXXXXXXXXXXXXXXXXXXXXXXXXXXXXXXXXXXXXXXXXXXXXXXXXXXXXXXXXXXXXXXXXXXXXXXXXXXXXXXXXXXXXXXXXXXXXXXXXXXXXXXXXXXXXXXXXXXXXXXXXXXXXXXXXXXXXXXXXXXXXXXXXXXXXXXXXXXXXXXXXXXXXXXXXXXXXXXXXXXXXXXXXXXXXXXXXXXXXXXXXXXXXXXXXXXXXXXXXXXXXXXXXXXXXXXXXXXXXXXXXXXXXXXXXXXXXXXXXXXXXXXXXXXXXXXXXXXXXXXXXXXXXXXXXXXXXXXXXXXXXXXXXXXXXXXXXXXXXXXXXXXXXXXXXXXXXXXXXXXXXXXXXXXXXXXXXXXXXXXXXXXXXXXXXXXXXXXXXXXXXXXXXXXXXXXXXXXXXXXXXXXXXXXXXXXXXXXXXXXXXXXXXXXXXXXXXXXXXXXXXXXXXXXXXXXXXXXXXXXXXXXXXXXXXXXXXXXXXXXXXXXXXXXXXXXXXXXXXXXXXXXXXXXXXXXXXXXXXXXXXXXXXXXXXXXXXXXXXXXXXXXXXXXXXXXXXXXXXXXXXXXXXXXXXXXXXXXXXXXXXXXXXXXXXXXXXXXXXXXXXXXXXXXXXXXXXXXXXXXXXXXXXXXXXXXXXXXXXXXXXXXXXXXXXXXXXXXXXXXXXXXXXXXXXXXXXXXXXXXXXXXXXXXXXXXXXXXXXXXXXXXXXXXXXXXXXXXXXXXXXXXXXXXXXXXXDHFINFHNFQPHPDPHT

SEQ ID NO: 11235 - protein, 224 aa, Vitis vinifera
MCGILAVLGCVDNSQAKRSRIIELSRRLRHRGPDWSGLHCHQDCYLAHQRLAIVDPTSGDQPLYNEDKTVVVTVNGEIYNHKQLREKLTSHQFRTGSDCEVIAHLYEEYGEDFVDMLDGMFSFVLLDTRDKSFIAARDGIGITPLYIGWGLDGSIWFASEMKALSDDCERFMSFLPGHYYSSKRGELRRWYNPPWYSEHIPSTPYDPLVLREAFEKAKVSKGKP

SEQ ID NO: 11236 - protein, 369 aa, Vitis vinifera
MPSPPKWKNGLMTDVPFGVLLSGGLDSSLVASVASRYMLQSEAACQWGSQLHTFCIGLKGSPDLKAAREVANYLGTRHHEFHFTVQEGLDALEEVIYHIETYDVTTIRASTPMFLMSRKIKSLGVKMVLSGEGSDEIFGGYLYFHKAPNKEELHQETCRKIKALHLYDCLRANKATSAWGVEARVPFLDKEFINIAMNIDPEPDLGRIEKWVLRNAFDDDQKPYLPKHILYRQKEQFSDGVGYRWIDGLKDHANEHVTDAMLLNANFIYPENTPTTKEGYYYRAIFEKFFPKNAARSTVPGGPSVACSTAKAVEWDVAWLKNPDPSGRAALGVHECAYEEAVDAKNANLINGTTQKPQEGILEKTTTAI

SEQ ID NO: 11237 - protein, 403 aa, Vitis vinifera
MEGADPSSLANKVAKVAGSINPGEAAAPASLGMAAGPTVLETVKEFAKENGASQVESQLPSGLSDTLKIHLQKVIETQPVMLFMKGSPEEPKCGFSRKVVEILREEKVKFGSFDILLDTEVREGLKKFSNWPTFPQLYCKGELLGGCDIAIAMHESGELKEVFRDHGIETSDLNEAKETKPGSGKGGISESTGLSVTLTSRLESLINSSPVILFMKGKPDEPRCGFSRKVVEILQQEKVDFGSFDILSDDEVRQGLKVHSNWSSYPQLYIKGELIGGSDIVLEMQKSGELERVLAEKGITQKETLEDRVRNLINSSPTMLFMKGTPDAPKCGFSSKVVDALRAENVSFGSFDILTDEEVRQGLKVFSNWPTFPQLYYKGELIGGCDIIMELRNNGELKSTLSE

SEQ ID NO: 11238 - protein, 135 aa, Vitis vinifera
MGESSDSEKVSASNRVYSAEDKERESAAIGYKVVGPLQPSDRVFKPYEPVFAVVQIGSHQFKVSNGDCIYTERLKFCEVNDRLILNRVLLIGSTSQTIVGRPTLPDVAVHAVVEEHVSCSLFFFLLTTTSFLTGS

SEQ ID NO: 11239 - protein, 872 aa, Vitis vinifera
MMGGFDSWISRSVECLILSFFLLLQSTCAQQAFVSIRCLFDKGYIPFWTSLAILFNVSIGVTPIGLVNGSDDSVEVEGVFTARNHHIDFCLLKGTGDPYIYKLELRPLNVLKYLQGGTSSVLKLVKRVDVGNTGEDIRYPVDPNDRIWKAESSSIPSSLLEKTPPNPISSSANVSITTAVPLQVLQTALNHSERLEFLHNDLDIGEYNYNLSLYFLEFIESVDTGQRVFDIYINNVRKQPDFDIMADGSKYREAAFRFTANGSFNLTLVKVSDKSLFGPICNAYEILQVRPWVQETNGEDVNVIMKVKDELLKKNQGNKVLGSWSGDPCLPLVWHGLICNNSINNSPVITELDLSSSGLQGSLPASIVKLAYLEKLKLSDNKFTGVIPEFPASSMLISLDLRHNDLMGKIQESLISLPQLAMLCFGCNPHFDRELPSNFNSTKVTTDYGNCADQGSSHSAQGILIGTVAGGSFLFTIAVGIVFVCFYRQKLVARGKFHEGGYPLTKNAVFSLPSIDDIVFKSIDIQNFTLEYIEIATNKYKTLIGEGGFGSVYRGTLPDGQEVAVKVRSATSTQGTREFENELNLLSAIQHENLVPLLGYCCEYDQQILVYPFMSNGSLQDRLYGEAAKRKTLDWPTRLSIALEYFYCSGLTYLHTFAGRSVIHRDVKSSNILMDHNMSAKVADFGFSKYAPQEGDSGVSLEVRGTAGYLDPEYYSTQHLSAKSDVFSYGVVLLEIISGREPLNIHRPRNEWSLVEWAKPYIRDSKIEEIVDPSIKGGYHAEAMWRVVEVALACIEPYSAYRPCMVDIVRELEDALIIENNASEYMKSIDSFGGSNRFSIEKIERKVVLPPTPTLTDPSPDILQALTPPQPR

SEQ ID NO: 11240 - protein, 490 aa, Vitis vinifera
MGGFDSWISRSVECLILSFFLLLQSTCAQQAFVSIRCCAESTFTEPSTNISWIPDDGWYSNTLGCQNINKPVENYQGDKIRIFKGDLAKKWCYNLSTTKGHEYLIRGTFLFGDSVRTSLAILFNVSIGVTPIGLVNGSDDSVEVEGVFTARNHHIDFCLLKGTGDPYIYKLELRPLNVLKYLQGGTSSVLKLVKRVDVGNTGEDIRYPVDPNDRIWKAESSSIPSSLLEKTPPNPISSSANVSITTAVPLQVLQTALNHSERLEFLHNDLDIGEYNYNLSLYFLEFIESVDTGQRVFDIYINNVRKQPDFDIMADGSKYREAAFRFTANGSFNLTLVKVSDKSLFGPICNAYEILQVRPWVQETNGEDVNVIMKVKDELLKKNQGNKVLGSWSGDPCLPLVWHGLICNNSINNSPVITELHRISSKTLLTRNETCSIQLHVQPGCTYTTTEKHFGNLFCKCCRNLIHKSSFVLLSNRVSFRCLDQGFLLF

SEQ ID NO: 11241 - protein, 232 aa, Vitis vinifera
MFEEYFYCSGLTYLHTFAGRSVIHRDVKSSNILMDHNMSAKVADFGFSKYAPQEGDSGVSLEVRGTAGYLDPEYYSTQHLSAKSDVFSYGVVLLEIISGREPLNIHRPRNEWSLVEWAKPYIRDSKIEEIVDPSIKGGYHAEAMWRVVEVALACIEPYSAYRPCMVDIVRELEDALIIENNASEYMKSIDSFGGSNRFSIEKIERKVVLPPTPTLTDPSPDILQALTPPQPR

SEQ ID NO: 11242 - protein, 414 aa, Vitis vinifera
MGQLCDFCGDQRSMVYCRSDAACLCLSCDRNVHSANALSRRHSRTLLCERCNSQPATVRCVEEKISLCQNCNWIGHGSTTSASDHKRQTINCYSGCPSAAELSRIWSFVLEFLSVDDSNCEQGMVLMSLTENSVGSCSLPPVNNNINDSTVAGRTNAQENVDKSDLWMASSPVPALNPISSSVDQPTDLVNSPTTKLCCSGICDDDDLLYEDFSMADVDLSIENYEELFGVSQNHSEQLLENGGIDSLFGIGNLPGTDASARGAYVAEGSSVVHIKAMQPACSNPISADSIISSKTDPNLCFPPRQAHSSLSLSFSGLTGESSTGDYQDCGVSSMLLMGEPPWCSPCPENSLPSANRDSAVLRYKEKKKARKFEKKIRYASRKARADVRKRVKGRFVKAGDAYDYDPLNQTRSF

SEQ ID NO: 11243 - protein, 221 aa, Vitis vinifera
MCGILAVLGCVDNSQAKRSRIIELSRRLRHRGPDWSGLHCHQDCYLAHQRLAIVDPTSGDQPLYNEDKTLLLLEKLTSHQFRTGSDCEVIAHLYEEYGEDFVDMLDGMFSFVLLDTRDKSFIAARDGIGITPLYIGWGLDGSIWFASEMKALSDDCERFMSFLPGHYYSSKRGELRRWYNPPWYSEHIPSTPYDPLVLREAFEKASSSLFFSCLTTIVLFY

SEQ ID NO: 11244 - protein, 280 aa, Vitis vinifera
MKRLGSSESLGALMAICPTTDEHSPRNNHVYSREFQTMFDGLDEEGCVEESGQIVEKKRRLSVDQVKALEKNFEVENKLEPERKVKLAQELGLQPRQVAVWFQNRRARWKTKQLERDYGILKANYETLKLNYDAIQHDNEALLKEIRELKSKLNEEKTESNLSVKEDNDDSFKDGNGGGRVSVFPDMKDGSSDSDSSAILNEDNSPNAAISSSGNNHHHHLLMSPPSSSLRPTLGNTQKAYQPQFVKMEEHNFFGADESCNFFSDDQPPTLPWYCPDQWT

SEQ ID NO: 11245 - protein, 119 aa, Vitis vinifera
KQKQALAKQLNLRPRQVEVWFQNRRARTKLKQTEVDCEFLKKCCESLTDENRRLQKELQELKALKLAQPLYMQLPAATLTMCPSCERIGGVTDGASKSPFTMAPKPHFYNPFTNPSAAC

SEQ ID NO: 11246 - protein, 406 aa, Haemophilus influenzae Rd KW20
MKMKLPIYLDYAATCPVDERVAKKMMAFLTIDGTFGNPASRSHKFGWQAEEAVDIARNQIADLIGADSREIVFTSGATESDNLAIKGAAHFYQTKGKHIITCKTEHKAVLDTCRQLEREGFEVTYLSPEADGLIDLEKFKAALRPDTILASIMHANNEIGVLQDIKAIGELCRANKTIFHVDATQSVGKVEINLEELAVDLMSMSSHKLYGPKGVGALYVRRKPRVRLEAIIHGGGHERGMRSGTLPVHQIVGMGEAYRIAKEEMASEMPRLKALRDRLYNGLKDIEETYVNGSMEHRLDSNLNISFNYVEGESLMMALRDIAVSSGSACTSASLEPSYVLRALGLNDELAHSSIRFTLGRYTTEEEIDYTINLMKGAVEKLRALSPLWDMFKEGIDLNTIEWSAH

SEQ ID NO: 11247 - protein, 255 aa, Vitis vinifera
MVFTTEGEVPYREGQSIGVIPDGIDKNGKPHKLRLYSIASSALGDFGDTKTVSLCVKRLVYTNDQGEIVKGVCSNFLCDLKPGADVKITGPVGKEMLMPKDPNATVIMLATGTGIAPFRSFLWKMFFEKYEDYKFKGLGWLFLGVPTTSSLLYKDEFEKMKEKAPENFRVDYAVSREQTNEKGEKMYIQTRMAQYAEELWELLKKDNTYVYMCGLKGMEKGIDDIMVSLAARDGIDWTEYKRQLKKSEQWNVEVY

SEQ ID NO: 11248 - protein, 178 aa, Vitis vinifera
MGSKCGGEELPMRPPSPSQGNSTDGNLVKLRLDCSKVDFSGAELKKIMGNEKLAEIALVDPKRAKRILANRQSAARSKERKVRYMAELEHKVHTLQTETTTLSHLLTLLQRDSAELTSRNNELKLRIQAMEQEAQFRDALKEALTLEVHRLQLLGTAEPSGGKVFFSSLCFVRDSGPN

SEQ ID NO: 11249 - protein, 284 aa, Vitis vinifera
MSEEASHGNLWQNHSCDFLNSDSNSGGSGGEKLGEKPPDSSSNSPVENRQGMALVGRKRGRRAKASDGGGGESEHETHIWTERERRKKMRNMFSSLHALLPQLPPKADKSTIVDEAVNYIKTLQNSLTKLQKQRHEMQQGATAVDCEQSIITSQALAPDTRETSLPAGDRSLKNYFSLPTNKPNLLSAPSSSLCFQTWFSPNVVVSMCGNDAHISVCSSRKPGLLATIFYILEKHKLDVLSAHISSTQQRSIYMIHAHVSPTSFPCFNFLIWANDIQLNEGKFP

SEQ ID NO: 11250 - protein, 524 aa, Vitis vinifera
MMEAKPTVLVAEKLGEAGLELLKGFANVDCSYNMSPEELCTKISLCDALIVRSGTKVTREVFESAGRRLKVVGRAGVGIDNVDLSAATEHGCLVVNAPTANTIAAAEHGVALLTAMARNIAQADASVKAGKWERSKYVGVSLVGKTLAVMGFGKVGSEVARRAKGLGMHVIAHDPYAPADRARAIGVNLVTFEEAISTADFISLHMPLTPATSKILNDESFSRMKKGVRIVNVARGGVIDEEALIRALDSGIVAQAALDVFTEEPPPKDSKLVQHENVTVTPHLGASTTEAQEGVAIEIAEAVVGALKGELAATAVNAPMVPAEVLSALAPFVVLAEKLGRLAVQLVAGGSGVRSVKVTYASSRGPDDLDTRLLRAMVTKGLIEPISSVFVNLVNADFTAKQRGLRITEERVVQIANVESKFASAISEVKDGKPHLTKVGSFGVDVSLEGSLILLRHVDQPGIIGKVGSILGEENVNVSFMSVGRTAPRKQAVMTIGVDEEPSREALTRIGNLPAIEEFVFLEL

SEQ ID NO: 11251 - protein, 390 aa, Vitis vinifera
MVSITSLEFKFLVFRYVRESGFTHSAFALGCEAGLSKSTIDGNLVPPGAFLEVNSNHSDVDMDNNFSFLQPLDLITEDLTLDMKRMELVKSICLWICKIGLKTMEISPSSTCLPCEIPSCDVKVLEGLTSEVFACAWSPAGSFLASGSGDSTARIWSITNGPCSTMQNGLLNIVLKHFRGRTNEKNKDVTTLDWNGDGTVLATGSYDNQARIWSRVGMLRSTLNKHKGPVFSLKWNKKGDNLLSGSMDKTAIVWGGNRNNNLNFIEPPLLMLIVGENRPVKTFSGHQDEVNAVKWDPTVSFLASCSDDYTAKVIDNFSLTPFYMKQDDHLHDLKEHTKEIYTIRWSPTGAGTNNPNHQLVLASASFDSTIKLWDVELGCLLYSLNGHSDE

SEQ ID NO: 11252 - protein, 336 aa, Vitis vinifera
MHFNEMVKGSHDSTARIWTIVDGACNSTLQDVLVLTHAGAMTVEDNGFAAICELDWKGDGTLLATGSCTGETRIWTPNGALVASFEEDMGHIVSLQWNQMGNSLLSCGSDKVVVWDINTVGSRQEFSFHSARILDADWRNNISFATCSADRKIHVCEVGLNRPYKTFLGHRAEINGIRWSPTGTLLASCSDDTSIKIWSMNHNSFVRDLRSHKREVYCIEWSPTGPTTDNPNLTLLLASSSFDNTINVWDVERGNPIYGLTRHRNIIYTIEFSPNGEYLASGSLDNWLYVWSVKEGRLIKSYYGGGGVTDISWNKSSDKIAVSFVNKLVCVLDLKM

SEQ ID NO: 11253 - protein, 253 aa, Vitis vinifera
MKRFSSSVSLAPLVSMCSPKEGKNSKNYPVYDSEFQAMLDSFDEEDCAEETGLITEKKKRLSFDQVKALERSFEIENKLEPERKVKIAEELGLKPRQVAIWFQNRRARWKTKQLERDYGILKANYDALKLDYESLEQEKEALVAELRELKAKLQGGNMELNQSVKEEALSRVRTMEIYQESMDWETSKTASSSSLRLNCASLSSPSPMNWFPSKAFQHQFGRMEEQSFFSAEEPCNFFWGDQAPSLHWYFPDQ

SEQ ID NO: 11254 - protein, 652 aa, Vitis vinifera
MEQQQQLNIEDGSKTQRAEWVLNSPEPPGLCHEIVSSIKSAVFPNGGKHSSSSTKQTRSTAAGVVSFLYGLFPILTWGRNYKATKFRNDLMAGLTLASLSIPQSIGYATLANLAPQYGLYTSVVPPLVYALMGSSREIAIGPVAVVSLLLSSMIQNVVDPVANAVAYRKLVLTVTFFAGTFQFIFGLFRLGFLVDFLSHAAIVGFMGGAAIVIGLQQLKGLLGISHFTTKTDVVSVLEAVFRSLHHQWYPLNFVLGCSFLIFILFTRFIGRRNKKLFWLPAIAPLISVVLSTAIVFLTKADEHGVKIVKHIKRGLNPISAHELQFSGQHVGQAAKIGLVSAIVALTEAIAVGRSFASIRGYHLDGNKEMVAMGFMNIAGSLTSCYVATGSFSRTAVNFSAGCETVVSNIVMAIAVFLSLELLTRLLYFTPIAILASIILSALPGLIDIPEAYHIWKVDKMDFLACAGAFFGVLFVSVEIGLLAAVTISFAKIILNSIRPSVEGLGKLPGTDIFCDINQYPMAIKTPGILIVRINSGLLCFANANFVRERIMKRVTEKDEEGKENSKERTQAVILDMSTVMNIDTSGICALQEVYNKLVSHNIHLAVANPRWQVIHKLKLAKVVDKIGKDWIFLSVGEAVDACSSKMVNFSSC

SEQ ID NO: 11255 - protein, 297 aa, Vitis vinifera
MMLFLLQVIIPGPFYVSYPEMARLADATPVILPTLISNNFRLDPEVLKSTISEKSRVLILCSPSNPTGSVYPKKLLEEIADIVAKHPRLLVIADEIYEHIIYAPAIHTSFASLPGMWERTLTVNGFSKTFAMTGWRLGYLAGPKHFVAACGKIQSQVTSGASSISQKAGVAALGLGYRGGEAVAKMVKAFEERRDFLVESFRELGGVKISEPQGAFYLFLDFSSYYGAEAEGYGIIKDSESLCKYLLDKAQVALVPGDAFGDDKCIRISYAASMSNLQAAMERIKGAIVHLKATVPA

SEQ ID NO: 11256 - protein, 366 aa, Vitis vinifera
MFLKVNGKLYQRLGKIGSGGSSEVHKVISSDCSIYALKKIRLKGRDYATAYGFCQEIQYLNKLKGKSNIIQLIDYEDDGCIYMVLEYGEIDLANMLSQKWKEMDSSDRTIDENWLRFYWQQILQAVNTIHEERIVHSDLKPANFLLVKGSLKLIDFGIAKAIMSDTTNIQRDSQVGTLSYMSPEAFMCNESDANGNTIKCGRPSDIWSLGCILYQMVYGRTPFSEFKTFWAKFKVITDRNHEIKYEPVSNPWLLDIMKKCLAWDRNERWRIPELLQHPFLVPPVPVLAQLSSSQDQSCKLLQLITEACANDPKALILCRQLQQLLRDPVTVPTSQVLTSRDQQCKLLSYVSKLCCQLQEYLSDPDT

SEQ ID NO: 11257 - protein, 189 aa, Vitis vinifera
MAESKRSTGTVKWFSGQKGFGFIAPDDGGEDLFVHQTSIRSDGFRTLSEGETVEFAVDHGEDGRTKAVEVTAVRGSYSSGGGGGRGFSGGRSRGGNDGYGGGGACYNCGRTGHLARDCYQGSGGGRRGYGGGGGYSAGAGGGGYSAGAGGGGYSAGAGGGGYSFGAGGGACYNCGEEGHFARDCPNGQK

SEQ ID NO: 11258 - protein, 449 aa, Vitis vinifera
MQLSQCTWTFPELLKRPAFLRRSIDSISSRSRSSSKYPSFMASASTVSAPNTEAEQTHNPPQPLQVAKRLEKFKTTIFTQMSMLAIKHGAINLGQGFPNFDGPEFVKEAAIQAIKDGKNQYARGYGVPDLNSAVADRFKKDTGLVVDPEKEVTVTSGCTEAIAATMLGLINPGDEVILFAPFYDSYEATLSMAGAQIKSITLRPPDFAVPMDELKSAISKNTRAILINTPHNPTGKMFTREELNVIASLCIENDVLVFTDEVYDKLAFEMDHISMASLPGMYERTVTMNSLGKTFSLTGWKIGWTVAPPHLTWGVRQAHSFLTFATCTPMQWAAATALRAPDSYYEELKRDYSAKKAILVEGLKAVGFRVYPSSGTYFVVVDHTPFGLKDDIAFCEYLIKEVGVVAIPTSVFYLHPEDGKNLVRFTFCKDEGTLRAAVERMKEKLKPKQ

SEQ ID NO: 11259 - protein, 363 aa, Vitis vinifera
MRCFDRAKIYVKAGDGGNGVVAFRREKYVPFGGPSGGDGGRGGNVYVEVDGSMNSLLPFRNGVHFRAGRGSHGQGRNQNGAKGEDVVVKVAPGTVIREAGSDGVEGEVLLELLHPGQRAMLLPGGRGGRGNASFKSGTNKVPKIAENGEEGPEMWLELELKLVADVGIVGAPNAGKSTLLSVISAAQPTIANYPFTTLLPNLGVVSFGYDATMVVADLPGLLEGAHKGFGLGHEFLRHTERCSSLVHVVDGSSQQPEYEFDAVRLELELFSPELAEKPYVVAYNKMDLPEAYERWPSFKERLQARGIGTFCMSAVKGEGTHEVVCAAYELLRNRTESNKEIEGQNFILISFLIYLVCLSDGSK

SEQ ID NO: 11260 - protein, 597 aa, Vitis vinifera
MYRHRTKGKGKALSDGDRSGRKSNKEDDSDESVESCNSAALFSTGKKRWGYEQQLITGSKRIRKQINGSPGSTSFVRQDSSFMSWISNMMKGLSKSNQDETPSLALTLARPNHDNYDQKLVTCNKNQDPGCRNIGFQSIFQSLYCPTTKVQESRTLNADNQTGEGSKEFCLANKLCDFNQSTFGNRAGPSTQPKVLSAKFAVSQENYKTSSVENRSASNPVSSSSSLGKRKANSAENNDSDPPSEGKTIHNFGYKSDLLGSLWVTRFSPKTSSPTCKVDHCNQNTGGATELSTDCMGLIPYSQNRTEVSFGFKKNNAHNNQNSIYKLNPISPSQRFKSSEAMASLFARRLDALKNIITLNQTDTEARATPTCFFCGIRGHSIHDCSEIKETELEDLLRNNNLYPGAEEPPCFCIRCFQLNHWAVACPSVLKRQNQSECGASLVNRCSSESQIIPLCNFVNPQISDVPKGIFDAIKRLRLSRGDILKWMNSVFPFSHLNGFFLRLRLGKWEEGLGGTGYYVACISGAQKERPSQSSKNPIAVNIGGVKCLVQSQYISNHDFLEDELMAWWGATTRAGGKIPSEEDLKVKLEERKKFGF

SEQ ID NO: 11261 - protein, 157 aa, Vitis vinifera
MAFVSFVGRVLFASVFILSAWQEFNEFGVDGGPAVESLAPKLDVFSKHVSANVGVQVPEVEIKNLVAASIALKGLGGLLFIFGSSLGAHLLLLHQAIVIPILYDFYNYDVDKKEFVVLFLKFTQNLALFGALLFFIGMKNSMPRRQLKKKAPKTKTV

SEQ ID NO: 11262 - protein, 257 aa, Vitis vinifera
MMAGHLGWGIIEEGWRKGPWTAEEDRLLTEYVKLHGEGRWNSVARLAGLRRNGKSCRLRWVNYLRPDLKRGQITPHEENIILELHARWGNRWSTIARSLPGRTDNEIKNYWRTHFKKKGKLPSDKSEKAKTRLLRKQQFYQQQQQQQQQQQQQQQQQLNQLDLKRIMALLDQPDIGDTPMAQARQDLGSCIYSTHHAAEEHGYVHLPIPNADVSTQESSSEDMLWDGLWNLDDFHGNLSAACAASKASLHHLVAPFY

SEQ ID NO: 11263 - protein, 337 aa, Vitis vinifera
MPFDLFCTAIWEKPEPIAMSAFRSFFMCFVVAAAIVIPISAQLSPDFYDKLCPQALPTIRSILEKAIYHEPRLGASLLRVHFHDCFVNGCDASVLLDDTPNFTGEKTAGPNLNSLRGFEVIDEIKEAVNSACCGNVVSCADILAVAARDSVAILGGPSYQVLLGRRDARTASLNDANSDIPRPIFDFPALLSNFQNHGLDLNDLVLLSGGHTIGLARCTNFRDRIYNETNIKPKFAASLRGICPKEGGDDNTATLDATTANFDTEYFKDLLKLKGLLHSDQELFKGVGSASDGLVQYYNNNPGAFFADFGVSMIKMGNMKPLTGSDGEIRMNCRKIN

SEQ ID NO: 11264 - protein, 533 aa, Vitis vinifera
MSTSYSDLLTSADEDPVTTTTGDKGAVGRGLSDRIAERTGSGVPKFKSIPPPSLPISPPPISPSSYFSIPAGLSPAELLDSPVLLSTSNILPSPTTGTFPSQGFNWRSNSNSNQQDVKREDKNYLDFSFQPQARPSTTSASMFQPSTTTITTDSNQLGVFKNQPSKIVFHQKKLRATETATMDSNRIMAVTTHHLKQRRSEDGYNWRKYGQKQVKGSENPRSYYKCTYPNCPTKKKVERSLEGQVTEIVYKGTHNHPKPQSTRRSSLSSSQTIQASNPPNNEVPDQPFNSSISMGDDDFEQSSQKSKSGGDDFDEDEPEAKRWKKESENEGISAPGSRTVREPRVVVQTTSDIDILDDGYRWRKYGQKVVKGNPNPRSYYKCTNPGCPVRKHVERASHDLRAVITTYEGKHNHDVPAARGSGSHSVNRPLPLPDTTAAATTNNNMPMAIRPSIMTHLPNNSTTNPLRHVRHPTSEAQAAPFTLEMLQSPDGFGFSSFGNSMATYMNQPQHQDNVFSRTKEEPRDDMLFESLLC

SEQ ID NO: 11265 - protein, 589 aa, Vitis vinifera
MCGILAVLGCSDDSQAKRVRLFYHCYLCFCDRLKHRGPDWSGLYQHGDCYLAHQRLAIIDPASGDQPLYNENQAIVVTVNGEIYNHEELRKSMPNHKFRTGSDCDVIAHLYEEHGENFVDMLDGMFSFVLLDTRDDSFIVARDAIGITSLYIGWGLDGSSVWISSELKGLNDDCEHFESFPPGHMYSSKEGGFKRWYNPPWFSEAIPSAPYDPLVLRRAFENAVIKRLMTDVPFGVLLSGGLDSSLVASITARHLAGTKAAKQWGAQLHSFCVGLEGSPDLKAAKEVADYLGTVHHEFHFTVQDGIDAIEDVIYHIETYDVTTIRASTPMFLMSRKIKSLGVKMVISGEGSDEIFGGYLYFHKAPNKEEFHRETCRKIKALYQYDCLRANKSTSAWGLEARVPFLDKEFIKVAMDIDPEWKMIKPEQGRIEKWVLRRAFDDEEQPYLPKHILYRQKEQFSDGVGYSWIDGLKAHASQHVTDKMMLNASHIFPHNTPTTKEAYYYRMIFERFFPQNSARLTVPGGASVACSTAKAVEWDSAWSNNLDPSGRAALGVHLSAYDQKLTTVSAANVPTKIIDNMPRIMEVTAP

SEQ ID NO: 11266 - protein, 569 aa, Vitis vinifera
MAEEDNYTKDGTINYQGNPANKKKTGTWTACPYILGNEFCERLAYYGMSSNLVLYFKYKLHQDSATASKNVLNWSGTCYLTPFIGAFLADAYLGRYWTIASFSIIYVIGMTLLTVTASVPGLKPNCSPSGVCDPTETQTAVCFLALYLVALGTGGIKPCVSSYGADQFDDTDEHEKTHKSSFFNWFYLSINVGALIAGSILVWIQENIGWGVGFGIPAAAMAIAVVSFFSGTRLYRNQKPGGSPLTRMSQVVVASLKKYRVQVPADKSLLYEIADGESGIQGSRKLDHTKDLSFFDKAAVEIQSDHIKDSPDPWKICTVTQVEELKAIIRLLPVWATGIIFSAVYSQMGSLFVVQGESMDPHMGRHFEIPSASLSIFDTISVIFWVPIYDRIIVPVARKFTGHSNGITQLQRMGIGLFISIFAMLSAGILEVVRLGIVKRHNYYDHDRIPLSIFYQVPQYFIIGCAEVFTFIGQLEFFYEQAPDAMRSFCSALSLATVALGNYLSSLLVTIVTDVSTRGGKLGWIPDNLNRGHLHYFFFLLAILSVLNLVAFLFVAKWYTYKRAVGTLR

SEQ ID NO: 11267 - protein, 638 aa, Vitis vinifera
MVLQKRLDYGFNGYQVPATPRATRSARRRGLFRKKVEDNQMFAFDLLATVAGKLLLEGEKSPDSQCVIAEDQVKNEGHAEDKPLKIEPCDQGNSGGSFIVSELSSQMPSQKYCLREFPPLASVITSDCSEKNETESFASKVEVGSSGFREFNDRKLENETKRQIKVEPIKTGRAILNTGAGIDNIPCGSFPLCRGDVKVVSRDDDDNSSGCTQPSTSTKSFRPLPRIGDRRIRKLLASKYWKVTPKLKEDGLSNVDGEVKPIYRNKRNCYKRQRSQRNYPFKKRKLLYCSSVSNSEGGNGSQRISDSPQMGINSDASGSGLKLHGGISTSASVAGQHTSFISRDSHVKLRIKSFRVPELFIEIPETATVGSLKRTVMEAVTAILGGGLRVGVLLRGKKVRDDSKTLQQTGISQDDQMDALGFTLEPNPSQAPQALCPGDNPFLLPYDTPQPLKRYPPTPTVAHQGTSDASPDPPVTNLCDFVESDHDSAPSPDTDMSIDKSVTDSKALVSVPAMSMEALAVVPVHRKSKRSEIVQRRIRRPFSVSEVEALVQAVEKLGTGRWRDVKLRAFDNAKHRTYVDLKDKWKTLVHTARISPQQRRGEPVPQELLDRVLTAHAYWSQQQAKQQLKHQSETCLLL

SEQ ID NO: 11268 - protein, 232 aa, Vitis vinifera
MAISALGGNSHPTSNGSDPSEPGQVHGTLTSSLTDRLCRLIETNAEAQTVKGKREDNLKTASYAPQASEDNHKNLVDPPEDPLLKSSCFIETNVVRNGETLIGAETVDLQTASHASQSCGVGAPDGDSNWAGEVRPSLDNSASQSESQPRRGRKRASEATASMASVEREDWLPPGWIVEGRVRSSGASAGSRDKYFIEPITGRRFRSKKEVRYYLETGEVRKKPKKNPDNVS

SEQ ID NO: 11269 - protein, 245 aa, Vitis vinifera
MDAHYMNTSYPYSTVGSFMDYFEGLAYEHVNFIFATASHGQSPYASSMNTSLYKFGLSETGSTSYYDYDQAYVVNDHVPGISEYRRTPENSSAITTDQIPTVNTQCEGNTNTTTTHATPVECPRSHPNSQDYQVIWQDNIDPDNMTYEELLELGEAVGTQSRGLSQELISLLPISKYKCGFFTRKKSRCERCVICQMEYKRRDRLITLPCKHVYHAACGTRWLSINKACPICYTEVIGEVPKIDK

SEQ ID NO: 11270 - protein, 2159 aa, Vitis vinifera
MEGHERELLLACVVSGTLFSVLSVASLCILWAVNWRPWRIYSWIFARKWPDILQGPQLGLLCGMLSLSAWIFVISPIVMLIIWGCWLIMILGRDIIGLAVIMAGIALLLAFYSIMLWWRTQWQSSRAVAALLLVAVALLCAYELCAVYVTAGASAAERYSPSGFFFGVSAIALAINMLFICRMVFNGNGLDVDEYVRRAYKFAYSDCIEMGPLACLPEPPDPNELYPRQSRIHICRASHLGLLYLGSLLVLLVYSILYGQTAMEAQWLGAITSAAVIILDWNMGACLYGFQLLKSRVVALFVAGLSRVFLICFGVHYWYLGHCISYAVVASVLLGAVVSRHLSATNPLAARRDALQSTVIRLREGFRRKEQNSSASSSEGCGSSVKRSSSAEAGHLGNVIETSSRSAAQCIGDASNWNNVISHEGINSDKSIDSGRPSLALRSSSCRSVAQEPEAGGSTDKNFDHNSCLVVCSSSGLESQGYESSASTSANQQLLDLNLALVFQEKLNDPMVTSMLKKRARQGDRELTSLLQDKGLDPNFAMMLKEKSLDPTILALLQRSSLDADRDHRDNTDITIIDSNSVDNGLLNQISLSEELRLKGLEKWLQWSRFVLHHIAGTPERAWVLFSFIFILETVIMAIFRPKTVKLVNSKHEQFEFGFAVLLLSPVICSIMAFLRSLQAEEMAMTTKPRKYGFIAWLLSTCVGLLLSFLSKSSVLLGLSLTFPLMVACLSVSIPIWIHNGYQFWVPRVESAGHPGHHRTPGKKEGVVLVICILVFAGSIFALGAIVSVKPLEDLRYKGWTGDQRTFTSPYASSVYLGWAIGSVIALVVTGVLPIISWFATYRFSLSSAVCAGIFSVVLVAFCGASYLEVVKSRDDQVPTKGDFLAALLPLVCFPALLSLCTGLYKWKDDDWKLSRGVYVFVIIGLLLLLGAISAVVVIVEPWTIGVACLLVLLLIALAIGVIHYWASNNFYLTRTQMFFVCFIAFLLALAAFLVGWYEDKPFVGASVGYFSFLFLLAGRALTVLLSPPIVVYSPRVLPVYVYDAHADCGKNVSVAFLVLYGIALATEGWGVVASLKIYPPFAGAAVSAITLVVSFGFAVSRPCLTLKMMEDAVHFLSKETVVQAIARSATKTRNALSGTYSAPQRSASSAALLVGDPTVMRDRAGNFVLPRADVMKLRDRLRNEEVAAGSFFCRVRNGRTFWHESTSDIGYRREMCAHARILALEEAIDTEWVYMWDKFGGYLLLLLGLTAKAERVQDEVRLRLFLDSIGFSDLSAKKIKKWMPEDRRQFEIIQESYIREKEMEEEILMQRREEEGRGKERRKALLEKEERKWKEIEASLISSIPNAGSREAAAVAAAVRAVGGDSVLDDSFARERVSSIARRIRMAQLARRALQTGVTGAVCVLDDEPTTSGRNCGQIDPTICQSQKVSFSIAVTIQPESGPVCLLGTEFQKKVCWEILVAGSEQGIEAGQVGLRLITKGDRQTTVAKEWSISATSIADGRWHIVTMTIDADLGEATCYLDGGFDGYQTGLPLRVGNGIWEQGTEVWIGVRPPIDIDAFGRSDSEGAESKMHIMDVFMWGRCLTEDEIAAFYGAMGSAEYSMIDFPEDNWQWADSPSRVDEWDSDPAEVDLYDRDDVDWDGQYSSGRKRRSEREGMVVDVDSFARRLRKPRMETREEINQQMLSVELAVKEALSARGETHFTDQEFPPNDQSLFVDPENPPLRLKVVSEWMRPTDMVKESYLDAGPCLFSGAANPSDVCQQGRLGDCWFLSAVAVLTEVSRISEVIITPEYNEEGIYTVRFCIQGEWVPVVVDDWIPCESPGKPAFATSRKGNELWVSLLEKAYAKLHGSYEALEGGLVQDALVDLTGGAGEEIDMRSAQAQIDLASGRLWSQLLRFKQEGFLLGAGSPSGSDVHVSSSGIVQGHAYSLLQVREVDGHKLVQVRNPWANEVEWNGPWADSSPEWTERMKHKLKHVPQSKDGIFWMSWQDFQIHFRSIYVCRIYPPEMRYSLRGQWRGYSAGGCQDYDTWHQNPQFHLRATGPDASFPIHVFITLTQGVSFSRTTAGFRNYQSSHDSMMFYIGMRILKTRGRRAAYNIYLHESVGGTDYVNSREISCEMVLEPDPKGYTIVPTTIHPGEEAPFVLSVFTKASVTLEAL

SEQ ID NO: 11271 - protein, 694 aa, Vitis vinifera
MTSLSNVVLWCDVQLTKDGAGICFPDMKLENASDISIVFKNRNNVYLVNGVSTPGWFSVDFTLTDLETVALNQGVYSRSGRFDGNLFPILTVQEMVKLIRPPGLWLNLQHDVFYTKHNLSMRNFVLSVSKSVIVDYISSPEVAFLRGVSQRFKATKTKLIFRFLEKEETDPSTNQTYGSLLNNLTFIKTFASGILVPKGYIWPVNKNSYLESSTLVVQNAHKEGLEVFGSDFINDIPFSYNYSYDPIAEVLNFIDNDAFSVDGVLSDFPITPSAAIDCFAHIGKNASGQEKPLIISYNGASGDYPSCTDLAYTKAISDGVDVLDCNVQMTKDGTPICLSSINLMDSTKVAQTPFSTFTTTITELQKGSGIFTFNLTWEDIRSLTPAISNPYSTFRLSRNPAAKTAGKLVSLSDFLSIAKEANSLSGGVLIGIEHAAFLVKVGLSVTDAVLDALSKAGYDNVTTPRVMIQSTNSSVLKEFKEKKKNYELVYRVDENIRDASDATIEDIKKFATSVVISKDSIYPENKAFITGATDIVSRLKKNNLPVYVQRFDNEFISQAWDFFSDATVEINSFVTGAGIDGVITSFPQTAASYRKNRCLKYKNAPSYMSPVQPGSLMQVITSDDMPPALAPYPVLTESDVAEPPLQEVAPATPTSSTNAGTTAPAPTSPNGQPRIATCIVLSNLAVLLVAVLLL

SEQ ID NO: 11272 - protein, 328 aa, Vitis vinifera
MGSVEPVCEFCGVARAVVYCKQDMAALCLQCDGFVHSANFISQRHVRSLLCDKCNSQPATIQCLEDEACLCESCECNVNSCLGSEHKHQPLSFYSGSPSPEEFIEIWSSSPSCKSPVSLSTNCINSYWENRNNSRSLFWSVTSLTNRMKELETFTKMSSSPMKSQNLHICNVNNPCEGRMDDAELNLEKSDKVYGSLQCYINSFEDIGMKPINPCRSQSVNLNFPTGLVQSGASLSLSNITGESCVADYQDCGLSAVILNGNPTWDANLGTSCSQARVEAKKRYNKKKKTRMFGKQIRYASRKVRADSRQREKGRFVKAGETYGYNFH

SEQ ID NO: 11273 - protein, 208 aa, Vitis vinifera
MKEMKECELCSFPARMFCESDQARLCWDCDEKVHGANFLVARHSRSLLCHACQAPTPWKASGTRLAPTVSVCEACVLRCDKDRHRSSGEDRESEGGNTDDEEDDDDDHDDDDENDGDEGDEDDDVEEEEDGENQVVPLSSSAASLLLPPDASSSSSEDGEASSRFSARGRGGVSALKRTRQNADLDLDSDVCFSFSSSNQRYCFLDLF

SEQ ID NO: 11274 - protein, 341 aa, Vitis vinifera
MGRTPCCDKNGMKKGPWTVEEDQKLLDYIQKHGHGRWRTLPKNAGLKRCGKSCRLRWTNYLRPDIKRGRFSFEEEEAIIQLHGILGNKWSAIAARLPGRTDNEIKNYWNTRIRKKLLRMGIDPVTHAPRMDLLELASLLGSSLYNSSLQLNVPAGSLGMGPMVNDDVLTLATALLSSHFQNQFESFQGNNLQSSIQEVQACPTSSAASTPFLNETQLMQAIAEHLSQNPTDFAYQNSLPNLWQVHGGHPITAASFTNPTLSFDSIPSSITGHQTLKSNAVSNNTQNFSFDSVLSTPSSTSTPLDSSQMTYAKGSTEDERDSYCSNFLMFDIPSDLDVNAIM

SEQ ID NO: 11275 - protein, 846 aa, Vitis vinifera
MCVLWIAFSYRWMTMEGSSESGWRNSDISRGLNVSIVSHGRNPRQRHANRIGLSGGASHDSGFISGRKERDHVLSSHTKNHKNQVGISQVCDDDVALDPFVRAIEWGDVSLRHWLDKPERRVDALECLHIFTQIAEIVNAAHSQGVVVNNVRPSCFVMSSFNHVSFIESVSCSDSGSDSLEDGSVSATHVTLVEDREEYKSTDRRSVEQSEEKKQTFPMKEILLMETNWYTSPEEISGAQTSCASDIYQLGVLLFELFCTFSSREEKSRTMSCLRHRVLPPQLLLKWPKEASFCLWLLHPEPSSRPKISELFQSEFLTEPRDKMEEREAAIELRERIEEQELLLEFLLLMQQRKQGAVDKLQDTISFLSSDIEEVGKQQATLRKRGGSYQELDSTSVRSSKRFRQGVHHIKELDDTLNNGQKLGMNAENPEILISKSSRLMKNFKKLESAYLLTRRKPTKPSGKPSNKISPPSSNGRGSIVVTERSSVNNLASKDQYNEHGQSGWINPFLDGLCKYLSFSKLKVKADLKQGDLLNSSNLVCSVSFDRDGELFATAGVNKKIKVFECNSILNEDRDIHYPLVEMACRSKLSSICWNSYIKSQIASSNFEGVVQVWDVTRSQVLTEMREHERRVWSIDYSLADPTMLASGSDDGSVKLWTLKLNGVSVGTIKTKANVCCVQFTPDSGRYLAFGSADHRIYYYDLRNSKIPLCTLLGHNKTVSYVKFVDSTHLVSASTDNTLKLWDLSMCTARVLEGPLQSFTGHQNVKNFVGLSVSDGYIATGSEANEVVIYHKAFPMPALTFKFNSMDSDHESDDSAQFISSVCWRGQSSTLVAANSAGNIKILEMV

SEQ ID NO: 11276 - protein, 243 aa, Vitis vinifera
MGRGKVELKRIENKINRQVTFAKRRNGLLKKAYELSVLCDAEVALIIFSNRGKLYEFCSGSSMPETLERYQRCSYSALEASQPAKETQNSYQEYLKLKSKVEVLQRTQRNFLGEDLGHLGTKELEQLEHQLDKSLKQIRSTKTQFMLDQLSDLQRKEQILMEANNALRRKLGESSAESGLGSTWEAAAHNLPYNREPVQSEDFFEPLQCDSTLQIGYNPVLRVEMNGASTTQNVNGFIPGWMV

SEQ ID NO: 11277 - protein, 209 aa, Vitis vinifera
MYASGPSHFHKDSTTSEPSAPPLPPPPPPFPFDSYEYTAPTTGFPANITNQYNPPIPTPAPPPAVSFRSTPVPWSTGLCHCFNDCKSCCLTFWCPCVTFGRIAEIVDRGSTSCGVSGALYTLILCLTGCSCLYSCFYRSKLRGQYLLEESPCVDCCVHCWCEGCALCQEYRELQNRGFDLSIGWHGNMERQRRGGVDVNPVVPEGSMTR

SEQ ID NO: 11278 - protein, 530 aa, Vitis vinifera
MLEKHLKATGGRVFTRFPPEPNGYLHIGHAKAMFVSFGLAKERDGCCYLRYDDTNPEAEKKEYIDHIDEIVRWMGWEPFKVTYTSDYFQDLYDLAVELIRRNHAYVDHQTPEEIKEYREKKMNSPWRDRPIAESLELFDQMRRGMIEEGKATLRMKQDMQSDNYNMYDLIAYRIKARDKWCIYPSYDYSHCIVDSLENITHSLCTLEFETRRASYYWLIDALGLYQPYVWEYSRLNVTNTVMSKRKLNRLVTERWVDGWDDPRLMTLAGLRRRGVTSTSINAFVRGIGITRSDSSMIRLDRLEFHIREELNKTAPRMMVVLHPLKVVITNLEVGSTMDLDAKKWPDAQIEDSSSFYKVPFSNIVYIEHTDFRMKDSKDYYGLAPGKSVLLRYAFPIKCTEVILSDDKETVVEVWAEFDPSKKTKPKGVLHWVAEPSPGIDPLKVEVRLFDKLFLSENPAELDNWLADLNPESKVVIPGAYAVPSLRTAAVGDRFQFERLGYFVVDKDSTSEKLVFNRTVTLRDSYSKGGK

SEQ ID NO: 11279 - protein, 230 aa, Vitis vinifera
MDVIPMRSSSLELTISVPGFTSSPSLPSSADGKKTGEGVCGVRDLDINQVPLGAEEEWTTGSMEDEEESGNGGPPRKKLRLSKDQSRLLEESFRQNHTLNPKQKEALAMQLKLRPRQVEVWFQNRRARSKLKQTEMECEYLKRWFGSLTEQNRRLQREVEELRAMKVAPPTVISPHSCEPLPASTLTMCPRCERVTTTSLGKDPTNRTTSPTLSSKLPTALHSRHSSAAC

SEQ ID NO: 11280 - protein, 315 aa, Vitis vinifera
MFPNHIPNPEDKTAMALTKAAVLENNADLGIVFDTDVDRSGVVDSSGNPINGDKLIALMAAIVLREHPGSTIVTDARTSMALTQFIANRGGHHCLYRVGYRNVIDKGVQLNKDGIEAHLMMETSGHGALKENHFLDDGAYMVVKIIIEMVRMKLAGSYEGIGSLIEDLQEPFESVELRMNVISEPKHAKAKGAEAIEAFRNYIEEGKLEGWELDSCGDCWVSEGCLVDLNDTPAAIDAYMYRAKVSDKEHGQHGWIHLRQSIHNPNIAVNIQSSVPSGCQSMARVLREKFLIASGMEKSLDITQIDKYAKSGQVG

SEQ ID NO: 11281 - protein, 154 aa, Vitis vinifera
MATGIPISSTGGLQPGTEVPWSTGLCDCFSDVTNCCITCWCPCITFGQIAEIVDKGTVSCFASGAIYAALTYFTTCACLFSCSYRTKLRKQLMLKESPCGDCLVHFCCETCSLCQEYRELTHRGFDMSLGWEGNMERQNRGVAMAPVVERGMQR

SEQ ID NO: 11282 - protein, 191 aa, Vitis vinifera
MTTPPPEPAPPSFNGAGTATGIPVSSPEPSFSEKPSQAPLQPKVKAPRVPWSSGLCDCFSDPRNCCITCWCPCITFGQIAEIVDKGSSACGVNGALYTLIACVTGCACCYSCFYRAKMRQQYLLKPSPCGDCLVHCCCEYCSLCQEYRELKNRGFDMTIGWHGNVERQNRGVEMSSMSSQTAPTMEEGMSR

SEQ ID NO: 11283 - protein, 192 aa, Vitis vinifera
  misc_feature (8)..(40): Xaa can be any naturally occurring amino acid
  unsure (1)..(192): unsure at all Xaa locations
MDLRIVGXXXXXXXXXXXXXXXXXXXXXXXXXXXXXXXXXIVGFDCPFFSTLQNMIDTGDDSDKSLNTPTRTYVRDAKAMAATPADVKEYPNSYAFIIDMPGLKSGDIKVQVEDDNVLVISGERKREEEKEGAKYVRMERRVGKFMRKFVLPENANTDKISAVCQDGVLTVTVEKLPPPEPKKPKTVEVKIA

SEQ ID NO: 11284 - protein, 113 aa, Vitis vinifera
MAATLADVKEYPNSYTFIVDMPGLRSGDIKVQVEDGNVLVISGERKREEEKEGAKYVRMERRVGKFMRKFVLPENANTDKISAVCQDGVLTVTVEKLPPPEPKKPKTIEVKIA

SEQ ID NO: 11285 - protein, 581 aa, Vitis vinifera
MPSVKQFFTGMSDSGKHTSISKRNKKLFLLVFSSVLLIAAVVGIVAGVHSRKSSTNDVGLTAGHAVLKSACSSTRYPDLCYSAIATVPGASKKVTSQKDVIAVSLNITVTAVEHNYFTIEKLLDFKNLTKREKAALHDCLETIDETLDELHVAMDDLDEYPDKKSLTQHADDLKTLMSAAMTNQETCLDGFSHDDADKHVREVLLKGQRHVEHMCSNALAMIKNMTDTDIAREREAMNRKLMEERDESGWPKWLSAGDRRLLQSSSVTPDVVVAADGSGDYKTVSAAVAAAPEKSSKRYIIGIKAGVYKENVEVGKKKTNIMFLGDGRSNTIITGSKNVVDGSTTFNSATVAVVGEKFIARDITFQNTAGPSKHQAVALRVGSDLSAFYKCDMLAYQDTLYVHSNRQFYINCLVAGTVDFIFGNAAAVFQDCDIHARRPNSGQKNMLTAQGRTDPNQNTGIVIQKCRIGATSDLQAVISSFKTYLGRPWKEYSRTVVMQTSITNVIDPAGWHEWSGSFALSTLYYGEYQNTGAGAGTSKRVTWKGFKVITSASEAQGFTPGTFIAGSSWLGSTGFPYSLGL

SEQ ID NO: 11286 - protein, 537 aa, Vitis vinifera
MRRFVSGVLSSYQKRSLSHRSLRFFSSTTSLSNSDSPSSSSSAAMPTPVTLETINPKVLECEYAVRGEIVTLAQRLQQELQEKPGSLPFDEILYCNIGNPQSLGQQPITFFREVIALCDHPPILDKSETQGLFSADAIERAWQILDQIPGRATGAYSHNVISILLYFCPHQGIKGLRDTIAAGIEARDGFPSNPNDIFLTDGASPAVHMMMQLLIRTEKDGILCPIPQYPLYSASIVLHGGTLVPYYLDEATGWGLEISELQKQLEDAKSKGITVRALVVINPGNPTGQVLSEDNQRDIVEFCKKEGLVLLADEVYQENVYVPDKKFHSFKKISRSMGYGEEDISVVSFQSVSKGYYGECGKRGGYMEVTGFGADVREQIYKVASVNLCSNITGQILASLVMSPPKVGDESYESYFMEKDGILSSLARRAKTLEDALNSLEGVTCNKAEGAMYLFPRIHLPEKAIKAAEAAKTAPDAFYARRLLNATGIVVVPGSGFGQVPGTWHFRCTILPQEDKIPAVVSRLTEFHKGFMEEFRD

SEQ ID NO: 11287 - protein, 346 aa, Vitis vinifera
MCGGAIISDFIPASRCRRVDEDYFPALKKRTSGNHCSKSLWSEAVEDDDDDDFEADFLGFKDDSDDEEDDIKPSAFSAAKPHAFCDKKKKISFEVYHCYTGIKSVEFNGQAEKSAKRKRKNQYRGIRQRPWGKWAAEIRDPRKGVRVWLGTFNTAEEAARAYDAEARRIRGKKAKVNFPDETPLTAPKRTIKANAQKLIPKGSPNSSHSNLNQSFNFMNNSDQEYYSNSFPANGENGRMYFNSDQGSNSFDCSDLGWGEQGAKTPEISSVLSATLEGDESQFIEDANPKKKLKSNSQNAYFQIPYLDGNWEASMDALLSGDAAQDGGNPMDLWSFDDLPTVVGGVF

SEQ ID NO: 11288 - protein, 490 aa, Vitis vinifera
MESGTWASYVAAWLATVALILLSTHLRRRRKLNLPPGPKPWPIIGNLNLIGALPHRSIHELSQKYGPIMQLRFGSFPVVVGSSVAMAKLFLKTHDVTFASRPKTAAGKYTTYNYSDITWSPYGPYWRQARKMCLMELFSARRLESYEYIRVEETKSLLSSLYKQSNSPVDLKDHLSTVSLNVISRMVLGKKTWRARSGVLNIGDSIPWIDFLDLQGYVKRMKVLSKKFDRFLEHVLDEHNARRKGVENYVAKDMVDVLLQFADDPTLEVKLERHGVKAFTQDLIAGGTESSAVTVEWAISELLRKPELFDKATEELDRVIGKERWVEEKDIPNLPYLDTIVKETMRMHPVAPMLVPRFSREDIKIADYDIPKDTRVLVNVWTIGRDPEIWDQPNEFIPERFIGKNIDVKGQDFELLPFGTGRRMCPGYSLGLKVIQSSLANLLHGFKWKLPGDMKPGDLSMEEIFGLSTPKKIPLVAMAEPRLPAHLYDM

SEQ ID NO: 11289 - protein, 343 aa, Vitis vinifera
MAMCSSFCPPQVPNHFRGTTPIPSFLPKPPSFKAFSSQTATASTKDEFPARVGFLGLGIMGSPMAQNLIKSGCDVTVWNRTKSKCDPLISLGAKYKSSPEEVAASCDVTFAMLADPESAVDVACGKHGAASGIGPGKGYVDVSTVDGATSKLIGEHIKATGALFLEAPVSGSKKPAEDGQLIFLTGGDKSLYETVAPLLDIMGKSRFFLGSVGNGAAMKLVVNMVMGSMMASFSEGLLLGEKVGLDPDVIVEVISQGAISAPMFSMKGPSMVKSVYPTAFPLKHQQKDLRLALGLAESVSQPTPIAAAANELYKVAKSHGLSDHDFSAVIEALKVKMQDPPEY

SEQ ID NO: 11290 - protein, 853 aa, Vitis vinifera
MVLMTLFLSGFISIDCGISEDSSYTDQVTGIYYTSDATFIDTGISNSISPEFKTNSLPQQLWNVRSFPEGINNCYTLRPARGRGNKYLIRAQFMYGNYDAKNQLPEFDLILGVNMLESVQLDNASSVISKEIIHVLSSDYIYVCLVNTDSGIPFISALELRLLDNSMYETQSGSLVRYARWDFGSPYELIRFKDDNCDRFWFPYNSGEWKMLNTSRTIDTDDDNKLQLTSIVMSTAVKPLNTMEPLKFSWESTDPTSKFYIYLYFAEVEELQLNESREFNIFLNGNLWHGPLTPESFEATAMYRISSSISEKFEFSIYKTNSSTLPPIINALEVYLVKQLLQSQTDQKDVDAIMNIKSLYGVKKNWQGDPCAPENYSWEGLNCSYNDYNPPRIISLNLSSSRLTGNITPYISNLTLLQSLDLSQNGLNGPIPDFLSQLPLLRSLNLTGNKLTGSVPVELIERYKNGSLLLSVKSNPELCWPGSCKKKNKFVVPVVVSVTAAFIFLTTLATFWWIRRGRQEVMIILVGKVEEMDAEMDSNKRQFTYSEVLTITNNLEKVVGKGGFGTVYYGHLDGIQVAVKMLSQSSIQGYKQFQAEVNYNIHHRNVTSLIGYCNDGYHMGLIYEYMVNGDLKRHLSDNYFMMPSVLSWEERLRIATDAAQGLDYLHDGCKPSIIHRDIKSTNILLNERFQAKLADFGLSRAFPIEGSSHVSTAVVGTPGYLDPELTEKSDVFSFGVVLLEIITSQPAISKDREKTHIIEWVSCMLANGDIKNTVDPRLQGEFDINSAWKAVEVAMCCVSPTSTERPAMHYVVMELKQCLEMEASQKEGHEPESKDSIGITTEDQSTEIIPLAR

SEQ ID NO: 11291 - protein, 484 aa, Vitis vinifera
MWDSLNCSYDGHEPPRIISLNLSSSGLTGEIAPSISNLTLVQYLDLSNNGLTGPVPDFLSQLPLLRAQNLTGNKLTGSIPVELIERSENGSLLLSVNENPNLCWSGSCKKKKKFVVPIVASVAALFILLTALAIFWKHRRGGKQVSKDQEMVSESNRDEGSLVSKKQQFTYSEVITITNNFEKEVGKGGFGTVYHGHLDDTQVAVKMFSPSSIQGYKQFQAEAKLLMRVHHRNITSLIGYCKEGNNMGLIYEYMANGDLQRHPSGNERNTNVLSWEERLRIAVETAQGLEYLHNGCKPPIIHRDIKSTNILLNEKFQAKLADFRLSRAFPNEGSTHVSTIVAGTRGYLDPEYHASNRLTEKSDVFSFGVVLLEIITSQSPVPGNHEETHIIQWVSSMLANGDIKNIVDPRLQGDFDINSAWKAVEVAMSCVASTSTERPAMNYVVMELNQCLEMEASRNQGTESKDSTDMVSMKLHTGTTPLAQ

SEQ ID NO: 11292 - protein, 830 aa, Vitis vinifera
MNVRSFPEGARNCYTLRPEQEKDNKYLIRALFMYGNYDSKNQFPEFKLYLGTDEWDTVNIGDSSTALWKEIIHAPKTNDIDVCLVNIDSGTPFISVLELRPLNNSIYDKTEPGSLLFYNRWDFGAEQDMEIRDKDDVFDRIWNPFRLDSWEFITASYGSYTLSTSEYRLPRTVMATAATPANESESLRLSLNISGDPSQKLYMYMHFAEVEKLNEGELREFTISLNDDESWGGGALTPPYLSSDTLYSTNSVSGSTTNKLLFTIKKTGRSTRPPIINAMEVYKIKDFSQSSTLQGDVDAIKKIKSVYTMSRNWQGDPCLPESYRWTGLSCSKSGSPSIISLNLSSSSLTGKIDSSFSTLTSLQYLDLSYNNLTGEIPDFLAELTSLNSLNLSGNNFTGSVPLALLRKSDEESLSLSLDGNPYLCKTNSCAEEEEKQKKKGRNITVPVVASVASIASVLLLLAALATLWRFKIRRQHGTDGKPKEEKKLLDSKNQCFSYSEVVSITDNFQKVLGKGGFGAVYSGHLKDGTQVAVKMLSPSSAQGYISLNLDIFGCSSEQQAQLLARVHHRNLASLVGYCDEGSNMGLIYEYMANGNLEELLSGKNAPVLSWEQRLRIAIDAAQALEYLHNGCKPPIIHRDVKTANILLNEKLQAKVGDFGMSRIIPFESETHVSTAVVGTPGYLDPEYYITARLNEKSDVYSFGIVLLELISGKPAIIGSHGNKDHIVQWVSPIISRGEIRSIVDPRLEGDLINTNSAWKAVETAMACVPSISIQRPTMSEVVGELKECLNIEIRDERAYNVKEDNGIISSYSPEMVVLGIDEDAMGPQAR

SEQ ID NO: 11293 - protein, 768 aa, Vitis vinifera
MCGNVQEYNDQLPEFKLYLGVEEWDTVKFNSSYSIFRTEIIHVTRTDEIYMCLVNTDSGTPFISALELRPIDNSIYNKTQSGSLVLFNRLNSGSQTNETVRYGDDVLDRMWVPFNSIYWKAIKAPYSSSVLSENEFKLPATVMETAVKPVNGSLDFYLVGIDSSQEFYMYFHFAEIEEVQDQIREFTISLNNKTISDPIEPKYMVSDSYFTQSSLSGIQMNFSLAKTNRSTLPPIMNALEIYTIKEFLQSPTEQLDVDAMKKIKSVYQVMKSSWQGDPCLPRSYSWDGLICSDNGYDAPSITSLNLSSSNLVGKIDNSFKNLTSLQYLDLSNNSLSGDVPEFLSEMSSLKTLNLSGNKLTGSVPSALLAKSNDGTLTLSLDGNPDLCQNNSCNTKTKTKNSVAVPVVASIASFVVLLGAIFAIYWHFIRGRRHEEIQKEMIKPNEKLEAKKQCLSYSEVKRITNNFREVIGHGGSGLVYSGHLSHGIKVAVKKLSPTSHQSFEQFRNEASFPTARLLSTIHHRNLVSLMGYCDEDSNMLLIYEYMANGNLKEHLSGKIGSVLSWEQRLHIAIEAAQALEYLHEGCDPSIIHRDVKAANILLNEKMQAKVADFGWSRSMPSENPSHVSTTFVVGTSGYLDPQYNRTGQLTKESDVYSFGIVLLELISGRPAIMEENRSILDWVRPIIERGEIEDIVDPRLQGIFNTNSAWRAIETAMCCVPFSSTERKTMSYIVRELKECLKLVEMSSTSNTGISITQPIGPATGPRAR

SEQ ID NO: 11294 - protein, 760 aa, Vitis vinifera
MDQPPEFKLYLGVEEWDSVKLNKSHDQIIWKEIIHVPETDDIYVCLVNTGSGIPFISALELRALGNSIYNKTQSGSLVLFNRLNFGSASNETVRYGDDELDRIWNAYYFPDWKSIQAPYSSSSLSETEFKLPPKVMETAVKPLSGSYLNFTLGGIDSSEEFYMYFHFAEFEEVQDKIRQFTILLNDITIFDSIEPQYMVSETHSTKNSLSGRQLNFSLAKTNQSTLPPIMNALEIYMIKEFLQSPTEQQDVDAMKKIKSVYQVMKSSWQGDPCLPINYLWDGLICSDNGYNAPSIISLNLSSSNLTGKMDVSFSNLTSLQYLDLSYNNLTGEVPNFLAELPSLKTLNLSWNNFTGSVPLALIEKHNDRSLSLSLDGNPYLCNTTSCAGAKKKNKKTVVVPVVASITLFLVLLGGLAILWSFKRRREQNIVVKPTDQEDKALESKYLRLSYSEVERITDNFQNQIGKGGSGKVYRGRLSDDTEVAVKLLSSSSAEGFNLFQTEASFSIYIHHRNLVSLFGYCDEGSSMVLIYEYMNKGNLKKNLADKEEAVLSWKQRVGIALDAAEGLEYLHNGCKPPIIHRDIKTDNILLNEKLEAKVADFGWSRSMPVEGQTHVSTRIVGTEGYFDPEYQETSRLTEKSDVYSFGIVLLELISGQPAIIKSSESSTIHILQWVCPLLEMGDIGGIVDPRLNEDFDTNSAWRAVETAIGCVVHSSSERPTMSDVVAKLKECRSYMETTTANMEEDSGSIITEAAMSPQAR

SEQ ID NO: 11295 - protein, 770 aa, Vitis vinifera
MYLIRASFMYGNYDELNQVPQFDLYIGVNMWDSVKLDNASHLVMKEILHAPSDDDIYVCLVNIGYGEPFISSLEVRHFHDSSYKTESGSLALYRRLDAGSTTNEIVRFKDDAYDRIWFPYNLPDCESLNTTVPIDSHAETEYKLPSKVMTTAIRPMNSSASLDFDFDIGDSTLEFYVYMHFAELEGLQENQTRNFSITLNGNPWGEANIVPKYLHSRTVNNKQPVRGSKLKFSIYKTLNSSLPPILNAMEIYMVKGLLQAPTCQEDVNGISRIKSFYLVEKNWQGDPCAPVQPWDGLTCSNNGYESPRIISLKLSSSGLRGTISPSLLNLTALQFLDLSNNSLTGELPEFLSRLSFLTALNVTGNKLSGSVPPDLIARSEKGSLSLSVANNPDLCPSAQCKENKNSVGPIVAAVVSSLVIIFLALVIIWSLKRRKKGAFFAVQEVGLMNTCNQRFRYLEIVSITNDFQTVLGTGGFGTVYHGCMLNGTQVAIKMLSQSSKQGMKELLMRVHHRNLASLVGYCHEGTNMGLIYEYMAGGNLQNYLSDISTSPLSWIERLQIAVDAAQGLEYMHCGCKPPIIHRDVKTANILLSEKLQAKIADFGFSRFFSIESETHATTAVVGTIGYIDPEYYISNRLTEKSDVYSFGIVLLELITGKPAIIKDEDNIHIVQWVRSFVERGDIGSIVDPRLQGNLNTNSVWRVLETAMACLPPISIQRVTMSHVVMQLKECLEEEKAHDQTRRMEEQATKSSNLIDLYSLDLELEMGPEAR

SEQ ID NO: 11296 - protein, 773 aa, Vitis vinifera
MYGNYDSKNQPPIFKLYLGVDEWATVRIEKAIEISMAEIIHIPITDDIDVCLVNTGLGTPFISVLELRQLNDSIYSPPEPGSLLLRGRFDFGTQQDLYAIRDKDDVYDRIWEPANSESISSPLVNSSFSTSDYKLPGIVMATAATPADENEPLGFSFLIAGHPSQKLYVYMHFAEVEDLKGQIREFTISVNDDESFGGPVAPRYLLSDTVYSKYSLNGSINRLSFSLKRTNRSTLPPIINAMEVYRLKEFSQSSTQQNDVDAIKRIKSGYAVSSNWQGDPCLPMKYQWDGLTCSQDTSPSIISLNLSSSNLSGNILTSFSSLRSLQNLDLSYNNLTGPVPEFFADLPSLKTLNLTGNNLTGSVPQAVIDKFKDGTLSLGENPNLCQSDSCQRKKKKENKFLVPVLISVLSVIILILIAALAIIRKLTKRRETRETVSERPKEGSLKSGNSEFTFSDVATITNYFSRTIGRGGFGQVYLGTLTDGTQVAVKMRSQSSIQSPKALQAEAKLLTRVHHKNLVRLIGYCKDGTHMALIYEYMSNGNLQNKLLGREAADVLNWKQRLQIAVDAAHGLEYLHNGCKPPIVHRDMKSSNILLTETLQAKVADFGMSRDLAIESGAFISTVPAGTPGYLDPEYQSTGILNKKSDVYSFGIVLLELITGQPAIKNPGNIHIVGWVSPMIKRGDMRSIVDPRLQGAFNANSAWKALELALACVALTGMQRPDMSHVLEDLKECLEMEVTSRRIQSVGSHSIGSGNSLDDLPLILGTQLGPRAR

SEQ ID NO: 11297 - protein, 803 aa, Vitis vinifera
MNYEILIKIVNTRKYVYQNNDQHLKNVRSFPEGDRNCYTLWPGQGKNHKYLIRARFLYGNYDSKNQLPIFKLYLGVDEWTTVNIRNVTSTYRKEIIHIPITDYIDVCLVNIGSGTPFISVLELKRLNDSIYSPAEPGSLILYDRWDFGTQQEEWKEKDDVYDRIWKPNTWWSWLSINSSVVSSSFSTSDYKLPGIVMATAAKPANESESWGISLSIDDDPSQKLYMYMHFAEVEDHKGQIREFTVSVNDEPFSGPVAPRLLFSDTVSSKYSISGSTTKKLSFSLERTNRSTLPPIINAMEAYMIKEFPQSSTQQNDVDAIKRIKSDYAVGRNWQGDPCLPMEYQWDGLTCSHNTSPTVISFMNIFSIIFAQNACNSNYFMDLSYNNLTGPVPEFFADWPSLKTLNLTGNNLTGSVPQAVTDKFKDGTLSGRTMFYVMQVSEKIQIFVRPGEKPKVFSFFQFHFFLTTTIETVTERPKEGPLKSGNCEFTYSEVVGITNNFNRPIGRGGFGEVYLGTLADDTQVAVKVHSPSSNQGPKAFRAEAKLLTRVHHKNLVRLIGYCDDSTNMVLIYEYMSNGNLQQKLSAREAADVLNWKQRLQIAVDAAHGLEYLHNGCKPPIVHRDMKSSNILLTESLQAKIADFGMSRDLQSLSTDPVGTPGYFDPECQSTGNLNEKSDVYSFGIVLLELITGRRAIIPGGIHIAGWVSPMIERGDIRSIVDPRLQGDFNTNSAWKAVEIALACVASTGMQRPDMSHVVVDLKECLEREVASRRIQRVGGHSIGSGNFLENVPLVLSTEVAPHAR

SEQ ID NO: 11298 - protein, 882 aa, Vitis vinifera
MNFAEELPLPPPLLPMLQDIPHSRSRIRSGHWFISIDCGIAPGSYYTDDKTQIPYTSDADFTDTGINYNVSRSENPSKQLMNVRSFPEGARNCYTLEPEKGKGNKYLIRAFFMYGNYDSKNQLPVFKLHLGVDEWDTINFNNSSQTVRKEIIHVPKTDYIDVCLVNNGSGTPFISALELRPLGNSSYNKTESGSLLLFNRWDIGSEQEKLQVRYKDDALDRIWNSYMSTSWESITAGFESYSYSETRFKLPGIIMSTAATPKNESEPLRFFLDMDDPSQRFYLYMHFSEVLQLQGNQSRVFTIWLNGNLWSDAVAPERLTSTTIFSTNSVRGSRLSFSLQKTGESMLPPIINALEVYVIKEFSQSTTDQEDVEAIKKIKSVYMVRRNWQGDPCLPMDYQWDGLKCSDNGSPTLISLNLSYSNLTGKIHPSFSNLKSLQNLDLSYNNLTGSVPEFLAELSSLTFLNLEGNNLTGSVPQALMEKYQNGTLSLSLRENPNLCLSVSCKGKQNKNFIVPVLASIISVLVLFLLIAVGIIWNFKRKEDTAMEMVTKEGSLKSGNSEFTYSELVAITRNFTSTIGQGGFGNVHLGTLVDGTQVAVKLRSQSSMQGSKEFRAEAKLLMRVHHKNLVRLVGYCNDGTNMALIYEYMSNGNLRQRLSERDTDVLHWKERLQIAVDAAQGLEYLHNGCKPPIIHRDLKTSNILLNEKLQAKIADFGLSRDLATESGPPVSTVPAGTPGYLDPEYYSSGNLNKRSDVYSFGIVLLELITGQPAIITPGNIHIVQWISPMIERGDIQNVVDPRLQGDFNTNSAWKALETALACVPSTAIQRPDMSHVLADLKDCLEIEVGAMRTQRIDSYKMGSSNTLKSCAVDLENEMAPHVR

SEQ ID NO: 11299 - protein, 813 aa, Vitis vinifera
MNVRSFPEGNKNCYTLRPEGGKGNKYLIRARFMYGNYDSNNHLPKFKLYLGTDEWVTVNIEDASAYIREEIIHVPTTDDIYVCLVNIGGGTPFISTLELRPLNNSIYDQSEQGSLLLFNRWDFCKPENALHRPDDVFDHIWNLSAWSNEWDTLEAAYEISSLSHSEYKLPMSVMMDAVIPVDISEPWNFSLDLDDDPSQNLYIYMHFAEVQKLREGDIREFTVSLNEDDSWGGGEPVIPNYMVSNTLHHPSAVSGSTTNELSFALKKTNRSTLPPLINAMEVYKIKDFAQSSTKQGDVLAVKNIRSAYRLTRHWQGDPCLPLDFPWDGLQCSYSSDSPTIISLNLSSSNLTGNIHPSFSQLKSLANLDLSYNNLTGTVPEFFADLPLLMVLNLTGNQLTGSVPQTIMEMFKDKDRTLSLGANPNLCPSVSCQGKEKKKKNRFLVPVLIAILTVTVILVLITALAMIIRKFKRRETKETVSERPKEGSLKSGNSEFTFSDVASITNNFSRTIGRGEFGQVYLGTLADGTQVAVKMRSESSMQGPKALRAEVKLLTRVHHKNLVRLIGYCNDGTNIALVYEYMSNGNLQQKLSGRAAADVLNWKQRLQIAVDAAHGLEYLHNGCKPPIVHRDMKSSNTLLTETLEAKIADFGMSRDLESGALLSTDPVGTPGYLDPEYQLTGNLNKKSDVYSFGIVLLELITGQPAIKNPGSIHIVGWVSPMIERGDIQSIVDPRLQGDFHTNSAWKALEIALACVALTGMQRPDMSHVLADLKECLEIEMASRRTQSVSHSIGSGNFLEDSPLTLGTQSAPRAT

SEQ ID NO: 11300 - protein, 798 aa, Vitis vinifera
MDVRSFPEGDRNCYALPPGQGKNHKYLIRAWFMYGNYDSKNQPLVFKLYLGVDEWATVNITNASVIIRKEIIHIPTTDDIDVCLVNAGSGTPFISVLELQQLNDSIYSPTEPGSLLLHDRWDFGTQKEKWSLISKDDVYDRIWRPFTKSSWESINSSVVRSSFSVSDYKLPGIVMATAATPANESEPLRISLDIDDDPSQKLYIYMHFAEVKEGVFREFTTFVNDDEAWGGTVLTTYLFSYTAESDYSMSGSTTKKLSFSLKRTNRSTLPPIINAMEVYIIKEFSQASTQQNDVDAIKGIKSEYAVSRNWQGDPCLPIKYQWDGLTCSLDISPAIITFRNLSSSNLAGNILTSFSGLKSLQNLDLSYNNLTGPVPEFFADLPSLTTLNLTGNNLTGSVPQAVMDKKGEEEEQVPCSCSHSHSECNCDPDPHNCPCNDHPEVQKERNQRYFLLSFSFFFSLSEDLTFYCSILIVISFATTIEKSGNSEFTYSEVVSITNNFSQTIGRGGFGQVFLGTLADGTQVAVKVHSESSIQEAKALQAEVKLLTRVHHKNLVRLIGYCDDGTNMVLIYEYMSNGNLQQKLSGREAADVLNWEERLQIAVDAAHGLEYLHNGCKPPIVHRDMKSSNILLTETLEAKIADFGMSRDLESGALLSTDPVGTPGYLDPEYQSAGLNKKSDVYSFGIVLLELLTGRPAIIPGGIYIVVWVSHMIERGDIESIVDRRLQGEFNTNSAWKAVEIALACVASTGMQRPDMSHVVVDLKECLETGVASRRIKMVGSHLEDVPVVLSTESAPHAR

SEQ ID NO: 11301 - protein, 771 aa, Vitis vinifera
MNVRSFPEGARNCYTLEPEKGKGNKYLIRAFFMYGNYDSKNQLPVFKLYLGVDKWDTIKFKNSNKIVRKEIIHIPKTDYIDVWDFGSEQEKFQVRYKDDALDRIWNSYKNAFWESITAGFESYSYSDNPFKLPGIVMSTAATPKNESEPLSFFLDMDYPSQRFYLFMHFSEVLQLQGNQSRVFTIWLNGTLWNDPVVPKRCSSTRIFRTNSVKGSRLLFSLVKTDESTLPPIINALEVYVIKEFSQSTTDQDDVEAIKKIKSVYMVRRNWQGDPCLPMDYQWDGLKCSNNGSPTLISFRNLSYSNLTGKIHPSFSNLKSLQTLDLSHNNLTGSVPEFLTELPSLTFLNLAGNNLKGSVPQGLMEKSQNGTLYLSLGENPNPCVSVSCKGKQNKNFVVPALASVISVLVLFLLIAVGIIWNFRRKEDRYFLSFIPLDFMVTREGSLKSGNSEFTYSELVTITHNFSSTIGQGGFGNVHLGTLVDGTQVTVKLRSQSSMQGPREFQAEAKLLKRVHHKNLVRLAGYCNDGTNTALIYEYMSNGNLRQRLSARDTDVLYWKERLQIAVDVAQGLEYLHNGCKPPIIHRDVKTSNILLNKKLQAKIADFGLSRDLAIESGSHASTIPAGTPGYLDPEYYSSGNLNKRSDVYSFGIVLLELITGLPAIITPGNIHIVQWISPMLKRGDIQNIVDPRLQGDFNTNSAWKALETALACVPSTAIQRPDMSHVLADLKDCLEMVGPMRTQRIDSYKMGSSNSLKSYAVDLEGEMAPHVR

SEQ ID NO: 11302 - protein, 498 aa, Vitis vinifera
MGDTEEANIDMIQRLQSSFGTSSSSIQKQPMSMNQLDIPQLNASSQIRAPMMRHFSPNFSGDSSKRHGFPPSHPHQIPPISPYSQIPVPRPANQQLVSQNFSPGPSHSRSLSQPSFFSLDSLPPLSPSPYRDSSSTSISDAVSADISMEDRDASSHSVLPPSPSPFSRGNSMRVGENLPPRKAHRRSSSDIPFGFSSIMQSSPPLIPLRGEVVDDLLSAYMNLDNIDARKMDLDSRASGTKTNGGDSSDNEAESSVNESGNILQLRRGKESKEVQVVTLLQPPDIIEVFMGKMNFGDDNSMDGNSATFSLEFGNGEFSGAELKKIMANEKLAEIALTDPKRAKRILANRQSAARSKERKMRYISELEHKVQTLQTEATTLSAQLTLLQRDSAGLTSQNNELKFRLQAMEQQAQLRDALNEALTAEVQRLKLATAELGGESQASKCLVPQLSVNPQMFHLHHQQPTQLNIHQLQQQQQQQHNQQQQQNGSTTTKHESNQ

SEQ ID NO: 11303 - protein, 146 aa, Vitis vinifera
MSRVTGTVKWFNDQKGFGFITPDDGGDDLFVHQSSIRSEGFRSLGEGEAVEFVVESSDDGRTKAVDVTGPDGNPCEQKGDDWWGVNVYFHMFFSFLSSYLSFFFFSYCHGLFLSGSSSYSPPFSFQVMFCNCLGLSFIGFFLDRIW

SEQ ID NO: 11304 - protein, 418 aa, Vitis vinifera
MAKPVSIEVWNPCGKYRVVSTKPMPGTRWIDLLVQQDCRVEICTQKKTILSVEDIIALIGDKCDGVIGQLTEDWGETLFSALSRAGGRAFSNMAVGYNNVDVNAANKYGVAVGNTPGVLTETTAELAASLSMAAARRIVEADEFMRAGLYDGWLPHLFVGNLLRGQTVGVIGAGRIGSAYARMMVEGFKMNLIYYDLYQATRLEKFVTAYGQFLKASGEQPVTWKRAASMDEVLREADLISLHPVLDKTTYHLVNKERLSMMKKEAILINCSRGPVIDEVALVAHLKENPMFRVGLDVFEDEPYMKPGLAEMKNAIVVPHIASASKWTREGMATLAALNVLGKIKGYPIWHDPNKVEPFLNENSLPPAASPSIVNAKALGSIHPLKPVNYVGVLVNVSTANFRVPCRFACFKAMSRRG

SEQ ID NO: 11305 - protein, 913 aa, Vitis vinifera
MEDGSFTPNSVFGAPSDSAMDLNFMDELLFEGCWLETTDGFSFLQPGASTSSALNDSSHHSLTFENPNTPEKSYGDDGQRSSLPENPPPFYPQAEGLVGTQSDNWKTFEAATASGQSESFLVERTELNRRLWIGPSANPGPVSSVKNRLILAIRNLREFTKERDVLIQIWVPIERGGKNDSKEQVGLPGRVFLGKVPEWTPDVRFFKSEEYPRINYAQRYNVRGSLALPVFERGSGVCLGVIEIVTTTQKINYRPELENVCKALEAVDLRSSEVLIPPVKACNELYQAALPEILKVLARVCRTHRLPLAQTWAPCIQQGKGGCRHSDKNYALFLSTVDHAYYVTDPKFKGFNEACFDHHLFRGQGVVGRALTTNQPCFESDITAFSKTEYPLSHHARMFGLRAAVAIRLKSIYNGSADFILEFFLPTDCQETEEQKQVLNSLSIVIQQTCQIFRVVTEKDLEKESILPVGEILFASDERVKQEGSVKLLSPPIKEPSREESSWIAHMMEAQKKGKGVSVSLEYQKEEPEEEFKVTTNWDNTEVELHHGQVFSEFGQPQQNSGAKGSVEGGGDSSFGGQHSSGSRKAREKRRTKTEKTISLQVLSQYFAGSLKDAAKSIGVCPTTLKRICRQHGITRWPSRKIKKVGHSLRKLQLVIDSVQGTQGAIQIGSFYTNFPELSSPNVPGTVPFSSSKMTDDSKQLNPQSEVLFSPGVTTSKSPSSSCSQSSSSSFCCSTGAKQQSTTVNASVSGDVLMAEDPVLLKRTRSDAELHVSNPDEPKLLVRSQSHKSFGEHPCVETLPPLPKSNSRALRDGGGFRIKATFGEENVRFSLQLNWSFKDLQQEIARRFGIDNMNSIDLKYLDDDCEWVLLTCDADLEECIDVYRSCQSRKIKLSLHHSSRLKLKSSAFSSGPS

SEQ ID NO: 11306 - protein, 401 aa, Vitis vinifera
MVFSKEASSSSHGLNPMSPEEAPLLPKLKLLSSQPKTFANVFIAVVGAGVLGLPYCFKRTGWVVSLLMLFSVAALTHHCMMLLVRTRRRLESVMGFTNIASFGDLGFIVCGSVGRFAVDLMLVLSQAGFCVGYLIFIANTLANLFNSPTPTNLHPRILGLMPKTVYIWGCIPFQLGLNSISTLTHMAPLSIFADIAVGSLSMFFYGLGVAVYAFEGVGMVLPIESETQEREKFGKVLALAMASISLMYGGFGALGYFAFGEDTKDIITANLGTGLVSFLVQLGLCVNLFFTFPLMMNPVYEVVERRLYNGRYCLWLRWLLVLTVILVALLVPNFTDFLSLVGSSVCCGLGFVLPALFHLMVFKEEMGWGGVSLDVGIVVVGVVLGVSGTWYSLVEIFSVKV

SEQ ID NO: 11307 - protein, 255 aa, Vitis vinifera
MDFGDEVQKVYCWISHIGSLGLKVLWHFLHFIVSVWFLARQAAYVLESCFISSGLLKRYEALNLGNLRYLAIVIESEEAHQIPKVIELLNWLATIGVKHVCLYDNEGVLKKSKEAILEKLTDATLFEGVDENNLLLDQEHITLEFASISDGKGAVTKAANILFMKYLKSADSGGSSAESIFTEPHMAEALKAVGCRGPDPDLLLIYGPARCHLGFPAWRIRYTEIIHMGPLKSMKYGSLLKAIYKFSMVHQNYGK

SEQ ID NO: 11308 - protein, 139 aa, Vitis vinifera
MKKNAGELSLKFFLRIFEIAPSAKKLFSFLRDSDVPPEQNPKLKPHALSVFVMTCESAIQLRKAGRVTVRESNLIDLGATHFKYGVVDEHFEVTKYALLETIKEAVPDMWSPEMKSAWAEAYDQLVAAIKKEMKPPQTS

SEQ ID NO: 11309 - protein, 137 aa, Vitis vinifera
MKKNSGELGLKFFLKIFEIAPSAQKLFSFLKDSKVPLEKNPKLKSHAMAVFVMTCESAVQLRKAGKVTVRDSTLKKLGSVHYKSGVLDEHYEVTKFALLETIKEAVPEMWSPEMKNAWAQAYDQLVVAIKSEMKPSS

SEQ ID NO: 11310 - protein, 281 aa, Vitis vinifera
MAEGGGHEGFLWENQSWGFSNSDNSGGSDKKSGEKQPGSASNSQTAATGMDLVPPDKKRGRGGAIKNGKNGKGSGEGNEGKSGGGGGGESDHEIHIWTERERRKKMRNMFSSLHALLPQLPPKADKSTIVDEAVNYIKTLQHTLQKLQKQKLERLQGATTVNYEPSIITSQKLAFDSREAFLADQGSSSNLAITPSNSSNSLSVARVPAVFQSWTSPNVTLNVCGNEAQISVCSPKKPGLLTTICYVLEKHKLEVISAHVSSDYNRSMYMIQTNVSLLFFP

SEQ ID NO: 11311 - protein, 653 aa, Vitis vinifera
MKTIQTTPKPFIDFPAPNHGRDHRKTTIKCIIGSCLTSTISSTVPTAQLSTIHLRHTAMAAASSSTLFPSNKLSSNSLSRKLSLAPAFSVAVVVPRRRRSLVVVATALDAKPTVLVAEKLGAAGLDLLKDFANVDCAYNLSPEELCTKISLCDALIVRSGTKVSREVFEASSGRLKVVGRAGVGIDNVDLAAATEHGCLVVNAPTANTVAAAEHGIALLTAMARNVAQADASVKSGKWQRNKYVGVSLVGKTLAVMGFGKVGSEVTRRAKGLGMHVIAHDPYAAADRARAIGVELVGFDEAISTADFISLHMPLTPATSKMLNDETFAKMKKGVRIINVARGGVIDEEALVRALDAGIVAQAALDVFTEEPPPKDSKLILHENVTVTPHLGASTMEAQEGVAIEIAEAVVGALKGELAATAVNAPMVPAEVLSELKPFVELAEKLGRLAVQLVSGGSGVKSVKVTYASARAPDDLDTRLLRAMITKGLIEPISSVFVNLVNADFSAKQRGLRITEERSILDGSPESPLEFIQVQIANVESKFASAISESGEITVEGRVKDGIPHLTKVGSFEVDVSLEGSIILCRQVDQPGMIGKVGSILGEENVNVSFMSVGRVAPRKHAVMAIGVDEQPSKVTLKKIGEIPAVEEFVFLKL

SEQ ID NO: 11312 - protein, 190 aa, Vitis vinifera
MEWNLQPSTWDLIELNQEKDPYMPTTVGSGTLLGQKTKEKFSVDLKLGRLGDLGDGSTDKFKDSKSLRVSSPSGSSRRARALNGTQNVSCLVDGCTSDLRNCREYHRRHRVCERHSKTPVVIIGGQEKRFCQQCSRFHSLGEFDEVKRSCRKRLDGHNRRRRKTQPESFYLGSGNFLSNHQGRNPLLNTL

SEQ ID NO: 11313 - protein, 569 aa, Vitis vinifera
MAGALHLCGVTTPNCAVSSRRSLHCQPLWSQRVDFTLSVAGGSRLCRSVKDSSRKNVLRVCCSGGSIDVLEKSKTENQTTDGVTEQLTIAMKFGGSSVASAERMREVADLILSFPNERPVIVLSAMGKTTNKLLLAGEKAVSCGVSNASCIDELTFIKELHLRTADELGVDSSVISAHLEELEQLLKGIAMMKELTLRTKDYLVSFGECMSTRLFAAYMNKIGAKARQYDAFDIGFITTDDFTNADILEATYPAVAKRLLGDWISDPAIPIVTGFLGKGWRSCAVTTLGRGGSDLTATTLGKALGLREIQVWKDVDGVLTCDPNIYSHAKPVEYLTFDEAAELAYFGAQVLHPQSMRPAREGDIPVRVKNSYNRNAPGTLITRTRDMSKAVLTSIVLKRNVTMLDIVSTRMLGQFGFLAKVFSIFEELGISVDVVATSEVSISLTLDPSKLWSRELIQQASELDHVVEELEKIAVVNLLQHRSIISLIGNIQMSSLILEKAFHVLRTKGVNVQMISQGASKVNISLIVNDDQAEKCVRALHSAFFESLSEVDRECQSDNGSTSAFSNGH

SEQ ID NO: 11314 - protein, 123 aa, Vitis vinifera
MSPSLRTHHSFPPLLTLTPELKTTLDKVVTSNKVVLFMKGTKEFPQCGFSNTVVQILNSLNVPFETINILENEILRQGLKEYSNWPTFPQLYIEGEFFGGCDITVDAYNSGQLQEQLEKAMCS

SEQ ID NO: 11315 - protein, 1246 aa, Vitis vinifera
MSFQENRLNIQAKLSSWYAAKVGFFRVFSLAKPEAGKLIVATIALLVASTSIVMLPKYGGMVIDIVSRDIRTPEQQSEALTAVKNAALAVVLMVVLGSLCVAVREWLFASVSERIVAHLRKDLFSHLINQDIAFFDVTPTGELLSRLSEDSQIIKNVATSNLSSALTSITIVFIGLGFMFSSSWKLTLLVLALVPVVSVAAHVFGRYLRELSHKTQAAAAVACSMAEESFGAIQTVRSFAQEGYAISSYSEKVHETLKLALRQSKLVALFYGGINAVFTLSIVIVVVYGASLTIARSMTAGSLASFILYSLTVGISMLSLFGLYTTAMKAAGASRRVFQLLDRVSPMPISGHKCPLGNPDGDVELDDIWFAYPSRPSHMILKGISLKLRPGSKVALVGPSGGGKTTIASLIERFYDPLKGKILLNGVPLVEISHKYLHKKISIVSQEPVLFNCSVEENIAYGFDGKASSSEIENAAKMANAHDFIANFPEKYRTVVGERGLRLSGGQKQRIAIARALLMDPRVLLLDEATSALDAESEYLVQDAMESLMRGRTVLVIAHRLSTVKTADIVAVICDGRIAQSGSHEELLSKNGIYTGLVKRQLQGPSTPHYKTMFCWHAHIKIFDGFKKPNDDQAANDPLTDLERGDADQVIVICVAAKVGFFRVFFLAKPYAGKLIIATIALLIESTSRVMIPKYCGIIIDIVSRDIRTPEQQSEALVAVKNAVLDIVMIVVLGSLCSALEEWLFASVSERIVARLRKDLFSHLINQEIAFFDVTKTGELLSRLSEDSQIIKNVATSNLSSALTSITTAAITLSFMFSSSWKLTLLALAVVPVISVAARKFGYHLRELSNTTQAAAAEASSMAQESFGAIRTVRSFAQEGYAISSYSEKVDHTLKLGLRQAKLVALFYGGLDAASTLSLITVMVYGAILTIARSITTGSLTSFILYCFTVRSSVSSLAGLYTAGMKAAGASRRVFQLLDRVSTMPISGNECPLGNPDGDVELDDIWFAYPSRPSHMILKGITLKLRPGSKVALVGPSGGGKTTIAGLIERFYDPLKGKILLNGVPLVEISHKYLHKKISIVSQEPVLFNCSVEENIAYGFDGKASSSEIEHAAKMANAHDFIENFPEKYRTVVGERGLRLSGGQKQRIAIARALLMDPRVLLLDEATSALDAESEYLVQDAMESLMRGRTVLVIAHRLSTVKSADTVAVISDGRIAESGNHEELLSKNGIYTGLVKRQLQGPSTPN

SEQ ID NO: 11316 - protein, 135 aa, Vitis vinifera
MDKLLCNIIGFTEEQEALVVKSWNSMKKNAGGLGLKFFLKIFEIAPSTKKLFSFLKDSKVPLQKNPKLKSHGMTFFFFFYYCCSTSKSRQNSTLKKLGVVHYKSGVLDEHYEVTKFALWETIKETVPEMWSLASK

SEQ ID NO: 11317 - protein, 243 aa, Vitis vinifera
MGRGRVELKRIENKINRQVTFAKRRNGLLKKAYELSVLCDAEVALIIFSTRGKLYEFCSSSSMLKTLERYQKCSYGAVEVSRPSKELESSYREYLKLKSKFESLQRTQRNLLGEDLGPLNTKELEQLERQLETSLKQVRSTKTQFMLDQLSDLQNKEQVLVESNKALTRKLDEISVKNHLQLSWESGEQSMPYGHQQAQSQGFFQPLECNPTLQIGYNPAGSSQLSAPSNAQNVNGFIPGWML

SEQ ID NO: 11318 - protein, 240 aa, Vitis vinifera
MKETTMGEIGLPPIREHSEASICFPVSTSGEKPVYGRSSSFNSLMPFLTENWGDLPLKVDDSEDMVLYGVLRDAVSVGWTPFGLPPPPEVKEEPREEVAAPAMPEVRAAPSRGRHYRGVRQRPWGKFAAEIRDPAKNGARVWLGTYETAEEAAVAYDRAAYRMRGSRALLNFPHRVGSGEPDPVRITAKRRSPEPEPSPESGSPKRLKNGLAAEVERRSNVFQVGHQMGALPVGEQLLVV

SEQ ID NO: 11319 - protein, 603 aa, Vitis vinifera
MKKKAEYINFWLEFAYYLSFQVKFKAGEEACTLDGTVDCRGNPAIRSRSGKWFAGIIILLNQGLATLAFFGVGVNLVLFLTRVLQQNNADAANNVSKWTGTVYIFSLVGAFLSDSYWGRYKTCAIFQVIFVIGLVSLSLSSYIFLVKPEGCGNEDSPCPSHSSLEIGLFYLSIYLVALGNGGYQPNIATLGADQFDEEDPKEGHSKVAFFSYFYLALNLGSLFSNTILSYLEDEGMWALGFWVSAGSAFLALILFLGGTPRYRHFKPSGNPLSRFCQVMVAAMRKFRVEMPPSAEDLYEGDGKECSNNSIRRILHTDGFKFLDRAAFISSKDSDNQEQGFYNQWRLCPITQVEEVKCILRLIPIWLCTIIYSVVFTQMASLFVEQGAAMKTTVSNFRIPPASMSSFDILSVAAFIFLYRRVLDPLVGRIRKTDTKGLTELQRMGIGLIIAIIAMIAAGIVECYRLKYAQKDCTNCEGSSSLSIFWQVPQYAFIGASEVFMYVGQLEFFNAQTPDGLKSFGSALCMTSISLGNYVSSLLVTMVMKISTEDHMPGWIPGNLNKGHLDRFYFLLATLTALDLVVYVACAKWYKCIKMEDRANEYGV

SEQ ID NO: 11320 - protein, 321 aa, Vitis vinifera
MEKSVSRNSDRLKIFSGTANPTLSKEIAWYMGKELGKINIKRFADGEIYVQLEESVRGCDVYLVQPTCPPANENLMELLIMIDACRRASAKTVTAVVPYFGYARSDRKARRESIAAKLVANVITKAGADRVLACDLHSGQSMGYFDIPVDHIYCQPVILDYLASKTICCNDLVVVSPDVGGVARARAFAKKLSDAPLAIVDKRRQGHNVAEVMNLIGDVKGKVAVMVDDMIDTAGTITKGAALLHQEGAREVYACCTHAVFSPPAIERLTSGLFQEVIITNTIPTQEKNYFPQLTVLSVANLLGETIWRIHDDCSVSSIFL

SEQ ID NO: 11321 - protein, 532 aa, Vitis vinifera
MTSSSLRWLLFLCPIFFFSGASALNYSNASYTSLKSVTSFCKSTPYPDVCFQSLKVHVSININPNIITFLLHSLQTAISEAGKVSTLLSTAGQHSDVIEKQRGTIQDCRELHQITVSSLQRSVSRVRSGDSQKLKDARAFLSASLTNKVTCLEGLDSAAGPSKPTLVNSIVAAYKHVSNCLSVLSKSTPQKGPINRRLMGAPAWASRRILQSSGDEYDPSEVLTVAADGTGNFTTVTDAINFAPNNSNDRIIIYVREGVYEENVDIPSHKTNIVFLGDGSDVTFITGSRSVVDGWTTFRSATVAVSGEGFLARDITFENRAGPEKHQAVALRINADLAAVYKCTILGYQDTLYVHSFRQFYRECDIFGTIDFIFGNAAVVFQACNIVARMPMAGQFTVVTAQSRDTSDEDTGISIQNCSISATDDLYSNRGSVKSYLGRPWKVYARTVYLESYIDDFIDPSGWTEWNGNEGLDTLYYGEYDNNGPGSGTENRVTWQGYHVMEDNDAYNFTVSEFITGDEWLDSTYFPYDDGI

SEQ ID NO: 11322 - protein, 226 aa, Vitis vinifera
MHFYISIISKPKISNLYCLTPTLAAPHFQLFSSSEIVMMALPPLFAVVFVLATLSSTFAEDLVHSSCIHASYPNICLRTLSSYSGPAKTPRDLAQAAVKVSLSRAQRVSTYLNGVAGQGKASKREQVALSDCVEQISDTVEELSNTLKELKHLRPGTFRWQMSNAETWVSAALTNEDTCLDGFQGVDGKVKADVKRKITNVARVTSNALYLINRLDSTRGRAGLEP

SEQ ID NO: 11323 - protein, 477 aa, Vitis vinifera
MQVIFALDLLALVWLAAAALLSKLFSFRPAHKQNLPPGPKPWRIIGNLNLIGHLPHLSLHKLSQKYGQIMQLQFGSFPVVVASSPEMARQFLKTNDHLFASRPQTAAGKYTAYNYSNITWAPYGPCWRQGRKIFHTELFSWKRLESCEYIRVEERRAFVSRLYALSTSMSLNPGEFQEMLDELFLLNGVLNIGDWIPWIAFLDLQGYVKRMKALRDKFDRLFDHVIEKHRARREAADFVAKDMVDMLLRLADDPDLEVKLGTDGVKGLTLDLLAGGTDTSATTMEWAMSEILRQPSIATKATEELDRVIGRDRWVEEKDIPQLPYIDAIVKETMRLHPVAVLLAPHLALQDCNVSGYDIRKGTRVLVNAWSIGRDPNIWDAPEEFRPERFLGKAIDVNGQNFELLPFGSGRRMCVGYRLGLKMIQSSLSNMLHGFHWKLPGDMKTEELNMEEVFGLTTPRKVPLVAVMEPRLPSHLY

SEQ ID NO: 11324 - protein, 181 aa, Vitis vinifera
MISDQTGAQKPSNTALNFGDHKQQSLPSETDYNSINSSNINSNNTIRVCADCNTTKTPLWRSGPRGPKSLCNACGIRQRKARRAMAAAAATANGTILPTNTAPTKTKAKHKDKKSSNGHVSHYKKRCKLAAAPSCETKKLCFEDFTISLSKNSAFHRVFLQDEIKEAAILLMALSCGLVHG

SEQ ID NO: 11325 - protein, 392 aa, Vitis vinifera
MDPDFKPTISEAHPETMDFLSRAWCNFAVQAIQPELQDQSVVILDNPIKKFGNDTKAPFPKMDNSVKMDDAGIKSPPPWKTNDVKSWIWMQQAMHPELNYNSYFRKKWISWKIMPLGSNISIKKWFKDIKLKRKEEDRLQRAEVYAAISVAGVAAALAAIAAENPKQDHSNATKESAVASAAALVAAQCAQVAEAMGAKREQLSTVMCSAMSGTSASDILTLTAAAATSLKGAATLKGRAGYKNRLNGSAPVLPIEESNELDSDLEKHRSMLAKGAQLTFHTSDGRCLLRSVSIILNSQAKVILKIRKLNLMNTFSRKKESIIQDLHAELYDDSEADERNTCYLIVLTTNCGTIKLDMGDDYHLYKIWATTVNHMLTFSTSFTRYELQFYKS

SEQ ID NO: 11326 - protein, 392 aa, Vitis vinifera
MEPDFKPTISEAHPETMDFLSPAWCNFAVQAIQPELQDQSLVILDNPIKKFGYDTKAPFPKMDQSVKVDDAGIKSPPAWKPNDVKSWIWMQQAMHPELNYNSYFRKKWLSWKIMPFGSSVSIKKWFKDIKLKRKEEGRLQRAEVHAAISVAGVAAALAAIAAESSKQDQSNATKESAVASAAALVAAQCAQVAEAMGAKREHLSTVMSSAMSGTSASDILTLTAAAATSLKGAATLKARAGYKNRLNGSAPVLPIEESNEPDSDLEKHRTMLAKGAQLTIHTSDGRCLLRSVSIILNSQAKVILKIRKLNLMNTFSSKKESIIQDLHAELYDDSEADETNTCYLIVLTTNHGTIKLDMGDDYHLYKIWATTVNHMLTLSTSFTRYELQFYKT

SEQ ID NO: 11327 - protein, 467 aa, Vitis vinifera
MDDIEIPQYFLCPISLQIMKDPVTAMTGITYDRESIEQWLLTAKDTTCPVTKQPLERDFVLTPNHTLRRLIQAWCADNATNGVDRIPTPKTPLDRTHVVKLIRDLGVAQLYLKTLQKMEALTRDNERNRNCMADAGAAKAIVLLIIKCFKENKTTGVEEGLRILHLIWSPTSEMKLLLKENYDFVDAVTWALGCETDNYVAVRSNAVLVLKNIVEVASPNLLERLKFEFLNRLIRTMREKISQAAMKAALYVLMEVCPWGRNKWQMIEAGAVFQLIEMELENPEKKITEIIFCLLGHLCSCADGRAQFLAHAGSMAMLSKRILRVSNTTDDRALHIIALISKFSGTNEVLMEMLRVGAVSKLCMVLQADCAKYLKEKAREILRLHSKVWNNSPCIAVYLLTRYARLQKESDLKKESEKNKTSENRNKKLKKTEKNERKIKRIDSAIERKVEKKINFYAKTIMQVSGR

SEQ ID NO: 11328 - protein, 414 aa, Vitis vinifera
MDEIDVPSHFMCPISLQLMRDPVTVATGITYDRENIERWLFSCKNNTCPFTKQVLVDTDLTPNHTLRRLIQAWCIVNACHGVERIPTPKPPIDKAQIIKLLNDAIKFPQMQLKCLQRLRSIAFESDRNKKCLEAAGAVEFLASIIKKDESAVIEVVLEDGSREFTRASDEALSILYQLETSEAALKSLVSSNYGFIESLVHVLKCGNYQSRAYAAMLLKSIFQVADPIQLINASPELFTEIVHVLRDGISQQASKAALKLLVELCPWGRNRIKAVVAGVSHVLIEHLLDTSEKRTCELILVVLDQLCSCAEGRAELLKHGAGLAIVSKKILRVSQVGTDRAVKILASVSKFSATSRVLQEMLQVGVVSKLCLVLQVDSSKKTKEKTREILNLHSRVWKNPSCIPARLFSSYPSS

SEQ ID NO: 11329 - protein, 270 aa, Vitis vinifera
MQDIHSMGAGGGRIFGGDRRLRPHQNQALKCPRCESLNTKFCYYNNYNLSQPRHFCKSCRRYWTKGGVLRNVPVGGGCRKTKRSKAKSSSDAPRERKSNSHSSSESSSLTATTTAAATTATTEAVSAPSSNAASTLVGFRESRFFAPQSPNPNFEMPTLLDHSSDGNIFPEIGSFTSLMTGSNDPAALGFNISDISPFKYQEQEITAGFLDQTVQVELSALQNRSNHGGFPSLDWQTSGDQGIFDLPGNVDQGYWTQSQWSDNDHPLYLP

SEQ ID NO: 11330 - protein, 328 aa, Vitis vinifera
MSTLSKSASSSSEEDAELRRGPWTLEEDTLLIHYIASHGEGRWNLLAKCSGLRRTGKSCRLRWLNYLKPDVKRGNLTPQEQLLILELHSKWGNRWSKIAQHLPGRTDNEIKNYWRTRVQKQARHLKIDSNSRAFQDVIRCVWMPRLLQKIEGSSSTSSTTSQVSIIPQSLNHADSQQHSAAAPPPVVAQAPVQGPLSINETINNLEHNEKNSSSENCTSPSICSSESMNISQISQIPDYPTSPFQAMSNSDDYSTLLKGYYNVDNSNYEMETFNLASMSAPQGDFENPVGDCPMVESNWVDSDLADSLWNMDELWQFWKLQEGAPRLF

SEQ ID NO: 11331 - protein, 381 aa, Vitis vinifera
MLPYYLSSFGNPHSRTHLYGWESELAVEKARAQVAALINASPKEIVFTSGATESNNISVKGVMHFYKDKKRHVITTQTEHKCVLDSCRHLQQEGFEVTYLPVGSDGIVDIDQIRSAIRPDTGLVSVMAVNNEIGVIQPIEEIGKMCKELGVPFHTDAAQALGKIPIDVEKMNVSLMSLSGHKIYGPKGVGALYMRRRPRIRVEPQMNGGGQERGIRSGTVPTPLVVGMGAACELAMKEMEYDDERITALQKRLLNGINAKLDGVVVNGSRERRYAGNLNLSFAYVEGESLLMGLKEVAVSSGSACTSASLEPSYVLRALGVDEDMAHTSIRFGIGRFTTDAEIDRAVELTVQQVEKLREMSPLYEMVKEGIDIKSIQWAQH

SEQ ID NO: 11332 - protein, 430 aa, Vitis vinifera
MISNSAIRAVVSSEKETVTSGASNGGLRGKLNKVVLAYSGGLDTSVIVPWLRQNYGCEVVCFTADVGQGIKELEGLEEKAKASGACQLVVKDLKEEFVKDYIFPCLRAGAIYERKYLLGTSMARPVIAKAMVDVAKEVGADAVSHGCTGKGNDQACIEILTFFALNPELNVVAPWREWEIRGREDAIEYAKKHNVPVPVTKKSIYSRDRNLWHLSHEGDILEDPENEPKNDMYMMSVDPEHAPDQPEYIEIGMVSGLPVSVNGKELSPASLLSKLNEIGGRHGIGRIDMVENRLVGMKSRGVYETPGGTILFTAARELESLTLDRESIQQKDSLALKYAELVYAGRWFDPIRESIDAFMKKITETTTGSVRLKLYKGSVTVAGLKSPYSLYRQDISSFESGQIYDQADAAGFIRLYGLPMKVRAMLEKGI

SEQ ID NO: 11333 - protein, 374 aa, Vitis vinifera
MASMAATSKMGLHFSEDLRKKKLNKNVGLAKKLLKVEYYCSPMIRKENLLRRKLSVVANSTGYRAAQTDMINGKKLNGIHAGKMISSTDACMLGKFVEERFVYRQTFVIRSYEIGPDKTATMETLMNLLQETALNHVSSSGLAGNGFGATREMSLRKLIWVVTRIHIQVEKYSSWGDVVEIDTWVDAAGKNGMRRDWIIRDCNTQKIITRATSTWVIMNRETRRLCKIPEQVREEVQPFYLNRLAIAAAAQNHNEKIDKLTDETAGRIRSGLAPRWSDMDANLHVNNVKYIGWILESVPVDVLEHYNLTSMTLEYRRECRQSDLLESLTSMKAKVSEESSNKSRDLLSTHLLRMDDDKAEIIRARSEWQSKQQH

SEQ ID NO: 11334 - protein, 681 aa, Vitis vinifera
MVLKKKQDYGFNGFHVSTIPRAPRSIRRRGSIKKPVEDSQICAIDLLATLAGKLLQESESSSASSNVAAGKDRLNISKDGIKQELQDDDKPLKGECLDQGSCEGIVFVSKLASQDLSPKYTVKQFPHAVHDAVLDCTSTVASPDYLDKRGSPDCGETCGDLENGAEIRQDAEGEESGGLTMANRCSSKDSVELCMKNPAQINSDSNVKLSLNRDSIPNASFPKHRNDVKIGIIDDDENSYRCNQHGTKIKAFRSSPCIGDQRIRKLLTSRYWKVAPKLKDCELSNTDGGIKPVFRKRKFCGTRKRYQRETTFKRRKLFERHMVVASDGGISSESVTNSPEKNMNTEMGGSAAMLHGVSGLSSSVISHQASFNSGDSHVKFSIKSFRVPELFIEVPETETIGALKRTVMEAVNSIFGGGLHVGMFLQGKKVRDDYKTLRQTGISHNDNLDTLGFALEPSPIHPSPPLHTEDPPFLLPSDTSQLLTRSPDPPTFDSGFSDATPDPSPLTNLGNQVEKIHDSVPSPTDILTDKTMPDSRALVAVPAMSLEALAVVPMNMKTNRADLVQRRTRRPFSVSEVEALVHAVEELGTGRWRDVKLRAFDNAKHRTYVDLKDKWKTLVHTARISPQQRRGEPVPQEVLDRVLSAHAYWSEHQAKQHGKHQVGTLRITGPLAERDGIGQDI

SEQ ID NO: 11335 - protein, 437 aa, Vitis vinifera
MNHPLLPDWNIEGDVPVTNQKKPMGQEHELVELLWRNGQVVLHSQTQRKSGLAPNESKQVQKHDQTMLRNGGSCGNWSNLIQDEESISWIQYPLDDSLDKEFCSNLFMELPPNDPVQPEKPVRHSEQEKSVPSSQQPIFKHLGSPEFPGNPMPPPKFQVPGSGSGNMAQGGDAKEGSVMTVGLSHCGSNQVVNEADLSRFSSSGGDRRQTETLEPTVTSSSGGGSGSSFGRTYKQSTDTNSHKRKGREAEESECQSEAAEHESAARNKASQRSGSTRRSRAAEVHNLSERRRRDRINEKMKALQELIPHSNKSDKASMLDEAIEYLKSLQLQLQLMWMGGGVAPMMFPGVQHYMARMGMGMCPPPLPSIHNPMHLPRVQLVDQSTSAVPPSNQPPICQTPVLNPVNYQNQMPNPNFPEQFAHYMGFHPMQTPSQVSC

SEQ ID NO: 11336 - protein, 589 aa, Vitis vinifera
MYLNPLSECTFDGSVDRHGHPAVRARTGNWVTAILILVNQGLATLAFFGVGVNLVLFLTRVLGQDNATAANNVSKWTGTVYIFSLLGAFLSDSYWGRYKTCAIFQVIFVIGLVLLSLSSYIFLLKPNGCGDKEFPCGSHSTFEISFFYLSIYLIALGNGGYQPNIATFGADQFDEDNPKESHSKVAFFSYFYLALNLGSLFSNTILGYFEDGGRWVLGFWASSASAILALILFLFGIPRYRHFKPSGNPLSRFCRVVVAATRKWKVEMPPEGEDLYEVDGDDCSGNCRRKMLHTQGFKFLDKAAVLTAKEREQEDKESRSPWRICTVTQVEEVKCILRLLPIWLCTILYSVVFTQMASLFVEQGAAMKTTLLGFHIPPASMSSFDIVSVAAFIFIYRRVLDPLVARLKGTKARGLTELQRMGIGLIIAIIAMVAAGIVEWFRLKYAKKDCRQCESESSLSIFWQIPQYVLIGASEVFMYVGQLEFFNDQAPDGLKSFGSALCMTSISLGNYVSSLLVTIVMKFSTRDQMPGWIPSNLNKGHLDRFYFLLAALTMADFGVYIICAKWYKSIKLEGKYEDSNSKGSDDVMV

SEQ ID NO: 11337 - protein, 322 aa, Vitis vinifera
MEETINKNDTRLRIFSGTANPALSQEIACYMGLELGKINIKRFADGEIYVQLQESVRGCDVYLVQPTCPPANENLMELLIMIDACRRASAKNITAVIPYFGYARADRKTQGRESIAAKLVANLITEAGANRVLACDLHSGQSMGYFDIPVDHVYGQPVILDYLASKTICSDDLIVVSPDVGGVARARAFAKKLSDAPLAIVDKRRHGHNVAEVMNLIGDVKGKVAVMVDDMIDTAGTIAKGAALLHQEGAREVYACSTHAVFSPPAIQRLSSGLFQEVIITNTIPVLEQNYFPQLTVLSVANLLGETIWRVHDDCSVSSIFQ

SEQ ID NO: 11338 - protein, 371 aa, Vitis vinifera
MTLLHIASRQFTPHPHAGDKWCVYPSYDYAHCIVDSLENITHSLCTLEFETRRASYYWLLHVLGLYHPYVWEYSRLNVTNTVMSKRKLNRLVTEKWVDGWDDPRLMTLAGLRRRGVTSTSINTFIRGIGITRSDCSIIRLDRLEYYIREELNKTAPRTMVVLHPLKVVITNLEDGSITDLDAKKWPDAQEDDASAFHKVPFSKIVYIEQSDFRMKDSKDYYGLAPGKSVLLRYAFPIKCTEVILSDDKETVVEVRAEYDSSKKTKPKGVLHWVAEASPGLDPLTVEVRLFDKLFLSENPAELDDWLGDLNPQSKVVVPSAYSVPSLKNAAVGDRFQFERLGYFVVDKDSTPEKLVFNRTVTLRDSYGKGGK

SEQ ID NO: 11339 - protein, 507 aa, Vitis vinifera
MNSIGVVGEVKAETQEAAGPEEWRRYRGVRRRPWGRYAAEIRDPAKNGARVWLGTYETAEDAALAYDRAAFRIRGSRALVNFPQRIGSGDPEPVRITPKRRSPQPSLSAAAAPALKRRKGDVDSTVEVEAATENVVDVFQLHQLWLFGMSIAFLFVQETVEGVVAAVKRLKDVSISEKEFREKVETAGPIDHENLVPLRANYYSKDEKLIIYGYMPIGSLSALPHGNRGVSMTLPIWEARSGIALGATRGIAYIHSWGSASPHGDIKSSNILLTKSCEGQVSDFGLAHLVGPIAIPNRVVGYCALEATDARKVSKKKVDAYNFAEFCDDSMVPTWFMILSDSETAKRILGSLVSTDRRMKESACEFLFHRAMGFAPFRAYWRSLRRISATHLFSPRGISVFGEFRRIIGLKMLDEIRASIEEEGEVNVKKVLHFESSNNVMMSVFGGRYRTVRKYMALMSLTQSEEENSGARESRASCKRLGRKPERRPPPSHTSPATLLSRSSPDP

SEQ ID NO: 11340 - protein, 227 aa, Vitis vinifera
MADCEDVGVSSPNSTISSISGKRNDRETNEEENENENEIESSEEDAGGTGDTVRKKLRLSKEQSAILEETFKEHNTLNPKQKLALAKQLNLRPRQVEVWFQNRRARTKLKQTEVDCEYLKRCCENLTEENRRLQKEVQELRTLKLSPQLYMHMNPPTTLTMCPSCERVAVASASSSAPSPSPASNPLAAAPHFPLGPHQHRPMPIAGPWAGAASMRHRPFDAHGTRS

SEQ ID NO: 11341 - protein, 463 aa, Vitis vinifera
MASTVSVAYNLSASVPDWLNKGDNAWQMIAATLVGLQSVPGLVILYGSVVKKKWAVNSAFMALYAFAAVVLCWVIWAYKMSFGDKLLPFWGKGGPALGQKYLLKQSALPATTHYHKDGTVETAMVTPFYPMATMVWFQCVFAAITVILLAGSLLGRMNIRAWMMFVPLWLTFCYTVGAFSLWGGGFLFHWGVMDYSGGYVIHLSSGIAGFTTAYWVGPRSTKDRERFPPNNVLLMLAGAGLLWLGWAGFNGGDPYAANTDSSMAVLNTNICAATSLLGMITGLVCITPAAGLVQGWAAIVMGILSGSVPWFTMMILHKRWTLLHHIDDTLGVFHTHAVAGYLGGILTGIFAEPELCSLFLPVTNSRGAVYGGSGGIQVLKQLAGGAFIIGWNAVVTSIICLVVRVVLPLRMPEEELLIGDDAVHGEEAYALWGDGEKYDSAKHGLYSDDTQHQMPSSGTTQVV

SEQ ID NO: 11342 - protein, 465 aa, Vitis vinifera
MASTVPVAYQGNLSASVPVWLNKGDNAWQMIAATLVGLQSVPGLVILYGSVVKKKWAVNSAFMALYAFAAVVLCWVIWAYKMSFGDKLLPFWGKAGPALGQKYLLKQSALPATTHYHKDGTVETAMATPFYPMATMVWFQCVFAAITVILLAGSLLGRMNIRAWMMFVPLWLTFCYTVGVFSLWGGGFLFHWGVMDYSGGYVIHLSSGIGGFTTAYWVGPRSTRDRERFPPNNVLLMLAGAGLLWLGWAGFNGGDPYAANTDSSMAVLNTNICAATSLLGMITGLVCITPAAGLVQGWAAIVMGILSGSVPWFTMMILHKRWTLLHHIDDTLGVFHTHAVAGYLGGILTGVFAEPELCSLFLPVTNSRGAVYGGSGGIQVLKQLAGGAFIIGWNAVVTSIICLVVRVVLPLRMPEEELLIGDDAVHGEEAYALWGDGEKYDSAKHGLYSDDTQHQMPSSGTTQVV

SEQ ID NO: 11343 - protein, 402 aa, Vitis vinifera
MGFEKEASSSSYGLDSVPREDTPLLSKSRPLSSQTKTFANVFIAIVGAGVLGLPYTFKRTGWVLGSLMLFAVAILTYHCMMLLVHTRRKLDSLHGFSKIASFGDLGFAVCGSIGRVAVDAMIVLSQAGFCISYLIFIANTLAYVSNSSPSNPILGLTPKSFYIWGCFPFQLGLNSIPTLTHLAPLSIFADQRPALRAFGGFSVFFYGLGVAVYAFEGIGMVLPLESEAKDKDKFGKVLALSMAFISVMYGGFGALGYFAFGEETKDIITTNLGQGPLSIMVQLGLCVNLFFTFPLMMNPVYEVMERRFRDGAYCLWLRWVAVLGVILVALMVPNFADFLSLVGSSVCCVLAFVLPSLFHLIVFKDQLSRKGMALDVAILVLGLVFGVSGTWSSLLEIVSPSA

SEQ ID NO: 11344 - protein, 525 aa, Vitis vinifera
MANSKYEYVKSFEVEDEVMPPNLIVVRIDGRGFRRFSEVHEFEKPNDERALNLMNSCAAAMLEEYPDIVFSYGFSDEYSFVFKKTTKFYQRRASKIVSLVVSFFTSIYTTKWKEFFPHKELRYPPSFRAWVICCASMEVLQTYLAWRQNDCHINNQYNTCFWMLVKCGKTEEEAQEVLKGTHKQEKNELLFQQFGINYKNLPSMFRQGSCVCKTQVEAIVKYSENGTPVKRLRRKPIIVHSDNIAARSFWNEHPFLLKELGDFREDINNIKPEYVKSFQFENKLMPLTWIVVRIDGCHFHRFSEVHEFEKPNDEQALNLMNSCAVAVLEQFKDVIFSYGVSDEYSFVLKKDSQFYQRRGSEIVTALVSYFTSIYVMKWKEFFPQKELKYPPCFDGRAVLYPTSEILRDYLTWRQVDCHINNQYNTCFWMLVKSGKSKSEAQAYLKGTQAREKNEVLLQQFGIDYNTLPLMFRQGSSAFWNETGMYENGASAEKSGKKVVVEQCNIIEQSFWEAHPSILNEKPHMV

SEQ ID NO: 11345 - protein, 676 aa, Vitis vinifera
MVSERESEICLSKFSQTLQTTMAAASPVEACTAEEMLDPEQNGRAERVQWVLNAPEPPGLWQELMDSIRETAFPHGNNFPSLQKQPTTHAISVLQGIFPILQWCRNYKATKFKKDLMAGLTLASLSIPQSIGYATLAKLDPQFGLYTSAIPPLIYALMGTSREIAIGPVAVVSLLISSMVPKLEDPVDNPIAYRKLVFTATFLAGIFQAAFALLRLGFLVDFLSHAALVGFMAGAAVVIGLQQLKGLLGITHFTNKTDVISVLEAVWRSFHHTWSPYNFILGCSFLSFILITRFVGRRNKKLFWLPAIAPLVSVILSTLIVFLTRADKHGVKVVKHIKGGLNPSSVHQLQFTGPHTGEIAKIGLIVAIIALTEAIAVGRSFASIKGYHLDGNKEMVALGIMNIAGSLTSCYVATGSFSRSAVNFSAGCETAISNIVMAITVLISLQFFTKLLYFTPTAILASIILSAIPGLIDISEAYKIWKVDKLDFLACIGAFLGVLFGSVEIGLLVALTISFAKIILNAIRPGIETLGRLPGTNMFCDVDQYPMAITSPGVLIVRVKSALLCFANANFVRERIMMWVTEEAEDNKGSAKGRNQLVVLDMSNLMNIDTSGIASLEEVHKQLVSQGMELAIANPRWQVIHKLKLAKFVNKIGGRVFLSVAEAVDECSTIKIMTTI

SEQ ID NO: 11346 - protein, 257 aa, Vitis vinifera
MSSITSAELNYLVFRYLHESGFTHSAFSLGYEAGINKCPIDGNMVPPGALITFVQKGLQFVEMEANLSNSDTDVDDDFSFLQPLDLITKDVHQLQKKKKRRRLLGSRGVGDGGSSRASCTEWGKALFIMEVGERNERQVVEGLEKNKAEALQQVERWDVVEEERILSEEELGHKKTAKENYSKWLIWLNKALLGKWIWRFARAKEELWKKFQQKLFSLLGKLLGGRSLHWIGCREEDGTSLIGASCVDVKRKLSIIC

SEQ ID NO: 11347 - protein, 374 aa, Vitis vinifera
MDISTSSTFQACEIPSSDVTILEGHTSEVCACAWSPAGSLLASGSGDSTARIWTIADGTCRSSVQNGPSNVLVLKHVKGRTNEKSKDVTTLDWNGDGTLLATGSYDGQARIWSTNGELRSTLSKHKGPIFSLKWNRKGDYLLTGSCDKTAIVWDVKTEEWKQQFEFHAGPTLDVDWRNNVSFATSSTDNMIYVCKIGENRPIKTFSGHQGEVNCVKWDPTGQLLASCSDDITAKIWSIKQEKYLHDLREHAKEIYTIRWSPTGQGTNNPNQPLVLASASFDSTVKLWDVEQGKLLCSLNGHRDPVYSVAFSPNGEYLASGSLDRSMHIWSLKERKIVKTYTGNGGIFEVCWNKEGDKIAACFANNTVCVLDFRM

SEQ ID NO: 11348 - protein, 240 aa, Vitis vinifera
MNIEETSKKRPFFTSPEDMFDEEYYDEQMPEKKRRLTPEQVHLLEKSFEAENKLEPERKTQLAKKLGLQPRQVAVWFQNRRARWKTKQLERDYDLLKSSYDSLVSEYDSILKEKEKLKSEVVSLTEKLQAKEVTGTPTLTVQKVEPLQADAADVPPVPCSVKVEDRLSSGSGASAVVDEDGPQLLDSGDSYFQNAEYPGCLGVQSEEDDGSDDGQSYFSDALVLPEHHHEEGEALLWVWP

SEQ ID NO: 11349 - protein, 288 aa, Vitis vinifera
MHGSFHYSVKLSIKSFRVPELFVEIPATATVGSLKRTVMEAVTAVLGGGLHVGILLQGKKVGDDSKTLLQSGISQGDKLRTLGFMLEPRCTQIPPSLCAEDPAVFLHGCTPQHLTSFSTTPTSGPGTSKISPDPPVTNLSKCVQRNHDTAPSHTDISTDKTIPESRALLAVPSVSLKPLAMVPFHQKSRRPEFVQRRIRRPFSVSEVEALVQAVENLGTGRWRDVKLCAFDGAKHRTYVDLKDKWKTLVHTAKISPQQRRGEPVPQELLDRVLAAHAYWSQQQVKVEV

SEQ ID NO: 11350 - protein, 547 aa, Vitis vinifera
MAEDDMYTKDGTMNIHNKPANKKKTGQWKACRFILGNECCERLAYYGMSTNLVNYLQIRLNQGNVTASNNVTNWSGTCYITPLIGAFLADAYFGRFWIIAIFSIIYFCGMVLLTMTASIKGLRPSCDDNGCDPTKLQSAVCFIALYLIALGTGGIKPCVSSFGADQFDVNDEAEKKKKSSFFNWFYLSINVGALIASSVLVWIQMNVGWGWGFGIPAVAMAIAVVSFFSGSRMYRLQKPGGSPLTRICQVLVASTRKYHVKVPNNKSLLYETKDAESNIKGSCKLEHTEKLRFFDKAAVEVESDHVKSSNNPWKLCTVTQVEELKSILRLLPVWATGILFSTVYSQMSTMFVLQGNTMDQHMGPNFKIPSASLSLFDTLSVIFWAPVYDRIIVPFARKFTGHERGFTQLQRMGIGLVISIISMIVAGILEVIRLNYVRKHNYYDLEYIPMSIFWQVPQYFLIGCAEVFTFIGQLEFYYDQAPDATRITIVNKVTTRNGKMGWIPDNMNRGHLDYFYWLLAILSLLNFLVYLWIAKWYTYKKVTGRPG

SEQ ID NO: 11351 - protein, 559 aa, Vitis vinifera
MAEEDIYTKDGTIDFRSNPAVKKETGTWKACPYILGNECCERLAYYGINTNLVNYLKFQLNQRNVVAINNVTNWSGTCYVTPLLGAFLADAYLGRYWTIAGFSIIYVFGMTLLTLSASAHGLKPLCDGQNVCYPTGLQTAVFFVGLYLIALGTGGIKPCVSSFGADQFDDSDETERKSKSSFFNWFYFSINIGALLASSVLVWVQTNVGWGWGFGIPAVAMGIAVMSFFSGTRLYRNQKPGGSPLTRICQVIVASLRKFQVEVPADKCLLYETADSESAVTGSRKLDHTKHLSFFDKAAVETHIDAIKGSVDSWRLCTVTQVEELKSIIRLLPIWATGIVFSAVYSQMGTLFVLQGNTMDLHITGSFQIPSASLSLFDTISVIFWVPIYDRLIVPFARKFTGHKSGFTQLQRIAIGLVISIFAMLVAGTLELLRLRMHIPMSIFWQVPQYFIIGCAEVFTFIGQLEFFYEQAPDAMRSLCSALSLTTAALGNYLSTLLVNVVTDVSTRGGKPGWIPDNLNYGHLHYFFWLLAALSVFNLGVYLQVARWYTYKRTAVDSL

SEQ ID NO: 11352 - protein, 368 aa, Vitis vinifera
MVGSESETLSQSEVESGLQEDQQPKNHGMPSLGRQSSIYSLTLDEFQHTLCENGKNFGSMNMDEFLTSIWTAEENQATNFNHISNSQMSLSETSMEKPIAKQPSLARQGSLSLPAPFCQKTVDEVWSEIHKAQQQQQQDSVHNAESAHRQPTLGEMTLEDFLIRAGVVREQPTATAPAQHQQQHQYGLYQNNNTISPTFARPVMGMGGGAGVGTCLGGRVGNGGGVYGPGQTLAMESTVSPVSSDGMCPNQIDNTAGQFGLDVGGLRGRKRIIDGPVEKVVERRQRRMIKNRESAARSRARKQAYTVELEAELNQLKEENTLLQQALADFERKRKQQYLEELKMKTQTKAEKAKEKLKKMRKTWSCPL

SEQ ID NO: 11353 - protein, 302 aa, Vitis vinifera
MYTPLYIPTPLKPIFSSKSLFFLATPSSSFFFKRMGHLIEEKALGDDHQRGDSLEEKISLFFDEEDEELDRNSEGDWADDEAANNELHDPIERKEFWDSQEALLLEIMERCNSMGAKLREEIGRVVERARETLVCSCSKSNSDECALCLRRRVVDLLCLKGFSASLRTSKWRHTHKFPGGSHEYIEVMASTPGRKKQIPFLIELEFRTEFEMAKACDEYRRLIAQLPKSYIGKSDYLNAILRVVCDAAKRSMKEQKIHMGPWRKRSFMQMKWSGYNDRKQPSKDQPWNKFSLSGITAAVVVK

SEQ ID NO: 11354 - protein, 263 aa, Vitis vinifera
MLLLVIVDCRLHTTKLFMDGPSEVRKGAWTREEDVLLRTCIEKYGEGKWHQVPFRSGLNRCRKSCRLRWLNYLRPDIKRREFTTDEVDLIIRLHRLLGNRQAPKHQWALIAGRLPGRTSNDVKNYWNTHQSKKYFGKAGKDVADKTAKVTVINTCPRTFYKNLSYLKGKAAKESDVQSADHTLSKPYSTPPLSEDGFSWLDSLFSGKEGQKESTCFRDGSANESISSFWDEETPAATKVGETFLEEKESDWNHFSFDVDLWDL

SEQ ID NO: 11355 - protein, 246 aa, Vitis vinifera
MDGPSGVRKGAWTREEDVLLRTCIEKYGEGKWHQVPFRSGLNRCRKSCRLRWLNYLRPDIKRGKFKTDEVDLIIRLHKLLGNRQAPWALIAGRLPGRTSNDVKNYWNTHLSKKFFGKAVKDVADKTAKVTVIKPRPRTFNKNLSYLKGKAAKESDVQSADHTLSKPYSTPPLSEDGISWLDSLFSGKEGHKESTCFRNGSGKESISSFWDEEISAATKVGETFVEENESDWNHFSFDMDLWDLLNA

SEQ ID NO: 11356 - protein, 243 aa, Vitis vinifera
MEGSLGLRKGAWTSEEDHLLRKCVEKYGEGKWHQVPFRAGLNRCRKSCRLRWLNYLKPDIKRGKFTADEVDLMMRLHKLLGNRQAQWALIAGRLPGRTSNDVKNYWNTHLRKKMVKDEVEETVKINAIRPRPRTFTKNLYWLERKELLENDQSELHIPRKPFSTTPPSEDGLNSWWESLFSDKEENKEITCSIERSANESISCLWDEQIAAMPEVGKTSITNGQIEWTDCSFDMDHLWDLINA

SEQ ID NO: 11357 - protein, 477 aa, Vitis vinifera
MGPRSPSSILTAALKTTLNEARIAVQMVTRFNALSSSYREQIAIEDCKELLDFSVSELAWSLLEMKSIRAGSTNVQSEGNLKAWLSAALSNQDTCLEGFEGTDRRIESFIRGSLKQVTQLISNVLAMYVQLHSLPFKPPRNSTEKSPSQDFPKWMTDGDKDLLLAHPNQMGVDTIVSLDGSGHYRSIAQAIYEAPSYSNRRYIIYVKKGVYKENIDMKKKKTKIMIVGDGIGATVVTGNRNFMQGWTTFRTATVAVSGKGFIARDITFRNTAGPKNFQGVALRVDSDQSAFYRCSMEGYQDTLYAHSLRQFYRECDIHGTIDFIFGNGAAVLQNCKIFTRKPLPLQKVTITAQGRKSPDQSTGFSIQDSYVYATQPTYLGRPWKQYSRTVFLNTYMSSLVQPRGWLEWNGNFALGTLYYGEYRNYGPGALLSGRVQWPGYHKIQDTSVANFFTVGRFIDGLSWLPSTGVRFSAGLKN

SEQ ID NO: 11358 - protein, 655 aa, Vitis vinifera
MCSISSLTKYWKTKYKKILNSFLIRENLIELLCLIGKLGTVIGIDLGTTYSCVGVYRNGHVEIIANDQGNRITPSWVSFTNTERLIGEAAKNQAALNPERTIFDVKRLIGRKFDDPEVQRDIKFLPYKVVNKEGKPYIQVTIRDGEIKVFSPEEISAMILGKMKETAEAYLGKKIKDAVVTVPAYFNDAQRQATKDAGIIAGLNVARIINEPTAAAIAYGLDKKAEKNILVYDLGGGTFDVSILAIDNGVFEVLATSGDTHLGGEDFDHRVMDYFIKLIKKKYDKDISKDNKALGKLRRECERAKRALSSQHQVRVEIESLFDGIDFSEPLTRARFEELNMDLFKKTMGPVKKALEDAGLKKTDINEIVLVGGSTRIPKIQQMLKEMFDGKEPCKGVNPDEAVAYGAAVQGGILSGEGGEETGGILLLDVAPLSLGIETVGGVMTKLIPRNTVIPTKKSQIFTTYQDQQPTVSIKVYEGERSLTKDCRELGRFELSGIPPAPRGVPQIEVTFEVDANGILHVRAEDKAAKKSQSITITNDKGRLSQEEIDRMVKEAEEFAEEDRQVKERIDARNKLETYLYSMRATINDRDKLADKIDSEDKEKIEAALKEALDWLDDNQNADKDEYNEKLRGVEAVCNPVIKQVYEEWWGFFQF

SEQ ID NO: 11359 - protein, 872 aa, Vitis vinifera
MYGEIATISVANETRKQYTTLRHFPADNRKYCYTLDVISRTRYLVRATFLYGNFDNNKVYPKFDISLGATPWSTIVISDANTIESSELIFLASDPTISVCLSNATTGQPFISTLELRQFNGSIYYTEYEEDFFLSVSARVNFGADSEAPVRYPDDPFDRIWESDSLKKANYLVDVAPGTEKVSTQMPIDVNKDSRPPEKVMQTAVVGRNGTLSYRLNLDGFPGFGWAFTYLAEIEDLGPEETRKFRLILPNMPDLSKPAVNIQENAQGKYRLYEPGYPNISLPFVLSFKFGKTSDSSQGPLLNAMEINKYLEKRDGCLDGSAIASIVLQYSSEDWAKEGGDPCLPVPWSWVACNSDPQPRIVSIHLSGKNLTGNIPTDLTKLSGLVELWLDGNALAGPIPDFTGLINLKTIHLENNQLSGELPSSLVDLQSLKELYVQNNMLSGKVPSGLLNENLDFNYSGNDNLHKGSTGGRHIGIIIGSSVGAVVLLIATIASCLFMHKGKKRYYEQDQLGHGLPAQRIVSSLNDAATEAANCFSLSEIEDATRKFEKKIGSGGFGVVYYGKMKDGKEIAVKVLINNSYQGNREFSNEVTLLSRIHHRNLVQFLGYCQEEGRSMLVYEFMHNGTLKEHLYGPLTRERAISWIKRLEIAEDAAKGIEYLHTGCVPSIIHRDLKSSNILLDKYMKAKVSDFGLSKLAVDGSSHVSSVVRGTVGYLDPEYYISQQLTDKSDVYSFGVILLELISGQEAISNESFGVNCRNIVQWAKLHIESGDIQGIIDPSLRDEYDIQSMWKIAEKALMCVQPHGSMRPPISEVIKEIQEAISIERGAEAAREGNSDASRNSIHSSINMGIDVGPTENYLSFDESIARPTPR

SEQ ID NO: 11360 - protein, 414 aa, Vitis vinifera
MALPQMEVVGLHTSISLYRETWRSHYLHRFQFTTLGKKSFLHGCSFQFRAWSRSRELVSPRTNLSIIRRVNATERVEEEFDVIDNPAAASTMSSSEDEESSASTFLSLSEKPDRNMALLDDYELEELDFASNPNHRSGYVAVLGKPNVGKSTLANQMIGQKLSIVTDKPQTTRHRILGICSGPEYQMILYDTPGVIEKKMHKLDSMMMKNVRSATINADCVVVLVDACKEPQKIDEVLEEGVGNLKDKLPTLLVLNKKDLIKPGEIAKKLEWYEKFIDVDEVIPVSAKYGQGVDDVKDWILSKLPLGPAYYPKDIVSEHPERFFVGEIVREKIFMQYRNEVPYACQVNKNSQKIILIGKEGKALKLLATAARLDIEDFLQKKVFLEVEVKVKENWRQDEGLLKYYGYGGQIQAL

SEQ ID NO: 11361 - protein, 482 aa, Vitis vinifera
MDWIKILEGSGHKISEVQYHGTDGDGIIWGEPSISEVIKGAPTDFDDQDIAVAIVRSIEDYEAEEDKKLKKLVDNESQLKEDEQLAKALQESLNMESPPRRDARNIFQPLTFSSLGFRICARCNLEIGHERHLRRMGAVWHPECFRCHACGLRIFDLEFSVSGNRPYHESCYKDQNHPRCNVCKNFIPSNAAGETEYRAHPFWMQEYCPSHEHDGTPRCCSCERTEVRDIRYLSLDDGRKLCLECLDSAIMDTLECQPLYLQIQEFYEGLNMKVEQQIPLLLVERQALNEAMEGEKSGHHLLPETRGLCLSEEQTVSTISRRPRISTGYRIINMMTEPCRLVRRCEVTAILILYGLPRLLTGTILAHEMMHAWLKLKGYRNLRQDVEEGICQVLAYMWLESEIHSSSGNNVSSASTPSSSSTSEKGARSQFEKKLGEFFKDQIETDSSPAYGDGFRAGNQAVQQYGLKSTLDHIRLTGSFPY

SEQ ID NO: 11362 - protein, 465 aa, Vitis vinifera
MDWLTKILKGSGHKISEGQYHGRYGDDRIWEEPSTPDVSTDFDHDDLAVAMARSLEDYPEEDQKGKKVVDTESQLEEDEQLARALQESLNVESPPRHDAGNIFQPFPSFFSPGYRICAGCNCEIGHGRYLSCMGAVWHPECFRCRACGLPIFEHEFSMSGSHPYHKSCYKEQNHPKCDVCRNFIPTNAAGLIEYRAHPFWMQKYCPSHEHDGTPRCCSCERMEARDTRYLSLDDGRKLCLECLDSAIMETVECQPLYLEIQEFYEGLNMKVEQQVPLLLVERQALNEAMEGEKNGHHHLPETRGLCLSEEQTVSTISGRPRIGTGYRIIDMMTEPYRLIRRCEVTAILILYGLPRLLTGSILAHEMMHAWLRLKGYPNLSQDVEEGICQVLAYMWLDSEIYSSAGSDKGARSQFEKKLGEFFKHQIETDSSPAYGDGFRAGNQAVQKYGLKSTLDHIRLTGSFPY

SEQ ID NO: 11363 - protein, 496 aa, Vitis vinifera
MAMASFYLFTSSLCILFSFVVFTEAAPKGSLITHLPGFNGTFPSKHYSGYVDIGGEPAKNLFYYFVVSERNPGKDPLVLWLNGGPGCSSFDGFVYEHGPFNFEAGKTPNSLPTLHLNPYSWSKVSSMIYLDSPAGVGFSFSKNTWQYNTGDLQTASDTHEFLLRWFKEFPEFITNPFYVSGESYAGVYVPTLSAAIVKGIKSGAKPTINFKGYLVGNGVTDMEFDANALVPFTHGMGLISSEMFEKARDNCGGNYYSNESKSCIEELNKIYNAISGLNKYNILEPCYHRPAKKGEETGNTTLPLSFKQLGATNRPLPVRTRMFGRAWPFHAPVKDGILPLWPELMKKKTIPCTASYSYYVWLNDKGVRTAIHAQQKDVIGEWEICTGRLYYSSDSGSMLQYHKSLTAEGYQALIYSGDHDMCVPFTGSEAWTRSLGYKIVDEWRAWISNDQVAGYTQGYEHGLTFLTIKGAGHTVPEYKPKEALDFFSRWLDGKAI

SEQ ID NO: 11364 - protein, 599 aa, Vitis vinifera
MASVSAKIISSTAAAVATATGGNTTTTRSSCLPVFRRGPATPLPLKLSRRRRHHVRHITNVFKTVESPAAPPTLDPVRQVQKPTILVSEKLGEAGLEVLREFGEVECSYDLSQEDLCKKISLCDALIVRSGTKVTRAVFEAAKGRLKVVGRAGVGIDNVDLQAATEFGCLVVNAPTANTIAAAEHGIALLAAMARNVAQADASMKAGKWQRNKYVGVSLVGKTLAVMGFGKVGSEVARRAKGLGMHVIAHDPYAPADRARAAGVDLVSFDLAISTADFISLHMPLTPTTKKIFNDETFAKVKKGVRIINVARGGVIDEDALVRALDSGAVAQAALDVFTEEPPPKDSKLVQHENVTVTPHLGASTKEAQEGVAIEIAEAVVGALRGELSATAVNAPMVPPEVISELSPYVVLAEKLGRLAVQLVAGGSGIKSVKVVYKTARDPDDLDTRLLRAMVTKGIIEPISSSFINLVNADFTAKQKGLRIIESIQVQISNNEYISIEGKVKDGIPRLTCVGSFSVDVSLEGNLILCRQVDQPGMIGRVGNILGECNVNVSFMSVGRTVKRTRAIMAIGVDEEPDKDTLKKIGEVPAIEEFVFLKL

SEQ ID NO: 11365 - protein, 609 aa, Vitis vinifera
MLRALSLRRSLRAFHHYHHHHHQPTNPHSNLLKALSSTTSPNPNPNLTRPFSSLSSSPSSEAEFRKYLGYFALLLGCGIATYYSFPFSDSAKHKKAQLFRYAPLPDDLHTVSNWSGTHEVQTRVFHQPESLEELEQIVKEANEKKQKIRPVGSGLSPNGIGLTRAGMVNLALMDNVLDVDVEKKRVRVQAGIRVQQLVDAIKDYGITLQNFASIREQQIGGIVQVGAHGTGARLPPIDEQVISMKLVTPAKGTIEVSKERDPELFYLARCGLGGLGVVAEVTLQCVERQELVEHTYTSLVVILFSFCRKLLSENKHVKYLYIPYTDTVVVVTCNPVSKWKGPPKFKPKYSRDEAIQHVRDLYQESLKKYSPEAITAKSSDNSEPDINELSFTELRDKLLALDPLNKDHVIQVNQAEAEFWRKSEGYRVGWSDEILGFDCGGQQWVSETCFPAGTLAKPSMKDLEYIEDLKKLIEKEEIPAPAPIEQRWTQSSKSPMSPASSSAEDDIFSWVGIIMYLPTMDARQRKEITEEFFHYRRLSQTQLWDLYSAYEHWAKIEVPKDKDELAALQARLRKRFPVDEYNKARKELDPNRILSNNMLGKLFPSSDTI

SEQ ID NO: 11366 - protein, 197 aa, Vitis vinifera
MDFSIYRSGNGGRSKRDLEATVNEVETSRASDDDENGSTRKKLRLSKEQSAFLEESFKEHNTLNPKQKLALAKQLNLRPRQVEVWFQNRRARTKLKQTEVDCEYLKRCCETLTEENRRLQKELQELRALKTSQPFYMQLPATTLTMCPSCERVATTSTSSSAAAAAPTSTSATLARTRLFPFSQAHVHQAPAHQAAS

SEQ ID NO: 11367 - protein, 292 aa, Vitis vinifera
MATSVAWLLFLYIGAVSSLPGTLSSSVCPLQSDFLVAFLQSQCPLSLSSHALLDVDGNFLDRALTSKQGNGFTSVLFHASWCPFSCKMRPKFEVLSSMFPQIEHLAIKESSASPSMFSRYGIHSLPSILIVNQTSRMRYHGPKDLPSLVKFYRKTTGLEPVQYFAEDQTIRQSILQPWNGSYVKEIFTREPYLAFSILFFCLRVVLALFPGLLSQLKAFWVLYVPHLNLEIFGETSQMLGRVLNMIDVQRVWAKLKLCKIRNFREGAKSARVWASSLASVSLGETSSSGSSS

SEQ ID NO: 11368 - protein, 492 aa, Vitis vinifera
MLRAVLLFVFSVLYSFFHFQLDTALSKEKEEEGVWEVRGGKWHKIIPDSSKDEFLVVTPGIGAVGAPKSSTLPNLWLQCKELFLRLMLPEGFPHSVTSDYLDYTLWRGVQGVASQISGVLATQALLYAVGLGKGAIPTAAAVNWVLKDGIGYLSKILLSKYGRHFDVHPKGWRLFADLLENAAYGLEILTPAFPHQFLLIGAVAGAGRSAAALIQASTRSCFYAGFAAQRNFAEVIAKGEAQGMVSKSIGIMLGIALANCIGSSAPLSFASFTVVTAVHMFCNLKSYQSIQLRTLNPYRASLVFSEYLLSGQVPSIKEVNEEEPLFPVVPLLNAKPTYKAQSAVLSTEAKDAAAEIERRLQLGSKLSEVVSSKEDVLALFDLYRNEAYILTEHKGRFFVILKESCSPQDMLKSVFHVNYLYWLERNAGIISMGASDDCRPGGRLQISLEYVQREFNHLKNDSEFVGWATDGLIARPLPNRIRPGHVASTPTS

SEQ ID NO: 11369 - protein, 622 aa, Vitis vinifera
MKQKVGLGFFVLLSVFCAVDSQCSRGCDLALGSYYVWQGSNLTFISQLFQTTISEILSYNSQIANQDSVEADTRIRVPYSSCDCINGEFLGKVFNYTVQSGDTYDLVAETYYSNLTTSAWLQNFNSYAANQIPDTDAYLNVTLNCSCGNSTVSKDYGLFLSYPLRPEDNLTSVAESEGLNASLLQSYNPDSNFSAGSGLVYIPTKDTSGSYRALKSSARKLTYSTSGLAGGVIAGISIAAVVGVLLLTVCIYIGFYRKRKVKEAALLPTEEHSLQPGHGPGIASDKAVESTGPAFGSSAGLTGITVDKSVEFSYEELAKASDNFNLANKIGQGGFGSVYYAELRGEKAAIKKMDMQASREFLAELKVLTHVHHLNLVRLIGYCVEGSLFLVYEYIENGNLSQHLRGSGRDPLQWSSRVQIALDSARGLEYIHEHTVPVYIHRDIKSANILIDKNFHGKVADFGLTKLTEVGSSSLPTRLVGTFGYMPPEYAQYGDVSPKVDVYAFGVVLYELISAKEAVVKDNGSVAESKGLVALFEDVLNKPDPREDLRKLVDPRLEDNYPLDSVRKMAQLAKACTQENPQLRPSMRTIVVALMTLSSSTEDWDVGSFYDNQALVNLMSGR

SEQ ID NO: 11370 - protein, 749 aa, Vitis vinifera
MGGKRSAIDCLNLEIYAQTFVGFVLIFAAQVLLGYTSPGDVTAINNLYAALGSPLLPGWVSTGGDPCADAWQGVSCNGSEINSIILNGANLGGELGDSLGTFASIKVIDLSNNQIGGSIPSSLPLTLQNFFLSANQFTGSIPTSLSSLSLLTDMSLNNNLLTGEIPDAFQALVGLINLDLSSNHLSGQLPPSMENLSSLTTLRLQINQLSGTLDVLQDLPLKDLNVENNLFSGTIPDKLLSIPNFRKDGNPFGNVTAPLLAPTSPLTLPSPPPPLSGPPSSNQPPVKPADGPSATEESNSGGKGKGLSTKRIVWISITVVLVFIILVLALVLLVKWCCGERQESDWISKRNETGAYKGSRLNLRDNGSLEQQEAVGTPKEEHQEVVRRIGVAPKPQNEQDRNVERMFTIPKQDSHEIDIIIVNPIVPVEVNAEKPSMKTLNPPISARSFTIASLQQYTNSFSQENLIGSGMLGTVYRAQLPGGKLLAVKKLDKKICNQQKDDEFFDLVNSIDGIRHANVVELMGYCAEHGERLLIYEYCSDGTLHDALHSDDEFKKKLSWSARVRMALGAARALQYLHEVCRPPIVHRNFKSANVLLDDELTVRVSDCGLAPLISRCSVSQLSGRLSAYGCEAPEHESGIYTLKSDVYSFGAVMLELLTGRKSYDSKRNRGEKLLVRWAIHQLHDIDALSRMVDPSLNGEYPAKSLSRFADIISRCVQDEPEFRPQMSEVVDDLIDMIQKEASNRSNGD

SEQ ID NO: 11371 - protein, 329 aa, Vitis vinifera
MLLLVGNGKWIIFLLFCFHKDKKSIKQSMLLCCKLYISESRNHTALDSIERAARLDGETVIVNKFQDRAYNRIGYTLVSYIVHDSTGNIIYSPLQQTLLSMVEAAYEAINLELHHGAHPRLGVVDDIVFHPLARASLEEAAWFAKMAAADIGNKFQVPVFLYDAAHPMGKPLDIIRRELGYYRPNFMGNQWSGWDMPEVLSEKPDEGPTMVSRARGIVMIGARPWVSMYNIPIVSTDISAARRIARTVSARGGGLPTVQTLGLFHGEDSTEIACMLLEPNRIGADRVQNQVEMLAAQEGLDVEKGYFTDFSPEMIIEKYLKLISGAESH

SEQ ID NO: 11372 - protein, 392 aa, Vitis vinifera
MASQPPVTAGATGTAAASIQDIFDSSLNLEETHFNDGFTEGYNAGLISGKEEAKQVGLKFGFQVGEELGFYRGCVDVWNSAIEVDSTRFSSRVQKSIKQMEELLQKYPYFDPDDESAQEIMDNLRLKFRAICATLSFMATKFFGWLHSCLQPSSDTCALRGAVLAMVKAAFEAINLEMHCGNHPRLGVVDHICFHPLADASLKQTAGIAKSLAADIGSNLQVPTFLYGAAHEEERTLDSIRRELGYFKPNSSGNQWAGGMKSESSLLKPDVGPAQAAQAKGVVVIGSTRWVDNYNVPIFSSNIAAVRRIAKRVSGRGGGLPSVQAMALAYGENVTEVACNLLEPSRIGGDQVQLEVERHAEEEGMIAGKGYYTDFSQEKIIKRYLDFNPLCD

SEQ ID NO: 11373 - protein, 335 aa, Vitis vinifera
MEPICEFCGVVRAVVYCKSDAARLCLHCDNSVHSANALSRRHLRSLLCDKCNLQPGIYRCMDEKLCICQACDWIGNGCSAPGHRLQSLQFYMGCPSLSDFSRLWSSVLDLPSATGLKAGWGSMNSVAVDENCVSQCLEPKDNEGSLVLGCNKLNEQKPWGCSNFKDLGLNEGGDLCQGINMDDVAVNFENSDEMIGSSQGHSTCRYDNAGMDSRLMDKNLSMGLGFPGGQVHASVSLSLSNVTGESSAADYQDCGLSPAFLAGESPWTSNLDAHCPQARDKAKMRYNEKKKTRTFGKQIRYASRKARADTRKRVRGRFVKAGEAYDYDPLTSTSN

SEQ ID NO: 11374 - protein, 248 aa, Vitis vinifera
MKPIFCGNLEYDARQSDVERLFRRYGKVDRVDLKSGFAFVYMDDERDAEDAIRRLDRTVFGRKGRQLRVEWTKQERGIRRPGGSRKSSANMKPSKTLFVINFDPIHTRTRDLERHFDLYGKILNIRIRRNFAFIQFESQEDATKALDATNMSKFMDRVISVEYAARDDDDDRRNGYSPERRGRDMSPDRRRRSPSPYHRDRASPDYGHGANANSRSEPRGSPNYDRDESPVNERYHSRSPPPRERSRS

SEQ ID NO: 11375 - protein, 348 aa, Vitis vinifera
MRNIARKGIHYWQKLNAANVPAELIENGQNRVIDASLTLIRERAKLKGELVRALGGALASSSLLGVPLGHNSSFLQGPAFAPPRIREAIWCGSTNATTEEGKELNDPRVLTDVGDVPVQEIRDCGVDDDRLMKIISESVKLVMEEDPLRPLVLGGDHSISFPVVRAVSEKIGGPVDILHLDAHPDIYHSFEGNKYSHASPFARIMEGGYARRLLQVGLRSITSEGREQGKRFGVEQYEMRTLLEKCEVFLYVLHCFVQQKLGEGVKGVYISLDVDCLDPAFAPGVSHIEPGGLSFRDVLNILHNLQADVVAADVVEFNPQRDTVDGMTAMVAAKLVRELTAKMSKMKN

SEQ ID NO: 11376 - protein, 315 aa, Vitis vinifera
MTLYDLLNQGTTFLGISTLQELEEQQVILISIHMSSPPFNNPHYEDNSCPSLHYADLWSLLQEIDISVPVDDHNSLDRMDPIMFEQENSAMVQYSSQEKGLVGDNPINPVAFDQENSTMVQSSKEKGQVGGKTNLKTGERNRRIKHSQAKKTLLKHIADQQGSSVLRKENHNAKERVRRMQLNASYLALRSLLPDARRSKRWSSPRIIDRVLEYIPELENEIENLTLKKENMLSSLANEQTHQNQPSDLQVPTVSVTEVRKGEVIVQICMQREPGNVLSNLMQNVEGEGMRIMSASSLHVCDERVCYHLHIQGEN

SEQ ID NO: 11377 - protein, 127 aa, Vitis vinifera
MKESGMIEEQLGMDGEAHEKPETTYEAVRRLGSSNAVVVFSLSGCCMCHVMKQLLFGLGVGPTIVELDKEKYGSEMQSVLYQLAGGQHSVPAVFVGGKFLGGIETLMSCHINGTLVPLLKAAGALWL

SEQ ID NO: 11378 - protein, 545 aa, Vitis vinifera
MGVEPSEGVRRRGCSCSKDDFLPEESFKTWGNYGRALAEIPARLKDRLLTRSLDTTEMNEIKARSAHEMKKTLTWWDLMWFGIGAVIGAGIFVLTGIQARDVAGPAVVLSYVVSGISAMLSVFCYTEFAVEIPVAGGSFAYLRVELGDFMAFIAAGNILLEYVIGGAAVARSWTSYFATLCNHKPEDFRIIAHSLKEDYNQLDPIAVGVITIICLLAVFSTKGSSRFNYIASIFHVIVILFIIIAGLCKADTSNYTPFAPNGVRGIFKSSAVLFFAYIGFDAVSTMAEETKNPGRDIPIGLVGSMSITTLAYCLLAVTLCLMQKYTDIDKDAPFSVAFEAVGWNWAKYIVAAGALKGMTTVLLVSAVGQARYLTHIARTHMMPPWLAHVNSRTGTPVNATIVMLVATAIIAFFTDLGILSNLLSISTLFIFMLVAVGLLVRRYYVSNPKLWGVPLVPWLPSASIAINIFLLGSIDKASFERFGIWTAVLMVYYFFFGLHASYDTAKESAKVTHETTQYKKVEEGAVTPSVDSSTGVNASNASTNP

SEQ ID NO: 11379 - protein, 114 aa, Vitis vinifera
MASSFGSRLEETVKKTVDENPVVVYSKTWCSYSSEVKSLFKRLGVEPFVIELDEMGPQGPQLQKVLERLTGQHTVPNVFIGGKHIGGCTDTVKLYRKGELEPLLSEASTRKTES

SEQ ID NO: 11380 - protein, 234 aa, Vitis vinifera
MSEHLEPNSQMELVGHSIVLTSYPYQDPHNVGIMTSYGPQAMVHPHLFGMHQPRMPLPLEMEEEPVYVNAKQYHGILRRRQSRAKAELEKKAIKVRKPYLHESRHQHAMRRARGCGGRFLNTKKLDNNDANTTAEKGSVSGAALSTQSASSSGSEHLPTNSSRNLDSSSVQQEEKGRTIQDMLEAHTYSNGNRNGHGLSSAYHSSNGSEGGDCFGQPRENMQLNTAPHRALPIK

SEQ ID NO: 11381 - protein, 176 aa, Vitis vinifera
MSRVYVGNLDPRVSERELEDEFRVYGVIRSVWVARRPPGYAFVEFADRRDAVDAIRGLDGKSGWRVELSHNSKGGGGGGGGGGGRDREDLKCYECGEPGHFARECRLRIGSRGMGTLALVLVGVQVMGAGAIARMRENLHDVEAYHLVEVAATAGHLHIAVLAMIHLLLMGILMLE

SEQ ID NO: 11382 - protein, 857 aa, Vitis vinifera
MASRSCANFLDLASGSLLDIPHTPRPLPRVMTVPGIISDLDGYGSNDGDSDVCHERKIIVANMLPLHAQRDKVTAKWCFSLDEDALLLHLKDGFSPETEVIYVGSLKVEIDASEQEEVAQKLLEDFNCVPTFLPHDLHKKFYHGFCKQQLWPLFHYMLPMCPDHGDRFDRVLWQAYVSANKIFADKVREVINPDDDYVWVQDYHLMVLPTFLRKRFHRVKLGFFLHSPFPSSEIYRTLPVRDEILRGLLNCDLIGFQTFDYARHFLSCCSRMLGLDYESKRGHIGLDYSGRTVYIKILPVGVHMGRLESVLNLHSTSAKIKEIQKQFEGKKLILGVDDMDIFKGISLKFLAVEQLLQQHPELQGKLVLVQIVNPARSTGKDVQEAKRETYLTAERINETYGSPNYEPVILIDRPVARYEKSAYYAVAECCIVNAVRDGMNLVPYKYIVCRQGTPHMDKETGMNLVSPPTSMLVVSEFIGCSPSLSGAIRVNPWDTDAVAEALNLAITMPNSEKQLRHEKHYRYVSSHDVAYWARSFMHDLDRACKDHYSKRCWGIGLGLGFRVVSLSPSFRKLSIDHIVSTYKRTTRRAIFLDYDGTVVPQSSIIKSPSPEVISVLSTLCSDPKNTVFIVSGRGRSSLSEWLAPCERLGIAAEHGYFMRWNESTKWESCNLAADLDWKKVVEPVMRLYTETTDGSNIEIKESALVWHHQDADPDFGSCQAKELMDHLENVLANEPAVVKRGQHIVEVKPQGVSKGLVAEKVLSTMVNDGKPPDFVMCIGDDRSDEDMFEGIFRTISSPSLSMSPEIFACTVGQKPSKAKYYLDDTTDVVRLLQGLATASNPKPRYIAQIQVSFESSI

SEQ ID NO: 11383 - protein, 556 aa, Vitis vinifera
MLSENFWYLLVLLSYCYCYNVHNFQEDRIKSAKEEVGEVREENERLKQILAKIKKDYQSLQMQFSEIAQHEEARKSTDTILTHQEEEEEETDLISLSLGRVSSAESKKDDKKTSFLSGKGKGDEKMDEGLALGLECKFEPAPTEHMMNASPENSFEGPKEEEPSTETWPPSKILKMGRSRDEEVLEQTHLKKARVSVRARCDTPTMNDGCQWRKYGQKIAKGNPCPRAYYRCTVSPSCPVRKQVQRCAEDTSILITTYEGTHNHPLPVSATAMASTTSAAASMLRSGSSTSQPGMEAFATSSTANLHGLNFSIPQNSRSQQFYFPNSSFSTSNSHPTITLDLTAPTASHFNRLSSSFPSAPRYPATCLNFSSSSSSSPLDPNNLPTSWGTLPSYGALSSYNKNQIGPFNFGMQPPSQENIYQPYMQKINNQAPSQQSLTETIATATKAIAADPTFRSALAAVITSFVGNAGGAGGGENHVKGENPSHNLKWGEFLSVNSALASSHNGVGCASSYLNRSSSANSQQQGNLISYPPSFPFSVPKSASASPSDHKDNIQ

SEQ ID NO: 11384 - protein, 405 aa, Vitis vinifera
MGYICDFCGEQRSIVYCRSDAASLCLSCDRHVHSANALSRRHSRTLLCERCNSQPAFVRCIEEKISLCQNCDWTGHGGSTTTSSHKKETINCYSGCPSSEGLSTMWPFVLDLPSTGNSTCEQGLSLMCLNETSEMNSWGPPGNSMNDANNVDKSSILIGSSSVPELNSPSQKLDQPSGSADLTLPKLLCPGTDDLGFCEDDSLYEDFNMDEVDLNLENYEELFGVALSHSEQLFENGGIDSLFGKMDTSGADSHCQGAVIAEGSVGLANAVQPTYSNAASADSIMSSKTEPILCFTGKQAHSSLSFSGLTGESSAGDYQDCGASPTFLMGEPPWCPPGPESSLPSTSRSSAVMRYREKKKNRKFDKRVRYASRKARADVRQRVKGRFVKAGEAYDYDPISETRSF

SEQ ID NO: 11385 - protein, 381 aa, Vitis vinifera
MGGFLGTLSSLSATKLGSIAIEAALKRANVDASLVQEVFFGNVLSANLGQAPARQAALGAGIPNSVVCTTINKVCASGMKATMLAAQSIQLGVNDIVVSGGMESMSNVPKYLAEARKGSRFGHDSLVDGMLKDGLWDVYSDTGMGVCAELCADNHVISREEQDAYAIHSFERGIAAQDGGAFAWEIVPVEVSGGRGRPSTIVDKDEGLGKFDPVKLKKLRPSFKENGGSVTAGNASSISDGAAALVLVSGEKALQLGLSVIAKIAGYADAAQAPELFTTAPALAIPKAISNAGLEASQIDYYEINEAFAVVALANQKLLGLSPEKVNVHGGAVSLGHPLGCSGARILVTLLGVLRQKDGKYGVGGVCNGGGGASALVVELV

SEQ ID NO: 11386 - protein, 208 aa, Vitis vinifera
MKGMMRNPYEYHHDLGMNYTLITDHLIVGSQPQKPEDVDHLKQEENVAYILNLQQDKDVEYWEVDLPSIIKRCKELEIRHMRRPARDFDPDSLRSGLPKAVSSLEWAISEGKGKVYVHCTAGLGRAPAVAIAYMFWFCGMDLNTAYDTLTSKRPCGPSKQAIRGATYDLAKNDPWKEPLESLPERAFEDVADWERNLIQDRVRSLRGT

SEQ ID NO: 11387 - protein, 616 aa, Vitis vinifera
MANVAATNITFFKPFLQHYSNFPTSFFNITIPIPNHYHKPTSTKCLSRCHLSVTPEPSPGAPETFVSRFAADQPRKGSDILVEALEREGVTHVFGYPGGASMEIHEALARSSMIRNVLPRHEQGGIFAADGYARASGRPGVCLTSSGPGATNIISGIADANFDSIPIVAITGQVPRGLMGTDAFQEVPLIDITRPITKFNYLVLDVEDIPRTVKEAFLLATSGRPGPVLIDIPRDIQKELVVPNWNKPIMLPGNASRLPKLPEKAHLEEIVRLISVSKRPVVYAGGGCMNCSEELRRFVGLTGIPVASTLMGLGIFPCTDDLSLHMLGMHGTIQANYAVDRSDLLLAFGVRFDDRVTGKVESFARNATIVHIDIDPAEIGKNKKPHLSICTDQPTAENKRGKGTNYRTFGEAIPPQYAIQLLDELTNGNSIICTGVGQHQMWAAQYCKHKNPRHWLSSSGLGAMGFGLPAAMGAALAKPDAIVVDIDGDGSFMMNIQELATIRVENLPVKIMLLNNQHLGMVYQYEYEYGDGDSLHSYMGNPSNQAQVFPDMLMFAEACNITAARVTKKAELREAIEKMLKTPGPFLLDVMVPHQAQVLQLIPDGGTFKDAIKGAQ

SEQ ID NO: 11388 - protein, 306 aa, Vitis vinifera
MAIHMLDYITAGIRGNRKVAKRNRTPELMPLSHALATKLGTRLTEVKKNGTCSWLKPDGKTQVTIEYHNENGAMVPFHVHIVLIPTQHDETVTDDETTTSTLLSSSPGLAVIFALFFFYLSLTTPCSAASPEPHPPTNTTQFIRTSCGVTMYPKLCFKTLSAYASTIQTSHMELANAALCVSLKGAQSSSNKVLKLSKGQGLSRREAAAITDCIENMQDSVDELQQSLVAMKDLQGPDFQMKMSDIVTWVSAALTDEDTCMDGFAEHAMKGDLKSTIRSNIVSVAQLTSNALAIINKFLSIQGNQL

SEQ ID NO: 11389 - protein, 236 aa, Vitis vinifera
MKFGLRDLTLVERVSLTRFLIPNLQVSLQVTRRDMEGSFFSSHFLPALLIFLSLTSYINLSSAARPAADKASTEFIRTSCGTTTYPRLCYTSLSAHASVIQTSPKLLADTALAVTLSTARSTSSLMSKMVQSHGLKPREVAAMHDCVEELSDSVDQLRRAMGEMTQIKGSNFGLMMDDIQTWVSTALTDEDTCTDGFAGNAMNGNLKTTVRARIVNMAHMTSNALGLINSYASLHN

SEQ ID NO: 11390 - protein, 562 aa, Vitis vinifera
MALKPLTSVFLSPLSLPYSPSNPTPKFSSFYTKPTPISCQTQAHQQAAPTSDPYRPESDGLGAAAPTRGDLFLEHHQSVAASEVVFNANKKKKKVKFSGSWKASAASACYGCGAPLQTLETDAPGYVDPETYELKKKHRQLRTVLCGRCRLLSHGQMITAVGGNGGYSGGKQFISAEELREKLSHLRHEKALIVKLVDIVDFNGSFLAHVRDLAGANPIILVVTKVDLLPKETDLNCVGDWVVEATMKKKLNVLSVHLTSSKSLVGISGVASEIQKEKKGRNVYILGSANVGKSAFINALLKMMAQRDPAAAAAQRYKPIQSAVPGTTLGPIQIDAFLGGGKLYDTPGVHLHHRQAAVVHSEDLPALAPRSRLRGQCFPVLAFDDSTLSRIKSNGLNGFSIFWGGLVRIDIVKVLPQTRLTFYGPKALNIHMVPTDKADEFYQKELGVLLTPPTGKQRAEDWLGLETERQLQIKFEDSDRPACDLAISGLGWIAVEPIGRSLRTSDSDLEETAEQLQLSIQVPKPVEIFVRPPIPVGKGGGEWYQYRELTEKEVEVRPQWYF

SEQ ID NO: 11391 - protein, 337 aa, Vitis vinifera
MSFRSIVRDVRDGFGSLSRRSFDVRLPGHHRGKSHGSVHELQDQPLVVQNSRWAGLPPELLRDVIKRLEASESTWPSRKHVVACAAVCRSWREMCKEIVKSPEFSGKLTFPISLKQAWPRDGTIQCFIKRDKSNLTYHLFLCLSPALLVENGKFLLSAKRNRRTTCTEYVISMDADNISRSSSTYIGKLRSNFLGTKFIIYDTQPPYNGSQLSPPGRTSRSYNIAQVTYELNVLGTRGPRRMHCTMHSIPASSLEPGGTVPGQAELLPRNLEDSFRSISFSKSIDNSTEPLVLRNKPPRWHEQLQCWCLNFRGRVTVASVKNFQLIAATQPAAASSL

SEQ ID NO: 11392 - protein, 571 aa, Vitis vinifera
MGYNNAADADSRGKKKVALMGFSSILLVAMVVGTVVTVNHRNGSSSSATDDAQAGGGISTSVKAIQAICQPTDYKEACVNSLTSAKANTSDPKELVRTAFQVAINQISSALQNSTTLRDLEKDPRTKGALENCHELMDYAIDDLRNSFNKLGVFDISKIDDYVEDLKIWLSGALTYQETCLDGFENTTGDAGEKMKALLKSAGELTSNGLAMIDEISSVLTNLQIPGISRRLLSDESGKGDVGQRKLFQATPDTIKPNVIVAQDGSGKYKTINEALVEIPKNGNTTFVLYVKEGVYKEQVNFTKSMTNVMLIGDGPTKTTISGSLNFIDGIGTFRTATVAAVGSNFMAKDIGFENNAGASKHQAVALRVGSDMAIFYNCRMDGYQDTLYVHAHRQFYRDCTITGTIDFIFGDSAVVFQNCLILVRKPLDNQQCIVTAQGRNERREPTGIVLQNCTISAADDYIPFKTKFKSYLGRPWKAFSRTIIMQSQIDDLISPEGWLPWMGDFGLNTCFYAEYGNRGPASATTSRVTWRGIKQITGQHVNDFTVGRFISGHLWLGASGVPYTSDMMAV

SEQ ID NO: 11393 - protein, 1130 aa, Vitis vinifera
MSSGNRGTQSHHQAQSSGTSNLRVYHTDSMSKAIAQYTMDARLHAVYEQSGESGKSFDYSQSVRTTTQSVPEQQITAYLSKIQRGGHIQPFGCMLAVDEATFRVIAFSENAREMLGLTPQSVPSLEKPEILLVGTDVRTLFTPSSAVLLEKAFGAREITLLNPVWIHSKNSGKPFYAILHRIDVGIVIDLEPARTEDPALSIAGAVQSQKLAVRAISHLQSLPGGDINLLCETVVENVRELTGYDRVMVYKFHEDEHGEVVAESKRSDLEPYIGLHYPATDIPQASRFLFRQNRVRMIVDCHATPVLVIQDEGLMQPLCLVGSTLRAPHGCHAQYMANMGSTASLAMAVIINGNDEEAIGGRNLMRLWGLVVCHHTSARCIPFPLRYACEFLMQAFGLQLNMELQLASQLSEKHVLRTQTLLCDMLLRDSPTGIVTQSPSIMDLVKCDGAALYCQGKYYPTGVTPTEAQIKDIAEWLLANHADSTGLSTDSLADAGYPGAASLGDAVCGMAVAYITSRDFLFWFRSHTAKEIKWGGAKHHPEDKDDGQRMHPRSSFKAFLEVVKSRSLPWENAEMDAIHSLQLILRDSFKDATDGSNSKAVMHAQLGELELQGMDELSSVAREMVRLIETATAPIFAVDVDGCINGWNAKVAELTGLSVEEAMGKSLVHDLVYKESEETVDKLLHHALQGSEEDKNVEIKLRTFDSQQHKKAVFVVVNACSSRDYTNNIVGVCFVGQDVTGQKVVMDKFIHIQGDYKAIVHSPNPLIPPIFASDENTVCSEWNTAMEKLTGWSRGDIIGKMLVGEIFGSSCRLKGPDALTKFMIVLHNAIGGQDTDKFPFSFFDQNGKYVQALLTANKRVNIEGQIIGAFCFLQIASPELQQALKVQRQQEKKCFARMKELAYICQEIKNPLSGIRFTNSLLEATDLTEDQKQFLETSAACEKQMSKIIRDVDLDSIEDGSLELERAEFLLGSVINAVVSQVMILLRERDLQLIRDIPEEVKTLAVYGDQVRIQQVLADFLLNMVRYAPSPDGWIEIQVHPRLKQISEEVKLMHIEFRMVCPGEGLPPNLIQDMFHSSRWMTQEGLGLSMCRKILKLINGEVQYIRESERCYFLISIELPVPRRGSKSVD

SEQ ID NO: 11394 - protein, 905 aa, Vitis vinifera
MDTVCFWVCFFLLFWLGNVGFCYQDGFLSLSCGATADFVDSTNISWVSDSTYVDTGNTTTIDFIEGTSSSHVPIRFFPDSKGRKCYRLPVKNVSSVVLVRTQFVYKNYDGLAKPPAFSVSLGTAITTTANLTVSDPWTEEFVWSVNQDILPLCLHALPGGGVPVISSLEVRPLPQRAYTSGMEDFPNKSLRKCYRINCGYANGSLRYPLDSYDRIWDADQSFSPFHLSTGFNIQLSFNLSSIEESPPLAVLQTARVLARRDALAYYFPLDKLGDYYIVLYFAGILPVSPTFDVLINGDVVWSSYTVKNSEATALFFTRKGIKSLSITLKNISFNPLINAIEVYEMVDIPSETSSTTVSALQVIQQSTGLDLGWQDDPCSPTPWDHISCQGSLVTSLGLPNINLRSISPTFGDLLDLRTLDLHNTSLTGKIQNLDSLQHLEKLNLSFNQLTSFGSDLENLISLQILDLQNNSLEGTVPESLGELKDLHLLNLENNKLQGTLPDSLNRESLEVRSSGNLCLSFSISTCSEVPSNPSIETPQVTIFNKKQHDDHNLRTIILGAVGGVLFAVIVTSLLVFLYMRRKRTEVTYSERAGVDMRNWNAAARIFSHKEIKAATNNFKEVIGRGSFGSVYIGKLPDGKLVAVKVRFDRTQLGADSFINEVHLLSQIRHQNLVSLEGFCHESKQQILVYEYLPGGSLADNLYGANGRRITLSWVRRLKIAVDAAKGLDYLHNGSNPRIIHRDVKCSNILLDMEMNAKVCDFGLSKQVTQADATHVTTVVKGTAGYLDPEYYSTQQLTEKSDVYSFGVVLLELICGREPLSHSGTPDSFNLVLWAKPYLQAGAFEIVDESIKGNFDVESMRKAALIASRSVERDAAQRPVMAEVLAELKEAYSIQLSYLASCGHLN

SEQ ID NO: 11395 - protein, 561 aa, Vitis vinifera
MSSFKAYGKVNEAEQERLLARRKTRRRITIISLSSIILVAVIVAAVVGTTTNSGGKSKNAGNSVSTSIKAVCDVTLYPDSCYNSLAPMVKSSQLKPEDLFNMSMEVALNELHRTFQRFSEHEGFKGITDKMLAGALDDCYELLDLAIDNLNSSLSSSLDNFDDLKTWLSAAGTYQETCINGFESGNLRSSVLEFLKNSTEFSSNSLAIITEISKLAGSISSRRLMGLPEDKVPKWLSAKDRKLLQSSSTLKKKADAVVATDGSGKYKTISEALKAVPDKSKKSFVIYVKKGVYNENVRVEKSKWNVLMIGDGMNKTVVSGKLNFVDGTPTFSTATFAVFGKGFVAREMGFRNTAGAIKHQAVALMSSADQTVFYRCLIDAFQDSLYAHSHRQFYRECDIYGTVDFIFGNSAVVFQNCNILPKQPMPGQQNTITAQGKNDPNQNTGIAIQNCTILPSADLSSVKTYLGRPWKNYSTTVYMHSMMGSLIDPAGWLPWTGTTAPNTIFYSEFQNFGPGSSTKNRVKWKGLRNITQKEASKFTVKSFIDGSKWISDAGVSFKPGL

SEQ ID NO: 11396 - protein, 534 aa, Vitis vinifera
MERQLSFGGSSERKKVKESPGKRGDSHLHLAARAGNLTRVKEIIEKCESSELQALLSKQNQEGETPLYVASENGHALVVSELLEHVDLQTASIKANNGYDPFHVATKQGHLEVLKELLRFFPNLVMTTDSSNSTALHTAAAQGHIDVVHLLLETDPNLAKIARNNGKTVLHSAARMGHLEVLKALVSKDPSIVFRTDKKGQTALHMAVKGQNVEIVHALLKPDPSVMSLEDNKGNTALHIATRKGRSQFVQCLLSVEGIKMNATNKAGETPLDIAEKFGTQEIASILREAGATNSADHGKPPNAAKQLKQTVSDIKHDVQSQLQQTRQTGVRVQHIAKRLKKLHISGLNNAINSATVVAVLIATVAFAAIFTVPGQYVEVPTKGASLGQAHIARTAAFLIFFVFDSLALFISLAVVVVQTSVVVIEQKAKKQLVFVINKLMWMACLFISIAFISLTYVVVGSHARWLAVCATVIGSVIMLTTIGAMCYCVIVNRIAEAKKRNIRKAESRSRSFSVSMASESELLNSEYRRMYAL

SEQ ID NO: 11397 - protein, 926 aa, Vitis vinifera
MGLFSHFLVSFLCLITTTLCQVTEFISIDCGGTSNYTDSRTGLQWISDTGAISYGKSVQVENPYGGWLQYQQRRDFPTESKYCYTLKTEERRRYLVRATFQYGSLESEGTYPKFQLYLDATKWATVTVLESARVYVKEMIIRAPSSSIDVCLCCATTGSPFISTLELRPLNLSMYATDFEDGFFLKVSARVNFGAPSEDPIRYPDDPYDRIWESDLVKRQNYLVGVAPGTERVNTSKQIDVRTREYPPVKVMQTAVVGTRGRLSYRLNLEDFPANARAYAFFAEIEELGVNETRKFRMERPYLPDYSNAVVNIAENANGSYSLYEPSYMNVTMDFVLSFSFVKTRDSTRGPLLSAIEISKYVQIAPKTDKGDVTVLNALCAMSTESAWSNEGRDPCVPAHWSWVACSPTTTPRITKITLSGKNLNGVIPSELKNMEGLTELWLDGNYLTGPIPDMSNLISLKIVHLENNRLTGPLPSYLGSLPSLQELHVQNNLLSGEIPPALLTGKVIFNYEGNSKLHKEAHKTHFKLILGASVGLLALLLVLCIGSLFLLCNTRRKESQSKRSSLRTSTKASTSYSIARGGNLMDEGVACYISLSDLEEATKNFAKQIGRGSFGPVYYGKMPDGKEIAVKIMADSSSHGTQQFVTEVALLSRIHHRNLVPLIGYCEDEHQHLLVYEYMHNGTLRNHIHDSTNQKCLDWLGRLYVAEDAAKGLEYLHTGCNPSIIHRDVKTSNILLDINMRAKVSDFGLSRQAEEDLTHVSSVARGTVGYLDPEYYANQQLTEKSDVYSFGIVLLELISGRKPVSPEDYGAEWNIVHWARSLICNGDVISIVDPFLLGNVKIESIWRIAEIAILCVEQHGTSRPKMQEIILAIQDAIKIERGNEGDHKACSGSSKGQSSRKTLLTNFLDIESPDLSNDCLVPSAR

SEQ ID NO: 11398 - protein, 331 aa, Vitis vinifera
MGSAYPSSSRSPFISYACIFLAVFFILSNAPCEAQLSSKFYDNTCPKALSTIRTAIRTAVSRERRMAASLIRLHFHDCFVQGCDASILLDDSATIQSEKNAPNNNNSVRGFEVIDNVKSQVESICPGVVSCADILAVAARDSSVAVGGPTWTVKLGRRDSTTSGLSQAAANLPSFRDGLDKLVSLFSSKGLNTREMVALSGSHTIGQARCVTFRDRIHDNGTNIDAGFASTRRRRCPVDNGNGDDNLAPLDLVTPNSFDNNYFKNLIQRKGLLQSDQVLFNGGSTDSIVTEYSKSRSTFSSDFAAAMVKMGDIDPLTGSNGEIRKLCNAIN

SEQ ID NO: 11399 - protein, 302 aa, Vitis vinifera
MPCEAQLSSSFYDNTCPKALSTIRTATRKAVSRERRMAASLIRLHFHDCFVQGCDASILLDDSSSIQSEKNAPNNLNSARGYEVIHDVKSQVESICPGIVSCADILAVAARDASVAVGGPTWTVKLGRRDSTTSGLSQVSSNLPSFRDSLDRLISLFGSKGLSTRDMVALSGSHTIGQARCVTFRDRIYDNGTDIDAGFASTRRRRCPADNGDGDDNLAALDLVTPNSFDNNYFKNLIQKKGLLQSDQVLFSGGSTDSIVSEYSKNRKTFSSDFALAMVKMGDIEPLTGAAGEIREFCNAIN

SEQ ID NO: 11400 - protein, 179 aa, Vitis vinifera
MASLLRTRLSQFSLFFTIFFFFISCSSSTFASSSDEEANLKLLQSQCLAVPSSAFISSLKSTIDVLRGTMSVVSQFTKVFNDFRLSNAISDCLELLDFAADDLSWSLSAIQNPKGKDNGTGDLGSDLKTWLSSTFTNQDTCIEGFVGTNGIVKTVVAESLSQVASLVHSLLTMANPMAR

SEQ ID NO: 11401 - protein, 215 aa, Vitis vinifera
MEEADWSAVTGSCSGTLGGHLARRLVQIGVRDVFSVPGDFNLTLLDHLIAEPGLNLVGCCNELNAGYAADGYARARGVGACVVTFTVGGLSVLNAIAGAYSENLPVICIVGGPNSNDYGTNRILHHTIGLPDFTQELRSFQTVTCTQAVVNHLEDAHEQIDTAISTALKESKPVYLSISCNLPGIPHPTFSREPVPFFLAPKVSNQIGLEAALIF

SEQ ID NO: 11402 - protein, 690 aa, Vitis vinifera
MWTLGTLACALLSFLNQFFWYRREPLSITSISAQIAVVPLGHLMATVITNRVFFKGKRWEFTLNPGPFNIKEHVLITIFANSGAGNVYAIHIVSAVKIFYKQNLTFFVSLLVVITTQVLGFGWAGIFRRYLVEPAAMWWPQNLVQVSLFRALHEREKRIKGGLTRNQFFLIAFICSFAYYIFPGYLFPMLTSLSWICWIFPTSVLAQQLGSGLHGLGIGAIGFDWSSISSYLGSPLASPWFATANIALGFALIMYVITPVAYWFNIYKAKAFPIFSDDLFIATGQRYNISAIIDSKFHVDIQAYERQGPLYLSTFFAMSYGVGFACLTATVVHVFLFHGKEIWQLSKSAFQENKMDVHTKLMRKYKQVPEWWFMCILFVNIGATIFTCEYYNNQLQLPWWGILLACGLAIFFTLPVGIITATTNQTPALNVITEYIIGYIYPGFPVANICFKVYGYISMKQGIAFLQDFKLGHYMKIPPRTMFMAQIVGTIIAALVHLGTAWWLMETVPDICDRALLPAGSPWTCPGDHVFYDASVIWGLIGPRRIFGDLGHYSAINWFFLGGAIAPLLVWLAYKAFPNQHWIRLITMPVLLGATVNMPPATAVNYTSWIIIGFFSGFIAYRYYRNWWSRHNYVLSGALDAGLAFMGVLLYLCIGMEHDSLSWWGSDPDGCPLASCPTAQGVFVKGCPVF

SEQ ID NO: 11403 - protein, 157 aa, Vitis vinifera
MAQERSTGVVRWFSDQKGFGFITPNEGGEDLFVHQSSIKSDGFRSLGEGETVEFQIVLGEDGRTKAVDVTGPDGSSPGHLARDCSRPSGGGGGGGGCYNCGDYGHLARDCTLESGSAGRFGGGGGGGGGRFGGGGGGCYNCGQEGHFARECPNPNPS

SEQ ID NO: 11404 - protein, 731 aa, Vitis vinifera
MAEIGEAAAMEAGVSYECPIKQVDVTVPKTDDPTIPVLTFRMWVLGLSSCIVLSFVNQFFWYRSQPLIISSISAQIAVVPIGHLMAKKITKRVFLKGSRWEFTLNPGPFNVKEHVLITIFANSGAGTVYATHILTAVKLLYKRNLTFIPALLVMTTTQVLGFGWAGLFRKFLVEPGEMWWPSNLVQVSLFRALHEKEKRPKGGTTRTQFFLIVFICSFTYYVAPGYLINMLTSFSWVCWLAPKSILVQQLGSGLEGLGIGSIGLDWSTISSYLGSPLASPWFATANVALGFCLVMYVMTPATYWSNVYNAKNFPLYSEKLFTSNGSRYNILSIIDSNFHLSKEQYVKSGPLNMSTFFAMTYGLGFATLSATIVHVALFNGSELWKQTKGAFGEKKMDIHTWLMKKYKSVPNWWFFVIHVVNIATIIFACEYYNDVLQLPWWGVLLACAIAFFFTLPIGIITATTNQTPGLNIVTEYVMGYMYPGRPVANMCFKVYGYISMTQALTFLADFKLGHYMKIPPRSMFMAQVVGTVVAVIVYVITAWWLMATIPNLCDTTMLPADSPWRCPMDNVFFDASVIWGLIGTRRIFGNLGAYSNVNWFFLLGAIAPLLVWLMHKAFPKKKWIPLIHMPVLLGSTAMMPPASAVNFTSWIIVGFLSGFVIFRHKPKLWERYNYVVSGGLDAGTAFMTILIFLTLGSRNVSIDWWGNNPEGCPLASCPTAKGIVVDGCPVF

SEQ ID NO: 11405 - protein, 658 aa, Vitis vinifera
MLMRLIYTMAGCLVAISIAKEESNKLGTVIGIDLGTTYSCVGVYKNGHVEIIANDQGNRITPSWVAFTDTERLIGEAAKNQAAVNAERTVFDVKRLIGRKFDDKEVQKDMKLFPFKIVNKDGKPYIQVKIKDGETKVFSPEEISAMILTKMKETAEAFLGKTIKDAVVTVPAYFNDAQRQATKDAGIIAGLNVARIINEPTAAAIAYGLDKKGGEKNILVFDLGGGTFDVSILTIDNGVFEVLATNGDTHLGGEDFDQRIMEYFIKLIKKKHGKDISKDNRAIGKLRRESERAKRALSSQHQVRVEIESLYDGLDFSEPLTRARFEELNNDLFRKTMGPVKKAMEDAGLEKRQIDEIVLVGGSTRIPKVQQLLKEYFDGKEPNKGVNPDEAVAYGAAVQGSILSGEGGDETKDILLLDVAPLTLGIETVGGVMTKLIPRNTVIPTKKSQVFTTYQDQQTTVSIQVFEGERSLTKDCRELGKFDLSGIAPAPRGTPQIEVTFEVDANGILNVKAEDKASGKSEKITITNDKGRLSQEEIDRMVREAEEFAEEDKKIKEKIDARNSLESYVYNMKTQINDKDKLADKLESEEKEKIETAVKEALEWLDDNQNAETEDYQEKLKEVEAVCNPIITAVYQRSGGAPGGSSDAGEDEDSHDEL

SEQ ID NO: 11406 - protein, 421 aa, Vitis vinifera
MRTFLLFVSDFHFCCCNFLALKQGEALKTQAPWNSDKPEKQTHFPQEKTGVKSEFASLQSLSPEIASIQTNMQSNNIPQSGRSHHAQPSESYREQRRSDDGYNWRKYGQKQVKGSENPRSYYKCTFPNCPTKKKVERSLEGHITEIVYKGTHSHPKPQPKRSSSQSFPSASTNSEISGHSMPIGNPYMDSMTTSENSSVSIGEDDFDQNSPMSRSGGDDENEREAKRWKGEYENEAISASESRTVKEPRVVVQTTSDIDILDDGYRWRKYGQKVVKGNPNPRSYYKCTSIGCPVRKHVERSSKDIRAVLTTYEGKHNHDVPAARGSGSHFVTKPLPNNSTTTVPAPIRPSVMTNHSNYTTTNANPQTRPPTSASQAPFTLEMLQSPGSFGFSGFGRMSHPDGVFSRTKEEPKDDLFQSFFC

SEQ ID NO: 11407 - protein, 323 aa, Vitis vinifera
MASHHSSSSVFTTFKLCFCLLLLSFIGMASAQLTTNFYAKTCPNALSIIKSAVNSAVKSEARMGASLLRLHFHDCFGCDASILLDDTSNFTGEKTAGPNANSVRGYEVVDTIKSQLEASCPGVVSCADILAVAARDSVVALRGPSWMVRLGRRDSTTASLSAANSNIPAPTLNLSGLISAFTNKGFNAREMVALSGSHTIGQARCTTFRTRIYNEANIDASFKTSLQANCPSSGGDNTLSPLDTQTPTTFDNAYYTNLVNKKGLLHSDQQLFNGGSTDAVVNTYSTRSTTFFTDFANAMVKMGNLSPLTGTSGQIRTNCRKTN

SEQ ID NO: 11408 - protein, 930 aa, Vitis vinifera
MSIKASFSNVANALLDWDDVHNADFCSWRGVFCDNVSLSVVSLNLSNLNLGGEISSAVGDLKNLQSIDLQGNRLTGQLPDEIGNCVSLSTLDLSDNLLYGDIPFSISKLKKLELLNLKNNQLTGPIPSTLTQIPNLKTIDLARNQLTGEIPRLIYWNEVLQYLGLRGNSLTGTLSPDMCQLTGLWYFDVRGNNLTGTIPDSIGNCTSFEILDISYNQITGEIPYNIGFLQVATLSLQGNKLTGKIPEVIGLMQALAVLDLSENNLIGPIPPILGNLSYTGKLYLHGNKLTGPIPPELGNMSKLSYLQLNDNQLIGSIPAELGKLEQLFELNLANNDLEGPIPHNISSCTALNQFNVHGNHLSGSIPPGFQNLESLTYLNLSSNNFKGRIPLELGRIVNLDTLDLSSNGFLGTVPASVGDLEHLLTLNLSRNNLDGPVPAEFGNLRSIQTIDMSFNKLSGGIPRELGQLQNIVSLILNNNNLDGEIPDQLTNCFSLTILNVSYNNFSGVVPPIRNFSRFSPDSFIGNPLLCGNWLGSICGPYVPKSRAIFSRTAVACIALGFFTLLLMVVVAIYKSNQPKQQINGSNIVQGPTKLVILHMDMAIHTYEDIMRITENLSEKYIIGYGASSTVYKCVLKNSRPIAIKRIYSQYAHNLREFETELETIGSIKHRNLVSLHGYSLSPKGNLLFYDYMENGSLWDLLHGPSKKVKLDWETRLKIAVGAAQGLAYLHHDCNPRIIHRDVKSSNILLDENFDAHLSDFGIAKCIPTAKTHASTYVLGTIGYIDPEYARTSRLNEKSDVYSFGIVLLELLTGKKAVDNESNLHQLILSKADDNTVMEAVDPEVSVTCMDLAHVRKTFQLALLCTKRHPSERPTMHEVARPIDYAHFVMDKGQKQQNAQLPPHVEPDNNTSSNDAQWFVRFHEVISKNSL

SEQ ID NO: 11409 - protein, 205 aa, Vitis vinifera
MESLGVRKGKWTREEDFLLRKCVEKYGEEKWHLVPLRAGLSRCRKSCRLRWFNYLKPNIKRGKFASDEVDLMIRLHKLLGNRQLCFSRWSLIAGRLPGRTANDVKNYWHHHRFKKMLTTPRVKYLNTVGPRFNLENNVFRYYKRQMRKKSPQYIWCCMTHAFYDRMCPSCTAFHYTCPHCSRYSHKTRNSSLSPHLLPRSELENG

SEQ ID NO: 11410 - protein, 154 aa, Vitis vinifera
MESLGVRKGAWTQEEDVLLRKCIEKYGEGKWHLVPLRAGLNRCRKSCRLRWLNYLKPDIKRGEFALDEVDLMIRLHNLWSLIAGRLPGRTANDVKNYWHGHHLKKKVQFQEEGRDKPQTHSKTKAIKSRKPLDRRNCNTDKGTHGWYGRTNPGR

SEQ ID NO: 11411 - protein, 452 aa, Vitis vinifera
MDDVEIPEYFICPISLQIMRDPVTAITGITYDRESIENWLFKGNNTCPVTKQPLPPDSDLTPNHTLRRLIQSWCTENASNGVVRIPTPKAPLTKSHVVKLVKELWVPQLQLKTLRKLELLAMENERNRRYMVEAGVIKSMSSFLVACFNKQQTVGLEEALSILYLIRVNPTSETRLLPIENDRIMETFTWILQCKMDGHSSIKAHALLVLKVMVKTASSTQLERLKPEFLSSVVGVLREGISHQGINAALHILLDTCPWGRNRMSMIESGAIHDVIEIELGMPERRTTELILGILFHLCSCADGRSQFLSHSGAIAVVSNRMLNVSIAADDRAILILSLISKYCGTCVVLEEMISVRAVSKLCVVLQADYAHYLKEKAREILRSHYDFWKNSPCFISSPLYMANLNFGHPSYDHGLKHSTSLANPHWLALRTGFHLDPSTNVAPFGVSSLMK

SEQ ID NO: 11412 - protein, 401 aa, Vitis vinifera
MEEIDVPPFFLCPISLEIMKDPVTVSTGITYDRESIEKWLFSGKNNTCPATKQVLSADSDLTPNHTLRRLIQAWCTLNASNGVERIPTPKIPINKIQIVKLLNDAKSPQLQMKCIGKLRALATESDANKRCIESAGAVEFLASIVSKANFTTFEEESDKGLDILHYLLLSEAGLKKLVGKNGEFVGCLVRVLQRGNYESRAYAVMLLSSMLQVADPIQLIALKPEFFVEAVQVLQDHISHQATKATLKLLIEVCPWGRNKVKAVEAGAVSILTELLLASSEKRACEMILTVLDQLCGCAEGRAELLKHAAGMAIVSKKILRVSHVASERAVRILYSISKFSATPSVLQEMSQLGVVAKLCLVLQVDCGSRTKEKTRDILRLHARAWKNSPCIPTNLLSSYP

SEQ ID NO: 11413 - protein, 370 aa, Vitis vinifera
MEEIDVPPFFLCPISLEIMKDPVTVSTGITYDRESIEKWLFSGKNNTCPATKQVLSADSDLTPNHTLRRLIQAWCTLHASNGVERIPTPKIPINKIQIVKLLNDAKSPQLQMKCIGKLRALAAESDANKRCIESAGAVEFLASIVSKANFTTFEEESDKGLDILHYLLLSEAGLKKLVGKNGEFVGCLVRVLQRGNYESRAYAVMLLSSMLQVADPIQLIALKPEFFVEAVQVLQDHISHQATKATLKLLIEVCPWGRNKVKAVEAGAVSILTELLLASSEKRACEMILTVLDQLCGCAEGRAELLKHAAGMAIVSKKILRLGVVAKLCLVLQVDCGSRTKEKTRDILRLHARAWKNSPCIPTNLLSSYP

SEQ ID NO: 11414 - protein, 631 aa, Vitis vinifera
MHGLGGGERVPLLGREGGRKRNDTLVNGHLTDLEHGDAIPAANVGFCRVLSLAKPDAGKLVLATIALLIASTSSILIPKFGGKIIDIVSREIITPEQKTEALNAVKNTILEIFLIVIVGSICTALRAWLFSSASERVVARLRKNLFSHLIQQEIAFFDITRTGELLSRLSEDTQIIKNAATTNLSEALRNLSTAFIGLGFMFATSWKLTLLALAIVPAISVAVRKFGRFLRELSHKTQAAAALAASIAEESFGAIRTVRSFAQEAYEISRYSSQVEETLNLGIKQARVVGLFFGGLNAASTLSVIVVVIYGANLTINGSMSPGALTSFILYSLTVGSSVSGLSGLYTVAMKAAGASRRVFQLLDRVSSMPKSGNKCPLGDQDGEVELNDVWFAYPSRPDHMVLKGITLKLQPGSKIALVGPSGGGKTTIANLIERFYDPIKGRILLNGVPLVEISHEHLHRKISIVSQEPVLFNCSIEENIAYGYEGKASSADVENAAKMANAHEFISKFSEKYQTHVGERGVRLSGGQKQRVAIARALLMNPRVLLLDEATSALDAESEYLVQDAMDSLMKGRTVLVIAHRLSTVKSADTVAVVSDGEIVESGTHDELLDKDGIYTALVRRQLQGPRNEV

SEQ ID NO: 11415 - protein, 689 aa, Vitis vinifera
MWVLGTVSCVLLSFLNQFFWYRTEPLTITAISAQIAVVPLGRLMAAKITDRVFFKGTPWEFTLNPGPFNVKEHVLITIFANSGAGTVYAIHVVTVVKVFYKKHISFFVSLIVVITTQVLGFGWAGIFRRYLVEPAAMWWPANLVQVSLFRALHEKEERPKGGVTRTQFFLIAFICSFAYYVFPGYMFEMLTSLSWICWIFPTSVLAQQLGSGLYGLGIAAVGLDWSTISAYLGSPLASPWFATANVAVGFVFVMYVLTPICYWLNVYKAKTFPIFSDDLFTSTGQEYNISSIITSNFHLNITAYEEEGPLYLSTFFAMTYGVGFAALSATAVHVLLFHGREIWEQSKSSFKDKGMDIHTRLMTRYKQVPEWWFWSILIANIAFTIFACQYYNDQLQLPWWGVLLACAIAIVFTLPIGIITAITNQTPGLNIITEYIIGYIYPGYPVANMCFKVYGYISMTQAVTFLQDFKLGHYMKIPPRTMFMAQVVGTLIAGFVYLGTAWWMMETIPDICETTASSSPWTCPSDRVFYDASVIWGLIGPRRIFGDEGVYEAVNWFFLAGAVAPVLVWLAHKAFPKQEWIGLINMPVLISSTGMMPPATAVNYTTWVIAGFLSGFVVYRYRPDWWQRHNYVLSGALDAGLAFMGVLLYLCLGLEDISVDWWGNDLDGCPYATCPTAKGVFVEGCPVFD

SEQ ID NO: 11416 - protein, 1490 aa, Vitis vinifera
MEHRGGCGADNDSGDGSGLMTSIPWDLFNNWAKEQRIGSFDRLHTGVGMVFLPKDDDLMKEAKTVIDNSFKQEGLEVLGWRPVPVDISIVGYYAKETMPNIQQVFVRVVKEENIDDIERELYICRKLIERAVKSETWGNELYFCSLSNQTIVYKGMLRSEVLGNFYLDLKSDIYKSPFAIYHRRYSTNTSPRWPLAQPMRLLGHNGEINTIQGNLNWMQSREASLKSPVWRGRENEIRPFGNPKASDSANLDSTAELLIRSGRSAEESLMILVPEAYKNHPTLMIKYPEVVDFYNYYKGQMEAWDGPALLLFSDGKTVGACLDRNGLRPARYWRTIDNVVYVASEVGVLPMDESKVVMKGRLGPGMMISVDLTSGQVYENTEVKKQVALSNPYGKWVNENMRSLRPVNFLSATVMDNEGILRHQQAYGYSSEDVQMVIETMAAQAKEPTFCMGDDIPLAVISQRSHMLYDYFKQRFAQVTNPAIDPLREGLVMSLEVNIGKRGNILEVGPENASQVNLSSPVLNEGELESLLKDPHLKPRVLPTFFDIRKGVEGSLQKRLNKLCEAADEAVRNGSQLLVLSDRSDELEPTRPGIPILLAVGAVHQHLIQNGLRMSASIVADTAQCFSTHHFACLIGYGASAVCPYLALETCRQWRLSNKTVNLMRNGKMPTVTIEQAQKNFCKAVQSGLLKILSKMGISLLSSYCGAQIFEIYGLGREVVDLAFCGSVSSIGGLTLDELARETLSFWVKAFSEDTAKRLENFGFIQFRPGGEYHGNNPEMSKLLHKAVRQKSESAFSVYQQHLANRPVNVLRDLLEFKSDRSPIPLGKVEPAASIVQRFCTGGMSLGAISRETHEAIAIAMNRLGGKSNSGEGGEDPIRWSPLTDVVDGYSPTLPHLKGLQNGDTATSAIKQVASGRFGVTPTFLANADQLEIKIAQGAKPGEGGQLPGKKVSAYIARLRNSKPGVPLISPPPHHDIYSIEDLAQLIFDLHQVNPKAKVSVKLVAEAGIGTVASGVAKGNADIIQISGHDGGTGASPISSIKHAGGPWELGLSESHQTLIENGLRERVILRVDGGFKSGVDVMMAATMGADEYGFGSVAMIATGCVMARICHTNNCPVGVASQREELRARFPGVPGDLVNFFLYVAEEVRGILAQLGFEKLDDVIGRTDLLRPRDISLVKTQHLDLSYILSNVGLPKWSSTEIRNQDVHSNGPVLDDIILADPETSDAIENEKVVNKSIKIYNVDRAVCGRIAGVVAKKYGDTGFAGQLNITFTGSAGQSFACFLTPGMNIRLIGEANDYVGKGMAGGELVVTPVEDTGFLPEDATIVGNTCLYGATGGQIFVRGKGGERFAVRNSLAEAVVEGTGDHCCEYMTGGCVVVLGKVGRNVAAGMTGGLAYILDEDDTLIPKVNKEIVKIQRVTAPVGQMQLKSLIEAHVEKTGSSKGSAILKEWDTYLPLFWQLVPPSEEDTPEASAEFERTDASQVTLQSA

SEQ ID NO: 11417 - protein, 308 aa, Vitis vinifera
MSSGAARRVSRQDIQLVQNLIERCLQLYMNQKEVVETLLDQAKIEPDFTELVWQKLVEENQDFFEAYHLRLMVKHQINVFNELLKQQVDLMHRICPARVDTVPIPNGSQLSALQQNSACYPSEHVGPSMKPSSMHRHISSGLSNAFTNGGSSLQTSMHTAVDMSANTCRIDAPQDMLSTRSPNLGLMQGMNGGMIKPEAVPHSCLVLITLPWKNECISYTFLKCSPLLDSDTSTYGFLGQIPQSFSLSDLTAGFSQSSDILESYPRSPFLTTDTDNFMDSRGRGENQGDSKRLDTISEGLSYEDFPSD

SEQ ID NO: 11418 - protein, 703 aa, Vitis vinifera
MEYGSGGGGGGSGGSGGDPDGSDSRRKKRYHRHTAHQIQRLEGMFKECPHPDEKQRLQLSRELALAPRQIKFWFQNRRTQMKAQHERADNCALRVENDKIRCENIAIREALKNVICPSCGGPPIGEDSYFDEQKLRVENAQLKEELDRVSSIAAKYIGRPISQLPPVQPVHISSLDLSMGSFGGQGMGSGPSLDLDLLPGSSSAMPILPFQGTGISDMDKSLMADVAGNALDELLRLLQTNEPLWMKSTTDGRDVLNLESYERIFPRANSHLKNPNVRIEASRDSGVVIMNSLALVDIFMDSNKWMELFPTIVSMARTLEVLSSGMMGGQSGSLQLMYGELQVLSSLVPTREFYFLRYCQQIEQGSWAIVDVSYDFPRDNQFAPQNPSHRLPSGCLIQDMPNGYSKVTWVEHVEIEDKTPTHRLYRDLIHRGLAFGAERWLATLQRMCERFACLMVKGTSTRDLGGVIPSPDGKRSMMKLAQRMVNNFCASISTSNGHRWTTLSGLNEVGVRVTIHKNTDPGQPNGVVLSAATTIWLPVSPQNVFNFFRDERTRPQWDVLSNGNAVQEVAHIANGPHPGNCISVLRAFNTSQNNMLILQESCIDSSGSLVIYCPVDLPAINIAMSGEDPSYIPLLPSGFTISPDGRLDQGDGASGGSLITVVFQILVSSLPSAKLNLESVTTVNNLIGNTVQQIKAALNCPSS

SEQ ID NO: 11419 - protein, 262 aa, Vitis vinifera
MDHTPVTSQTLYKLPSLECIVASSAGVDHIDLTTCRLRGIAVANGSQAFSEDVADYAVALLMDVLRKISAGDRYLRSGLWSTKGDYPLGWKLGGKRVGIVGLGNIGSEVAKRLVAFGCAIAYNSRKKRSSVSFPYYADVCDLAANSDILVICGALTSETHHIINKDVMTALGKEGVIINVGRGSLINQKELVQFLVEGQIRGAGLDVFENEPIVPRELLELDNVVLSPHNAVVTPEAFEAMQELAISNLGAFFSNKPLLSPI

SEQ ID NO: 11420 - protein, 214 aa, Vitis vinifera
MVRGKTQMKRIENAASRQVTFSKRRSGLLKKAFELSVLCDAEVALIIFSPRGKVFEFSSSSINKTIERYQSKAKGLGISKRGAPENEQHHLEGETVDLAKKIELLEVSKRRLLGECLDSCSIEELQQIENELEQSLSNIRIQKNHLCKGHIERLKEQERILGEENAKLRGKCGLQPLQPSTKHQSVPYVEISEVETELFIGPPERRTVRYLSET

SEQ ID NO: 11421 - protein, 356 aa, Vitis vinifera
MKGMKGKLLKKLKSIRPIGYLKEDRVLQVNASDGFLDGSSWNPSVGVQAQFVCKGTVQNGLDRTGGTEREPEVIDVMELMRDLEGEDMEFDDLMDDKENIGPPVRAKDPDDGTWEATGNPGHTPLSEIDISSFRRPDLNSGSLFDPNLLAAFQQAVMDQIRINEEERKARMKEEDVEIDDEPPPKARRVEDDTNPLLGFEERCPPGGSDAVVLYTTSLRGIRKTFEDCTSIRFLLESFRVIFYERDVSMHLEFREELWRILDCKALPPRLFIKGRYIGGAEQVLGLHEQGRLRALFHGLPIDHSKGPCEGCAGIRFVMCYKCCGSRKIVSDDGNHGLSNNCPHCNENGLIICPICC

SEQ ID NO: 11422 - protein, 348 aa, Vitis vinifera
MGYNLKTPSWDLAELQKEGIPSVAPFLGSSSSLGGGQETKGDCLVDLKLGRLSDLGDGSVNSFKSSMMESSSSGSAKRARTPGHGTQVVSCLVDGCKSDLSKCRDYHRRHKVCELHSKTAKVTIGGHEQRFCQQCSRFHSLGEFDEGKRSCRKRLDGHNRRRRKPQPEPLSITSGRFLSSHQGTRLLAFSNPQVFPASAGVTSAWAGNIKTENDAVLYNSHQQLNFMDRQNSFPESFSRSYRGKQFPFLQGPNPTLPGTSVCQPLLDPSSASGNGSGGQKMFSDGLNRVISSDRALSLLSSPPPETQEIGLSRMVQQNPIPPAQSLIPSLHYTGLSQNGWVSRFCFGL

SEQ ID NO: 11423 - protein, 865 aa, Vitis vinifera
MEDGAPPPETALGTVPDSSMDLDFMDELFLGGCWLETTDGSEFLLQSPSNSGSVFDPSSLWPTFGSNNSLSQSMTNVAGYPVQSENYLMDDFDLSRRWWIRPKSSPGPSSTVMERLIRALSYIRGSTKNKDALIQIWVPVNRGGRRVLTTNDQPFSLDPSCPRLARYRDISVSYQFSAEEDSNELAGLPGRVFLGKVPEWTPDVRFFRSEEYPRVDYAQHFDVRGTLALPVFEQGSQTCLGVIEVVMTTQKSNYRPELESVCKALEAVDLRSSEVLSTRNVKACNKFYQAALPEILEVLTSACGTHGLPLAQTWVPCIQQGKWGSRHTDGNYIHCVSTVDSACCVADPRTQGFHEACSEHHLLKGQGIAGRAFTTNEPCFSADITSFSKTQYPLSHHARMFGLCAAVAIRLRSIHVPVSDFVLEFFLPVDCRDPEEQKGMLCSLSIIIQKVCRSLRVVTDKELEGETPSLVSELTKVQHTPTEKISQEQSSWMASLKEAQQSIDITPPSQKEKVRESLDSINKIQANKESSLSSVGKTGERRRSKAEQTITLQVLQQYFAGSLKDAAKSIGVCPTTLKRICRQHGIKRWPSRKIKKVGHSLHKIQLVIDSVKGASGAFQIGNFYSKFPELASPELSGTHPYSTSKLFDHQNPLSVQPEGDNSSTGVAASKSLSSSCSPSSSSSQCCSTGTQEHPSTCSVTGSDPMVGENSAEGMLKRVRSEVELPISSQEELKLLPRSQSHKSLPECPNLESHPAIPQSGSLASQEGDAWRVKVTYGDEKIRFRMQSNWGLKDLRQEIGRRFNIDDSSGFHLKYLDDDLEWVLLTCEADFEECKDICGSSQNHVIRLAIHQISHHLGSSLGSTCP

SEQ ID NO: 11424 - protein, 170 aa, Vitis vinifera
MKGGRSKSDTKKADAKLSVKKGAAATKAGKKTKKEKPVKDPNKPKRPASAFFVFMEEFRKQYKEKHPSNKSVSVVSNLIFDQFSLVGKAGGDKWKSMSEAPIGKIQEKAPYVAKAEKRKVEYEKNMKAYNKKQAEGTKVVEEEDESEKSLSEVNDQEDDEDGSEEVCLSD

SEQ ID NO: 11425 - protein, 196 aa, Vitis vinifera
MDFCIYRGGNGGTKRDFESGEAERTSSRASDEDDNGLTRKKLRLSKEQSAFLEESFKEHNTLNPKQKLALAKQLNLRPRQVEVWFQNRRARTKLKQTEVDCEYLKRCCETLTEENRRLHKELQELRALKTSNPFYMQLPATTLTMCPSCERVAATSTAPSAAASTATTATDPSTTTTTTANRPRFYPFSHQPPGAS

SEQ ID NO: 11426 - protein, 472 aa, Vitis vinifera
MAPLQGLSSCNRYQNSINISEFRVEKLSMKSYYIRCEGRDYVSLDGDGNGKKEKKRFRVLIAGGGIGGLVLALAAKHRGFEVKVFEKDLSAVRGEGRHRGPIQLLSSALAVLEAIDENVAKQIMEAGCVTGDRINGLADGLSGEWLSKFDLLTPAIRRGLPVTQVICRMSLQDILVNAVGLEILSNKSKVVDFMEDSNKVTVTLEDGRQYDGDVLIGADGIWSEVRSKLFGRQEAKYSNYTCYSGLTNFVPPYINTVGYRVFLGLNQYFVASDVGNGKMQWYAFNREPPMNNTDSPKGKKQRLLELFRSWCDEVITLILKTPDHMILQRDIYDRDMIYSWGTGRVTLVGDAAHPMQPNLGQGGCMAIEDCYQLILELDKIANSGSSILLSDQIVSALRRYEKKRMFRVGTVHTASRMASEVLAAYQPYMEFGFGPLPGLSTLRITHPGIQVARMFLQVFLQQFMTWMISGHG

SEQ ID NO: 11427 - protein, 562 aa, Vitis vinifera
MAGSVHFSGVRTPLLIKKACFSRFPSLSKSSNRIEFSASAISSSGLFAAFGDGCRRRVLRVGCKKGVEAVLREEASENESSDDNVEKLACVMKFGGSSLASAERMREVADLVLQFRDERPVIVLSAMGKTTNNLLLAGEKAVSCGVSNASEIDELSLVKELHLRTVQELGLDSSVISGHLEELEQLLKGIAMMKELTFRTTDYLVSFGECMSTRIFAAYLNKIGAKARQYDAFDIGFITTDDFTNADILEATYPAVAKRLYNDWINDPAIPIVTGFLGKGWKSGAVTTLGRGGSDLTATAIGRALGLQEIQVWKDVDGVLTCDPSIYPRALPVPYLTFDEAAELAYFGAQVLHPQAMRPARESDIPVRVKNSYNPEAPGTLINKTRDMSKAVLTSIVLKRNVTMLDIVSTRMLGQFGFLAKVFSIFEDLGISVDVVATSEVTGNLFSRQELDHVVEELEKIAVVNLLQHRSIISLIGNIQRSSLILEKAFNVLRTIGVNVQMISQGASKVNISLIVNDSEAEQCVKALHHAFFEIGDLFELMILDGGVENGSALPLTVENQL

SEQ ID NO: 11428 - protein, 218 aa, Vitis vinifera
MKMGFGLVFLLVLSLGVFDVCEGKGKGYEEAVNCKRLECAPYEVVHSQKDYEIRSYTTSMWISTPPLNSSSYKDAVGRGFNILFAYIQGNNDQRAKIDMTAPVLVDIFPSTGPFCNSSFIMYFYVPTKYQNNPPLSAQAHQVKLPKHKYAAVRRFGGFMDDSNIPTQALALRRSLKGTPWETSISTKNRVLTYSVAGYNSPFEYENRVNEVIFWFDRP

SEQ ID NO: 11429 - protein, 446 aa, Vitis vinifera
MASVSSQPQFRYTQPPSKVLHLRNLPWECTEEELIELGKPFGKVVNTKCNVGANRNQAFIEFADLNQAIAMISYYASSSEPAQVRGKTVYLQYSNRQEIVNNKTSADVAGNVLLVTIEGADARLVSIDVLHLVFSAFGFVHKITTFEKTAGFQALVQFSDSETASAAKNALDGRSIPRYLLPEHLGPCTLRITFSAHTDLSVKFQSHRSRDYTNPYLPVASSAIDGSGQFSMGFDGRKVEPESNVLLASIENMQYAVTLDVLHMVFSAFGPIQKIAMFDKNGGVQALIQYPDVQTAIVAKEALEGHCIYDGGFCKLHISYSRHTDLSIKVNNDRSRDYTSPVLSSQPSVLGQQPVPIPGPSTHQFEGAQYASPSDQPVIHQPSAGWATSAAAAGAPPPPPQSMPMQQHNHPYMPPGTMPPQPVPGMMPMQTQTGLPQSAAMPPYSH

SEQ ID NO: 11430 - protein, 100 aa, Vitis vinifera
MKKNVGELGLKFFLKIFEIAPSYQKWFSFLKNSKRRTQSSSPMPWLFLIMVDRISNKVTARDSTLKKLGVVHYKSGVLDEHYQATKFALLEIIKEAVPEM

SEQ ID NO: 11431 - protein, 653 aa, Vitis vinifera
MLVFSVLIFLSIGVESKCSRGCDLALASYNIWNGTTLSFIATAFSTSISEIQSFNPQINDIDLIIVDTRLNIPFSCSCIDGEFLGHTFFYSVDSNDTYNIIARTFYANLTTVEWLERFNRYEATEIPVNAIINVTVNCSCGNSRVSKKYGLFVTYPLQPGESLSSIANESGLPSKLLQDYNPGVDFSLGSGLVFIPGKDQNGSYPPLKLRSSWNSFMLPYICISIVLFLQSKWWDLYRFIATYSNFPFLSVSVRTGISVGVIAGISVAGVAGSLLLAFVLYVGIYKRKMGKAPLLPAAFEDQHMQPGQGYGSTLEKTSDSVALVAAVSLELVGITADKSVEFTYEELAKATNNFSAASKIGQGGFALVYYAELQGQKAAIKKMDMQASKEFLAELKVLTHVHHFNLVRLIGYCVTGSLFIVYEYIENGNLSQHLRGSGNDPLPWSTRVQIALDAARGLEYIHEHTVPVYVHRDIKSANILIDKNLRAKVADFGLTKLTVAGSSSLPTRLVGTFGYMPPEYAQFGAVTPKIDVYAFGVVLYELISAKEAIIKTNGSTTTEARGLVALFENVLSWPDLREDFCELIDHRLGNDYPLDLIWKMAQLAKACTQEDPQLRPSMQSVVVALMTLSSSTEDWDVRSVYENKALVNLMSGR

SEQ ID NO: 11432 - protein, 150 aa, Vitis vinifera
MQFLLLRAYTITFWTPRALIFTRHFDIAYLVGVFWDYIVSCSVMADPLERVARLASENAVVIFSLSSCCMCHAVKRLFCGMGVNPTVYELDQDPRGKEIERALMRLLGNSPAVPVVFIGGKLVGSMDSVMASHINGTLVPLLKEAGALWL

SEQ ID NO: 11433 - protein, 242 aa, Vitis vinifera
MPISFKPIVPIFSHHVTFMRNSWKIQLLALMWARLYSLMEGSYLFKAVAALSILLRLTTYMNSCSAAGATPGETNTEFIQKSCHVTPYPRLCISSLSSYASKIESSPKLLAVTALSMSLETALSTSTAITKLSKIHGLQPAEAAAISDCVEQIRDSVDELQRSLQEMKHPGGSNFVFPMNDVQTWVSAALTDDHTCMDGFAEIASKGKVHTMVRSRILHVAQMTSNALSLINNYASTKTTLS

SEQ ID NO: 11434 - protein, 384 aa, Vitis vinifera
MSQNTTLRHKVHNRLVSSNAKEATPKNEKLYRGVRRRPWGKFAAEIRDSTRHGRRVWLGTFDTAEAAALAYDQAAFSMRGPRAVLNFSEERVKESLRDIKCGWKDGGSPLVAMKRKHLMRRKLACREKKKEKEAREQHVVVLEDLGADYLDQLFFIVFNSMDSFFFHEYRTSEFSPESSLFDPLEYFSPWDEPLFNHDSLPFGINASDHEMITPFCMPAEGATGSSERASSAVVKEDHGVSSNAQEATSKSEKSYRGVRRRPWGKFAAEIRDSNRQGRRVWLGTFDTAEAAALAYDQAAFSMRGSMAVLNFPVEYVEKSLRYMKHGHKDGGSPVMAPNNGLSVGQKSANGRKEDKDERPAQNVLVLEDLGADYLEQLLCSSESC

SEQ ID NO: 11435 - protein, 215 aa, Physcomitrella patens
MAAAAMSSVVRVASCTGSTQDKRILHSLMALHAAKIFVAVESSSRGAVASAALKTKTSLVREEECSVGAFCSLYSTFSEVSTRGLSRVAARSSAAATNGAVSLNGDASSGGAAKERSPKKHKKSETKKKAAKDSDMPKRPPSAYFIFMETFRKEFKAANPDVKGVTASAKAGGEKWLSMSEEEKAPYVAEASVRKGQYEQAMTAYKNGKALESSL

SEQ ID NO: 11436 - protein, 165 aa, Physcomitrella patens
MKEAKGKKGVGAVAKRDVKEKVTKVQDKDIKKRKGPVKEPKGGKAKSAKKAKDPNAPKRPATAFFIFLNEFREVFKKENPNVKGVAAVGKAGGEKWKSMSEAEKQPYMQKAVQKKSEYDKTLSAYNKKQDDDEEDEEVEAEESDKSKSEINDDEEDEEEDEDLED

SEQ ID NO: 11437 - protein, 158 aa, Physcomitrella patens
MKEAKGKKGGGAVAKERVPKVQDKDIKKRKGAVKETKAKKPKGGKKLKDPNAPKRPPTAFFIFLNEFREVFKRENPNVKGVTAVGKAGGEKWKSMSEAEKQPFMTKAVQKKSEYDKTISAYNKKQDEDAEEVEAEESDKCKSEINDDEDEEEDEDLDG

SEQ ID NO: 11438 - protein, 515 aa, Malus hupehensis
MDGPVGRGGSSADTYLPNYKLGKTLGIGSFGKVKIAEHALTGHKVAIKILNRRKIKNLEMEEKVRREIKILRLFMHPHIIRLYEVIETPSDIYVVMEYVKSGELFDYIVEKGRLQEDEARNFFQQIISGVEYCHRNMVVHRDLKPENLLLDSKCNVKIADFGLSNVMRDGHFLKTSCGSPNYAAPEVISGKLYAGPEVDVWSCGVILYALLCGTLPFDDENIPNLFKKIKGGIYTLPSHLSPGARDLIPRMLVVDPMKRMTIPEIRQHAWFQAHLPRYLAVSPPDTIQQAKKIDEEILQEVVKMGFDRNLLVESLRGRVQNEGTVAYYLLLDIRFRVSSGYLGAEFQETVDCGFNRMQQSETAASPVGHRLPGYMEYQGMGFRPQFPVERKWALGLQSRAHPREIMTEVLKALQELQVCWKKIGHYNMKCRWVPGTPGHNEGMIDNSVHSNNYFGDESSIIENDGVMRMPNVVKFEVQLFKTREEKYLLDLQRVQGPQFLFLDLCAAFLAQLRVL

SEQ ID NO: 11439 - protein, 193 aa, Gerbera hybrid cultivar
GEGKWHLVPLKAGLNRCRKSCRLRWLNYLRPNIKRGDFGEDEIDLIIRLHKLLGNRWSLIAGRIPGRTANDVKNWWNTHLRSRHQQQQRVHQEDELSQDTTVAIIKPQPRTFSKTLNWFGNRQSVKDHVDINIIKSSSASDTNNISAPPELIASPKILDDAINECRQKLFDGDEKEVDIDGHVRWSFTPADEE

SEQ ID NO: 11440 - protein, 120 aa, Haemophilus influenzae Rd KW20
MIKCLSRLFIGNIMETLDKIKKQISENPILIYMKGSPKLPSCGFPARASEALMHCKVPFGYVDILQHPDIRAELPTYANWPTFPQLWVEGELIGGCDIILEMYQAGELQTLLAEVAAKHA

SEQ ID NO: 11441 - protein, 261 aa, Prochlorococcus marinus str. MIT 9215
MRSKMKESDPILEVENLSASTDDLPILKGVSLTVYPGEIHAIMGRNGCGKSTLSKIIAGHPSYNITNGNIKFLGENINSLEPEERAQSGIFLGFQYPIEIPGVSNLEFLRVSTNARRKFLNKEELDTFDFEELVKKKLELVKMDHAFLSRSVNQGFSGGEKKRNEILQMALLEPKIAILDETDSGLDIDALRIVASGIKKISNAQTGIILITHYQRLLDEIEPNYVHVMSDGQIIKTGDSNLALELEKKGYEWTDNFIKET

SEQ ID NO: 11442 - protein, 248 aa, Prochlorococcus marinus str. MIT 9215
MALSSQTKETILVADDEASIRRILETRLSMIGYKVVTASDGKEALKLFKDYDPDLVVLDVMMPKLDGYGVCQELRKDSDVPIVMLTALGDVADRITGLELGADDYVVKPFSPKELEARIRCVLRRIDKEQIPGMPNSGLILVTDIKIDTNRRQVFKSDERIRLTGMEFSLLELLVSRSGEPFSRGEILKEVWGYTPERHVDTRVVDVHISRLRSKLEADPANPELILTARGTGYLFQRIVDIAPFDAK

SEQ ID NO: 11443 - protein, 381 aa, Prochlorococcus marinus str. MIT 9215
MLSTPILLDYQSSTPCSKDVVDSMKPFWSDIFSNPSSKSNLAGINASAILEASRESIKQNLFLKNKKIIFTSGATESNNLALIGFARNYYKKTGNYGHIITLKTEHKAVLEPLNQLKKEGFVVTEITPETDGLISEGHFEKNIRGDTFMVSVMLANNEIGVIQPIENISRMCKSRGIIFHSDFAQCLGYMELGNLLSDLNMITMSSHKIYGPKGIGLLLIDEEINLEPLIFGGDQEYGLRSGTLPLPLIVGFAKAIEIAVFNQKKNAEKLLSYRNTLLEGLLENNSGLLINGSIEKRLPHNLNLTVLDLNGAKLHKLLKSKIICSSGSACSNGEPSHVLLSLGRSFKEAESSIRLSIGLSTNLKDIKQSINIITNTINSLR

SEQ ID NO: 11444 - protein, 327 aa, Prochlorococcus marinus str. MIT 9215
MQFIDQANIILKAGKGGNGIVSFRREKFVPAGGPSGGNGGRGGSVILIADNNLQTLLDFKFKREIIAKDGCKGGPNKRSGASGEDTILKVPCGTEIRDIKTGIILGDLTKHKESLTIAIGGRGGHGNAYYLSNQNRAPESFTEGKDGEIWEVQLELKLLAEVGIIGLPNAGKSTLISVLSSARPKIANYPFTTLIPNLGVVRKIDGNGCLFADIPGLISGAADGVGLGHDFLRHIQRTKILLHLIDSIAENPLHDFEIIEQELQKYGKGLLDKERIIVLNKMELVDDDYLKIITKKLEDLSKRKVLVISSSLKKGLSSLLSEVWKRI

SEQ ID NO: 11445 - protein, 391 aa, Prochlorococcus marinus str. MIT 9215
MELQQKTKTDTNGLIPPYGGELKNLIIKDKNLKNDLISKAAYEFECSERNACDVELLIVGAFSPLEGFMDENNYNSVIKNNRDLNGLLFGLPIVFDSNNDKVKAGEKILLTYKKQKIAVLEVSSKWEPDKSLEAELCYGTNSFDHPAVKMIFNERGRFYIGGRIYGFELPIREFPCKTPEEVRSTLPSNYDVVAFQCRNPIHRAHYELFTNALLSENVSPNSVVLVHPTCGPTQQDDIPGKVRYLTYKELEEEISDQRIKWAFLPYSMHMAGPREALQHMIIRRNYGCTHFIIGRDMAGCKSSATGEDFYGPYDAQNFANKCAEELMMKTVPSKNLVYTKEKGYITAEEAKELNYEIMKLSGTEFRKKLRDGDPIPEWFAFKSVVDVLRRS

SEQ ID NO: 11446 - protein, 244 aa, Prochlorococcus marinus str. MIT 9215
MLPASRGFNRFSSQQSGQSKINSIGERFPINRTLMEVIKGLDGASTEMVERSKTIFFPGDPAERVYLIRRGAVRLSRVYESGEEITVSLLRENSLFGVLSLLTGHRSDRFYHSIAFTRVEMITAPANSVLRAIEEDASVGLLLLQGLSSRILQTETMIETLTHRDMSSRLVSFLMVLCRDFGVAGEKGITIDLRLSHQAIAEAIGSTRVTITRLLGDLKDSGLLNIERKKITVFDPIALAKRFN

SEQ ID NO: 11447 - protein, 486 aa, Prochlorococcus marinus str. MIT 9215
MTTALQTPQRRSRSKLQDASLVNGPMLLLRSIRGFSSNRSMLWLATVPLALFGLGIFNLSAHAADLPELNAAFLANNLWLLIATILVIFMNAGFAMVEAGMCRSKNAVNILAKNLFVFALAVTSYWFIGYSLMYGGSVADGWLYFGGLFFDPTVTADMVTDAGLVPTVDFLFQSAFAGTAATIVSGLVAERVKFGEFVVFAIVLTAFIYPIAGSWKWNGGWLDSLGFVDFAGSSIVHSVGAWAGLVGAMLLGPRIGKYSDGKPQAMPGHNMAIATLGALVLWIGWYGFNPGSQLAMDQWVPYVAVTTTLAAAAGAIGATIVSTLTSGKPDLTMIINGILAGLVSITAGCGDMTLAGAWFAGLVGGIIVVFSVAALDAAEIDDPVGAFSVHGVCGVWGTLVIGLWGTAVQGDGAGMGLFNGGGINLLLVQALGAAAYAIWTLVTCWIAWSVIGGLFGGIRVSEEEETQGLDIGEHGMEAYPDFASAK

SEQ ID NO: 11448 - protein, 587 aa, Prochlorococcus marinus str. MIT 9215
MTLTSRSFSKGSSKHEKPVWITGAEALMDSLKIHGVKVIFGYPGGAILPIYDAVHKAEQDGWLKHYMVRHEQGGSHAADGYARSTGEVGVCFGTSGPGATNLVTGIATAQMDSVPLVVVTGQVPRPAIGTDAFQETDIFGITLPIVKHSWVIRDPSDIAKVVSEAFFIASSGRPGPVLIDIPKDVGQEFFNYQRVLPSEIIPKGFKRNGEINDCDISKAIKLIEDSERPLLYVGGGAISSGAHDEIKTLAKNYQIPVTTTLMGKGAFDEKDNLSVGMLGMHGTAYANFAVTECDLLIAIGARFDDRVTGKLDTFAPNAKVIHIDIDPAEVNKNRRVDVAIVADVSKAVLKINEQFLKKKFTCQTKNWLEKIDFWKHKHPLYEPPKEGEIYPQEVLLKVRELSPEAYITTDVGQHQMWAAQYLRNSPRKWISSAGLGTMGFGLPAAIGVKAALPNSDVICIAGDASVLMNIQELGTLSQYGLKVKLIIINNRWQGMVRQWQESFYDERYSSSDMSCGEPDFVKLAESFGVKGYLISERKQLKDELKNALDHDGPALINILVRRGENCYPMVPPGKSNAQMVGYVNCED

SEQ ID NO: 11449 - protein, 860 aa, Prochlorococcus marinus str. MIT 9215
MKIVPREFSNSAWNCFVFAKKIAYKNYQQNVDSDNLLLALIKEDHITKNILKKNNVNLKDLEREIISSLNAKAKMKNKQDNLYIGETLHKIFLKANDIKNTLNDVVISTEHLVYGFTYDNNYGFKILKQKCIPEFLEIIKKMKSDPAVKNEFDSSNESLEKYGIDLTQSARDGILDPVIGRDEEIRRTIQILSRRTKNNPVLIGEPGVGKTAIVEGLAQRIINGDVPSALQDRKLISLDMGSLLAGAKYRGEFEERIKNILKKVKESDGKIILFIDEIHTVVGAGASGGSLDASNLLKPMLARGELRCIGATTINEHKQNIEKDPALERRFQKIKVEAPSINDTVSILRGLRERYEVHHSVRISDNALVAAATLSERYINDRFLPDKAIDLIDEAASRLNMVITSKPEEIDEIDRKVLQFEMEKLSLKRETDDFSIERLEKINSELIALKDKQTELGAQWKKEKDEIDEISTIKEEIESVQLQIDQAKRSFDLNKAAELEFGTLNSLQKKLKEKSESLVNSQKNGDTSLLRQEVTFDDIAEVVSKWTSIPVQNLNQSEKDKLLSLESILKEKIIGQDSAIRAVADSIKRSRTGLNDPSKPLASFLFLGPTGVGKTELSKVTAKIIFDSNSSITRLDMSEYMEKHSVSKIIGAPPGYLGFESGGQLTEAVRKNPYSLILLDEIEKAHKDILDILLQVLDDGIITDGQGRTINFKNSIIVLTSNLGSQSINDLSVRKEDTNEIKKVVDNEIKKFFKPEFLNRLDEIVIFNNLELNDIKEIAKIQLQNLEKRLSKKNLKFKITDEAINQLVENSFDHAYGARPLKRIIQKQLETKISNNILNNHYLNKDEINIYLVNGEINVD

SEQ ID NO: 11450 - protein, 392 aa, Prochlorococcus marinus str. MIT 9215
MSQINLSERALSIEPSLTLQISARANQLSAEGVDICNLSAGEPDFNAPKEVIEATSKAIFDGFTKYGPAAGNLDLRKAIANKLQIQNNLNFKFENVMITNGAKQAIYNLFQVLLNIGDEVIIPSPYWLSYPQMVRLAGGKPIFTNSSAEDGFKINIKDLKSKISSKTKFIIINSPNNPTGRIMSKEELMQIADLAREHPNINILSDEIYELILKKEFKHYSLSTLANDLKDRIFIINGFAKGWAMTGWRIGYLVGPKDVIKASSALQSQSTSNVCSFVQKGALEALKVNNEFFSMINSHYDQRRSLLYEGLKNINGIYIEEPNGAFYAFPRLPNSSITSVDFCNKVLQDFGLVVVPGKAFGADECIRISCAASEAKIKDGLDRFEKAISQYY

SEQ ID NO: 11451 - protein, 637 aa, Prochlorococcus marinus str. MIT 9215
MNQKFKTLILWALPILLVIALSYQYLSSSNVDSLKSNGTTVAPRNSAVARVSYGRFLDYINSGRVTSVDIFEGGRNAVIETIDSDLDNKVQRLRVDLPGLTPELINILKNEGISFDVHPVKTSSPALGILGNLLFPAILIGGLILLARRSNGMPGGPGQAMQFGKTKARFAMEAETGVVFDDVAGVNEAKQDLQEVVTFLKKPEKFTSVGARIPKGVLLVGPPGTGKTLLAKAIAGEAGVPFFSLSGSEFVEMFVGVGASRVRDLFKRAKENSPCLIFIDEIDAVGRQRGAGIGGGNDEREQTLNQLLTEMDGFEGNSGIIIIAATNRPDVLDSALMRPGRFDRQVTVDAPDIKGRLSILEVHARNKKLQDDLTLESIARRTPGFTGADLANLLNEAAILTARRRKTEISISEIDDSVDRIVAGMEGSPLTDGRSKRLIAYHEVGHAIIGTLVKAHDPVQKVTVIPRGQAKGLTWFTPDDDQSLISRANLKARIMGALGGRAAEDVVFGEGEITTGAGGDFQQVAQMARQMVTRFGMSNLGPIALEGGNQEVFVGRDLMTRSEVSDSISKQIDESVRVMVKQCYKETYDIVYKNREAMDKIVDLLIEKETLDGEEFVNILSKFTTIPEKERTPQLLS

SEQ ID NO: 11452 - protein, 236 aa, Prochlorococcus marinus str. MIT 9215
MENLLEIKSLNTYYGESHILRDVDLNVQSGEMVCLIGRNGVGKTTLLKSLIGLLKQKKGDIYLLGENINRKEPHQRARKGMAYVPQGREIIPYLSVEENLMLGMESLPGGLSKNRKIDPFIYDLFPILKDFLQRKGGDLSGGQQQQLAIARALLGNPQLLLLDEPTEGIQPNIVLDIENAINQIIRDTGIGVLLVEQHLHFVRQANRYYAMQRGGIVASGNTSELSQAVIDNFLSV

SEQ ID NO: 11453 - protein, 390 aa, Prochlorococcus marinus str. MIT 9215
MENNFIYLDNASTTPLSENVLNIINSTYRNYWHNPSSTYELGIKCSTYLEKIRTNIAYIFEADPEDIIFTSGSSESTNIVFNNIYEKFKNGRVVISNVEHQATTICSNKLRKQNWDIYEWTVNNDGILNISNIKKILTNKTKLVSIIWGQSEIGTIQPVQFIGSKCEELNIMFHLDGTQILSNGIFSWKELKCDFLSLSAHKFGGPKGIGILLTKEKSRQILKNKDISLTQEYSIRQGTQALPLIAGMYESLKNINGKIKLYDYMTEFPSNNIIKLKNYLFQKIKDNNHIKITGSIKHRLPNHVSFLLLNKLFEPIRAYKIVNFMSENRIAISSGSACSSSSGKPSSTLKNIGLKDDELYSNIRVSLGSINNKLEIDKFLELIQICIEKF

SEQ ID NO: 11454 - protein, 368 aa, Prochlorococcus marinus str. MIT 9215
MTFFNKRAIEYAEANKPKKVEKKVEKPVIKAKSAAPAKVEVQKNTSDNSNIQTETPINKGVPNIEKKPMKKKHADVPVNIYRPKAPYEGTVIENYSLLKEGAIGRVNHITFDLKGSDPFLNYVEGQSIGIMPAGQDANGKPHKLRLYSIASTRHGDNFEGNTVSLCVRQLQYEKDGETINGVCSTYLCDIKPGDKVKITGPVGKEMLLPEEEDSNIVMLATGTGIAPMRAYLRRMFEATEKEKNKWNFKGKAWLFMGAPKSANLLYEEDLQRYLSDYPDNFKYTKAISREQQNTKGGRMYIQDRVLESANELFNMIEDEKTHIYLCGLKGMEPGIDEAMTKAAQEKGLNWSDLRPQLKKAGRWHVETY

SEQ ID NO: 11455 - protein, 330 aa, Prochlorococcus marinus str. MIT 9215
MTSFITAVQNKESNFNLTNSRLRLVSGTTNPKLAEEIASYLGIKNVPLISKRFADGELYVQIQQSIRGCDVFLIQPTCAPVNDSLMELMIMVDACKRASARQITAVIPYFGYARADRKTSGRESITAKLTANLLEKSGVDRVLAMDLHSAQIQGYFDIPCDHIYGSPVLIDYLESLNLEEIVVVSPDVGGVARARAFAKLMKDAPLAIIDKRRSAHNIAESLTVIGEVKGKTAILIDDMIDTGGTICSGAHLLKKEGANRIFACASHAVFSPPSYERLSIKDLFEQVIVTNSIPVIKDDFPQLKVLSVANMLGEAIWRIHEESSVSSMFR

SEQ ID NO: 11456 - protein, 463 aa, Prochlorococcus marinus str. MIT 9215
MSISSYLTKKFSKSLFFPAHNRGTALPKKLVTLLKNRPGYWDLPELPEIGSPLTQNGLIAKSQREFSDKFGAKGCFFGVNGASGLIQSAIIAIANPGETILMPRNVHISVIKTCAMQNINPIFFDLEFSSVTGHYKPITKIWLENVFKKINLDENKIAGVILVSPSYHGYAGDLEPLIDVCHQKNLPVLVDEAHGSYFLFCENLNLPKSALSSNADLVVHSLHKSLNGLTQTAVLWYKGNLINERNLIKSINLLQTTSPSSLLLSSCEESIKDWLNKKSLSKYQKRILEAKSIYKKLIQKNIPLIETQDPLKIVVNTSKAGIDGFTADKFFYRNGFIAELPEMMTLTFCLGFTNQKDFPDLFEKLWHKLLLNSKKSKSLEVLQTPFKLVQAPEIEIGIAWRSETRSIPFSESLNKISGDIICPYPPGVPLLVPGEKIDIDRFNWINNQSLCNKDLVNFNIRII

SEQ ID NO: 11457 - protein, 363 aa, Prochlorococcus marinus str. MIT 9215
MQSISPEIIFRGNYAWEKSLPLISKLTKNPLILGRSIHTNNLRNKIFIDLKNQNLSVNSAELQFDCCYEDILRVKNIILNNNNDSVLATGGGKVLDSGKLIAESLNIPCITVPLSASTCAGWTALSNIYTKDGQFIKDVALGSCPKMLVYDHKFIQTAPSRTLASGIADALAKWYESSITSSTIEDGLVQQAIQISRVLRDQLLIDGEKAFKGQYENNPSWRNIIEACGLTAGLVGGIGGEKCRTAAAHAFHNAITQIITPNKFLHGEIVGVGLLLQLRLEEMKNNNKLANQSIKQLFLLMQKLNLPTTISQLGINVFENNNLEKIADFTCRDKSEIHFLPFEIHKRDIIKVITNFEQQIIKT

SEQ ID NO: 11458 - protein, 593 aa, Prochlorococcus marinus str. MIT 9215
MALKKDSNSLGSQHEKSQNKDSSLLEFKNLDNKKEIESQLLEVSKGDDNENGFLDFGFNQSILNSLINKGYKNPTPIQKAAIPELMLGRDLLGQAQTGTGKTAAFALPLIEKLTNNKELNAKVLVMTPTRELATQVAESFKSYSSESSNFKTVAIYGGTDYRNQISALKRKVDVVVGTPGRIMDHIRQGTFKIKHINCLVLDEADEMLNMGFLEDIEWIIDQLPENKQMVLFSATMPSEIRNIAKKYLNDPAEILIKSVKKETQLISQKFLYVQRHHKLDALKRILELNNEGVIIFVRTKLLTTSIAEALENSGHTVAVLNGDIPQNQRENTVDRLKKGFINILVATDVAARGLDVERIKLVVNYDFPFDKETYTHRIGRTGRAGRSGEAILFVNQREKHFLRNLENSTRTKIEEINIPSNKIINEKRMEKLIDNVNESSLAKDENEENKALIIDVLDNLKEKYSMDDSNIAMAAINLVIGNKSFFVNDDDSWINKQNNTDRNRSNRNSNNRMRNSNRRNNYQNDSFETYKFNFGKFDGVRVANIISSICNSTNINGRSIGKIQIFNDYSLVDLPRDLHRETKNKLKKIKVRN

SEQ ID NO: 11459 - protein, 107 aa, Prochlorococcus marinus str. MIT 9215
MDNLTKDKIQKLIDSNPLMVFMKGTKLMPQCGFSNNVVQILNSLGVEFGTFDVLSDFAIREGIKEYSDWPTIPQVYLKGEFLGGSDILIEMYNAGSLKEKIEIELAS

SEQ ID NO: 11460 - protein, 376 aa, Prochlorococcus marinus str. MIT 9215
MTKILIPSEKSSGERRVSATPEAVKKLKDLGCDVYIESSAGKLSGFNDLSYVESGGKIINDLDQKIWSEADIVFCVQTPSEDHLTKLKKGAILLGLLNPYGNKELLRIINSNKVSALSLELLPRISRAQSSDVLSSQANIAGYKAVLLAASELDRYFPMLMTAAGTVQPAKVVVLGGGVAGLQAVATAKRLGAIVFVSDIRPAVKEQVESLGARFIELPEVDEKPAEAGGYAKAVTPEFLSKQKATLTKYLSEADVAICTAQVLGKKAPVLIDAPMIEKMRSGAVIIDLAVSQGGNCEGTKSNETIIKDGVKLIGAGELPSSVPYDASSLYAKNLTSLITPFIKDGLIKLDKEDELISGCLLSDEGVILQNKVFEN

SEQ ID NO: 11461 - protein, 380 aa, Prochlorococcus marinus str. MIT 9215
MIGFISEKLLIPILDFFYGLVPSYGLAIVALTVVIRIALFPLSAGSIRSARRMKIAQPVMQKKQAEIKSKFSGDPKRQQEELGKLMNEFGSPLAGCLPLIVQMPVLFALFATLRGSPFADVPYNINLKVVPQDQIATIDPKPYKSPRHSIFITEKSHFPVIATIPNGTKLGTEDSVKINLQTTNGNSYSEVLSKYDNGSKFLPTWKVSKGSENLKISQDGTVTAIKPGDATIEAKIPGLAAKSGFLFIKALGQVGFYVDGAINWDIAALVGAFGLTLLLSQVLSSQGMPANPQQSTANKITPIMITGMFLFFPLPAGVLLYMVVANIFQAFQTFLLNKEALPENLQKILDQQLLAKNEVITTSASTISDKRLPFEPNSKK

SEQ ID NO: 11462 - protein, 174 aa, Prochlorococcus marinus str. MIT 9215
MQIKALFLDRDGVINSDYDHVFKKEDIKFLEGIFDLVREAKKKGYIVIIVTNQAGIAKKIFSEEEFINLMKWMVKQFLKRNAIIDDYFYCPYHPEFQEIKYKNYKYDRKPYPGMLLKAKYKYNIDMKKSIFIGDKLTDMIAGEKANIGKLIYFNKNKAREYITIDNHYEIKKLI

SEQ ID NO: 11463 - protein, 626 aa, Prochlorococcus marinus str. MIT 9215
MCGFFGIYNKSNDSDSSFVDKFFKSEISQLLIHRGPDGCHWYEDNNIKLASVRLKITGRRNDSDMPYHSNSGQNIIGFNGEIYNFRKLANKFSYEIKTDCDTEVVTELIEKFGHNVCNQFEGIFAIANYNKNEKKLSLLRDPIGVKPIYYFQNKDFLIFSSEIKPILLTCKKLGISIVPSYRASIEYISLSKYDHSELTFFEGIYKVQPGMIISQLGNSTFKSIYYDYSYEENKDTYEEVSREFLFKLTESMKLQTQTDLPINVAISGGSDSRIMLSTLAKCGTISNVENSWSYSYQDHLDDDLANINKITSFYNLKHNIVTLQKNDFLNDFDEILLALEQPFPGLPTIAKYNMYKKASIKSNRIFLEGQGGDEIGGAYRYTLGAFVKYSLNEDIDFDFNQFVEQYSLINNLNKNQIYKLIINSQSKLFGLNSSADGTSIINEKFRMSMENIQKKDSFKSDYFFNAKSTNEFQKVLDDDLFMNKLQRVLRSCDMCSMLFSKELRVPILAPSLVKFARSINPKHKVHNGLHRGFFLNALKMVENPKIHSSSKVKKHVVDPQREWLFKDLKEFVLSTIDENKLSENLGLEKKQIKLLINDFYNQESTPNNSVLIWQFLCLSKWYELFF

SEQ ID NO: 11464 - protein, 669 aa, Prochlorococcus marinus str. MIT 9215
MCGITGFVSNKIRNKEECIVRMISSLKHRGPDEYGAFISNNCCLSNARLSINGLQNGVQPFSDNSNKIICVFNGEIFNFKELNEKYQAKKLLNKQFRNLEGDSIISSYMKRDFDFLKELKGQFAISILDLNKNKLILARDRFGIRPMFYSLNENGFFFGSEIKSIVSSSYVEFNLNDEILPEILTYWAPLGRNTSFKNIFSLLPGELLIFDLETKLINKTKYWDAAEFIQRNSKEKIDITPSELRNQFDLSVKRQSISDVSIGAYLSGGIDSSALCYAAKKNNNELKTFSIDFQNSSYSEGSAQNKVIKNLELDNITLKLDDNEIAKNLEKAIYHIEQPIFRTAPVPLMLLSKVVNENGIKVVFTGEGSDELFLGYDIFREIKIKKRIQKNPNSLLNQLMLGSLYAYMPQYQNPRFRKIIYDSYLNENLNKDFFGLDRRWKSNQNLLRYLANPFKKGDSYSIMEDDTFDWQIFNELDDIEKSQYLELRILLSSYLLSSQGDRMSMANSVEGRYPFIDDDFAKLVLSIPKEQRLNGLKDKFILRKSFENLIPPEIVNRKKVAYQSPDIGVIQSCFTNKNNKELYEHLISDENLDRVGVFNKTLVDTIRKKIIYSNFSNKRASNQDCIISTLIITTLLFENNFKNLHKDETTLDYDINAFFKKIIFSNDYL

SEQ ID NO: 11465 - protein, 303 aa, Prochlorococcus marinus str. MIT 9215
MANYRSGFVTLLGRPNVGKSTLINKLIGEKITITSPVAQTTRNKLKGILTTENGQIIFVDTPGVHKPHHRLGEILVKNAKSAINGVDMVIFVIDSSEAPGKGDEYILNFLIDNKIKFIVVLNKWDLVNKEFRNLRLDQYRRFFGMNRNFQSVSASQGQGCSELVDMVLNFLPEGPKLYGEETICDQPLDNLLSDLVREQVLKNTREEVPHSVAVKIEKREEMKRKNGKVFTAILATIIVERSTQKIILIGKKGSMLKMIGQSARSNMSKLIDGPVHLELFVKVVPNWRKKESRLIEFGYEEDF

SEQ ID NO: 11466 - protein, 147 aa, Prochlorococcus marinus str. MIT 9215
MTNSKKSSNNSLKNHELYAIAETSGQQFWFEVNRYYDIDRLKAKEKDKITLDKVLLLKDKDSITVGKPYVKDAKIELEVVSHKRDKKILVYKMRPKKKTRRKMGHRQELTRVMVKSIKVGKPTPKSSSKKEETVKKETKPKSEKSTN

SEQ ID NO: 11467 - protein, 528 aa, Prochlorococcus marinus str. MIT 9215
MTKVLITDPIDQTGIDILSQVAQVDQKIGISESELASIIGDYDALMIRSGTQVTEEIINSSSKLRIIGRAGVGVDNVDVKAATQKGVLVVNSPGGNTIAAAEHTIAMMLALSRHIPVANNSTLLGKWERKKFVGNELYNKKLGVVGLGKIGAHVAKVANALGMEVYGYDPFVSNERAQQIQVKLSELSDLFQQSDYVTLHLPRTPETENLVNMDVLKSMKSSAKLINCARGGLIDEGALAEALNKSLIGGAAIDVFSKEPLESNSPLLEVEKNLILTPHLGASTREAQENVAVDVAEQIRDVLLGLSARTAVNIPGLSPDIMDSLKPHLQLAETMGLLISQLSGGQIQKLEVKLQGEFVQHPSQPLIIASLKGLLSKALGDRINYVNASLEADSRGITVVESKDEARPEFASGSLQLTTYGDNGDHSVAGSIFADGELKIMSIDQYPVNVSPSRYMLVTRHRDMPGIIGKLGSLLGSNNVNIASMQVGRKIVRGEAVMVLSIDDPIPNKLLDTIIEVEGITNANPVTL

SEQ ID NO: 11468 - protein, 1524 aa, Prochlorococcus marinus str. MIT 9215
MGESIKRIVGPYQDSYSPNGIIGEKDACGVGFIANVNGIESNWILKQSLKGLNCMEHRGGCGGDSDSGDGAGILCSIPWNYLEKDVHFKNKKEYEKGLGMVFMPHEKEKIEECKSICQEEAEKLSINKTFWRKVPVNNEILGPLAKANAPFICQWILYIDKKDHPDIERLLFQLRKRIEKKIIETFKNHVGDCEFYFASLSSQTVVYKGMVRSEVLSEFYQDLKEESFKVSFSVYHRRFSTNTLPKWPLAQPMRFLGHNGEINTLLGNINWAKASETHIDNFWGELSNEIKPIVDVNKSDSSNLDATLEINIRSGQPITDSLLKLVPEAFRDQPEIELRANIKAFYEYSASLQEAWDGPALLVFTDGNFIGATLDRNGLRPARYSITNDGFVIMGSETGVVDLVEEKIIEKGRLGPGQMLAVDFNQNRILRNWEVKSEAAQRHDYQNLLINRTIKIENNEWIKDCELKDLELLQQQTAYGFSAEDNDLILDSMASLAKEPTYCMGDDIPLAVLSSKPHILYDYFKQRFAQVTNPPIDPLREKLVMSLEMHLGERCSPFKVKDAKSFIHLKSPILNEKELFSIKKSEIKSQTISTLFEINDGIKGFEGKLHDICEQSEKAVNNGCSLIIISDKGISSTKSFIPPLLAVGAIHHYLLKKEIRLKASLIIETGQCWSTHHLACLIGYGVSAVCPWLIFESGRHWLKHPKTQKLIESKKIDSLSTDQVQTNIKKALEDGLRKILSKIGISLLSSYHGAQIFEAVGLGSDLINLGFDGTTSRIAGITLKELANESISIHTKAYPEIDLKKLEFLGFVQFRNYGEYHSNNPEMSKALHSAVKQGPGYDHFKLYKELISKRPITALRDLLSIDSNRESIPINEVESVESICKRFCTGGMSLGALSREAHEVLAVAMNRIGGKSNSGEGGEDPARFNVLNNIDENTQSATLPFIKGLKNGDTACSAIKQIASGRFGVTPEYLRSGKQLEIKMAQGAKPGEGGQLPGPKVDSYIAKLRNSKPGVALISPPPHHDIYSIEDLAQLIHDLHQVHPKAKVSVKLVSEIGIGTIAAGVSKANADVIQISGHDGGTGASPLSSIKHAGLPWELGLAEVHKSLLDNNLRDRVLLRTDGGLKTGWDVVIAALLGAEEYGFGSVAMIAEGCVMARVCHKNTCPVGVATQKEELRKRFKGLPDNVVNFFIYIAEEIRQILSTIGVKTMEEIIGNKEFLTTRNISLPKTENIDLTSLVNDEISYEDRSWIKHSNNAHSNGTVLEDSILTDAQFIDAVTTHGEFSKKIEIKNTDRSVCAKISGELAQHYGNKGFEGAINLIFNGHAGQSFGAFLLKGMIIQLIGEANDYVCKGMNGGILTIIPPRIDKNSSEQVILGNTCLYGATGGKLYALGKSGERFAVRNSGAVAVTEGAGDHCCEYMTGGKIVILGSTGRNIGAGMTGGIAFILDEKNDLDKKVNKEIVSIFEIKTPKQEQILLEIINEYRDKTQSPKAASILEDWINFKTLFKVIVPPSELEMLGLRNQ

SEQ ID NO: 11469 - protein, 586 aa, Prochlorococcus marinus str. MIT 9215
MALLVKKFGGTSVGDIKKIKNIARNICKSKEAGNEIVVVVSAMGQATDDLNCLAESISKNPNRRELDMLLSTGEQVTIALLSIALNEFGIPAISMTGSQVGIITESIHGKARILDIKTERIQNYINQGFVVVVAGFQGTTLSHTGSMEITTLGRGGSDTSAVALSTALGAETCEIYTDVPGVLTTDPRIVPSAKLLDEISCEEMLELASVGASVLHPRAVEIARNYGIKLCVKSSQSESSGTLLESQIQPLPLKRGSLELTKTVNSLEVLENQAVFSLSNIPDRPGIAAQIFEKLSEASINVDLIIQATNDGNNNDITFTVSDLEVKKTAEQCELITSQLGGEYNLKTKMTKLSIQGAGIMGRPSVSADLFDTLSQANINVRLIATSEIKVSCVIEINNIPKAIRFVAEKFKLSDTQIFINPINKKQNQPEVRGIALDKNQVQVSFRKLPDRPGVAASICLALAENNLLFDTIVQSERISSLKTKDISLTMNKQDREKANLVFEALTKKLPGSYIEDGPAIAKVSTVGAGMAFKVGTAGKIFRALANQNINIEMIATSEIRTSCIVLEKDCDNAVSAIHNHFELEK

SEQ ID NO: 11470 - protein, 293 aa, Prochlorococcus marinus str. MIT 9215
MTKNLFDNENAIYIGAKRNPENCSIGIFGVNYDGTCSFKPGARFGPEAIRQVSSCLETYCPKIKKDLEDILYVDFGSILIDKNDSKSVIESVKSATNYLISKRLSPIMLGGEHSITRGAIEALVKKYPDLILIQLDAHADLRESYIGNEHSHACTMKRCLEVLPEKKILQVGIRSGTKEEFEIMHSNHQLVNFCPGGNAHELKQALLPYAKSPIYLTIDLDWFDPSLLAGTGTPEPGGFFWNDFEEILKTLKDLRIVASDIVELSPEIDKSGVSSIVAAKVLRSLILSLENMQ

SEQ ID NO: 11471 - protein, 635 aa, Prochlorococcus marinus str. MIT 9215
MGKVVGIDLGTTNSCVAVMEGGKPTVIANAEGFRTTPSVVAYTKNQDQLVGQIAKRQAVMNPENTFYSAKRFVGRRVDEVNEESKEVSYSIEKSGSSVKLKCPILDKQFSPEEVSSQVLRKLADDAGKYLGDKVTQAVITVPAYFNDSQRQATKDAGKIAGLEVLRIVNEPTAAALAYGLDKENEKILVFDLGGGTFDVSVIEAGDGVTEVLSTSGDTHLGGDDFDRCIVDHLANTFKSNEGIDLRQDKQALQRLTEAAEKAKIELSNATQSEINLPFITATPEGPKHLDLNLTRAKFEELAASLIDRCKTPVERAISDAKISTSEIDEVVMVGGSSRIPAVLDLVKKIIGKEPNQTVNPDEVVAVGAAIQGGVLAGEVKDILLLDVTPLSLGVETLGGVMTKMINRNTTVPTKKSETYSTAVDGQTNVEIHVLQGEREMASDNKSLGTFRLDGIPSAPRGVPQIEVTFDIDANGILSVTAKDKGSGKEQSISITGASTLSDNEVEKMVKDAESNASADKEKREKIDLKNQAETLVYQTEKQLGELGDKIDAAAKSKVEEKSNALKEATSKEDYESMKKLLEELQQELYAVGSSVYQQPGNQPPSSSAAGGPDQSDSNEKGGDDVIDADFTETKD

SEQ ID NO: 11472 - protein, 404 aa, Prochlorococcus marinus str. MIT 9215
MQQVKKVVLAYSGGVDTSVCIPYLKKEYGISEVITFVADLGQGEDLELIRQKALNSGASQSIVGNLVNSFVERYAFPAIRANALYLDKYPLSTALARPLIAENLVNIAREFSADAVAHGCTGKGNDQVRFDLAINALGPDLKIITPAREWNMSREEAIIYGEKFGIPAPVSKKSPYSIDVNLLGRSIEAGILEDPMQEAPEDIFAMTSSIDNSPDSPLDIEIIFKNGFPVGINDEFLTPVEIIKKANVLAGEHGYGRIDMIEDRVVGIKSREIYETPGLLLLIKAHKELESITLNPDIVDFKGIVEKKWGQIVYQGFWFGPLKDSLDAFISSTQTSVNGRVKIRLYKGNAIVIGRMSENNSLYRDDLATYSKDDVFKHSLAEGFIYMWGMSNKIWAELNSKTTD

SEQ ID NO: 11473 - protein, 164 aa, Staphylococcus delphini
TAAVDLQASDYVAPIVLGNIDKIKALAAEKSLNIEGLNIIQPDTSDLKATLVEQFVERRKGKATEEQAQSLLNDVNYFGTMLVYAGHADGLVSGAAHSTADTVRPALQIIKTKPGVSKTSGVFFMIKEDQQFIFGDCAINPELAASDLAEIAVESAKTAQSFGM

SEQ ID NO: 11474 - protein, 164 aa, Staphylococcus delphini
TAAVDLQASDYVAPIVLGNVDKIKALAAEKSLNIEGLNIIQPDTSDLKATLVEQFVERRKGKATEEQAQSLLNDVNYFGTMLVYAGHADGLVSGAAHSTADTVRPALQIIKTKPGVSKTSGVFFMIKEDQQFIFGDCAINPELAASDLAEIAVESAKTAQSFGM

SEQ ID NO: 11475 - protein, 164 aa, Staphylococcus delphini
AAAVDLQASDYVAPIVLGNVDKIKALAAEKSLNIEGLNIIQPDTSDLKATLVEQFVERRKGKATEEQAQSLLNDVNYFGTMLVYAGHADGLVSGAAHSTADTVRPALQIIKTKPGVSKTSGVFFMIKEDQQFIFGDCAINPELAASDLAEIAVESAKTAQSFGM

SEQ ID NO: 11476 - protein, 164 aa, Staphylococcus intermedius
TAAVELQASDYVAPIVLGNIDKIKALAAEKSLNIEGLNIIQPDTSDLKAALVEQFVERRKGKATEEQAQALLDNVNYFGTMLVYAGHADGLVSGAAHSTADTVRPALQIIKTKPGVSKTSGVFFMIKEDQQFIFGDCAINPELAASDLAEIAVESAKTAQSFGM

SEQ ID NO: 11477 - protein, 164 aa, Staphylococcus schleiferi subsp. schleiferi
TAAVELQGSDYVTPIVLGDVDKINALAADKSLNIEGLKVIHPENSDLKAELVEKFVERRKGKATEEQAQSFLNDVNYFGTMLVYAGYADGLVSGAAHSTADTVRPALQIIKTKPGVSKTSGVFFMIKEDQQFIFGDCAINPELGASDLAEIAVESAKTAQSFGM

SEQ ID NO: 11478 - protein, 175 aa, Chenopodium rubrum
MPRTPRDPLVVGRVIGDVLDPFNRTVNLRVSYNNRDVNNGCEFRPSQVVNQPRVEIGGDDLRTFYTLVMVDPDAPSPSNPHLREYLHWLVTDIPGSTGASFGQELFGYESPRPSVGIHRFIFVLFRQLGRQTVYPPGWRQQFNTRDFAEIYNLGLPVASVYFNCQREGGSGGRRL

SEQ ID NO: 11479 - protein, 495 aa, Mycoplasma capricolum
IHHNALVSAAKLSSRYITDRYLPDKAIDLVDEACASIKTELASIPIELDQVNRKVMQLEIETSALEKEKDDKSKERWQEAKKELDSLKIEQATLNKKWEKEKEELSKINLVKSSIENLKQELETAQNDGNYKRAGEIKYSLLPSLEKSLALFETQTGAKMISEEVTEQEIAKVVSKSTGILVDKLISSEKERLLNLEDLLKKYVKGQDQAIKAVTSAIMRSRSGIKNPDKPIGSFLFFGPTGVGKTEVARSLADILFNSPKKMIRLDMSEYMEKHSVAKLIGAPPGYVGYEEGGRLTEAVRRNPYSIILFDEIEKAHSDVFNILLQILDDGRLTDSLGKTIDFKNTIIVMTSNIASQYLLTSDDFVQIDDQKIQAELNQTFRPEFLNRIDNIVYFNALSVQTIGEIVDKLLDELITRLQDEQNYFINFSEEARNKIINEGYDRLFGARLLKDILKKIIETLIAHYIISGLISESTRYLIDVKNNQFILEEFKQFN

SEQ ID NO: 11480 - protein, 435 aa, Dendrobium crumenatum
MSKEFGIEAPLSKIAVSKAHGEDSPYFAGWKAYEENPYDAVDNPNGVIQMGLAENQLSFDLLEEYLEQHPEASSWGSGMSSFRENALFQDYHGLQTFRKAMASFMEKIRGGRSKFDPDRIVLTAGATAANELLTFILADPGDALLVPTPYYPGFLRDLQWRTGVTIFPVHCHSSNGFQLTLASLESAYADAKASNFNVKGLLITNPCNPLGTVASLSLLQDIILFISDKNIHLISDEIYFGCVFSSTNLFSISDLITNAVSYQIHIVYSLSKDLGLPGFRVGALFSYNDRVVKTARRMSSFSLVSSQTQKLLAFMLSDEEFTVNYIKKNRERLRERYELVVGGLKEAGIECLKGEAGLFCWVNMEELMEDKTEEGELRLWKVMVDELKLNISPGSSCCCSEPGWFRVCFANTSRETLEVALRRLKDFARKKTKNI

SEQ ID NO: 11481 - protein, 402 aa, Salmonella enterica subsp. enterica serovar Typhimurium
MSYKIMAINAGSSSLKFQLLEMPQRDMLCQGLIERIGMADAQVTIKTHSQKWQETVPVARSSRCVNWLLEKLLGYQIINSLRDIDGVGHRVRHGGEFFKDSTLVTDETLAQIERLAELAPLHNPVNALGIHVFRQLLPDAPSVAVFDTAFHQTLDEPAYIYPLPWHYYAELGIRRYGFHGTSHKYVSGVLAEKLGVPLSALRVICCHLGNGTSICAIKNGRSVNTSMGFTPQSGVMMGTRSGDIDPHSAVDSPARNENAEQLNQLLNNESGLLGVSGVSSDYRDVEQAANTGNRQAKLRSHSVCRTHSATIGSYIMQMGGLDALVFTGGIGENSARARSACAIISIFGLSVDEEKNQRNATFIQTENALVKVAVINTNEELMIAQDVMRIALPATEGLCVPA

SEQ ID NO: 11482 - protein, 177 aa, Hordeum vulgare subsp. vulgare
MAGRDRDPLVVGRVVGDVLDPFVRTTNLRVTFGNRAVSNGCELKPSMVAQQPRVEVGGNEMRTFYTLVMVDPDAPSPSDPNLREYLHWLVTDIPGTTGASFGQEVMCYESPRPTMGIHRFVLVLFQQLGRQTVYAPGWRQNFNTRDFAELYNLGQPIAAVYFNCQREAGSGGRRMYN

SEQ ID NO: 11483 - protein, 219 aa, Carica papaya
MGRGKIEIKRIENTTNRQVTFCKRRNGLLKKAYELSVLCDAEVALIVFSSRGRLYEYSNNNIRSTIDRYKKACSDSSATTSVTEINAQYYQQESAKLRQQIQMLQNSNRHLMGDSLSALSVKELKQLENRLERGITRIRSKKHEMLLAEIEYLQKREIELENESVCLRTKIAEVERSLQVNMVTGPELNAIQALASRNFFIENETTYSHGPDKKILHLG

SEQ ID NO: 11484 - protein, 469 aa, Bacillus pumilus SAFR-032
MKTPLYTALAQHAEKKPYSFHVPGHHNGDVFFDEARSHYASILQLDVTELEGLDDLHHPTGVIQEAEHLLTKLYDSDQSFFLVNGTTVGNLAMVMTACRTGDEIFVQRNCHKSVFHAIELAGATPILIDAEIDPHLHVPTHVAEDTVRKAIAKHPHCRAIILTYPNYYGHAADLLKLIHMCHEAGMIVLVDEAHGAHFVLGGGFPPSALSYGADVVVQSAHKTLPAMTMGSYLHLQGDRIDAKRLKILLTMLQSSSPSYPIMASLDVARAYVEEIKEKGTLDVIMKELTELKDQFNRLTHLEVVEPESLHSDPLKCVIRSTKGLTGYELKQVLESVDVHPELADEHQVLLVLSLEQRKDVPFKQIDQALKQSDSLLKGKKYIRNETVSLETDILNQDIEAVPFEQATGRVSAESIIPYPPGIPLMIKGERIEKEQIEALSRLLGHEVHIQASQVIHQRKLYVYIEEETL

SEQ ID NO: 11485 - protein, 317 aa, Bacillus pumilus SAFR-032
MSNRYADANLKIFSLNSNPELAKEIADRIGVDVGKSSVKRFSDGEVQINIEESIRGCDCYVIQSTSAPVNEHIMELLIMVDALKRASAKTVNIVIPYYGYARQDRKAKPREPITAKLFANLLETAGATRVIALDLHAPQIQGFFDIPIDNLMAVPILTNYFEQKNLNDIVVVSPDHGGVTRARKMADRLKAPIAIIDKRRPKPNVAEVMNIIGNIEGKTAILIDDIIDTAGTITLAANALVENGAAEVYACCTHPVLSGPAVERITNSKIKELVVTNSIHLTDDKKVGKFIPLSVGPLLAEAIIRVHEEESVSYLFS

SEQ ID NO: 11486 - protein, 811 aa, Bacillus pumilus SAFR-032
MMFGRFTERAQKVLALAQEEAIRLGHKNIGTEHILLGLVREGEGIAAKALEALGLVSDKIQKEVESLIGRGQEVSQAIPHYTPRAKKVTELSMDEARKLGHSYVGTEHILLGLIREGEGVAARVLNNLGVSLNKARQQVLQLLGSNETGASAAGSNSNANTPTLDSLARDLTAIAKEDSLDPVIGRSKEIQRVIEVLSRRTKNNPVLIGEPGVGKTAIAEGLAQQIIHNEVPEILRDKRVMTLDMGTVVAGTKYRGEFEDRLKKVMDEIRQAGNIILFIDELHTLIGAGGAEGAIDASNILKPSLARGELQCIGATTLDEYRKYIEKDAALERRFQPIQVDQPSVDESIQILRGLRDRYEAHHRVSITDEAIEAAVKLSDRYISDRFLPDKAIDLIDEAGSKVRLRSFTTPPNLKELEQKLDEVRKEKDAAVQSQEFEKAASLRDTEQRLREKVEVTKKSWKEKQGQENSEVSVDDIAMVVSSWTGVPVSKIAQTETDKLLNMEQLLHSRVIGQDEAVVAVAKAVRRARAGLKDPKRPIGSFIFLGPTGVGKTELARALAESIFGDEEAMIRIDMSEYMEKHSTSRLVGSPPGYVGYEEGGQLTEKVRRKPYSVVLLDEIEKAHPDVFNILLQVLEDGRLTDSKGRTVDFRNTILIMTSNVGASELKRNKYVGFNVQDEGQNYKDMKGKVMGELKRAFRPEFINRIDEIIVFHSLEKKHLKEIVSLMSDQLTKRLKEQDLSIELTEAAKAKIADEGVDLEYGARPLRRAIQKHVEDRLSEELLKGNIEKGQQIVLDVEDGEIVVKTTAATN

SEQ ID NO: 11487 - protein, 303 aa, Bacillus pumilus SAFR-032
MGEQKKVTLVGVPMDLGQMRRGVDMGPSAIRCAGVKEKLESLSFGVEDLGDIPVEQRDDEKGLYTSEKLKNLTENAGANQLLAEKVDSIVQSGSFPLILGGDHSIAIGTLAGVSKHYENLGVIWYDAHGDLNTEETSPSGNIHGMPLAVSLGLGHADLTNIGGYSPKLKPENVVLIGARSLDEGERALIREKGIKVYTMHEIDRLGMTRVMEEAISYLKERTDGVHLSLDLDGLDPAECPGVGTPVAGGISYRESHLAMELLEEAGILTSAEFVEVNPVLDEKNKTAEAAVALIGSLMGEKLL

SEQ ID NO: 11488 - protein, 361 aa, Bacillus pumilus SAFR-032
MIQPEDIVRSGPNQFISQKGIYHELDSLISSSFQSPAVVTGYDSFHAFSQYTKLPSHWPVVQHKGYSSPNAITRIAEELQEADVIIGIGGGTILDTAKSVAEALQIEVIMVPTIPGTCAASTPLSVIYDDKGNFMRVDYHKRSSYLTLIDHTFLLSSPLSYLQSGIGDTLAKWYEAEAIIRNAKDSLPLMVHAALKQAVYVRDILVSHSEEAVHSLQTGQLSQAFADVTDTIITLAGTVGGYGGRYGRMAGAHAIHNGLTFIEETHHVLHGQKVAYGILVQLAAENRMSEVEELLELYETLGLPRNMRELGITAQLEEAAKTVANHAARADETFCLIGDYSKEQIVDAIQVIENVSASKNR

SEQ ID NO: 11489 - protein, 460 aa, Bacillus pumilus SAFR-032
MRHILRKKHIHDLLEQSRQQKVKKTLGGLDLTLLGIGAVIGTGVMVLTGITAAKDAGPAVIFSFAIAAIVCSLAALCYAEMASALPVFGSAYIYSYTTMGELIGHLMGWTLLSVYMLTASAVASGWSSYFNSLLEGFGISIPHQFLAGPEQGGYMNLPAIIIALLIAWILSRGTKESKKFNNIMVFVKLGIIVLFIVVGGFYVQPANWQPFMPFGAEGVIAGAAAVFFAFLGFDAISASAEEVKNPQRNLPIGIIGSLLICTIIYIVVCLIMTGMVHYTKLNVTEAMSYVLQSVHQNSVAGIISVGAVIGLMAVIFANNYAATRIAYAMGRDGLLPKVFSKTNKSDTPVASIWMIGGMTAVISGFIDLKDLSNLANIGALLTFAMVSLSVLILRKTHQQLERGFRVPFVPVLPIISMGCCLFLMLNLPGRTWLYFGVWLLIGVVMYAAYSNKHSELAKSS

SEQ ID NO: 11490 - protein, 458 aa, Bacillus pumilus SAFR-032
MKVVKFGGSSLASGKQLQKVFDIVTADPARKAVVVSAPGKRHSTDTKVTDLLISCGEQYLRLGEAHDLQEAVIERYASIADELGLSHDVIDTIRQDLDSLLQADTSHPERYLDAIKASGEDNNAKLIAAYFRYQGVEAHYVNPKEAGLFVSDEPGQAQVLPESYDHLYKLRERSGIIIFPGFFGFSLSGDIVTFSRSGSDITGSILANGLKADVYENFTDVDAVYAVNPTIVHEPKEITELTYREMRELSYAGFSVFHDEALIPAFRAGIPVQIKNTNNPSAKGTKIVNQRDHTNGPVVGIASDSGFCSIYISKYLMNREVGFGRKVLQTLEEYGLTYEHVPSGIDDMNIILRQDQLEEQHIEQELLDRLKLVLDADEVVLEPNLSLIMIVGEAMRHNVGTTARAAKALSKAKVNIEMINQGSSEVSMMFGVKAAQEKEAVQALYEEFFSMSTVPVSL

SEQ ID NO: 11491 - protein, 67 aa, Bacillus pumilus SAFR-032
MEQGTVKWFNAEKGFGFIEREEGDDVFVHFSAIQGDGFKSLDEGQKVSFDVEQGSRGAQAANVQKIA

SEQ ID NO: 11492 - protein, 526 aa, Bacillus pumilus SAFR-032
MTTPFIVIVALLVIFFIIPIILFIWIWMRDEKQEEHSVLRNYPVIGKLRFIFEKIGPELRQYLFLNDREELPFSRREYEQAVMSGKYKSRTMGFGSKRDFDKPGYYIRNVLFPKQRDELRIDQSEKIQTKVYQIDQDNLLRRSEHTKEVEAKPYYLHQDDVQVIGEHTCQKPFRVKGLIGQSAMSYGSLGDRAITALSSGLKMAGGTWMNTGEGGLSPYHLKGGADIICQIGPGLFGVRTEDGAFSFEEFKKKSEHEEVKAFELKLAQGAKTRGGHIDGEKVTEEIANIRKLPPHQSIDSPNRFEMFHSIPDMFDFIEQLRSIGGKPVGIKLVVGHKENIEELAAYMKKSGKHPDFITVDGGEGGTGASFHELADSAGLPIFTALPMVHQILKEYGVRDQVKLFASGKLLSPDKIAIALSMGADFVNIARGLMFSVGCIRAQVCHTNKCPVGVATTDPKLQKGLSIEEKKYRVCNYILSLREGLFNLSAAAGIESPIHFNEKHIVYRQENGQTSEVPIFSGTQPSV

SEQ ID NO: 11493 - protein, 493 aa, Bacillus pumilus SAFR-032
MSIEIGISLSIYFIGMLAIGWYAFRKTNDLNDYMLGGRGLGPYVTALSAGASDMSGWMLMGLPGAMYTTGLSSGWLAVGLISGAYLNYLFLAPRLRSYTEVADDAITIPDFFDKRFKDSSTLLKAVSAVIIMIFFTLYTSSGMVSGGRLFESAFGANYMFGLILTSSIVILYTLFGGFLAVSLTDFVQGAIMFLALVLVPIVAFTQLGGPIATYQDIQQIDPKLLDIFRGTSVIGIISFLAWGLGYFGQPHIIVRFMAITTVKDLKPARRIGMSWMIVSVIGSLSVGLVGVAYVHETSTTLADPETIFIVFSKVLFHPYITGFLLSAILAAIMSSISSQLLVTASAMTEDLYRTFFRRKASDKELVMIGRMSVLVVAIIALCLSLNPSDTILDLVGYAWAGFGSSFGPVILLCLYWKRMNHHGALAGMVVGAVVVLTWISTGLNNTTGLYEMVPGFILSGLTAIIVSLLTNKPSKASKKLFTKMENHLEEETK

SEQ ID NO: 11494 - protein, 463 aa, Bacillus pumilus SAFR-032
MSSLFRKKSLDQLMLESQTKRLSRSLNTFDLILLGIGCVVGTGIFVITGVAAAKDAGPAIIISFILAAIACALAAFCYAEFSSSIPVSGSVYTYSYATLGEFLAFLMGWDLMLEYVIALSAVASGWSSYFQSLLSGFGVHIPKALSAAPGAADGAVFNLPGALIILLITFIVSRGVKESTKLNNIIVLIKIAIVLLFIISGFAYVKPENWTPFMPMGFHGVIAGAATVFFAYLGFDAIANASEEVKNPQKAMPIGIIGALGVCTILYIGVSFVLTGMVHYTKLNVSDPVAFALQVVGLNSVAGIISAGAIIGITTVLIALVYAQVRLTFAMSRDGLMPKIFSNVNPKSQTPVANTWLTGAVAACIVGFVNLSTLANLVSIGTLAAFTVISIAVIVLRKKHPNVKAAFKVPFVPVLPIISAVICITLATTLSWETWRAFLIWVAIGVVVYFAYARRKSHLNETH

SEQ ID NO: 11495 - protein, 377 aa, Bacillus pumilus SAFR-032
MKSQNVIIIGSGVAGLATALFLKKAGMESTIYESRSDEELETGAGFLLSPNGVKILDGIGCKNEVIANATVIKKIQQINSENEVEAIFYNYSEKYYDAPLLNVMRDQIIQSLLKEVHRQGIEVKYNKKLTSIKQQPHSVQVLFEDETVITGDIVIGADGTFSKTREAIAFNAKLDYSGFWGLQGVSFVKDFVLDEATSYFYNDGNFQFIFGKAHPTNKMNILWQAFSQCPEKLPTKHFEKANKETILQLLYKQMEGWNIPKHLFAIIDHTEMFFPRSIYEIKNLSVWSKGRVVLVGDAVHTANPFVGQGASYSLEDAMLIAKMLRDHDYRDAFYYYEKDRRKRTEELNALFQHMSIQNDIDKKMNEYTIEWDEETYV

SEQ ID NO: 11496 - protein, 580 aa, Bacillus pumilus SAFR-032
MGVIKRYMAFVTPYKKQIALTMVIGMIKFSIPLTLPLLLKYVIDDVIQGSGSADEKTSSLLMIMGIMLVLFLVMRPPVEYYRQYYAQWTGSKVLFDIREKLFSHIQKLSLRYYANTRTGEIISRVINDVEQTKEFVITGLMNIWLDLMTVLIVIAIMCTLDIKLTIVSVIIFPLYAFAVKFFYGRLRKLTKERSQALAEVQGHLHERVQGMPVIRSFAIEEYEQENFHDENKNFLNKAINHTNWNAKTFAVVNTITDIAPLLIIAFAGYTVINGSLSIGTMIAFVGYIDRMYNPIRRLINSSTTLTQSVASMDRIFEFIDEPYEVTDRPNAKEADHLKGEVEFKHVSFRYEHTQEEILRNISLKVEKGQTVALVGMSGGGKSTLVSLIPRFYDVTNGSLEIDGIDIKEYKARSLRNQVGMVLQDTFLFSDTIKENIAVGDPEASFEKIVSAAKAANAHDFIMSLPEGYDTKVGERGVKLSGGQKQRISIARVFLKNPPLLILDEATSALDLESEHYIQEAMQKLAKDRTTFIVAHRLSTITHADLIVVMEQGEIVEKGTHEELMNRDSHYRHLFTIQTLN

SEQ ID NO: 11497 - protein, 79 aa, Bacillus pumilus SAFR-032
MNLSVKIALGGNFMLEGKVKWFNSEKGFGFIEVEGQDDVFVHFSAIQGEGFKTLEEGQAVSFEIVEGNRGPQAANVNKA

SEQ ID NO: 11498 - protein, 399 aa, Bacillus pumilus SAFR-032
MLSKDQMNAIKQSAPLLKAEGTKLVTVFYQNMIRQHPELLNQFNKTNLMNGSQPEALAATLYQAALHIDRLEELLPVVKQIAHKHVSVMVKKEQYPIVGYHLIEGMKEVFGLTEKDDTLLAWKAAYDIIANIFITIEAEMMEENVKQIGGWSDVKPFVIKKKVQESPALISFYLVPEDESELPMFEAGQYITVQADMPGEAYMCSRQYSLSDQHHPSYYRITVKRDGHVSTFLHDEMEEGDVLQVSMPQGMFCLQEDTKEPVYFISAGSGVTPMIGLLKTAAQNSHPFTMIHADRLEDVTAFEHEFESVLSSAPHGRILLCNEQFAQSGKGELVEKAASRIDRSFLQSVVGEGKGQFYLCGSPVFTEEMIHILKELGIPEQNIHFESFGGQSTKEMEVV

SEQ ID NO: 11499 - protein, 615 aa, Bacillus pumilus SAFR-032
MMMCGITGWADFKKQLIQQDHVINQMTDTLSKRGPDDTNTWKSEHVLFGHKRLAVVDVEGGKQPMTYTHQNHAYTVVYNGELYNTEDIRKELLKRGHRFLGHSDTEVLLHAYTEWKEECVTHFNGIFAFVIWDSERELLFAGRDRLGVKPFFYTERHHSFLFGSEIKALLAHPDMKAKVDHEGLSEIFGLGPSRTPGQGVFKGVKELRPAHALTFSKDGLRVWRYWNVKSRVHTDSLDDTAQNVKDLFTDAVTRQLVSDVPVCTFLSGGVDSSAITAIAAKHFEKIGKAPLHTYSVDYEGNDQFFEASHFQPNADGPWIDRMTKAFQTNHHNCIIGQKELAAYLKEAVEVRDLPGMADIDSSLLWFCREIKKDFVVGLSGECADEIFGGYPWFHSASETNGFPWMRSTEARTQLLQDSWQKKLSLKEYAQSKYEETVAETPLLDGETGVDKARRELFYLNMVWFMTTLLDRKDRMSMGASLEVRVPFADHRLVEYVWNIPWEMKMYGNREKGVLRKALEGILPDEVLYRKKSPYPKTHHPAYTHAVKEMLTDCLAQKDSVLHEFLDPNQLKQLIETEGASFQVPWYGQLMKGPQLIAHLAQIHHWFETYRIDIEA

SEQ ID NO: 11500 - protein, 481 aa, Bacillus pumilus SAFR-032
MKRKWLWIVLLMGYTAAFFASITIREEQVHKSKDLEAFTDVSHLMPVKIKKVVQGKEIDTLKEVLKEAKAKKLPISIAGKQHSMGGHTYYENGIVLDMTEFRQILAFDEKKKTIRVQSGVTWDDIQTYVNPYGLAVKVMQSQNIFTIGGSLSANAHGRDIRYGSLIDTVRSFRLLKADGEIVTVKPGDDLFTAVIGGYGLFGVILDVELSLTKDELYKMETTSLDYDEYTDYFQKHVKQNKEVRMHLARISTAKTNFLKEMYVTNYSLNSQQEIESYQELKEDQLVMPLKFMLGLSRRFDMGKDLLWNLQKKYFQSQNDQLITRNNVMRSDSAFLEYENESDTDVLQEYFVPVDRFRAYIDDMRSYLQQEELNLMNITIRYVQKNEKADLSYAKEDMFALVLLVNYGFEKEETAEAERIIRQMTDITLRHHGSYYLPYMPYQTKAQMKRAYPKTDVFFQKKKQADPEGRFINYFYERYNTQ

SEQ ID NO: 11501 - protein, 441 aa, Bacillus pumilus SAFR-032
MNKEQPALKQDIGLFFALSLVIGTIIGSGVFMKPGNVLSYSGSSDIALFAWLLGGILTLAGGLTVAEIGTQIPRTGGLYAYLEEVYGEFWGYLCGWVQIIIYGPAIIGALGLYFGSLLANLFSLSSLWSTTIGIITVLFLCLINIMGTKYGGFVQGLTTIGKLVPIAAIIVFGLWKGNENILMAVNDSIAQMNFGAAILATLFAYDGWILLAALGGEMKNPEKLLPRAMAGGILIVTACYLFINVALLHVLPADQIVQLGENATSTAATMLFGPIGGKVISIGIIISIFGCLNGKVLSFPRVIFAMAERKQIPFANAISRIHPTFKTPWIAVFVQILIAIVFMIVSNPEKLSEVSIFMIYIFYVMAFFAVFKLRKQNKGIERAYSVPLYPLTPIVAIIGSLFVLISTMITDWKSCLISMLIGIAGLPLYYYMKRAHKKAER

SEQ ID NO: 11502 - protein, 700 aa, Bacillus pumilus SAFR-032
MRCQHCQVNEATIRLNMQVNSSRSQMVLCEDCYTSLMEQSKMKMGPQLFGGSSFFSEQAGHTQNVEQPKHKGLLDELGRNLTDGANAGLIDPVIGRDEEVARVIEILNRRNKNNPVLIGEPGVGKTAIAEGLALKIASGDVPNKLKNKQIYLLDVSSLVANTGIRGQFEERMKQLIKELQSRKNIILFVDEIHLLVGAGSAEGSMDAGNILKPALARGELQLVGATTLKEYRQIEKDAALERRFQPVIVDEPTQAEAIEILKGIQDKYESYHGITYSDEAIQACVQLSSRYIQDRHLPDKAIDLMDEAGSKANLSIDAASEDELTNRLSEIAAEKQAALKEEQYEKAAKLRDEEEAIEARLQNKTNHKEHVVTAEDIQAIVEQKTGIPVGKLQADEQTKMKEIDVRLKARVIGQEHAVEKVAKAVKRSRAGLKSKHRPTGSFLFVGPTGVGKTELSKTLAEELFGSREAIIRLDMSEYMEKHSVSKLIGSPPGYVGHDEAGQLTEKVRRKPYSIILLDEIEKAHPDVQHMFLQIMEDGRLTDSQGRTVSFKDTVIIMTSNAGSTDKTVKVGFQSDQEEAIEEQSLIDSLSAYFKPEFLNRFDSIIQFDSLDRDDLVKIVDLLLNELSAQLKEQNLTVHVTKEAKEKIAELGYHPAFGARPLRRTIQEHVEDQMTEILLEEDKLLGFTVDVEDNEIVVKKG

SEQ ID NO: 11503 - protein, 290 aa, Bacillus pumilus SAFR-032
MTQIKTVGFIGIGVMGRSMAEHLMDAGYEVLVYTRTKAKADALIQKGALWKPEVKEIAQHADAVITMVGYPSDVEEIYLGEEGLVAHATPGTYLIDMTTSKPQLAKEIEEKAKEKGLFALDAPVSGGDVGAKNGTLAIMIGGEKSAYEACLPLFEKMGENIQYQGPAGSGQHTKMCNQIAIAAGMVGVAEAMAYAEKSGLDPEHVLKSITTGAAGSWSLSNLAPRMLKGDFEPGFYVKHFIKDMGIALEEAELMGEEMPGLSLAKSLYEKLSEQGEENSGTQSIYKLWVK

SEQ ID NO: 11504 - protein, 389 aa, Bacillus pumilus SAFR-032
MEHLLNPRVKDIEISGIRTFSNLVSSYEDVVSLTIGQPDFYTPHHVKTAAKAAIDENFTSYTHNAGFLELRQAIQHYIKKKVNLDYEAESEIIVTTGASQAIDAAFRTILSEGDEVILPGPVYPGYEPIIRMCGGKPVHIDTTNAGFKLNAKLIEDALTENTKCVVLPYPSNPTGVTLSEEELKEIAQLLEGKDIFILSDEIYSELTFDRPHHSIASFLKEQTIVINGLSKSHSMTGWRIGFLFASAPIAKHVLKVHQYNVSCASAVSQKAALEAVTNGVDDALIMREQYKKRLDYVYDRLISMGLPVIKPSGAFYIFPSIESFGMSSFDFCMELLESTRLAVVPGSAFSPLGERYVRLSYAYSLETLKEGLDRLEQFVLEKRSIHLTD

SEQ ID NO: 11505 - protein, 496 aa, Bacillus pumilus SAFR-032
MKVGKQLSQHDTPLYTGLKKHAATNPVQFHIPGHKKGAGMDPEFRAFIGDNALSIDLINIEPLDDLHSPRGMIKEAQDLAAEAFGADHTFFCIQGTSGAIMTMVMTVCGPGDKIIVPRNVHKSIMSAIVFSGAVPVFIHPEIDKELGISHGITPESAKKALTEHPDAKGLLVINPTYFGVSADLKSIVDIAHSFHVPVLVDEAHGVHIHFHDKLPLSAMQAGADMAATSVHKLGGSLTQSSILNMKEGLISKDRVQSILSMLTTTSTSYLLLASLDVARKRLATEGKALADEAIRLAESARNRLNQIDGITCIGKEILGSASTYDYDPTKLIISIKDLGLNGHDVEKWLRESYRIEVELSDLYNILCIVTPGDSDETIDALITAMKDIAATSTSESGTQEVTEVLLPEIPSLAMTPRDAFYATTEVVPFKEAAGRIIAEFVMVYPPGIPIFIPGEIITEENISYIFKNIEIGLPVQGPEDSTLEMIRVIKEQKPIL

SEQ ID NO: 11506 - protein, 404 aa, Bacillus pumilus SAFR-032
MKIIVQKFGGTSVKDDQGRKRALAHILSAKEKGYKSVVVVSAMGRKGDPYATDTLLGLLYGSAQHMTNREKDLLVSCGENISAVVFSSMLNENGLKAVAMTGAQAGFVTDKEHTSAKIIDMKCERLEAALSEHDVVVVAGFQGAAKNGDVTTIGRGGSDTSAAALGAALQADFIDIFTDVEGVMTADPRIVENAKPLRVVTYTEICNLAYQGAKVIHPRAVEIAMQAKVPMRVRSTYSDEEGTLVTSHYSDKMSHDVYDRLITGIAHVNDVTQIKVPAKEGQYSVQTEVFKAMANAQISVDFFNITPSEIVYTVTGAMTEKATSILKDLGYTPIVTTNCAKVSAVGAGIMGVPGVTSKIVSALSEQNIPILQSADSHTTIWVLVNEENMRAAVNALHEVFELSR

SEQ ID NO: 11507 - protein, 1523 aa, Bacillus pumilus SAFR-032
MTYNQLPQPQGLYRPEFEHDACGIGLYAHLKGEATHSIVKKGLQMLCQLDHRGGQGSDPYTGDGAGLMVQLPDAFFRKSCKDFALPEKGRYGVGMVFFSKEDDEKTRQAIEQKINGFIKQEGQTLIGWRTVPVDAGKIGTVAAKSCPVVRQVFIGANDKITDRLSFERKLYVIRKQAENWGTEEEKQFYFVSLSSQTIVYKGLLTSDQVDAFYLDLQDETFVSAFSLVHSRFSTNTFPTWERAHPNRYLIHNGEINTLRGNINWMRAREQQFVSEAFGDDLDKILPVLNADGSDSSILDNAFEFFVLAGRTPAHTAMMLIPEPWTENTHMSKEKRAFYEYHSSLMEPWDGPTAISFTDGKQIGAILDRNGLRPARYYVTNDDHIIFSSEVGVIDTNEEDVKYKDRLEPGKMLLIDLEEGRIISDEEVKSTIANELPYQKWLDEEMVHVNRSEENSENSSIMDDLLTRQRAFHYTYEDIQKYLIPLLEEGKDPIGSMGSDTPLAVLSDRAQSLFSYFKQLFAQVTNPPIDAIREQLVTSTMTWLGAEGDILHPNEYSCRRIKLYTPVLTSGQFNGLKTIVHNAFKSKTIHTLFTDDLKRGLDAMFEEAEKAIREGVSLLILSDRDMTEQKVPIPPLLALSALHQHLVRQGLRTKVSLIVESGEVREVHHFAALIGYGADAIHPYLVYETYKQLIAEEAISFSFDEAVTKFGKSVTEGVVKVMSKVGISTVQSYRGAQIFEAVGISEDVIQAYFTGTASQLGGIDLETIAHEAKLRHEAGYQAATDQTLESGSDFQWRKNGEHHAFNPKTIHTLQWACRNEDYDLFKQYTKAADEERIGFLRNLFAFQPKQKPVRLEDVESAESIVRRFKTGAMSFGSLSKEAHEALAIAMNRIGGKSNSGEGGEDPARFTVDEHGDDRRSAIKQIASGRFGVKSHYLVNADELQIKMAQGAKPGEGGQLPGNKVYPWVADVRGSTPGVGLISPPPHHDIYSIEDLAQLIHDLKNANRDARISVKLVSKAGVGTIAAGVAKGTADVIVISGYDGGTGASPKTSIKHTGLPWELGLAEAHQTLVLNGLRERVVLETDGKLMTGRDVVMAAILGAEEYGFATAPLVVLGCVMMRACHLDTCPVGVATQNPELRKKFMGNPDHIVNFMMFIAEEVREILAELGFTSMDELIGRTDVLGVSERAKAHWKAGQLDLETLLYQPEGARTFRTPQNHKIDESLDMNEILPYVQEALNHQTPVDLSLNIRNINRVAGTITGSEVSKRYGEEGLPEDTITLRFTGSAGQSFGAFVPKGMSLYLTGDSNDYIGKGLSGGKIAVKTSDHFVQNGHENVIVGNVAFYGATSGKAFINGRAGERFAVRNSGVHVVVEGIGDHGCEYMTGGRVVILGDVGKNFGAGMSGGVAYIHTSDAKQFKRMCNMEMIMFEKLTDHDEEQEVKQLIQEHLHYTNSAKASALLENWAQEKDQFIKVIPRNYKMMLQSIEEQKQAGLSHEEAVMFAFEANTKPKNQETANGQKAALAH

SEQ ID NO: 11508 - protein, 605 aa, Bacillus pumilus SAFR-032
MSSGMGHKGGHPRGPVAKPKEFKKTLIRLIGYLKPRKFQLILVFIAAVGSTVFNVISPKLLGDATSSLFDSFTQGTAVQFDVISRILLLLILLYVVASLFSFVQQYVMAGVSQQTIAELRQEANDKLTRLPLRYFDKTTHGDTLSRVMNDIDNINTSLQQALTQVITSVITVIGIVVMMLFISPLLTLLVCLTLPLSLFAIRGITSFSQKHFKAQQKELGMINGHINEMFTGHQTVRAYGYEKKAIDTFDQLNEQLYESSRKAQFISGLMMPLMTFIGNLGYVAVSVAGGILVINGNIRVGDVQAFIQYTQQMSQPLVQASSVANLVQSAIASAERVFDILDEEEENAEEDAAIDLESLSGDVSFEQVQFGYEKDHPIIKNLSLDVKEGQTVAIVGPTGAGKTTIINLLMRFYELDQGSIRIGGVKTTDLSRQQVRDLFAMVLQDTWLFEGTIHDNIAYGRQNVSKEDVIKAAKHAYADDFIRTLPDGYDTLLTEDAGNLSQGQRQLLTIARAILSDPKILILDEATSSVDTRTEMHIQKAMNELMNGRTSFVIAHRLSTIKDADLILVMKDGTIIEKGTHSELLKQNGFYADLYMSQFTENQVG

SEQ ID NO: 11509 - protein, 441 aa, Bacillus pumilus SAFR-032
MTEEPRLKRSLTVFPLVVIGLAYMDPLVVFDSYGIVAQLTKGHVAAAYIFTLLALLLTALSYGNMVKAFPKAGSAYTYAQKSIHPHVGFLVGWTLLLDYLFLPMVNFAIGSAYLTAAFPDVPHYIWIIILAIAITTVNVIGIRLTANITALFVTFQVIVAVTFVGFIIYGLTQNAGSGELLSARPFYSASLDPALIFSGATILCFSFLGFDAISTMSEETIKPKKTIPLAIFLTVAIGGVLFTLTSYFLQQVFPNFQQFKHPDAASLEIAEFVGGAFLHSFFLAGTMVAVISSSLSSHASAARLLYAMGRDESLPKRFFGYIHPRLKTPVFNILLIGAFSLTAVVGELEVIYSFISFGALIGFTFVNLSVFAYYFVKQKQRGVLNTLRYAVIPLCGTAFCLWLLTSISTNALIIGMLWLIIGFVYFCYRLKTRPEFTFGYD

SEQ ID NO: 11510 - protein, 205 aa, Bacillus pumilus SAFR-032
MATDQKTIDILKQRASVKEYDTTHEMTKEELTELLDITTKAPSAWNLQHWHFTVFHSAESKAKLLPIAYNQKQISQASAVIAVLGDLEANQNGEKIYSELAEQGFITEDIKETLMTQINGAYQSEQYAREAAYSNASLAAMQLMIAAKAMGYDTCAMGGFSKEAFIKEFNVSGRYEPVMLISVGKAAKEAHKSNRFDIEEVSDFL

SEQ ID NO: 11511 - protein, 497 aa, Bacillus pumilus SAFR-032
MQGNLTALLITASIIFIVVVIGFAAGRDKSSRQSVEEWSVGGRKFGGLLVWFLVGADLYTAYTFLGLTSTAYTAGSVAFFAIPYSVLAYFIAYFFLPKLWTVAKNHNLTTLADYARERFDSKLLSSLIAIIGVLMLIPYICLQLSGIQDTLTVAGTSYINVNAVVIISFILVALYTFFSGIKGPTYTAIIKDILVWVIMLFMVVSLPIIHFNGWTPMMNTLAKEAPQLLTIPDGGPKGILWFITASGVSALALFMWAHAATGVFTAKSADAIRKNSMFLPLYNIVLILVIFLGFIAFLVLPEDTNPRFALLHLIQTSYGGVMQGLAYSTIALASLIPCSIMAIGASNLFANNLYRDLIHPNVSPKKLTMITRSMVFIVIGLALLFGMLFPTALVTLQLIGVSGMVQIFPAIAISLFWKKQSREATIAGLVVGIIVTFTANISQVTFGLYEGFLGLLANVVVILILNPFFQKKVTTNSVMNDLFEKDHDKTATTVNEV

SEQ ID NO: 11512 - protein, 66 aa, Bacillus pumilus SAFR-032
MQNGKVKWFNNEKGFGFIEVEGGDDVFVHFTAIEGDGYKSLEEGQEVSFEIVEGNRGPQAANVTKI

SEQ ID NO: 11513 - protein, 127 aa, Bacillus pumilus SAFR-032
MYRTFMTSKLHKATVTEANLHYVGSITIDEDLLDAAGMMANEKVQIVNNHNGARLETYIIPGERKSGVICLNGAAARLVQPGDEVIIIAYGMLSEGEAKTHTPKVVVLNKENQIEQMIGQEPARTIL

SEQ ID NO: 11514 - protein, 524 aa, Bacillus pumilus SAFR-032
MFRVLVSDKMSNDGLLPLLESDFVEIVQKNVTEAEDELHTFDALLVRSATKVTKELYEKMTSLKIVGRAGVGVDNIDIDEATKHGVIVINAPNGNTISTAEHTFAMISSLMRHIPQANISVKSKEWNRGAYVGAELYGKSLGIVGLGRIGSEIAQRARAFGMTVNVFDPFLTKERAEKIGVNAKSLDEVLEVSDIITVHTPLTKETRGLLNKETIAKTKKGVRLVNCARGGIIDERDLLEALESGHVAGAALDVFEVEPPTDNPLVDHPLVIATPHLGASTKEAQLNVAAQVSEEVLQFAKGLPVMSSINLPAMTKDEFKKIQPYHQFAGKLGRLVSQSMREPVKEVGISYEGSISKLETSFITKSLLSGFLKERVDSTVNEVNAGMVAKERGISFSEKISSSESGYENSISIEVKGDLSTFTLKATYIPHLGERVVSINGFNIDFYPDGHLVYIQHTDAPGVIGKVGQILGDHDVNIATMQVGRKEKGGEAIMMLSFDKHLEDEIVKELTEVHDILSVRLIDL

SEQ ID NO: 11515 - protein, 373 aa, Bacillus pumilus SAFR-032
MLTKEWRILTINPGSTSTKIGVFHNERSIFETTLRHTDEELKQFPHIIDQFSFRKETILKTLHEQGMNISKFDAVCARGGLLRPIEGGTYEVNEQMVQDLKEGYAGQHASNLGGIIAREIALGLNIPAFIVDPVVVDELKPIARISGLPTIERKSIFHALNQKAVARKTAASFGKRYEDLNMIITHMGGGITIGVHEKGKVIDVNNGLHGEGPFSPERAGTLPTGDLVNLCFSGEYSQEEMLKRIIGEGGLAGYLGTTDAVKVERMIEAGDERAALIYEAMCYQIAKEIGAASAVLKGAVDVIVLTGGLAYSKQITSSIRGHIDWISDVVVYPGENELQSLAEGALRILKEEESPKEYPNDQQMKKGVTSHGN

SEQ ID NO: 11516 - protein, 301 aa, Bacillus pumilus SAFR-032
MTNESFKSGFVSIIGRPNVGKSTFLNRVIGQKIAIMSDKPQTTRNKVQGVLTTNSSQTIFIDTPGIHKPKHKLGDFMMKVAQNTLKEVDLILFMINAKEGYGKGDEFIIERLKQTSTPVFLVVNKIDQIHPDELFLLIDEYRTRYPFKEIVPISALEGNNIDTLLQQVEGYLPEGPQFYPADQVTDHPERFIISELIREKVLHLTREEIPHSIAVAIESIKPDENGKIHVAATIVVERDSQKGIVIGKRGSLLKEVGQKARRDIEALLGSKVYLELWVKVQKDWRNKSTHLRDFGFREDEY

SEQ ID NO: 11517 - protein, 613 aa, Bacillus pumilus SAFR-032
MSKIIGIDLGTTNSCVAVLEGGEPKVIANAEGARTTPSVVAFKNGERQVGEVAKRQSITNPNTIMSVKRHMGTDYKVEVEGKNYTPQEISAIILQHLKSYAEGYLGEEVTKAVITVPAYFNDAERQATKDAGKIAGLEVERIINEPTAAALAYGLDKTDEDQTILVYDLGGGTFDVSVLELGDGVFEVRSTAGDNRLGGDDFDQVIIDHLVAEFKKENGIDLSKDKMALQRLKDAAEKAKKDLSGVSSTQISLPFITAGDAGPLHLELTLTRAKFEELSADLVERTMTPVRQSLKDAGLSASEIDKVILVGGSTRIPAVQEAIKKETGKEPHKGVNPDEVVALGAAIQGGVITGDVKDVVLLDVTPLSLGIETMGGVFTKLIERNTTIPTSKSQVFSTAADNQTAVDIHVLQGERPMAADNKTLGRFQLTDIPPAPRGVPQIEVSFDIDKNGIVNVRAKDMGTGKEQNITIKSSSGLSDDEIEKMVKEAEENAEADAKKKEEIEVRNEADQLVFTTEKTLKDLEGKIDEEQVKKANDAKDALKAAIEKGELEDIKAKKDELQTIVQELTTKLYEEAAKQAQAQQEGGAEGAQKADDNVVDAEYEEVNDDQEKK

SEQ ID NO: 11518 - protein, 366 aa, Bacillus pumilus SAFR-032
MEKVVCIGCGVAIQTEDKDQLGYAPAASLMKEDVICQRCFRLKNYNEIQDVSLTEDDFLNILHSIGETDSLIVKVVDIFDFNGSWINGLSRIVGGNPILLVGNKVDILPKSVKKDRLVHWMKREAKENGLNPIAVFLISASRGQGVPEVMEAIDHYREGRNVYVVGCTNVGKSTFINRIIKEVSGEENVITTSQYPGTTLDAIEIPLDDGSALFDTPGIINRHQMAHYVSKNDLKILTPKKELKPRTFQLNEAQTLYFGGLARFDYVKGGRTSFVCYMPNELNIHRTKLENADDLYEKHAGELLSPPSKEGMEDFPPLVPHTFTFDQPKMDIVFSGLGWITANDAGKQIKVYAPKGVHVFMRRSLI

SEQ ID NO: 11519 - protein, 269 aa, Bacillus pumilus SAFR-032
MKKMKRFGLLLFMTCCIAALTACGFAEKGSTDAKQGSSLETIQKDKKMIFGVKNDTRLFGLKNPSSGDIEGFDIDIAKAIAKEILGDEGKAEFKEVTSKTRIPLLQKGDIHAIVATMTITEERKKEVNFSDVYFEAGQSLLVKKGSDIQSIDDLKKGTKVLAVKGSTSSQNIREKAPEASVLEFENYQEAFTALKSNQGQVLTTDNAILFGMADEDSNYEVVGGTFTDEPYGIAVKKGDKELTTAINKALKTLKDNGEYDKIHQKWIKK

SEQ ID NO: 11520 - protein, 380 aa, Bacillus pumilus SAFR-032
MERIYLDHAATTPMDQRIVDKMIPYFTEIFGNPSSIHSYGREARKWLDEAREVIAGELHCKPQEVILTSGGTEADNLAITGVAMARQHEGKHIITAKTEHHAVLHTCERLEKLGFDVTYLDVDETGLIHLEQLKQALRDDTILVTIMYGNNETGVIQPIKDIGELMHHHTAHFHTDAVQAFGTMPIDVADLHIDLLSASGHKLNGPMGTGFLYVNEGVKLSPQLFGGEQERKRRAGTENVAGIVGLAEAVQLTKQNRREKAMHYGKLKEIMLQVFDEESLIFSINGHPKETLPHILNVHFPGVSIESLLVNLDMEGIAVSSGSACTAGSVLPSHVLSAMYGEEADKLTSSVRISFGLGNEEDHVKQAARKIAAVVKRLAK

SEQ ID NO: 11521 - protein, 428 aa, Bacillus pumilus SAFR-032
MFVDQVKVYVKGGDGGNGMVAFRREKYVPKGGPAGGDGGNGADVVFEVDEGLRTLMDFRYKRHFKADRGEHGMSKNQHGRNAEEMIVKVPPGTVVTDAETEQVLADLTEHGQRAVIAKGGRGGRGNSRFATPANPAPQLSENGEPGKERDVILELKVLADVGLVGFPSVGKSTLLSIVSSAKPKIADYHFTTLVPNLGVVETDDNRSFVMADLPGLIEGAHEGVGLGHQFLRHIERTRVIVHVIDMSALEGRDPYEDYVTINEELEQYNMRLTERPQIIVANKMDMPDAADNLAAFKEKLTDDYKVFPISAITREGLRELLFEIANQLETTPEFPLYNEEELSDNRVMYRFDEGDAPFEITRDPDGTFVITGKALERLFKMTDFSRDESVKRFSRQLRGMGVDDALRERGAQDGDIIRLLEFEFEFID

SEQ ID NO: 11522 - protein, 409 aa, Bacillus pumilus SAFR-032
MGLIVQKFGGTSVGSTEKIRNAAERVIAERKAGHDVVVVVSAMGKSTDVLVDLAKELTDHPSNREMDMLLATGEQVTISLLTMALQAKGYDAISFTGWQAGMKTEQVHGNARIVDIDESRVKEELNAGKVVVVAGFQGIADDLHITTLGRGGSDTTAVALAAALKADKCDIYTDVPGVFTTDPRYVPAARKLAGISYDEMLELANLGAGVLHPRAVEFAKNYQVPLEVRSSIENESGTLIEEESSMEQNLVVRGIAFEDQITRVTVCGLSSGLTTLSTIFTTLAKQNINVDIIIQSVTSTNQTSISFSVKTDDLSKTVEVLEEYKGALGYEQIETESKLAKVSIVGSGMVSNPGVAAEMFAVLAEKDIQVKMVSTSEIKVSTVVGRDDMVKAVEALHDAFDLSKVAAHS

SEQ ID NO: 11523 - protein, 403 aa, Bacillus pumilus SAFR-032
MSQNKKVVLAYSGGLDTSVAVKWLQEQGYEVVACCLDVGEGKDLAFVQQKALQVGAVQSYMIDAKEEFAEEFALTALQAHTMYEGKYPLVSALSRPLIAKKLVEVAEKENAVAVAHGCTGKGNDQVRFEVSIKALNPDLEVLAPVREWKWSRDEEIDYAQKHGIPIPINLDSPYSIDQNLWGRSNECGILEDPWAAPPEGAYDLTTPLEKTPDTPEIIEITFEKGKPTAIDGIQYSLSDLILHLNEVAGQHGVGRIDHVENRLVGIKSREVYECPGAVTLLKAHKELEDLTLVKEVAHFKPIVEQKMAELIYNGLWFSPLKGALDAFLQETQQNVTGVVRVKLFKGHAIVEGRKSPYSLYDENLATYTKADEFDHDAAVGFINLWGLPTKVNSIVNKKEQVKA

SEQ ID NO: 11524 - protein, 394 aa, Bacillus pumilus SAFR-032
MSKIIAINAGSSSLKFQLFDMPEETVLTKGLVERIGMDNSIFTISVDGEKKTEVTDIPDHAVAVKMLLEKLIEFNIIKDFNEIDGVGHRVVHGGEKFSDSVLLTDEVINDIDQLSELAPLHNPANVVGIKAFKQILPDVPAIAVFDTAFHQTMPEQSYLYSLPYDYYKNFGIRKYGFHGTSHKFVTERASELLGRPLEELRLISCHLGNGASIAAVEGGRSIDTSMGFTPLAGVAMGTRSGNIDPALIPFIMEKTGHTAEEVLSTLNKKSGLLGVSGLSSDLRDIEEATEEGNDRAEVALDIFASRIHKYIGSYAARMNGVDAIIFTAGIGENSSEVRARVLRGLEFMGVYWDPSLNNMRGEEAFISYPHSPVKVIVIPTNEEVMIARDVMRLA

SEQ ID NO: 11525 - protein, 510 aa, Bacillus pumilus SAFR-032
MKNVSSVFWIVIAITFVAVMWGAFSPETLQNVTDQIQTYITNDFGWYYLIVISLLVGFCLFFIFSPIGKITLGKPGEEPEFGLFSWFAMLFSAGMGIGLVFYGAAEPISHYAIQSPTGETETAQAFRDSLRYTFFHWGLHAWAIYAIVALCIAYFKFRKDAPGLISSTLYPVFGNRIHGWIGKTIDCIAVFATVVGVATSLGLGAAQINGGLTYLFGIPNNFLTQLIIIAIVTVLFLISAWSGIGKGIKYLSNSNMIFAAILMIFLLFAGPTVFILNSFTDSIGQYLSNIVQMSFRLSPNDPEKREWINGWTIFYWAWWISWSPFVGIFIARVSRGRTIREFLIGVLVAPSILVFLWFSIFGVSAMDLQQKNIIDVAGMPTETMLFGVLNQYPLAMITSILALILIAVFFITSADSATFVLGMQTTYGSLNPANSVKISWGIIQSAVAAVLLFSGGLQALQNTAKLAALPFSIVIILMVVSLYKSLNAERKAIKQANKVNKPRSPRVKKA

SEQ ID NO: 11526 - protein, 632 aa, Bacillus pumilus SAFR-032
MCGFVGVFNHRPLSETTEQEELIKQMNRLIVHRGPDDEGYFHDEHVGFGFRRLSIIDVEHGKQPLSYEDEKYWIIFNGEIYNYVELKEELVKKGYTFSTDSDTEVLLATYRHYKEEAASKLRGMFAFLIWDKEAQQLYGARDPFGIKPLYFTQVEEQVYFASERKSLMAVNENILFDETSLQQYMSFQFVPEPNTLDQKVHKVEPGHQFILRPGQEIEFKTYWKVQFKPEQTQEQKLIEEVRDAIYDSVNVHMRSDVPVGSFLSGGIDSSFIVSVAKELHPELKTFSVGFQQDGFSEVDVAKETADKLGLQNFSAVISPEEYMNELPKIVWHLDDPLADPAAIPLYFVAKEAKKQVTVVLSGEGADELFGGYNIYREPLSLKPFESVPTMLKKLLLRLARLMPEGMKGKSFIVRGCTPLEERYIGNAKIFEEPVKKNLLKHYDPSITYRDVTKTYFEESAGYSDINKMQYVDIHTWMRGDILLKADKMTMANSLELRVPFLDKVVFEAASKIPEELKTKDGTTKYLLRKAAEGIVPDHVLNRKKLGFPVPIRHWLKNEMNAWAKDIIKNSQTDEYINKEYVLDLLNEHCAGKADHSRKIWTVLIFMIWHSIYVERSIDPEQLNHQPKEVIFS

SEQ ID NO: 11527 - protein, 397 aa, Bacillus pumilus SAFR-032
MKKSYLSETVQSIQPSGIRKFFDLAATMEGVISLGVGEPDFVTAWNVREASIMSLEQGLTSYTANAGLLSLRKELSDYLYKRFHIDYSPEEELIITVGGSQALDLAFRAILNSGDEVIIPEPCFVAYGALTTLAGGVPVYLSTSAEKDFKADSADLRTKLTPKTKAILLCSPSNPTGSVYSKEELEDIAQFAKEHDLLVITDEIYAELTYDEAFTSVAAIQDMKERTILISGFSKGFAMTGWRLGYVAAPPVLRDAMLKIHQYSMMCAPAMAQYAAEEALKNGLEDVEKMKKSYRRRRNLFVGSLNELGLACHQPNGAFYAFPSIKSTGMTSEQFAEELLLSEKVAVVPGNVFGPSGEGHIRCSYASSLDHLQESLSRIQRFLQERQVKAEAPVIIK

SEQ ID NO: 11528 - protein, 378 aa, Bacillus pumilus SAFR-032
MIIGIPKEIKNNENRVALTPGAASQLLSAGHQILIETNAGFGSGFTDDDYVSVGAEILDQAKDVWASSDMIMKVKEPLPEEYSYFREGLILFTYLHLAAEPSLAEALKQKGVTAIAYETVTDGKSLPLLTPMSEVAGRMAAQIGAQFLEKPKGGKGILLAGVPGVSRGKVTIIGGGVVGTNAAKMAIGLGADVTLIDVNAERLRQLDDQFGHQMKTLMSNPVNIADSVSEADLLICAVLIPGAKAPTLVTEEMVKQMKPGSVIVDVAIDQGGIVETIDHITTHDQPTYEKHGILHYAVANMPGAVPRTSTVALTNVTVPYALQIAHKGASKAIQENKAIAEGVNVMNGHITYEAVARDLGYDYVPVHQAIDASSMTEA

SEQ ID NO: 11529 - protein, 327 aa, Bacillus pumilus SAFR-032
MTKPYVYITRKLDEASLTPLKEVAHIEMWPSEDEPCPREELEKQAAKADALLTMLSDQVDEALLSKAPHVKVIANLAVGYDNIDVEAAKKQNITICHTPDVLTESTADLAFALLMASARRIVEASDWVKDGNWTGWGPLLLAGADVHHKTLGIVGMGSIGTALAKRAAGFDMKVLYHNRSRKPEAEAQLGVTYAAFEDLLTQSDFIVCLTPLTPETKDMFNEKAFDLMKNSAYFINVSRGQTVDEDALYEAITTGKIAGAGLDVFREEPVSPSHPLTTLPNITVLPHIGSASVETRKTMMRLCADNIALVLQGQQAKTPVRSSYQAP

SEQ ID NO: 11530 - protein, 261 aa, Bacillus pumilus SAFR-032
MTASTLTIKDLHVEIEGKEILKGVNLEIKGGEFHAVMGPNGTGKSTLSAAIMGHPKYEVTKGSILLDGEDVLEMEVDERAQAGLFLAMQYPSEISGVTNADFLRSAINARREEGDEISLMKFIRKMDENMEFLEMDPDMAQRYLNEGFSGGEKKRNEILQLMMIEPKIAILDEIDSGLDIDALKVVSKGINRMRGESFGCLMITHYQRLLNYITPDHVHVMMQGRIVKSGGPELAQRLEAEGYDWIKKELGIEDETVGQEA

SEQ ID NO: 11531 - protein, 391 aa, Bacillus pumilus SAFR-032
MREAVIVAGARTPVGKAKKGSLKHVRPDDMGALCVKETLKRAGDYDGQIDDLIIGCATPEAEQGLNVARNIGALAGLPYTVPAITINRYCSSGLQSIAYAGERIMLGQAETILAGGVESMSQVPMMGHSIRPNAHLAEQAPEYYMSMGHTAEQVAQKYQVTRQDQDAFAVRSHQKAAKALQEGKFTDEIVSVDVTERRVGEQFQLEEHQFTFSQDEGVRAGTTEEILSTLRPAFSTKGTVTAGNSSQTSDGAACVMMMDREKASSLSLQPLAKFRAFAVGGVPPEVMGIGPIEAIPRALKIAGLELKDIGLFELNEAFASQAIQVIRHLGIDEEKVNVNGGAIALGHPLGCTGTKLTLSLIHEMKRRNEQFGIVTMCIGGGMGAAGIFELI

SEQ ID NO: 11532 - protein, 540 aa, Bacillus pumilus SAFR-032
MRFYGRFEGYDTSKLRRDLIAGLVVGVVAIPLGMAFAIASGVGPEYGLYTVIVAGILISLFGGSKYQIGGPTGAFVPILFGIVSQYGIENLLIAGFMAGCILVLFGIFKLGKLMKFIPRPVIIGFTAGIAVIIFSGQIANFLGLKGVEKHESFFLNMREIVVHLGTVNSLAILTAVIGLIVILAAQKYIPKIPGALLGLLASTFLAVLFFQGQVETIGSAYGEIPRQLPSFAFPELTIEKMIYLLPPAIVIALLGGVESILSAMVADNMKGSKHDSNKELVGQGIANMAAPLFGGIPATGAIARTATNIKNGGASPISGVVHGVVVLLILMLFAPYASMIPLAAMAPILMFVAWNMSEKKEFINIVKVKNADSLVLVVTFLLTVIGDLIIGVTAGLILAFIAFIKKMSQITSIRPNVVVPQMETAAALEKQTDQQGISMYAIEGPLFFGTTDSLENSILDHVQTKPKTLILLMNKVNYMDTSAEAVLMNISNRLKHHNGKLMIVGLQSQPKELLRRTGLFHHIGKQYFFERTDDISPQHL

SEQ ID NO: 11533 - protein, 323 aa, Bacillus pumilus SAFR-032
MTPHIFVAKPLPASFEELLKEHCTYEVWQSKDPIPKDILFQKLQHADGLLTSGTKIDQELLDHAPKLKVVSNNSVGYDNFDIEVMRQRGVIGTHTPHTLDHTVADLAFSLILSSARRIAELDRFIREGNWTKFVQEEDIFGIDVHHQTLGIIGMGRIGEQVAKRAAHGFDMNVLYYNRSRNEKAESAYGALYCTLDDLLKQADIIVLITPLTDETYHMIGERELKLMKQTALFVNISRGKTVDEKSLIQALQEGWIKGAGLDVFEQEPLQENHPFKEMNNVTLVPHIGSATETTRDLMLKRAIHNVIHGIDGKAPIDIVKELA

SEQ ID NO: 11534 - protein, 449 aa, Bacillus pumilus SAFR-032
MEKEHVQLKRTMTSRHIMMLALGGAIGAGLFKGSSSAIDIAGPAVILAYMIGGLILLFIMQGLAEMTVARPGARTFRDLIEPVLGKYPAYFLDWIYWKMWVLNIAAEAIVSAIFIQYWFPQVPIWTLVLIISLVVTLINVCSVKMFAETEYWLASIKIAVILLFIIIGLTMLFVSFGQHAAPGLSNLTDHGGFFPNGTGGLIAAMLVVVYSYGGTEMIGVTLAETKNPEKVIPKAIQSTFVRIIGFYVLPFFIIVSLIPWNQVNNEQVSPFVTVFATIGVPYASDIMNGIILLAILSSMNSGLYASSRVLFTQAMDGRVWKGFSKLSKQQVPVRAILVCTSTLYAAVLISLFVGSQTFNYLMGSLSYTVLFIWFIIAVGHLKSRSVAQPGGYRVKLYPFTTWFSVIAIMAIFVGVVLNTPIVQTLVTMCIYLIITLSFFINRKRFETAV

SEQ ID NO: 11535 - protein, 566 aa, Bacillus pumilus SAFR-032
MNSQAQPLTRRGAELIVDTLIAQGVTHVFAIPGAKIDAVFDVLKDRGPELVLCRHEQNAAFMAAAVGRLTGKPGVCLVTSGPGASNLATGLLTANTEGDPIVAIAGNVIRADRLKRTHQSLDNAALFKPVTKYSVEVQDVHNIPEALTNAFRAAQKGQAGAAFISFPQDVVTEHTTQTPVSAHPSPELGPAPDALISSAIAKIQNAHLPVAIVGMKASRPAAAKATRTLLKTLGIPFVETYQGAGVLSRELESQYVGRIGLFRNQPGDLLIEQADVLLSIGFDPIEYDPKHWNIQPKQRQIIHVDDMQADIDHFYEPALELVGNIAETIKHLAHDSVQLSLCKEQVEFVTELQELLSDIEKAPERESHLSHPLDVIHTLRRLIPDDTKVTCDIGSHAIWMSRHFRVYEPNTFLVSNGMQTLGVALPWAIAASILNPDEKIVSVSGDGGFLFSAMELETAVRMKTNLVHLVWNDSTYDMVAFQQEMKYDRTSCVEFGQIDLVKYAESFGATGLRVNSPEELSTVLQKGINIEGPVIIDIPIDYQDNPDLASQKWPEVFRETHTLNVR

SEQ ID NO: 11536 - protein, 212 aa, Bacillus pumilus SAFR-032
MLFFVDTANIADIKEAHELGILAGVTTNPSLVAKEKDVSFHDRLREITDVVSGSVSAEVISLKAEEMIEEGKELAAIAPNITVKIPMTTDGLKAVKALTDLGIKTNVTLIFSANQALLAARAGATYVSPFLGRLDDIGQNGLDLISEVKTIFDVHGLDTQIIAASIRHPQHVTEAALRGAHIGTMPLKVIKQLTKHPLTDAGIEQFLADWNK

SEQ ID NO: 11537 - protein, 391 aa, Bacillus pumilus SAFR-032
MSKTVIVSGARTPFGKLGGAFIGLTAAELGGVAIKAALERVPGSHHVDEVIMGSVLQGGQGQIPSRQAARHADLPWSVPTQTINKVCASGMRSVSTADQIIRAGDAEVILAGGMESMSHAPYLLKKARWGYKMGDGAVQDAMILDGLTCSFTGVHMGEYGSMAAKELGITREEQDLWALRSHERAIEAQKNGFFEHEITPVTVKTKTGERLITEDESPRRDTSYERLSKLMPVFNQTGTITAGNAPGINDGASALLLMKDTYAKQHDVKPLAVVLGHVQIAVEAKDFPKTPAFAIEKILQKTGKRLEDIDLFEINEAFSAVALACEKITGLDRRKMNINGGAVALGHPIGASGTRIILTLIHALKQRGGGIGIAAICSGGGQGDAIMIKVD

SEQ ID NO: 11538 - protein, 571 aa, Bacillus pumilus SAFR-032
MLKRFFAYYRPYRGLFFLDFFCAVAVGLMELGFPLIVNYFIDTLLPTGNWTIIVWTALALFVIYALSSVMQFIVSYWGHMLGINIETDMRKKLFDHFQRLSFKFFDNNKTGKLMSRMTNDLMYIGEVAHHGPEDLFIAIMTILGAFAVMLMINWQLAILTFLIMPVIIWLALHFNKKMTKAITQLNNDIGDFHARVENNIGGIRLVQAFANEHFEKKRFAENNNRFRKAKLLSYKIMSVNGSISYILTRLVTLFVLLAGTWFVLQGQLTAGGFIAFVLITNVLFRPIDKINTVIEMYPKGIAGFKSYVDLLETEPDVKDTEGARDVYGLKGEIEYRNVTFGYDEHSHVLKNIDLKIKQGETVAFVGPSGAGKSTICSLLPRFYDLDEGEITIDGISTKSMTLSSLRQQIGIVQQDVFLFSGTIRENIAYGNLEASDAEVWEAVRRAHLEELVQRFPEGLNTVIGERGVKLSGGQKQRLSIARMFLKNPSILILDEATSALDTETEKAIQDALSELAVGRTTLVIAHRLATIKHADRIIVVTEEGIEEQGRHQDLIQMGGVYSRLHEAQFGH

SEQ ID NO: 11539 - protein, 290 aa, Bacillus pumilus SAFR-032
MRFDEAYSGKVFIGSHPTWEDAKVILYGMPMDWTVSYRPGSRFGPNRIREVSIGLEEYSPYLDRELHEVPFFDAGDIPLPFGNAQKSLDLIEEYVDSILEKGKFPLGMGGEHLVSWPVFRAMHKKYPDLAIIHMDAHTDLREEYEGEPLSHSTPIRKVAGLIGPENVFSFGIRSGMKEEFEWAKEAGMYISKFEVLEPLKKVLPKLKGRPVYVTIDIDVLDPAHAPGTGTVDAGGITSKELLASIHAIAGSDVQVVGADLVEVAPVYDHSDQTANTASKLLREMLLGFVK

SEQ ID NO: 11540 - protein, 323 aa, Bacillus pumilus SAFR-032
MADIFSTVQEKVAGKGVKIVFPEGMDERILTAVQKLADGKVLQPIVVGKTQEVEAKAKELGLTLDGVDVYDPHTYEGFEELVQAFVERRKGKATEEQARKALLDENYFGTMLVYKGLAHGLVSGAAHSTADTVRPALQIIKTKEGVKKTSGVFIMARGEEQYVFADCAINIAPDSQDLAEIAIESANTAKMFDIEPRVAMLSFSTKGSAKSDETEKVSEAVQIAKEKAPELVLDGEFQFDAAFVPSVAAKKAPDSVIKGDASVFVFPSLEAGNIGYKIAQRLGNFEAVGPILQGLNQPVNDLSRGCNAEDVYNLALITAAQAL

SEQ ID NO: 11541 - protein, 513 aa, Bacillus pumilus SAFR-032
MSMTAFILFIAIVGLTLVITYFAAKKTSNASDFYTAGGGLTGFQNGLAIAGDYMSAASFLGIAGMIALNGFDGFFYSIGFLVAYLVVLYVVAEPLRNLGKYTMADMIAARFKRPAIRGVAAFNTITVSTFYMIAQLVGAGALIKLLLGIDYWIAVLIVGVLMTIYVVFGGMIATSWVQITKAVLLMLGTLIISLLVFAKFDFSLLKMFEEMKTATPLGGSFLHPGNKYDVPLETLSLNLALVLGTAGLPHILIRFYTVKDAISARKSVLSATWIIGIFYLMTVFLGFGAAAFVGTDAITAEDAAGNMAAPLLAQALGGDLLFAFVSAIAFATILAVVTGLVLSAASAFAHDFYSQIVRKGKASEREQVKAARFASIGVAILSIILALFAQSLNVAFLVSLAFAVAASANLPLIIFTVFWKRFNSTGAIAGSLVGLLSALIIVSLSPSVWDPSGAAIFTGDPLIPLSNPGIISIPLGFLAAYLGTIFSSEKADEDTFTEIQVKAHTGMHMDTDS

SEQ ID NO: 11542 - protein, 207 aa, Bacillus pumilus SAFR-032
MFIDQLKNDLHQSQPLFIGEETAFKAAVLVPLVQVNGEWHILFEVRSLIMRKQPGDISFPGGKLDGSETAQEAALRETHEELGIPPESVEILGQLSPYIASPSFVVYPYVGIIDEQKVKHSFNQEEVEETFTVPLSWLSQYEPYLHHVSVQPTPAEDFPYEKIMNGEKYRWGSRSIEEWFYDYENYTIWGLTARILKHFVTVAKRNS

SEQ ID NO: 11543 - protein, 172 aa, Sinorhizobium xinjiangense
WGFDGSSTNQAEGRSSDCVLKPVAVYPDPVRTNGVLVMCEVMMPDGRTPHPSNSRATILDDEGAWFGFEQEYFFYKNGRPLGFPEQGYPAPQGPYYTGVGYSNVGDVARKIVEEHLDICLAAGINHEGINAEVAKGQWEFQVFGKGSKRAADEVWMARYLLQRLTEKYGIDV

SEQ ID NO: 11544 - protein, 172 aa, Rhizobium leguminosarum
WGFDGSSTQQAEGRSSDCVLKPVAIYPDPARTNGALVMCEVMMPDGVTPHASNARATILDDEDAWFGFEQEYFFYQNGRPLGFPEQGYPAPQGPYYTGVGYSNVGDVAREIVEEHLDLCLAAGINHEGINAEVAKGQWEFQIFGKGSKKAADQIWMARYLLQRLTEKYGIDI

SEQ ID NO: 11545 - protein, 521 aa, Selaginella moellendorffii
MNLSSIMGEYTQHDNFTAVASLSLVLAAAIALLAALYSRLRNSKRPPLPPSPPSKLITGHLHLLDQLPNQSLYKLAKIYGPLIQLRLGVVPVVVASTAEMAREFLKVNDSVCASRPRMAAQKIITYNFTDIGWAAYGAHWRQLRKICTLELFTHRRMQETAKVRARELADTMAGIYRDRETSINMNTRIFSLTMNVINQMVMRKKPFSGSDTTEAREFIDLINGVFMVWGAFNIGDYIPGLSIFDFQGYIGMAKVLHKKLDHLLDKVIEEHIQRRMAKSDEPPDFVDVLLALTLEDGSKVSHKTIKGIIVDMIAGGTDTAAVTIEWALSELMRKPHILKKAQEEMDRVVGRDRVVDESDLPNLPYLECIVKEALRLHPSVPILRHESIEDCVVAGYRIPKGTGIMINVWAIGRDSATWENPMEFDPDRFISAGNTLDVRGNHFDLIPFGSGRRMCPGMPLGISMLQMSLGRFIQCFDWGLPPEMKSAEEIDMTETFGLTVPRKYPLHAVPIPRLPAHLYQA

SEQ ID NO: 11546 - protein, 498 aa, Selaginella moellendorffii
MEFLRLALAFLKALVFKLGCMSKSSSKSFSLPPSPRAVPLLGHLHLLGKLPHQSLQKLASRYGDVMLLKLGSHRTLVISSAEAARAVLKTHDHVFSSRPSTVAGKIFGYGGAGLVWAPYGEHWRTVRKLCTLELLTAKRVETSHPVRKREMAFVLDELSRHQQSDKQLEPVDLTTKLSDLTFNIMTRMVMNKSYLTGTSAEKEAAVRFKDLITEAFVVGTSCLSDSFSWLAWVDPQARKMERIHQQQDAYLSKQIAEHRQQPGSNGDFLDVMLAMEELSDTSIKSLSQDMLGAGTDTTAVTVEWALSELVKDPALLRRAQEELTEMVGDKAMVDESDLPKLRYLQAVVKETLRLHPAGPLLLPHESAEACVLENYTIPAKTRVIVNAYAIARDSRWWDEPLKFDPERFLEKCQGMDVRGQSFEYLPFGSGRRGCPGVTLGMTTVMFILANLIHAFDWKLASGEEMDMTEAFGVTVPRASPLKLVPSSLNLEFPPKFKS

SEQ ID NO: 11547 - protein, 490 aa, Selaginella moellendorffii
MNWFLLTFACILTAVISVSWWLMLKSRLRLPPGPMALPIVGHLHLLLKLPHQSFHKLSHKFGPIMTIKLGNKTAIVISSKKAAKEILTSYDRVFASRPVLISPQSLCYNSKNISCCKYGPYWREMRKICTTELFSSKRLSSFQNTRLEETQNLLQRVAEQLKVPLNMKIELSTLTLNVITRMAIGKKFRHGECSEDAEPLNVILEAVRLMGAVNLGDYIPFLKRLDPGGYIPRLKTTSKKIDCILQRLVDDHREEKVKSGDLVDVLQSVGIEDSAIKAVILKDILAGGTDTTAVTTEWALSELIRNPDCLRKVQQEIHVIVGDSRLVNENDLHHLHYLKAVVKETFRLHPAAPMMAPHESIEACTLKGYTIPAKTWLLINAWSMGRDPAQWDSPEEFMPERFINSSIDVKGCDFELIPFGAGRRMCVGMSLALCMVELTLARLVQAFHWALPDGSTMNMEERQGVIVARKHPLIAVANRRLPPEVYINTL

SEQ ID NO: 11548 - protein, 508 aa, Selaginella moellendorffii
MEHFDLALYLGLILLAGALWRQYRSFKVRLPPGPRGLPLIGHLHLLSTLPHRSLQKLSQAHGPLMHLRFGTVPVIVASSPAMAKEVLKTHDLAFASRPYLLVGEYAAYNFHNIGLAPYGDHWKMMRKLCSTELFTAKRIDSFSWVRVEELSGMVSGLLAKSASKEVVQIKSFLTDFTFNVMTRILMDRAFFGPAGADSQGKAREFRGIVEEILQVAGSFNVSEYIPSAFKWIDWNIPRFKRLHARQDRFLQEIIDEHKVGHDALAKPRDFIDILLSYFNHGDSRIDLDNIKAVLSDLLPGGTDTSITTVEWILAELLRNPLALKKAQDELDAVVGKDRMVNESDFPKLHYLHAIIKETFRLHPPIALLVPHMSRYECKVAGYDVPKGATTLVNVYAIGRDPTVWEDPTRFSPDRFLEGAGKGMDVRGQDFELLPFGSGRRSCPGLQLGLKTVELALSNLVHGFDWSFPNGGGGKDASMDEAFGLVNWMATPLRAVVAPRLPPHAYEKV

SEQ ID NO: 11549 - protein, 504 aa, Selaginella moellendorffii
MDAMNLFAAAAFLVIGLVYWLANRQRPSTPPGPWKLPVVGNLHQLLGKQPHRVITELSKKYGHLMSLRLGSVQAVVASSSQTAKIFLQTHDAIFSSRPEVANAKLLTYGFSDIMWAPYSQQWRELRKLSVLELFTAKRLESFQGIRRDETLNMIHRLLKLAREKKVVNFRDAATELSWSIIRTMVSNRQEFVNLEEGLKVKSSLDRALQLAGAFNLADYIPFFRAFDVQGFRQQSQILHEQLDFFFQGLVDSHRRQERPPNASEDFIDVLLSIQKQNGVEYVSDDTIKATIQDIFAAGTDTSSMTLEWALTELVRHPRSLQKAQDEISFIVGNDRMVSEADIPKLQFLQAVVKETLRLHPPGPLLQHQSVEDCKVGPYSFPAGTRVIINVYGISRDPSLWEQPLEFDPWRFLDKPTASIDMKGQHFEFIPFGSGRRICPGLAMGVRTVELALAQSLHCFHWHSPDDRVPDIEEVCGMTLPKKNPLLLAPSPRLADAVYGEIQRM

SEQ ID NO: 11550 - protein, 489 aa, Selaginella moellendorffii
MVMEQVCTKPQLPPQLPPSPTGLPFIGHLHLLGKLPHQSLLKLAQQYGDVMFLKLGKVNTLVVSSSDSAKEVLNTQDHIFGSRPKTTFSETIGYGGAGLAFANGENWKSTRKVCMYEVLTTKRVESFHPIRKFEVSLFMNELLKASREGSAVDLSSKLSDLTFNVISTMVLGKSYSASALSEAEKKETMFFKETLDEAAIMAGFHAGDYLPIPDWMDTQVNKIKQLQRDLDQFIQKEVESHRQRRDPGQAPRDFVDVLLSNSHISDTSIKALIVVSDMVGGGTESSAVSVVWALAELIKNPRLMERAQRELKEVVGEDRSLEESDIPNLPFLQAIVKETMRLHPPGPLLIPHESTEECEIGGYTVPARTRTVVNIYAIARDEDNWEDPLNFDPDRFMGSNIDLKGRHFEYLPFGSGRRICPGLMLAMATVQFILGSVLHGFNWRLPSGQTIDDLDMSESFGLTVPKAVPLKLVPSPRLEPQIYVKSLSS

SEQ ID NO: 11551 - protein, 489 aa, Selaginella moellendorffii
MAALVVTLLIVLLPLLLWWLRIYQSKKNVAPGPLAIPLLGHLHLLGRHPHKALSILSKKFGSVMSINLGSVPTLVISSPDAAKTILSTQDIFFASRPRTAAAKFIFFNARDMVWCEYGSYWRTMKKVSTLELFTAKRVEESKKLRMEEISRLVTSIAREGDNGRVAIDMNAKLSMTNMNLVSFMAFSQRFEESSFVELLQEAIDLVTSFVPSDYFPYLSWMDDYLGTVPKMKAVQGKLDKIFQAIIDEHRRVNGEKQRAPDLVDVLLSLDEVDDNDRKGLIMDMFGAGIDTSSITTEWALSELIRNPACMLKAQREIDQAVGFDRAVNEDDLLNLGYVRAIAKETFRLHPPVPLLIPHESTQESLVNGLRVPARTRATVNVWSIGRDPRWWERPEVFDPDRFAARSVIDVKGQHFELLPFGSGRRMCPAMGLGLAMVELSLARLIQGFEWNLPAGLQELNMEEEFGVTLRKRVHLSALAMPRLKAELYV

SEQ ID NO: 11552 - protein, 560 aa, Rickettsia akari str. Hartford
MNNNIINLIAAIVLSLSIIFGWQYFVIKPEQKKQQQQIAVQKAANLKKQQLKALVEPATDIVVQEESQVQRIKIESESLTGSISLKGLRFDDLILKKYKQDLSKNSSDVVLFSPTNTEHSYFAEIGLVSNLSSVKLPNNDTIWSSDGEILSPEKPVNLFWVNEDGVKFLVTITVDKNYLFTIEQTIVNNSDKELPIQSYGLINRKYTAVEKAVNILHQGPIGCIDENLKEYSYDDIKDKKSEKFAASKVDWIGITDKYWLSALIPDKSSNYSSNFNYAVKQGIEKYQVDFISPVQIIKPGENFAIKSRIFAGAKKVDLLDQYEKQYDIKLFDRAIDFGWFYIITKPVFYAMNFFYGYVGNFGVSILIVTVIIKLLMFTLANKSYRSMKKIKNLQPEIDRIKNLYSDDKARLNQEIMALYKKEKVNPVAGCLPILVQIPVFFSIYKVLYVTIEMRQAQFYGWIKDLSAPDPTTIFNLFGLLPFSPPSFLMIGAWPILMAITMFLQQKMSPEPADPMQAQVMKFMPLIFLFMFSSFPVGLLIYWSWNNILSIIQQYYINKFN

SEQ ID NO: 11553 - protein, 399 aa, Rickettsia akari str. Hartford
MSIISTRLNSIKPSPTLAVVKKTLELKKSGIDIIALGAGEPDFDTPDNIKEAAIKAIQDGFTKYTNVEGMPLLKQAIKDKFKRENSIDYELDEIIVSTGGKQVIYNLFMASLDKGHEVIIPAPYWVSYPDIVALSTGTPVFVNCGIEHNFKLSAEALERSITDKTKWLIINSPSNPTGASYNFEELENIAKVLRKYPHVNVMSDDIYEHIIFDDFKFYTLAQIAPDLKERIFTVNGVSKAYSMTGWRIGYGVGSKTLIKAMTIIQSQSTSNPCSISQMAAIEALNGPQDYIKPNALNFQKKRDFALSILKRVKYFECYKPEGAFYLFVKCDKILGHKTRSGKIISNSNDFAEYLLEEAKVAVVPGIAFGLEGYFRISYSTSMEEIEEACMRIERACNAL

SEQ ID NO: 11554 - protein, 385 aa, Rickettsia akari str. Hartford
MKDVILIANAGSSSLKISIFEIQNKQVKDKIYNIFLEKNDNKILCYINKKQESATDIKDDAIEMMIDLFEDWWKKQENLNLIATGHRIVHGGKNFNKPVIVNEKVSEDLRVLIPLNPLHQPYNLQVLDLFLQKYKEIVHIACFDTSFHFTNPPITKAFGLPKKYYAKGIIRYGFHGLSYKYVSSHFKEMTKEDLPIKTIIAHLGSGSSLCAIKNGLSLTSSMGFSVLDGVMMGTRTGNIDPGIVLYLIDHEKMTTKEITELLYKKSGLLGISGESSDIRTLLASNSPDAKFAIDLFVYRIVLEIGKLTAALEGIDGLIFTAGVGQNSAVIREMISAKLSWLGIKIDDTKNQKNEHLISTESSKVKVFAVPTNEELIIAEEVIKFL

SEQ ID NO: 11555 - protein, 293 aa, Rickettsia akari str. Hartford
MYNQRTISVCIIGRPNSGKSTLLNRIIGEKLSIVTPKVQTTRSIITGIITLKDTQVILYDTPGIFEPKGSLEKAMVRCAWSSLHSADLVMLIIDSLKPFDDVTHDILDKLRSLNIVPIFLLNKIDIESKYLDDIKAFLIGNHPDSLFFPISALSGKNINGLLEYITGKAQIAPWLYAEDDITDLPMRFIAAEITREQLFFNLQQELPYKLTVQTEKWEDLKDKSVKINQVIIVSRASYKTIILGKNGSKIREIGSKSRMQMERFFGFPVHLFLFVKVHELWENHPDFYQYMKI

SEQ ID NO: 11556 - protein, 627 aa, Rickettsia akari str. Hartford
MGKVIGIDLGTTNSCVAVMEGKEPKVIENAEGERTTPSIIAFANGEKLVGQSAKRQAVTNPSNTIYAVKRLIGRNFTDPMVKKDQDIVPYNIVKADNGDAWVEADSNKYSPSQISAFILQKMKETAENYLGEKVTQAVITVPAYFNDAQRQATKDAGKIAGLEVLRIINEPTAAALAYGFDKAASKTIAVYDLGGGTFDVSILEIGDGVFEVKSTNGDTFLGGEDFDTRILNHLIDVFKKESGIDLRNDPLALQRLKEAAEKAKKELSSAVTTDINLPYITADSTGPKHLNIKFTRAEFEKLVDDLIEKTVEPCITALKDAGLKASDIQEVVLVGGMTRMPKVQEAVKKFFGREPHKGVNPDEVVALGAAIQGGVLNKEVTDILLLDVTPLSLGIETLGGVFTRLIDRNTTIPTKKSQVFSTADDNQHAVTIRVFQGEREMAASNKLLGQFNLEGIPPAPRGVPQIEVTFDIDVNGIVHVSAKDKASGKEQKVTIQASGGLSDAEIEQMVKDAEQNAYEDKKRKELIEAKNAADSLVYSTEKSLTEYGDKLSSEDKGAAEEALSALKAVLESEDAALIKEKTERLTAASMKIGEAMYKAQSENQPAGENTANDDKVVDADFQDVAKK

SEQ ID NO: 11557 - protein, 463 aa, Rickettsia akari str. Hartford
MSFLRKKSFESVKEIGSSSGLSKTLGALDLILLGLGAMIGTGVFVVTGIIAAKYSGPAVMLSYAIAGITCIFVALVYTELAAMLPTSGSIYTYSYVAFGEVFAWMIGSVIILELGVAAGIVAAGWSGYVQGILAAGGINLPKELTTVPTNGGIINLPAFLISVFIGFILYLGTKDSKRLNAILVFIKMVAIFVFILAAAPHFDVTNWSNFMPFGFSNVLVGASILFLAFTGFGTIATAAEECKNPKRDIMIGIIGSLVLTTIVYVTMAGLVTGIAHFDQLNNDQPLAYALTINNSKIGSAIVATGAVCGMMTVLMMNIYGTSRIFYAIARDGLLPKSFAKLHPKYDSPYITIIIFASLSAILGGFCSTELLTQFTSMGALIDYITVTIIVVLFRVKLPDAQRPFKCPLVFIIVPFILIACAYLLFIQIYDGEFNILMAGRALIYWFITIFILYIIRSFFMTKE

SEQ ID NO: 11558 - protein, 767 aa, Rickettsia akari str. Hartford
MDEMNRINYAEALEYHEKDKPGKIAITATKSLVTQQDLSLAYSPGVAAPCLEIAKNLEDVYKYTARGNLVAVISNGTAVLGLGNLGAAASKPVMEGKAVLFKKFADIDAIDLEVNTEDPEEFINAVKYLSYSFGGINLEDIKAPECFIIEEKLKSLMDIPVFHDDQHGTAIITAAGLINAAYLTNRKLEDLKIVVNGAGAAAIACIDLLIALGADKSKIILCDTKGVVYKGRLEGMNKWKELYASDTKFRTLAESLNNADVFIGLSVKGVVTKEMVKRMANNPIIFAMANPDPEITPEDIKFVRDDAIIATGRSDYNNQINNVMGFPYIFRGALDVRATTINMEMKIAAAKAIADLARRPVPEEVSKAYSGRKMVFCKEYIIPVPFDPRLITVVAAAVAVAAIESGVAKVKDLSIGKYRKELGSRLNPTANYMNFLAEKIHNAPLKRIVFAEGEEEEVISAALMMRDEKYGHPIIIGRVERIEATLKKIGQYVSLDGIQIMNASLTDSLEKYIDYLYKRLQRKGYLYRDCAKLVETDKDIFAACIVACGDGDALLTGVTKSYIDSLENIMKVISPKHNRRILGYSIMIAKDNNIIISDNCITAYPNSLELAQIATQTAEIAKNMGITPRVAFLSCSSFGNASKATTARICEAVNILDNFSKDKKELSGMKVDFEYDGEMSVKVALDGDLRKLYKFCRLSGSANILIMPGLNSASISTELLQEFSSNSFIGPITNGFEKPVQILQATATANEILKIATFACVEAIKEV

SEQ ID NO: 11559 - protein, 319 aa, Rickettsia akari str. Hartford
MNHTNNYQIIAKRVISSAASALEKLSKNIPEDFSRIIEFLLSFKGRIILTGIGKSGYIARKIAASFSSTGMPAFYLHPAEASHGDLGMVTRHDLVIMLSNSGETKELFNVVEYCKNFSIKIAAMTMDKNSTLAKRSDFLLIVPEHPEASLIGAPTISSLIMLSLGDALITVIHEQRGFTKDDFKIYHPGGIIGANLTKIKNLMRSGDEIPLVYEDTSFADTIIIMNKKRLGCTLVTDKNQNLIGIITDGDLRRHINDQIHLKTASSVMTKNPIYISSEIFAKEALNLMQAKNITNIPIVDDNIIIGIIHIHDLLRMGVS

SEQ ID NO: 11560 - protein, 410 aa, Rickettsia akari str. Hartford
MNQQLNNLTLPIYMDYQATTPLDPRVMEAMLPYFTTKFGNPHSRSHSFGWEAERAVEEARSRVARLIGADTKEIIFTSGATESNNLAIKGVAKFYGNKKNHIITVVSEHKCVLDACRYLEQEGINITYLPVKPNGIIALETLKNAITDQTMLVSVMAVNNEIGVVQPLKEIGKICRARGVFFHSDIAQGFGKIPIDVNEFNIDLASISGHKIYGPKGIGGLYVRKKPRVRVTPLINGGGQERGMRSGTLPTPLIVGLGVAAEIAYSEMEKDTKHVNYLFDRFLNNIHSRISEVYLNGAKDPRYKGNLNLSFAGVEGESIILAIKDLAVSSGSACTSASLEPSYVLRSMGIGEELAHTSIRFGIGRFTTEQEIDYAVNLICSKIDKLRKLSPLWEMMQEGIDLKKIKWAVH

SEQ ID NO: 11561 - protein, 371 aa, Rickettsia akari str. Hartford
MIYLDHNATTFIDPKVKEYIISLMNKELNPSSIHRAGVFARNVIEEARFQLVAALGIALSSREYDITFTSSGTESNNLIMKNFYDGDIFISAIEHLSIYNHMEHAPNIKIIRVNNQGLVDLEHLEELLAQSNAAKKLVSVMMANNESGVLQDITTISEIAKKYYAKFHSDLVQSFGRISINIKELGLDFATISGHKIGGGHGGGALISNSNFQVTPMIIGGGQEKGIRSGTENVLAIAGLGLAAELITKDISEKYIKIKSLQEYLEQKLKKYPNVNIVSNNIARLPNTTLFTVQNTDAQVKLIGFDLRNICISSGSACSSGKISKSHVLNNMGVVEEEAKSSIRVSLSHTNTVSDIKAFIKAFEEVYNILV

SEQ ID NO: 11562 - protein, 410 aa, Rickettsia akari str. Hartford
MKNFNLSEELIIALETMNITEPTEIQKQSIPVAMAGSDILASSQTGSGKTLAYLLPLIDSFIKNKTTALILVPTRELATQIHSTLNKVTTSYKMNSAVLIGGEPMHKQFMQLKKNPKAIIGTPGRIIDHLNRGSLKIDRIGITVLDEMDRMLDMGMKEQLEEINKFLPEKRQVLMFSATMPKHIIVVSQKYLNNPVRITVGAANKAAAEIKQESIHVSDKEKFSELTKQLGNREGSVIIFVKTKRSADQLAKMLKYENHKAEAIHGDLSQRQRERVILSFRKSNHRIMVATDVAARGLDIPHTQHVINYDLPMCPEDYLHRIGRTGRAGATGHALSFISPDDIIRWRAIDRLVNKGESTPRSEFRVNKNNRKRSFGKRVGGEGKKFNSFDNSRTRTFDGNIYGNKRKKVS

SEQ ID NO: 11563 - protein, 70 aa, Rickettsia akari str. Hartford
MATNIVGKVKWYNSTKNFGFIEQENGGKDVFVHKSAVEATGLHSLEEGQDVIFDLEEKQGKAYAVNLRIK

SEQ ID NO: 11564 - protein, 568 aa, Rickettsia akari str. Hartford
MIKYLKFYKKDLIVVMVSLLSVSASLLLIGSVFRNLVDNGLSQDHILSVDKSILYICLLITILSIASFFRSYFINNIAEKAVNQIRKEAYSNLINYEIEEFEELKIGDIISRLTNDIDQISTLIVNFLSFFIRNSVMLIGGVTLMFFESFKLASIVIITIPVLLIPLIKFGKHVKALSKKALESKSLLASDIDETFNNIRAIYVFNNQTNKIAHFDTKLQNYLTYCKTRLKIRALFFAISIAVIFLAITLVVWIGALDIVKGHLSAGQIISFIYYAIIAGVSCGGIFELLSEIHLPVTALERIITIIDKTPITHNNYLELNNSNAVSIEFRNVNFTYHSRPHLTIINNMSFKINANQFVGIVGRSGGGKSTLMQLLLRFYRQESGTILINDQDITLLNPTEIRKLIAYVPQEASIFSGTIRSNIIFGNNEANDDEINEILKITGIEEFSATLHDCINAKIGEKGVRLSGGQKQRIAIARALIHKPHILLLDEAMSALDTMSEQKLLNSIRNIMKGKIIISIAHRISSIESADNILVVDKGAIVAEGSHNNLSKNSEIYRNICKEQLTV

SEQ ID NO: 11565 - protein, 401 aa, Rickettsia akari str. Hartford
MALIIQKFGGTSVANIDRIKQIVSIIKAAIAKNNQVIVVVSAMAGVTNQLVTLCNEVSSLNSISQFAEYDVALSSGEIVTASLLALALQEKDIKARSFLAWQLPILTNNNHSKSVVESVTTDLLKKCLQLNIVPIIAGFQGINKSNRLTTLGRGGSDTTAALIAAAMKADRCDIYTDVEGIFTADPRIIPNAKRIKEIDFLEMLELASSGAKVLHPRAVELVMRYKIDMCVLSTFSPNKEGTLITSKDKNMENGIINSITSNKNLLKISVKSISLSFLQVANIITQNNNHIEFMQEVNNNEEYSFIASLTDKNNLQALLTNLKNDKQIQDFTFDAEIATISLIGYGIKNDCKVLETILSKLTKDNINVNMIQLSEVKITLLINDQDVEKTIFNLYNLFKIS

SEQ ID NO: 11566 - protein, 104 aa, Rickettsia akari str. Hartford
MLENKNFEFIENALKNNKVVLFMKGTQEAPMCGFSAKVVAILNKLGVEFRDINVFVNPEFREDLKKFSDWPTFPQLYIKGALVGGCDIATELYNNGELEKILRE

SEQ ID NO: 11567 - protein, 392 aa, Rickettsia akari str. Hartford
MIKPVYITYAKRTAFGSFMGSLSTTSAPMLAAPLIKDMIQNSKIDPALVGEVILGQVITGGSGQNPARQTLIHAGIPKEVPGYTINKVCGSGLKSVALAANAIMTGDNEIVIAGGQENMSLSMHGSYIRAGAKFGDIKMVDLMQYDGLTDVFSGVFMGITAENVSKQFNISRQEQDEFALSSHKKAAKAQLAGIFKDEILPIEVTVKKTTSLFKHDETIRPDTSLEILSKLCPAFDKNGVVTAGNASSINDGAACLMVVSEEALKKHNLMPLARIVSYASAGVDPSIMCTAPVPASQKALSKAGWSVNDLEIIEVNEAFAAQSIYVNREMKWDMDKVNINGGAIAIGHPIGASGGRILITLIHSLRRAKAKKGLVTLCIGGGIGMAMCVEAV

SEQ ID NO: 11568 - protein, 330 aa, Rickettsia akari str. Hartford
MNFIDEVKIYIKGGNGGNGCVSFHREKFIDRGGPDGGDGGRGGSVIFRSNHHLNTLVNYRYKQHFTAENGENGKGSNRSGKSGKSLVLDVPIGTQIFSEDGNILLHDFTEDDQSFEIIKGGSGGLGNSHFKTSVNQAPRKRTEGEIAEEMWIHLSLKLLSDVGLVGLPNAGKSTFLSVVTAAKPKIADYPFTTLVPHLGVVYVDDEEFVIADIPGLIEGAHQGHGLGDKFLKHIERCNVLIHLIDGSSNDVVVDYNTVRLELGSYSDHLEHKIEIICLNKCDVLTDEEIQEKINKLQQATNKEVFSISTYTNLGVNKIVKLALKIIKNQE

SEQ ID NO: 11569 - protein, 373 aa, Rickettsia akari str. Hartford
MKIVALKEKAKHESRAAITPEVAELLVKKGYAVTVEKDIGLHAGFLDEEYIARGAKISSVPLEIISDADIILKVQPSSVTDKYSELEFAKKGAIIVGLLSPYLNHEYIKAAAKKNLTTFAMEFVPRITKAQNMDALSSQSNLVGYRAVIEASYHYTRAFPMMMTAAGTISPCKTLVLGIGVAGLQAIATAKRLGSIVAGYDVRAATKEQVESLGAKFVSLELQEDLQDKSGYANESSGDYKAKQAEFLAKIIKGYDIVITTAQIPGKKAPLLVTEKMLESMKYGSVIVDISTSTGGNVEGSEPDKIVNKHGVTIIGLSNLATKIATDSSKLYAKNLYNFLTYALQDGKFNMDDGLVRDMLITKDGKIVSEKVK

SEQ ID NO: 11570 - protein, 295 aa, Anabaena sp.
DVPVNLYRPNAPFIGKVISNEPLVKEGGIGIVQHIKFDLTGGNLKYIEGQSIGIIPPGVDKNGKPEKLRLYSIASTRHGDDVDDKTISLCVRQLEYKHPESGETVYGVCSTYLTHIEPGSEVKITGPVGKEMLLPDDPEANVIMLATGTGIAPMRTYLWRMFKDAERAANPEYQFKGFSWLVFGVPTTPNILYKEELEEIQQKYPDNFRLTYAISREQKNPQGGRMYIQDRVAEHADQLWQLIKNQKTHTYICGLEGMEEGIDAALSAAAAKEGVTWSDYQKDLKKAGRWHVETY

SEQ ID NO: 11571 - protein, 136 aa, Pyrobaculum aerophilum
  misc_feature (4)..(4): Xaa can be any naturally occurring amino acid
  misc_feature (91)..(91): Xaa can be any naturally occurring amino acid
  misc_feature (93)..(93): Xaa can be any naturally occurring amino acid
  misc_feature (103)..(103): Xaa can be any naturally occurring amino acid
  unsure (1)..(136): unsure at all Xaa locations
KWVXSTKYVEAGELKEGSYVVIDGEPCRVVEIEKSKTGKHGSAKARIVAVGVFDGGKRTLSLPVDAQVEVPIIEKFTAQILSVSGDVIQLXDXRDYKTIEVPXKYVEEEAKGRLAPGAEVEVWQILDRYKIIRVKG

SEQ ID NO: 11572 - protein, 421 aa, Saccharomyces cerevisiae
KIKDPKILGIDPNVTQYTGYLDVEDEDKHFFFWTFESRNDPAKDPVILWLNGGPGCSSLTGLFFALGPSSIGPDLKPIGNPYSWNSNATVIFLDQPVNVGFSYSGSSGVSNTVAAGKDVYNFLELFFDQFPEYVNKGQDFHIAGASYAGHYIPVFASEILSHKDRNFNLTSVLIGNGLTDPLTQYNYYEPMACGEGGEPSVLPSEECSAMEDSLERCLGLIESCYDSQSVWSCVPATIYCNNAQLAPYQRTGRNVYDIRKDCEGGNLCYPTLQDIDDYLNQDYVKEAVGAEVDHYESCNFDINRNFLFAGDWMKPYHTAVTDLLNQDLPILVYAGDKDFICNWLGNKAWTDVLPWKYDEEFASQKVRNWTASITDEVAGEVKSYKHFTYLRVFNGGHMVPFDVPENALSMVNEWIHGGFSL

SEQ ID NO: 11573 - protein, 135 aa, Methanocaldococcus jannaschii
VIIMPGTKQVNVGSLKVGQYVMIDGVPCEIVDISVSKPGKHGGAKARVVGIGIFEKVKKEFVAPTSSKVEVPIIDRRKGQVLAIMGDMVQIMDLQTYETLELPIPEGIEGLEPGGEVEYIEAVGQYKITRVIGGK

SEQ ID NO: 11574 - protein, 314 aa, Spinacia oleracea
QIASDVEAPPPAPAKVEKHSKKMEEGITVNKFKPKTPYVGRCLLNTKITGDDAPGETWHMVFSHEGEIPYREGQSVGVIPDGEDKNGKPHKLRLYSIASSALGDFGDAKSVSLCVKRLIYTNDAGETIKGVCSNFLCDLKPGAEVKLTGPVGKEMLMPKDPNATIIMLGTGTGIAPFRSFLWKMFFEKHDDYKFNGLAWLFLGVPTSSSLLYKEEFEKMKEKAPDNFRLDFAVSREQTNEKGEKMYIQTRMAQYAVELWEMLKKDNTYVYMCGLKGMEKGIDDIMVSLAAAEGIDWIEYKRQLKKAEQWNVEVY

SEQ ID NO: 11575 - protein, 314 aa, Spinacia oleracea
QIASDVEAPPPAPAKVEKHSKKMEEGITVNKFKPKTPYVGRCLLNTKITGDDAPGETWHMVFSHEGEIPYREGQSVGVIPDGEDKNGKPHKLRLYVIASSALGDFGDAKSVSLCVKRLIYTNDAGETIKGVCSNFLCDLKPGAEVKLTGPVGKEMLMPKDPNATIIMLGTGTGIAPFRSFLWKMFFEKHDDYKFNGLAWLFLGVPTSSSLLYKEEFEKMKEKAPDNFRLDFAVSREQTNEKGEKMYIQTRMAQYAVELWEMLKKDNTYFYMCGLKGMEKGIDDIMVSLAAAEGIDWIEYKRQLKKAEQWNVEVY

SEQ ID NO: 11576 - protein, 153 aa, Lupinus luteus
GALTESQAALVKSSWEEFNANIPKHTHRFFILVLEIAPAAKDLFSFLKGTSEVPQNNPELQAHAGKVFKLVYEAAIQLEVTGVVVTDATLKNLGSVHVSKGVADAHFPVVKEAILKTIKEVVGAKWSEELNSAWTIAYDELAIVIKKEMDDAA

SEQ ID NO: 11577 - protein, 303 aa, Anabaena sp.
TQAKAKHADVPVNLYRPNAPFIGKVISNEPLVKEGGIGIVQHIKFDLTGGNLKYIEGQSIGIIPPGVDKNGKPEKLRLYSIASTRHGDDVDDKTISLCVRQLEYKHPESGETVYGVCSTYLTHIEPGSEVKITGPVGKEMLLPDDPEANVIMLATGTGIAPMRTYLWRMFKDAERAANPEYQFKGFSWLVFGVPTTPNILYKEELEEIQQKYPDNFRLTYAISREQKNPQGGRMYIQDRVAEHADQLWQLIKNQKTHTYICGLRGMEEGIDAALSAAAAKEGVTWSDYQKDLKKAGRWHVETY

SEQ ID NO: 11578 - protein, 304 aa, Anabaena sp.
MTQAKAKHADVPVNLYRPNAPFIGKVISNEPLVKEGGIGIVQHIKFDLTGGNLKYIEGQSIGIIPPGVDKNGKPEKLRLYSIASTRHGDDVDDKTISLCVRQLEYKHPESGETVYGVCSTYLTHIEPGSEVKITGPVGKEMLLPDDPEANVIMLATGTGIAPMRTYLWRMFKDAERAANPEYQFKGFSWLVFGVPTTPNILYKEELEEIQQKYPDNFRLTYAISREQKNPQGGRMYIQDRVAEHADQLWQLIKNEKTHTYICGLRGMEEGIDAALSAAAAKEGVTWSDYQKDLKKAGRWHVETY

SEQ ID NO: 11579 - protein, 70 aa, Arabidopsis thaliana
AKGKHYRGVRQRPWGKFAAEIRDPAKNGARVWLGTFETAEDAALAYDRAAFRMRGSRALLNFPLRVNSGE

SEQ ID NO: 11580 - protein, 417 aa, Brassica rapa
  misc_feature (171)..(171): Xaa can be any naturally occurring amino acid
  unsure (1)..(417): unsure at all Xaa locations
MPRSLEPLDLGIQIPYHFRCPISLELMRDPVTVCTGQTYDRTSIESWVSTGNNTTCPVTRAPLSDFTLIPNHTLRRLIQEWCVANRSNGVERIPTPKQPADPTSVRALLSQASATSGAHVSARSRAAALRRLRGFARDSEKNRVLIAAHNAKEILIRILFSDDIDSSELVXESLALLVMFPMTEHDKCVSIISDPGRVEFLTRLLFDSSVETRVNAAALIEMAVTGSKETVSSSESIFEGVLDLLRNPASSYPRRALKIGIKALFALCLSKNTRHVAVSAGAPEILIDRLAAGLDRCDTERALATVEILCRSPEGCAAFGEHALTVPVLVKTILRVSDRATEYAAGALLALCTAEERWRDEAAAAGVVVQLLLMVQSECTERAKRKAQKLLKLLRDSWPDYSFANSDDFACSEVVPF

SEQ ID NO: 11581 - protein, 154 aa, Brassica rapa
MEFVRFPIVSILEDMLEVPEEHNEKSRNNPSRAYMRDAKAMAATPADVIEHANAYVFVVDMPGIKGEEIKVQVEDENVLVVSGERQRENKESEGVKYVRMERRMGKFMRKFQLPENADLEKISAVCNDGVLKVTVQKLPPPEPKKPKTIQVQVA

SEQ ID NO: 11582 - protein, 432 aa, Brassica rapa
MAEGEVTPPPRKVLIISAGASHSVALLSGEVVCSWGRGEDGQLGHGDAEDRSSPTQLSALDEHQIVSVTCGADHTVAYSQSRLEVYSWGWGDFGRLGHGNSSDLFTPLPIKALHGVMIKQIACGDSHCLAVTMDGEVQSWGRNQNGQLGLGNTEDSLVPQKIQAFEGIRIKMVAAGAEHTAAVTEDGDLYGWDGKIWKFGISDRNDRLFLKEYLCCVRDVDGAVMQPHISFLLWSIIYLWMEQIWPTRTWRLGGSPCFLTNWKRSATAFFSQISGGWRHTMPLTSDGKLYGWGWNKFGQVGVGNNLDQCSPVQVRFPDDQKVVQVSCGWRHTLAVTERNNVFAWGRGTNGQLGIGESLDRNSPNIIEALSVDGASGQHIESSSFDPSSGKSWVSPSERYAVVPGETGQTDSTSKGNGGDISVPQTDAKRVRL

SEQ ID NO: 11583 - protein, 256 aa, Bacillus subtilis
METQALQKVEQYALNKLNIFVSSKIRYVLRSILASMFIGFGITAASKTGSYFSMADSPFAFPAAAVTFGAAILLIAYGGGDLFTGNTFYFTYTALRKKIRWRDTLYLWMSSYAGNLIGAILFAILISATGLFEEASVHSFLIHLAEHKMEPPASELFFRGMLCNWLVCLAFFIPMSLKGEGAKLFTMMLFVFCFFISGFEHSIANMCTFAISLLIEHPDTVTVMGAVRNLIPVTLGNLTAGMVMMGWMYYTLNPDK

SEQ ID NO: 11584 - protein, 382 aa, Bacillus subtilis subsp. subtilis
MIYLDYAATTPICEEALTVYQKLSMDMYGNASSLHDAGGKAKHILEYCREKIANIIGGEASGIYFTSGGTESNFLAIQSLLNGLPKTKRHFITTAMEHQSIHNCAAFLEQQGYDVTVIEPNEYGLITEEILLTHIRPETGLVSIQHANSETGIIQPIQHLSSYLHNKGILLHCDAVQTFGKIPINTKNLGVDALSMSSHKIHGPKGVGAVYIRPDVPWKPVYPLTTHEYGFRAGTVNVPGIGAFTAAAELIVSEMEKQISRNEALRTYFLDQIRIRSLPVTLAADTSKAECLPHIIGCFFHSFEGQYVMLECNRSNICISTGSACSAGYHGPSETMKALRKTEQEALQFIRISFGRHTTAEQLEQLLHTFTVLWEQKKGEFD

SEQ ID NO: 11585 - protein, 406 aa, Escherichia coli K12
  misc_feature (405)..(405): Xaa can be any naturally occurring amino acid
  unsure (1)..(406): unsure at all Xaa locations
EKDKIKFLLVEGVHQKALESLRAAGYTNIEFHKGALDDEQLKESIRDAHFIGLRSRTHLTEDVINAAEKLVAIGCFCIGTNQVDLDAAAKRGIPVFNAPFSNTRSVAELVIGELLLLLRGVPEANAKAHRGVWNKLAAGSFEARGKKLGIIGYGHIGTQLGILAESLGMYVYFYDIENKLPLGNATQVQHLSDLLNMSDVVSLHVPENPSTKNMMGAKEISLMKPGSLLINASRGTVVDIPALCDALASKHLAGAAIDVFPTEPATNSDPFTSPLCEFDNVLLTPHIGGSTQEAQENIGLEVAGKLIKYSDNGSTLSAVNFPEVSLPLHGGRRLMHIHENRPGVLTALNKIFAEQGVNIAAQYLQTSAQMGYVVIDIEADEDVAEKALQAMKAIPGTIRARLLYXS

SEQ ID NO: 11586 - protein, 555 aa, Saccharomyces cerevisiae
SEITLGKYLFERLKQVNVNTVFGLPGDFNLSLLDKIYEVEGMRWAGNANELNAAYAADGYARIKGMSCIITTFGVGELSALNGIAGSYAEHVGVLHVVGVPSISSQAKQLLLHHTLGNGDFTVFHRMSANISETTAMITDIATAPAEIDRCIRTTYVTQRPVYLGLPANLVDLNVPAKLLQTPIDMSLKPNDAESEKEVIDTILALVKDAKNPVILADACCSRHDVKAETKKLIDLTQFPAFVTPMGKGSISEQHPRYGGVYVGTLSKPEVKEAVESADLILSVGALLSDFNTGSFSYSYKTKNIVEFHSDHMKIRNATFPGVQMKFVLQKLLTNIADAAKGYKPVAVPARTPANAAVPASTPLKQEWMWNQLGNFLQEGDVVIAETGTSAFGINQTTFPNNTYGISQVLWGSIGFTTGATLGAAFAAEEIDPKKRVILFIGDGSLQLTVQEISTMIRWGLKPYLFVLNNDGYTIEKLIHGPKAQYNEIQGWDHLSLLPTFGAKDYETHRVATTGEWDKLTQDKSFNDNSKIRMIEIMLPVFDAPQNLVKQAKLT

SEQ ID NO: 11587 - protein, 472 aa, Arabidopsis thaliana
KGITCVMKFGGSSVASAERMKEVADLILTFPEESPVIVLSAMGKTTNNLLLAGEKAVSCGVSNASEIEELSIIKELHIRTVKELNIDPSVILTYLEELEQLLKGIAMMKELTLRTRDYLVSFGECLSTRIFAAYLNTIGVKARQYDAFEIGFITTDDFTNGDILEATYPAVAKRLYDDWMHDPAVPIVTGFLGKGWKTGAVTTLGRGGSDLTATTIGKALGLKEIQVWKDVDGVLTCDPTIYKRATPVPYLTFDEAAELAYFGAQVLHPQSMRPAREGEIPVRVKNSYNPKAPGTIITKTRDMTKSILTSIVLKRNVTMLDIASTRMLGQVGFLAKVFSIFEELGISVDVVATSEVSISLTLDPSKLWSRELIQQELDHVVEELEKIAVVNLLKGRAIISLIGNVQHSSLILERAFHVLYTKGVNVQMISQGASKVNISFIVNEAEAEGCVQALHKSFFESGDLSELLIQKK

SEQ ID NO: 11588 - protein, 275 aa, Saccharomyces cerevisiae
NPKSSLADGAHIGNYQIVKTLGEGSFAKVKLAYHTTTGQKVALKIINKKVLAKSDMQGRIEREISYLRLLRHPHIIKLYDVIKSKDEIIMVIEYAGNELFDYIVQRDKMSEQEARRFFQQIISAVEYCHRHKIVHRDLKPENLLLDEHLNVKIADFGLSNIMTDGNFLKTSCGSPNYAAPEVISGKLYAGPEVDVWSCGVILYVMLCRRLPFDDESIPVLFKNISNGVYTLPKFLSPGAAGLIKRMLIVNPLNRISIHEIMQDDWFKVDLPEYLL

SEQ ID NO: 11589 - protein, 448 aa, Escherichia coli
EIVVSKFGGTSVADFDAMNRSADIVLSDANVRLVVLSASAGITNLLVALAEGLEPGERFEKLDAIRNIQFAILERLRYPNVIREEIERLLENITVLAEAAALATSPALTDELVSHGELMSTLLFVEILRERDVQAQWFDVRKVMRTNDRFGRAEPDIAALAELAALQLLPRLNEGLVITQGFIGSENKGRTTTLGRGGSDYTAALLAEALHASRVDIWTDVPGIYTTDPRVVSAAKRIDEIAFAEAAEMATFGAKVLHPATLLPAVRSDIPVFVGSSKDPRAGGTLVCNKTENPPLFRALALRRNQTLLTLHSLNMLHSRGFLAEVFGILARHNISVDLITTSEVSVALTLDTTGSTSTGDTLLTQSLLMELSALCRVEVEEGLALVALIGNDLSKACGVGKEVFGVLEPFNIRMICYGASSHNLCFLVPGEDAEQVVQKLHSNLFED

SEQ ID NO: 11590 - protein, 449 aa, Escherichia coli
EIVVSKFGGTSVADFDAMNRSADIVLSDANVRLVVLSASAGITNLLVALAEGLEPGERFEKLDAIRNIQFAILERLRYPNVIREEIERLLENITVLAEAAALATSPALTDELVSHGELMSTLLFVEILRERDVQAQWFDVRKVMRTNDRFGRAEPDIAALAELAALQLLPRLNEGLVITQGFIGSENKGRTTTLGRGGSDYTAALLAEALHASRVDIWTDVPGIYTTDPRVVSAAKRIDEIAFAEAAEMATFGAKVLHPATLLPAVRSDIPVFVGSSKDPRAGGTLVCNKTENPPLFRALALRRNQTLLTLHSLNMLHSRGFLAEVFGILARHNISVDLITTSEVSVALTLDTTGSTSTGDTLLTQSLLMELSALCRVEVEEGLALVALIGNDLSKACGVGKEVFGVLEPFNIRMICYGASSHNLCFLVPGEDAEQVVQKLHSNLFEDK

SEQ ID NO: 11591 - protein, 446 aa, Escherichia coli
SEIVVSKFGGTSVADFDAMNRSADIVLSDANVRLVVLSASAGITNLLVALAEGLEPGERFEKLDAIRNIQFAILERLRYPNVIREEIERLLENITVLAEAAALATSPALTDELVSHGELMSTLLFVEILRERDVQAQWFDVRKVMRTNDRFGRAEPDIAALAELAALQLLPRLNEGLVITQGFIGSENKGRTTTLGRGGSDYTAALLAEALHASRVDIWTDVPGIYTTDPRVVSAAKRIDEIAFAEAAEMATFGAKVLHPATLLPAVRSDIPVFVGSSKDPRAGGTLVCNKTENPPLFRALALRRNQTLLTLHSLNMLHSRGFLAEVFGILARHNISVDLITTSEVSVALTLDTTGSTDTLLTQSLLMELSALCRVEVEEGLALVALIGNDLSKACGVGKEVFGVLEPFNIRMICYGASSHNLCFLVPGEDAEQVVQKLHSNLFEK

SEQ ID NO: 11592 - protein, 232 aa, Campylobacter jejuni
GKLESIKSKGQLIVGVKNDVPHYALLDQATGEIKGFEVDVAKLLAKSILGDDKKIKLVAVNAKTRGPLLDNGSVDAVIATFTITPERKRIYNFSEPYYQDAIGLLVLKEKKYKSLADMKGANIGVAQAATTKKAIGEAAKKIGIDVKFSEFPDYPSIKAALDAKRVDAFSVDKSILLGYVDDKSEILPDSFEPQSYGIVTKKDDPAFAKYVDDFVKEHKNEIDALAKKWGLD

SEQ ID NO: 11593 - protein, 421 aa, Corynebacterium crenatum
MALVVQKYGGSSLESAERIRNVAERIVATKKAGNDVVVVCSAMGDTTDELLELAAAVNPVPPAREMDMLLTAGERISNALVAMAIESLGAEAQSFTGSQAGVLTTERHGNARIVDVTPGRVREALDEGKICIVAGFQGVNKETRDVTTLGRGGSDTTAVALAAALNADVCEIYSDVDGVYTADPRIVPNAQKLEKLSFEEMLELAAVGSKILVLRSVEYARAFNVPLRVRSSYSNDPGTLIAGSMEDIPVEEAVLTGVATDKSEAKVTVLGISDKPGEAAKVFRALADAEINIDMVLQNVSSVEDGTTDITFTCPRSDGRRAMEILKKPQVQGNWTNVLYDDQVGKVSLVGAGMKSHPGVTAEFMEALRDVNVNIELISTSEIRISVLIREDDLDAAARALHEQFQLGGEDEAVVYAGTGR

SEQ ID NO: 11594 - protein, 776 aa, Halobacterium sp. NRC-1
MIGAGIFVLPKIAAEQAGPASMVSFFVGGMVSLFAALSLSELATGMPKAGGSYYYVNRALGPFFGSIVGWGMWAGLTFASAFYMIGFGQYLLPGLGEYVGVLAGWGDLGITVAALAMAALLTAVNYYGVKETSALQNVIVLTLVGLVLAFLGLGAVTGPTITEFNPNGWPAVAATIGTVYVTFIGFEVIATSAEEIKNPSRNLPLAMIAAVVTPTLMYVGVMFVSTGTIDIPVLAGSDVPVALVAREIFQPLAGAVSWLPFVSVQPATAGSVGALAMIVGAVLATVSSANASILSAARVNFAMGRDKILVNWLNEVHDRFRTPYRAIAATGVITLLLIGIGVGVGTLAEVASFMYLVTYALVHVSVVVLRRANPDTYDPAFRIPAVLYPVVPVLGAAACVAVLVQMSVTFSPMTIGVASVAVVLPVTPTPVGAIGTVLVAFGIAWYYCYARARAPSQSLVGDALAPSSSPDTDTPDTYTVVVPVANPDTEHDLLRMAAASAHAHTDAHAEVIAVNVIEVPRQTSLSQDLAFEEERVERQQELLDAASAAAADLDVRLRTRAVASHDTGAAILDVIEDTAADHVLLGWGGTRRRDHVLGSTIDPVVGHASCDATLVRLGPAAAGDASDIMVLAGEGPHAPVAARRAAEFVAADETDASLTLLNVQPPADDDDDADASATERGAAVIDALAERAGIKYMTYDTEVVVSTDTEAAVIDAAADFDMVYAGATRSGPVSQAVFGSIPEAVGAGVDQTVVMARGPDNTPMSVRDAITRRFGG

SEQ ID NO: 11595 - protein, 201 aa, Halobacterium sp. NRC-1
MDLSGVAAHRPVRVTDQDRAAAVLVPVVDAADGAALVFTKRAADLSDHPGQMSFPGGGCEPRDPDCRSTAAREANEEIGLGRDEVAFAGQLDDIATITEYAVTPFVGRVPDREFDPDEREVDEVAVLSVSALTDPSNYDLEKRIHPEYGTALVHFFHVDGYTVWGATARILVQFLDLAAGWTPPDRDPTVVELDPDYPETS

SEQ ID NO: 11596 - protein, 125 aa, Halobacterium sp. NRC-1
MAQDAVDDIVDAAIENNEVVLFMKGTPAAPQCGFSERAIRLISDYRPDVHTVDVLQSTDEFRAALERHSGWETTPQAFVDGSFVGGSDILAELADRGDLADELNADGVDTTADDAALDADIDAPF

SEQ ID NO: 11597 - protein, 373 aa, Halobacterium sp. NRC-1
MTEFSDRVAQVSISGIRAVFEAAGEDAINLGLGQPDFPTPDHARQAAVDAIESGAADGYTSNRGTAALVDAIVEKHARDQGVDVAPAGVIATAGGSEALHLAMEAHVDPGDEVLFPDPGFVSYDALTRMAGGNPVGLPLRDDLTLAPETVEDHITDDTAAFVVNSPANPTGAVQSPADMRAFARIADEHDVLCISDEVYEHIVFEGEHRSPMEFADTDNVVVVNACSKTYSMTGWRLGWVAASERRAERMLRVHQYVQACASAPAQYAAEAALSGPQGVVDEMVAAFEARRDVLLDGLEAMGLDVPTPGGAFYAMPTVPDGWIDEVVDRGVVVVPGSAFGDHGAGTARISYATDMATLRDAIDVMRAATAAVQ

SEQ ID NO: 11598 - protein, 308 aa, Halobacterium sp. NRC-1
MATLELKDVHAEVAEDGGEKILDGVDLEIPSGEIHALMGPNGSGKSTTAKIIAGHPAYDVTDGEVLFTIEDDDFDGAEELPADDRTFDLLGLEPNERAALGIFLAFQYPAEIEGVTLVNFLRTALNAKLDEREELLFEDDDEDADDAADDDEDAGYETSPMEGPADDGEIGVADFQEILSEKMETLDMDEKFANRYLNAGFSGGEKKQNEVLQAAILEPSIAVLDEIDSGLDIDRLQDVSTGINALRDEQDTGILQITHYQRILDYVEPDRVHIMLDGEVVMEGDAELAEKLEDEGYDWVRDQVYETA

SEQ ID NO: 11599 - protein, 380 aa, Halobacterium sp. NRC-1
MNFSTRVTSVEPSATLAVSTLASELEADGVDVVDLSVGEPDFDTPESIVDAGKAAMDAGHTGYAPSNGVPELRDAIAEKLQGDGLDYEAGNVIVTPGAKQALYETFQAVVDEGDEVALLDPAWVSYEAMAKLAGGELNRVDLAPHDFQLEPALDDLADAVSDDTELLVVNSPSNPTGAVYSRAAMEGVRDLAVDHDITVISDEIYQRVNYGPAHVSLAGLDGMFERTVTINGFSKAYSMTGWRLGYLAGPEALVDQAGKVQSHSVSSAANFIQRAGVEAIRHTDDAIDEMVAAFESRRDLLVDLFAEHGTDVSTPDGAFYLMLPVADDDQAWCQDALKDAHVATVPGSAFGAPGYARLSYAASTDRLEAAVDRLAAEGYL

SEQ ID NO: 11600 - protein, 360 aa, Halobacterium sp. NRC-1
MRGAAPDAVLDAVQSGDPLPGTGGFAGELPDGRLARDVLGRRLCYVDGDEWSHDPRDLAAPTLLPAGHVRAPGATGSGRPVWSLPEPAPTGDEPVERVRDAVAGALGGVPAGDDLAVAFSGGVDSALAAAALDAPLYVVGYADSSDIAAARESAAAMGRADDLRVHEVTLADIEAAVPTVARAIGRTNAMAVQIALPLFLVAARAAADGYSRLVVGQGADELFGGYAKVAKAPTDPRTDADTVRGARRETVQSLPAQLERDLRALRAAGVEPVTPLLHDDVVRAALALPGEWLVSGDTRKRALREAARSWLPDAVADRDKKAVQYGSLVAREVDRLARQAGFKRRMDDHVTQYVEARIEE

SEQ ID NO: 11601 - protein, 522 aa, Halobacterium sp. NRC-1
MDSVGDYVIGGRDVGPVVTGFSERASEMSGWLTLGVPGDAYTTGIMAFYNGVGMIPADLAAWAGLAKRLRKYSEIVRAVTLPTFFATRLNDDTGVVKAVSSFVLIVFEGSYVGAQIVAAGTLLRVLTGVDMWVGIVAGGVIVVGYTMLGGYFAVAWSDYFQGAIILAAFAILPIIAYATWGLPFADLAAMDNGASLTSITGGATGWAALFGIISYAAVGLGIPGNPHIMVRFMGIDRVRNVRTAAVVAQLFMFVAYIGAALVGLYALTQFGGLENTDNAMPLVTLELLPSAVAGVVLAAALAAMMSSADSQLLVATSAVVEDVYHGFLNEQATEAQLVRYSRYVTLAIGFASIGFAYVARNTPIYELVLNYAWGGLGAALGPLLIAVLWWRRVTAAGAVASMVTGTATMILWTQWPTILGPETVNSFHPAVSGMLTVYGLFPAFVVSAVVLVVVSLLTTPPDQDDVSEAFDMMHRPLAAITDDDGDGSEYATDGGRPDPAPITEHDSIRSHVADTDYWTDDD

SEQ ID NO: 11602 - protein, 544 aa, Halobacterium sp. NRC-1
MSRRVWYLLGLEDATWPERALFAVTMAAMLALAVAGFRRPTQLSTVLNGAFDWVLRYFGWWFILLGFVLLVLVLGVTWSRYGRLRIGGPDAEPEFDTFSWLSMVFTVGFGASILIWGVGEPVSIVQQPPPEPWPVGGASAKSLALAFMFVHEVFPGLAMWYLPVALAFGIIVYTRGIGEYKVSTMLAGIMPAGDHPVVLWAVDVAAIIATIGGIATTLGFSSQTMAAILGGVFGLQSAWLTYGIFAAIGAVFLVDVWLGLRSGIRNAARATMLLIGVAMAVLVVVGPTLFTFQLGLDATGVWLNNVVRLMLYTDPTAAGHWAANWTGFWWAWWAAWSIFVGSFVARVSKGRTVREMFIVLVVAPGVLSWVQHTLIGGWVLAPDYVGPVGNALSANGIPAAIARALSITPYGSVLALLFVLVIAGYIITSLDSAVFMIAAITLGDEDPNPRNRACWGLLLAAFGVMSLELSSFEAIEALSPVLALPFTLFLLVIVYASYVAAREYARDRDDVAVSPGGLLSSRSSASDTDPEAGSGTDAAPTGDD

SEQ ID NO: 11603 - protein, 391 aa, Halobacterium sp. NRC-1
MRDGRDPAGMPSERAAAVTPFAAMDVLERAADRADVIHMEVGEPDFAPPAAATEAAVDALRAGDDDYTTSRGRRSLRDAISGYYAAEYGVSVPAERIVVTPGSSPALLTVLLATVDPGSAVVLSDPHYACYPNFVRLADGVVRTVGLAPDAGFQPAVSDYDAAIGDDTAAMLLNSPGNPTGAVIDGESLSALVALADRTDTAVVSDEIYHGLAFDAAAHSVLEYTDDAFVIDGVSKRYGMTGWRLGWVVCPRRYVDTINAIAQNTLICAPSFVQAGAEAAIRHGTDWLDGVRADYRTRRDILCAAAERWGFDPGYTPAGAYYMLLDVSRLGAAPAVADALLETAGVAVTPGPDFGANATEYVRASFAVSTDAVREAVARIDAVLASATTLT

SEQ ID NO: 11604 - protein, 586 aa, Halobacterium sp. NRC-1
MDDELRERVRRAAERAALFNALKHGSDAQVGAIMGPMMGEHPDFRAHGDEIPGVIAPVIEDVNGMSDDEQRARLAELAPEDVEELDSEDEGDDHALPALPNAEAYDEVRMRCAPNPNGPWHVGHARMPSVIGTYKQRYDGSFVVRFDDTDPETKRPDLDAYDQILEDLSYLGFEADEVLTASDRVETYYEHARRLIGMGGAYTCSCPGAEFSDLKNSGEACPHRDKDPETVADEFEAMVDGEYNSGEMVLRVKTDITHKNPALRDWVAFRMVDTPHPRDAASGYRCWPMLDFQSGVDDHRTGVTHIIRGIDLQDSAKRQRFLYEYFGWEYPEVVHWGHVQLDAYDVAMSTSTIKERIAAGELEGWDDPRAPTMQSIRRRGIRGAAVVDAMVELGTSSSDVELAMSAVYANNRDLVDDTAPRQFLVRDGFEARGEGPEESHEAVEVPVDDGPDEATPQVHPEHPDRGDREIPVGERVLVEATDLPAAGDRVWLKGYGPVRYDGERFAFLDADIDIVREEGVDVVQWVPAEHNVDVRLRTMDGDVTGYAEPGFADRDADEIVQFVRVGFARVDAHRDGGASVAYFTHP

SEQ ID NO: 11605 - protein, 728 aa, Halobacterium sp. NRC-1
MKTLERDLGLGAVFAISVGAMIGSGIFILPALALKMAGPAVIVAYLLAGLLVVPAALSKSEMATAMPEAGGTYIYIERGMGPLLGTVAGVGTWFSLSFKSALALVGGVPYLVLLFDLPVQPVALGLAALLIVVNLLGAKQTGRLQTVIVSLMLGALGWFVAGSAGQVQQANFQGFLTGGWEGLLAATGLVFVSYAGVTKVASVAEEVENPDRNLPLGILGSLAFTTLLYVGIVAVMVGVTDSGAVAGSATPVAVAADATLGTAGVYAVIAAAVLALVSTANAGILSSSRYPFAMSRDQLAPPTFAEIHDRFGTPTTAITLTGAVVLALIAFVPILDIAKLASAFQILVFVLVNLALVAFRTGTTDYDPDFESPLYPWMQGFGVLSGLALLTQMGWVPIAGAAVITLGSVVWYRVYARPRVRREGAATDVVRRRLGRDVLTETEALVDATGAEAGGPEVLVALTREASADRERALLSLAADRARNEDGQVVVVRFDEVPDQAPLDHAADVQSPADVRFEERTEGLSTEFDVDIAYGEVVSHDTKRAILNVAEQRSVDTVVAEHERLRLRSRLLGDPIDWVVRHAPCDVLLVENRGYDAPQNVVLEGDGGPYDPATVAVADAVAGAAGGTVTLQFPLSADHPDKRQETVHAYQDELAGLLSAPVRTADLRADGGDQTAPDLVVRTGAHRRVRGGRGSHTQTAADCTELTVYPHESRQPGLLRRLAERLVF

SEQ ID NO: 11606 - protein, 759 aa, Halobacterium sp. NRC-1
MKLTVKPLKQKDAGRGLAAVDRDSMDELALENGDYVVIDGQGDHGRAVARVWPGYPEDDGDGVVRIDGRLRKEADVGIDDQVTVEPADIKPAGGVTVALPQNLRVRGNIAPMVRDRLNGRPVTAGQTIPISFGFGGMSTISGQQIPVKIAETEPSGTVVVSNDTEIQLSERPAEEIAPGAGEAAETGDPTPNVTYEDIGGLDGELEQVREMIELPMRHPELFQQLGIDPPKGVLLHGPPGTGKTLIAKAVANEIDAHFETISGPEIMSKYYGESEEKLREVFDEAEENAPAIVFVDELDSIAPKRGETQGDVERRVVAQLLSLMDGLEDRGDVTVIAATNRVDAIDPALRRGGRFDREIEIGVPDQDGRKEILQVHTRGMPLVEDIDLDDYAESTHGFVGADIESLAKEAAMNALRRVRPDIDLESDEIDAELLESISITEADFKRALNGIEPSALREVFVEVPDTTWADVGGLTDTKERLRETIQWPLDYPDVFSEMDLQSAKGVLLYGPPGTGKTLLAKAVANEANSNFISVKGPELLNKYVGESEKGVREVFEKARSNAPTVVFFDEIDAIAGQRGRATSDSGVGERVVSQLLTELDGIEALEDVVVVATSNRPDLIDDALLRPGRLDRHIHVPVPDADARRAILDVHTRDKPLADDVDLDVVAQRMDGFVGADVEALVREATMNATREFINSVDPADASDSVGNVRVTMAHFEAALGEVTASVDADVKENYEEIEQRFNTADTPTDDEPASGAFR

SEQ ID NO: 11607 - protein, 357 aa, Halobacterium sp. NRC-1
MQLKDRHTVEGGRERITLVPESLDDLWHLAYVLEPGDFVAGDTHRRIQRNDDQMRDTGGEREHMFVTIDVGDVEFHKFSNRLRVSGTIEDCSREDQLGLHHTLNVAEREELEVEKHWQPDQLNRLNEAVEATDQPDVAIATVEEGEAHIHVVQQYGVDEQGSFTATTGKGEQNDRGRDELFGTLADALARMQADAIILAGPGFTKQDALDHITEEYPDLQETITMVDTSAVGGRGVHEVLKRGAVEDVQEETRIAEESELIDELTTQMATDGKAAYGIDEVQKAVEFGAVEDLLILDERLRLERAGEGDWVDVDVNDLVRTVEQQGGSVTVFSHEFAPGEQLRNLGGIGAVLRYRLD

SEQ ID NO: 11608 - protein, 750 aa, Halobacterium sp. NRC-1
MGLDDDALDYHASDPPGKVEISTTKPTNTQRDLSLAYSPGVAAPCRAIADDPTEAFTHTTKGNMVGVVSNGSAVLGLGDIGAQAAKPVMEGKGVLFKRFADIDVFDIELDQATADELVATVSAMEPTFGGINLEDIKAPECFEVERRLGDAMDVPVFHDDQHGTAIISGAALLNAAEIAGKDLSDLDVVFSGAGASAIATAKFYVSLGVDREHITMCDSSGVITEDRDVNEFKAAFAQPADSGGDLADAMAGADVFVGLSVGGIVNQAMVRSMADDPIVFAMANPDPEIDYESAKAAREDTVIMATGRSDYPNQVNNVLGFPFIFRGALDVRATDINEEMKVAAATALADLAKQDVPDEVVKAYGDQPLQFGSEYIIPKPLDPRVLFEVAPAVADAAMETGVARTELDLVDYREELEARLGKSREMMRIVINKAKSEQQRIALGEGGDEKMIRAAHQMHEAGIADPVLLGDRDTIQGTVDALSLDFDPDVVDPDEGDHSAYADTLYDLRKRKGITRNEAESLVARDPNYLGSTMVEAGDADAFLTGLTHHYPSALKPPLQVVGTAPDTDYVAGVYMLTFQNRVVFCADATVNQDPDADVLAEVAQHTADLARRFNVDPRVAVLSYSNFGSVDNEGTRKPRRAAQQLREDDDIDFPVDGEMQADTAVVEDILQGSYEFSDLDTAANVLIFPNLEAGNIGYKLLQRLGGADAIGPMLVGMNKPVHVLQRGDEVKDIVNLAAVAAADAQQRED

SEQ ID NO: 11609 - protein, 742 aa, Halobacterium sp. NRC-1
MNEVQLEVAKAYPNDSGRGIARLDPDTLLHLKLSPGDIIEIEGAETTAAKVWRADRQDWNTDTIRIDGFTRQNAEVGIGERVKIRKADAEKADTLVLAPPEEASVQFGSDAAGMVKRQILKRPVVARDIVPVMSSTNHPFMRSPGQAIPLIAVETEPEGVCLVTEDTDVELREEPISGFERTGGGITYEDIGGLENEIQRVREMVELPMKHPQIFQKLGIEPPQGVLLHGPPGTGKTLLAKAVANETSASFFSIAGPEIISKYYGESEQQLREIFEDAKDDSPSIIFIDELDSIAPKREDVTGEVERRVVAQLLTMMDGLEGRGQVIVIAATNRVDAVDPALRRPGRFDREIEIGVPDEIGREEILKIHTRGMPLSDDVNLSTLADDTHGFVGADIESLSKEAAMRALRRYLPEIDLDEEDIPPSLIDRMIVKREDFKGALSEVEPSAMREVLVELPKITWDDVGGLTEAKNNVKESVEWPLNQPEKFTRMGVEPPAGVLLYGPPGTGKTLMAKAVANETNANFISVRGPQLLSKWVGESEKAIRQTFRKARQVAPTVIFFDELDSLAPGRGQTGGNNVSERVVNQLLTELDGLEEMEEVMVIAATNRPDIIDPALIRSGRFDRLVQVGQPGIEGREQILKIHTQDTPLAADVSLRELAERADGYVGSDLANIAREAAIEALRDDEDADDVGMAHFRAAMENVRPTITDDLMEYYDQVEDQFKGSQGPNVNSRQGSEHIGFQ

SEQ ID NO: 11610 - protein, 272 aa, Halobacterium sp. NRC-1
MFPGASTADESNPGADADYVVVGAPLDVSTSFQPGTRFGPGELRTYAATFEDYHHRTGTHFSALSVTDYGDVRAWNDVPAYLEYLNGVVTDISWNDATPLLVGGEHTVTVAAVRALNPDVFVALDAHLDLRAALDGDPLSHSTVTRHALDVADEAIVVGARAGSEEEWERAADSDVTVIEPSAVADWTPAFGDADVYLSVDIDAADPGYAPGTGTPEPFGMSPRELRAAVRAVAPHAVGFDVVEVNDRDDGQAPTLGAKLLREFVHTHHADG

SEQ ID NO: 11611 - protein, 482 aa, Halobacterium sp. NRC-1
MVVALAVGLVAYRVTDRDAEDYYLAGRGLGTGVLLFTTFATLLSAFTFFAGPNIAYANGPEWILVMGLMDGVLFGLLWYVLGYRQWLLGKANGYVTLGEMLGDRFGSRGLRGLVAGVSIFWLFPYVMLQQIGAGEALVGLTGGAVPYWAGAGFITLFMVVYVAISGMRGVAWTDTLQGVFMLGITWVAFVWVAAEIAGTTGGLAGALPAEFRALGGGAYSPQWMLSQAIGIAVGVSMFPQVNQRFFVADSKRTLKRTFAIWPLLVVLLFVPAFLMGAWANGVGLPLPDGENIVPILLSEYTPGWFAALVVAGALAAMMSSSDSMLLSGSSYFTRDIYRPFVNADATARREDTLGRVGVAAFAVAAFGGSLLRPGSLLEVGSTAFGGFAQLAPPVALAMYWRRTTKAGMFAGVLGTQAFYLATVFGPPVTLAGVPIIASSYFGWFAQVVGLPLGVVLTVGVSAVTAPSDTENASAYVDALRAD

SEQ ID NO: 11612 - protein, 396 aa, Halobacterium sp. NRC-1
MPSGTVALAFSGGLDTTVCVPLLKEEYGYDDVIGVTVDVGQPDAEFAAARETAAALGVEHHVVDATAEFAALCFDAVRANATYQGYPLGTALARPVIADAILSVAEAEGCAALAHGCTGKGNDQLRFEAVWRASDHDVCAPVRELGLTREWEIEYAAERDLPVEAGNEGEWSIDTNLWSRSVEGGHLEEPDYQPPADIYAWTDAPSGETGTVDITFEAGVPVAVDGTAMEPVALIEALNDRAGSYGVGRTDMLEDRMLGLKVRENYEHPAATTLLAAHKALEGLVLTKAERDFTAAVSQQWAQKAYEGVVEHPLMDALNGYLDETQSAVSGTVTIAFEGGRARPIARESEHAVYSADAASFNTETVAGIEQADATGVAKYHGFQSRLANAAFDGNK

SEQ ID NO: 11613 - protein, 375 aa, Lactobacillus reuteri
MTEQEQQTEELRCIGCGSIIQTEDPNGLGYTPKSALERGKETGELYCQRCFRLRHYNEIAPVSLTDDDFLRLLNQIRDANALIVYVVDVFDFNGSLIPGLHRFVGDNPVLLVGNKEDLLPRSLRRPKLTDWIRQQANIAGLRPIDTVLVSAKKNHQIDHLLDVIEKYRHNRDVYVVGVTNVGKSTLINQIIKQRTGVKELITTSRFPGTTLDKIEIPLDDGHVLVDTPGIIHQEQMAHVLSPKDLKIVAPQKEIKPKTYQLNDGQTLFLGGVARFDYLHGERAGMVAYFDNNLPIHRTKLSNADNFYAKHLGDLLTPPTSDEKDGFPPLERYEFHITEKSDIVFEGVGWITGPAKTTGGAWVPKGVWALGPGPVS

SEQ ID NO: 11614 - protein, 486 aa, Lotus japonicus
MATPTAYQENLPASPEWLNKGDNAWQMTAATLVGLQSMPGLVILYASIVKKKWAVNSAFMALYAFAAVLLCWVLLCYRMAFGDKLFPFWGKGAPALGQKFLINQASVPESTHYFNNGSIETQTQRPFYPMATLVYFQFNFAAITMILLAGSVLGRMNIKAWMAFVPLWLIFSYTVGAFSIWGGGFLYHWGVIDFSGGYVIHLSSGIAGFTAAYWVGPRLKSDRERFPPNNVLLMLAGAGLLWMGWSGFNGGAPYAANIDASIAVLNTNICAATSLLVWTSLDVAFFGKPSVIGAVQGMMTGLVCITPGAGLVQSWAAIVMGILSGSIPWVSMMILHKKSSLLQKVDDTLGVFHTHAVAGLLGGLLTGLLAEPELCRLVLPVSNSRGAFYGGTGGAQFLKQLVAALFVIGWNLVSTTLILLAIQLFIPLRMPDYQLEIGDDAVHGEEAYALWGDGEKYDPTKHGSTIVDETLASAYSVGARGVTVNL

SEQ ID NO: 11615 - protein, 638 aa, Escherichia coli O157:H7 EDL933
MGKIIGIDLGTTNSCVAIMDGTTPRVLENAEGDRTTPSIIAYTQDGETLVGQPAKRQAVTNPQNTLFAIKRLIGRRFQDEEVQRDVSIMPFKIIAADNGDAWVEVKGQKMAPPQISAEVLKKMKKTAEDYLGEPVTEAVITVPAYFNDAQRQATKDAGRIAGLEVKRIINEPTAAALAYGLDKGTGNRTIAVYDLGGGTFDISIIEIDEVDGEKTFEVLATNGDTHLGGEDFDSRLINYLVEEFKKDQGIDLRNDPLAMQRLKEAAEKAKIELSSAQQTDVNLPYITADATGPKHMNIKVTRAKLESLVEDLVNRSIEPLKVALQDAGLSVSDIDDVILVGGQTRMPMVQKKVAEFFGKEPRKDVNPDEAVAIGAAVQGGVLTGDVKDVLLLDVTPLSLGIETMGGVMTTLIAKNTTIPTKHSQVFSTAEDNQSAVTIHVLQGERKRAADNKSLGQFNLDGINPAPRGMPQIEVTFDIDADGILHVSAKDKNSGKEQKITIKASSGLNEDEIQKMVRDAEANAEADRKFEELVQTRNQGDHLLHSTRKQVEEAGDKLPADDKTAIESALTALETALKGEDKAAIEAKMQELAQVSQKLMEIAQQQHAQQQTAGADASANNAKDDDVVDAEFEEVKDKK

SEQ ID NO: 11616 - protein, 504 aa, Escherichia coli O157:H7 EDL933
  misc_feature (141)..(141): Xaa can be any naturally occurring amino acid
  misc_feature (263)..(263): Xaa can be any naturally occurring amino acid
  misc_feature (400)..(400): Xaa can be any naturally occurring amino acid
  unsure (1)..(504): unsure at all Xaa locations
MKNEKRKTGIEPKVFFPPLIIVGILCWLTVRDLDAANVVINAVFSYVTNVWGWAFEWYMVVMLFGWFWLVFGPYAKKRLGNEPPEFSTASWIFMMFASCTSAAVLFWGSIEIYYYISTPPFGLEPNSTGAKELGLAYSLFXWGPLPWATYSFLSVAFAYFFFVRKMEVIRPSSTLVPLVGEKHAKGLFGTIVDNFYLVALIFAMGTSLGLATPLVTECMQWLFGIPHTLQLDAIIITCWIILNAICVACGLQKGVRIASDVRXYLSFLMLGWVFIVSGASFIMNYFTDSVGMLLMYLPRMLFYTDPIAKGGFPQGWTVFYWAWWVIYAIQMSIFLARISRGRTVRELCFGMVMGLTASTWILWTVLGSNTLLLIDKNIINIPNLIEQYGVARAIIETWAXLPLSTATMWGFFILCFIATVTLVNACSYTLAMSTCREVRDGEEPPLLVRIGWSILVGIIGIVLLALGGLKPIQTAIIAGGCPLFFVNIMVTLSFIKDAKQNWKD

SEQ ID NO: 11617 - protein, 457 aa, Escherichia coli O157:H7 EDL933
MMEGQQHGEQLKRGLKNRHIQLIALGGAIGTGLFLGSASVIQSAGPGIILGYAIAGFIAFLIMRQLGEMVVEEPVAGSFSHFAYKYWGSFAGFASGWNYWVLYVLVAMAELTAVGKYIQFWYPEIPTWVSAAVFFVVINAINLTNVTVFGEMEFWFAIIKVIAVVAMIIFGGWLLFSGNGGPQASVSNLWDQGGFLPHGFTGLVMMMAIIMFSFGGLELVGITAAEADNPEQSIPKATNQVIYRILIFYIGSLAVLLSLMPWTRVTADTSPFVLIFHELGDTFVANALNIVVLTAALSVYNSCVYCNSRMLFGLAQQGNAPKALASVDKRGVPVNTILVSALVTALCVLINYLAPESAFGLLMALVVSALVINWAMISLAHMKFRRAKQEQGVVTRFPALLYPLGNWICLLFMAVVLVIMLMTPGMAISVYLIPVWLVVLGIGYLFKEKTAKAVKAH

SEQ ID NO: 11618 - protein, 126 aa, Escherichia coli O157:H7 EDL933
MIRTMLQGKLHRVKVTHADLHYEGSCAIDQDFLDAAGILENEAIDIWNVTNGKRFSTYAIAAERGSRIISVNGAAAHCASVGDIVIIASFVTMPDEEARTWRPNVAYFEGDNEMKRTAKAIPVQVA

SEQ ID NO: 11619 - protein, 191 aa, Escherichia coli O157:H7 EDL933
MAKSVPAIFLDRDGTINVDHGYVHEIDNFEFIDGVIDAMRELKKMGFALVVVTNQSGIARGKFTEAQFETLTEWMDWSLADRDVDLDGIYYCPHHPQGSVEEFRQVCDCRKPHPGMLLSARDYLHIDMAASYMVGDKLEDMQAAVAANVGTKVLVRTGKPITPEAENAADWVLNSLADLPQAIKKQQKPAQ

SEQ ID NO: 11620 - protein, 677 aa, Escherichia coli O157:H7 EDL933
MTDLSHSREKDKINPVVFYTSAGLILLFSLTTILFRDFSALWIGRTLDWVSKTFGWYYLLAATLYIVFVVCIACSRFGSVKLGPEQSKPEFSLLSWAAMLFAAGIGIDLMFFSVAEPVTQYMQPPEGAGQTIEAARQAMVWTLFHYGLTGWSMYALMGMALGYFSYRYNLPLTIRSALYPIFGKRINGPIGHSVDIAAVIGTIFGIATTLGIGVVQLNYGLSVLFDIPDSMAAKAALIALSVIIATISVTSGVDKGIRVLSELNVALALGLILFVLFMGDTSFLLNALVLNVGDYVNRFMGMTLNSFAFDRPVEWMNNWTLFFWAWWVAWSPFVGLFLARISRGRTIRQFVLGTLIIPFTFTLLWLSVFGNSALYEIIHGGAAFAEEAMVHPERGFYSLLAQYPAFTFSASVATITGLLFYVTSADSGALVLGNFTSQLKDINSDAPGWLRVFWSVAIGLLTLGMLMTNGISALQNTTVIMGLPFSFVIFFVMAGLYKSLKVEDYRRESANRDTAPRPLGLQDRLSWKKRLSRLMNYPGTRYTKQMMETVCYPAMEEVAQELRLRGAYVELKSLPPEEGQQLGHLDLLVHMGEEQNFVYQIWPQQYSVPGFTYRARSGKSTYYRLETFLLEGSQGNDLMDYSKEQVITDILDQYERHLNFIHLHREAPGHSVMFPDA

SEQ ID NO: 11621 - protein, 457 aa, Escherichia coli O157:H7 EDL933
MESKNKLKRGLSTRHIRFMALGSAIGTGLFYGSADAIKMAGPSVLLAYIIGGIAAYIIMRALGEMSVHNPAASSFSRYAQENLGPLAGYITGWTYCFEILIVAIADVTAFGIYMGVWFPTVPHWIWVLSVVLIICAVNLMSVKVFGELEFWFSFFKVATIIIMIVAGFGIIIWGIGNGGQPTGIHNLWSNGGFFSNGWLGMVMSLQMVMFAYGGIEIIGITAGEAKDPEKSIPRAINSVPMRILVFYVGTLFVIMSIYPWNQVGTAGSPFVLTFQHMGITFAASILNFVVLTASLSAINSDVFGVGRMLHGMAEQGSAPKIFSKTSRRGIPWVTVLVMTTALLFAVYLNYIMPENVFLVIASLATFATVWVWIMILLSQIAFRRRLPPEEVKALKFKVPGGVATTIGGLIFLLFIIGLIGYHPDTRISLYVGFAWIVVLLIGWMFKRRHDRQLAENQ

SEQ ID NO: 11622 - protein, 430 aa, Escherichia coli O157:H7 EDL933
MMNTEGNNGNKPLGLWNVVSIGIGAMVGAGIFALLGQAALLMEASTWVAFAFGGIVAMFSGYAYARLGASYPSNGGIIDFFRRGLGNGVFSLALSLLYLLTLAVSIAMVARAFGAYAVQFLHEGSQEEHLILLYALGIIAVMTLFNSLSNHAVGRLEVILVGIKMMILLLLIIAGVWSLQPAHISVSAPPSSGAFFSCIGITFLAYAGFGMMANAADKVKDPQVIMPRAFLVAIGVTTLLYISLALVLLSDVSALELEKYADTAVAQAASPLLGHVGYVIVVIGALLATASAINANLFAVFNIMDNMGSERELPKRMNKSLWRQSTWGNIIVVVLIMLMTAALNLGSLASVASATFLICYLAVFVVAIRLRHDIHASLPILIVGTLVMLLVIVGFIYSLWSQGSRALIWIIGAILLSLIVAMVMKRNKTV

SEQ ID NO: 11623 - protein, 292 aa, Escherichia coli O157:H7 EDL933
MKLGFIGLGIMGTPMAINLARAGHQLHVTTIGPVADELLSLGAVNVDTARQVTEAADIIFIMVPDTPQVEEVLFGENGCTKASLKGKTIVDMSSISPIETKRFARQVNELGGDYLDAPVSGGEIGAREGTLSIMVGGDEAVFERVKPLFELLGKNITLVGGNGDGQTCKVANQIIVALNIEAVSEALLFASKAGADPVRVRQALMGGFASSRILEVHGERMIKRTFNPGFKIALHQKDLNLALQSAKALALNLPNTATCQELFNTCAANGGSQLDHSALVQALELMANHKLA

SEQ ID NO: 11624 - protein, 458 aa, Escherichia coli O157:H7 EDL933
MKNASNVSEDTASNQEPTLHRGLHNRHIQLIALGGAIGTGLFLGIGPAIQMAGPAVLLGYGVAGIIAFLIMRQLGEMVVEEPVSGSFAHFAYKYWGPFAGFLSGWNYWVMFVLVGMAELTAAGIYMQYWFPDVPTWIWAAAFFIIINAVNLVNVRLYGETEFWFALIKVLAIIGMIGFGLWLLFSGHGGEKASIDNLWRYGGFFATGWNGLILSLAVIMFSFGGLELIGITAAEARDPEKSIPKAVNQVVYRILLFYIGSLVVLLALYPWVEVKSNSSPFVMIFHNLDSNVVASALNFVILVASLSVYNSGVYSNSRMLFGLSVQGNAPKFLTRVSRRGVPINSLMLSGAITSLVVLINYLLPQKAFGLLMALVVATLLLNWIMICLAHLRFRAAMRRQGRETQFKALLYPFGNYLCIAFLAMILLLMCTMDDMRLSAILLPVWIVFLFVAFKTLRRK

SEQ ID NO: 11625 - protein, 362 aa, Escherichia coli O157:H7 EDL933
MPHNPIRVVVGPANYFSHPGSFNHLHDFFTDEQLSRAVWIYGVRAIAAAQTKLPPAFGLPGAKHILFRGHCSESDVQQLAAESGDDRSVVIGVGGGALLDTAKALARRLGLPFVAAPTIAATCAAWTPLSVWYNDAGQALHYEIFDDANFMVLVEPEIILNAPQQYLLAGIGDTLAKWYEAVVLAPQPETLPLTVRLGINNAQAIRDVLLNSSEQALADQQNQQLTQSFCDVVDAIIAGGGMVGGLGDRFTRVAAAHAVHNGLTVLPQTEKFLHGTKVAYGILVQSALLGQDDVLAQLTGAYQRFHLPTTLAELEVDINNQAEIDKVIAHTLRPVESIHYLPVTLTPDTLRAAFEKVESFKA

SEQ ID NO: 11626 - protein, 554 aa, Escherichia coli O157:H7 EDL933
MCSIFGVFDIKTDAVELRKKALELSRLMRHRGPDWSGIYASDKAILAHERLSIVDVNAGAQPLYNQQKTHVLAVNGEIYNHQALRAEYGDRYQFQTGSDCEVILALYQEKGPEFLDDLQGMFAFALYDSEKDAYLIGRDHLGIIPLYMGYDEHGQLYVASEMKALVPVCRTIKEFPAGSYLWSQDGEIRSYYHRDWFDFDAVKDNVTDKNELRQALEDSVKSHLMSDVPYGVLLSGGLDSSIISAITKKYAARRVEDQERSEAWWPQLHSFAVGLPGSPDLKAAQEVANHLGTVHHEIHFTVQEGLDAIRDVIYHIETYDVTTIRASTPMYLMSRKIKAMGIKMVLSGEGSDEVFGGYLYFHKAPNAKELHEETVRKLLALHMYDCARANKAMSAWGVEARVPFLDKKFLDVAMRINPQDKMCGNGKMEKHILRECFESYLPASVAWRQKEQFSDGVGYSWIDTLKEVAAQQVSDQQLETARFRFPYNTPTSKEAYLYREIFEELFPLPSAAECVPGGPSVACSSAKAIEWDEAFKKMDDPSGRAVGVHQSAYK

SEQ ID NO: 11627 - protein, 260 aa, Escherichia coli O157:H7 EDL933
MPQTRPIIIRLTDGSSIMKKLVLAALLASCAFGASAAEKINFGVSATYPPFESMDANNQIVGFDIDLAKALCKQMQAECTFTNHAFDSLIPSLKFRKYDAVISGMDITPDRSKQVSFTTPYYENSAVVIAKKDTYKTFADLKGKRIGMENGTTHQKYIQDQHPEVKTVSYDSYQNAFIDLKNSRIDGVFGDTAVVNEWLKTNPQLGVATEKVTDPQYFGTGLGIAVRPDNKALLEKLNNALAAIKADGTYQQISDQWFPQ

SEQ ID NO: 11628 - protein, 285 aa, Escherichia coli O157:H7 EDL933
MKADNPFDLLLPAAMAKVAEEAGVYKATKHPLKTFYLAITAGVFISIAFVFYITATTGTGTMPFGMAKLVGGICFSLGLILCVVCGADLFTSTVLIVVAKASGRITWGQLAKNWLNVYFGNLVGALLFVLLMWLSGEYMTANGQWGLNVLQTADHKVHHTFIEAVCLGILANLMVCLAVWMSYSGRSLMDKAFIMVLPVAMFVASGFEHSIANMFMIPMGIVIRDFASPEFWTAVGSAPENFSHLTVMNFITDNLIPVTIGNIIGGGLLVGLTYWVIYLRENDHH

SEQ ID NO: 11629 - protein, 582 aa, Escherichia coli O157:H7 EDL933
MHNDKDLSTWQTFRRLWPTIAPFKAGLIVAGVALILNAASDTFMLSLLKPLLDDGFGKTDRSVLVWMPLVVIGLMILRGITSYVSSYCISWVSGKVVMTMRRRLFGHMMGMPVSFFDKQSTGTLLSRITYDSEQVASSSSGALITVVREGASIIGLFIMMFYYSWQLSIILIVLAPIVSIAIRVVSKRFRNISKNMQNTMGQVTTSAEQMLKGHKEVLIFGGQEVETKRFDKVSNRMRLQGMKMVSASSISDPIIQLIASLALAFVLYAASFPSVMDSLTAGTITVVFSSMIALMRPLKSLTNVNAQFQRGMAACQTLFTILDSEQEKDEGKRVIERATGDVEFRNVTFTYPGRDVPALRNINLKIPAGKTVALVGRSGSGKSTIASLITRFYDIDEGEILMDGHDLREYTLASLRNQVALVSQNVHLFNDTVANNIAYARTEQYSREQIEEAARMAYAMDFINKMDNGLDTVIGENGVLLSGGQRQRIAIARALLRDSPILILDEATSALDTESERAIQAALDELQKNRTSLVIAHRLSTIEKADEIVVVEDGVIVERGTHNDLLEHRGVYAQLHKMQFGQ

SEQ ID NO: 11630 - protein, 70 aa, Escherichia coli O157:H7 EDL933
  misc_feature (70)..(70): Xaa can be any naturally occurring amino acid
  unsure (1)..(70): unsure at all Xaa locations
MSNKMTGLVKWFNADKGFGFITPDDGSKDVFVHFTAIQSNEFRTLNENQKVEFSIEQGQRGPAAANVVTX

SEQ ID NO: 11631 - protein, 196 aa, Escherichia coli O157:H7 EDL933
MNEAVSPGALSTLFTDARTHNGWRETPVSDETLRELYALMKWGPTSANCSPARIVFIRTAEGKERLRPALSSGNLQKTLTAPVTAIVAWDSEFYERLPQLFPHGDARSWFTSSPQLAEETAFRNSSMQAAYLIIACRALGLDTGPMSGFDRQHVDDAFFAGSTLKSNLLINIGYGDSSKLFARLPRLSFEEACGLL

SEQ ID NO: 11632 - protein, 502 aa, Escherichia coli O157:H7 EDL933
MAISTPMLVTFCVYIFGMILIGFIAWRSTKNFDDYILGGRSLGPFVTALSAGASDMSGWLLMGLPGAVFLSGISESWIAIGLTLGAWINWKLVAGRLRVHTEYNNNALTLPDYFTGRFEDKSRILRIISALVILLFFTIYCASGIVAGARLFESTFGMSYETALWAGAAATILYTFIGGFLAVSWTDTVQASLMIFALILTPVIVIISVGGFGDSLEVIKQKSIENVDMLKGLNFVAIISLMGWGLGYFGQPHILARFMAADSHHSIVHARRISMTWMILCLAGAVAVGFFGIAYFNEHPSVAGAVNQNAERVFIELAQILFNPWIAGILLSAILAAVMSTLSCQLLVCSSAITEDLYKAFLRKHASQKELVWVGRVMVLVVALVAIALAANPENRVLGLVSYAWAGFGAAFGPVVLFSVMWSRMTRNGALAGMIIGALTVIVWKQFGWLGLYEIIPGFIFGSIGIVVFSLLGKAPSAAMQKRFAEADAHYHSAPPSRLQEG

SEQ ID NO: 11633 - protein, 315 aa, Escherichia coli O157:H7 EDL933
  misc_feature (62)..(62): Xaa can be any naturally occurring amino acid
  misc_feature (252)..(253): Xaa can be any naturally occurring amino acid
  unsure (1)..(315): unsure at all Xaa locations
MPDMKLFAGNATPELAQRIANRLYTSLGDAAVGRFSDGEVSVQINENVRGGDIFIIQSTCAXTNDNLMELVVMVDALRRASAGRITAVIPYFGYARQDRRVRSARVPITAKVVADFLSSVGVDRVLTVDLHAEQIQGFFDVPVDNVFGSPILLEDMLQLNLDNPIVVSPDIGGVVRARAIAKLLNDTDMAIIDKRRPRANVSQVMHIIGDVAGRDCVLVDDMIDTGGTLCKAAEALKERGAKRVFAYATHPXXSGNAANNLRNSVIDEVVVCDTIPLSDEIKSLPNVRTLTLSGMLAEAIRRISNEESISAMFEH

SEQ ID NO: 11634 - protein, 330 aa, Escherichia coli O157:H7 EDL933
MQSDKVLNLPAGYFGIVLGTIGMGFAWRYASQVWQVSHWLGDGLVILAMIIWGLLTSAFITRLIRFPHSVLAEVRHPVLSSFVSLFPATTMLVAIGFVPWFRPLAVCLFSFGVVVQLAYAAWQTAGLWRGSHPEEATTPGLYLPTVANNFISAMACGALGYTDAGLVFLGAGVFSWLSLEPVILQRLRSSGELPTALRTSLGIQLAPALVACSAWLSVNGGEGDTLAKMLFGYGLLQLLFMLRLMPWYLSQPFNASFWSFSFGVSALATTGLHLGSGSDNGFFHTLAVPLFIFTNFIIAILLIRTLALLMQGKLLVRTERAVLMKAEDKE

SEQ ID NO: 11635 - protein, 461 aa, Escherichia coli O157:H7 EDL933
MAINSPLNIAAQPGKTRLRKSLKLWQVVMMGLAYLTPMTVFDTFGIVSGISDGHVPASYLLALAGVLFTAISYGKLVRQFPEAGSAYTYAQKSINPHVGFMVGWSSLLDYLFLPMINVLLAKIYLSALFPEVPPWVWVVTFVAILTAANLKSVNLVANFNTLFVLVQISIMVVFIFLVVQGLHKGEGVGTVWSLQPFISENAHLIPIITGATIVCFSFLGFDAVTTLSEETPDAARVIPKAIFLTAVYGGVIFIAASFFMQLFFPDISRFKDPDAALPEIALYVGGKLFQSIFLCTTFVNTLASGLASHASVSRLLYVMGRDNVFPERVFGYVHPKWRTPALNVIMVGIVAMSALFFDLVTATALINFGALVAFTFVNLSVFNHFWRRKGMNKSWKDHFHYLLMPLVGALTVGVLWVNLESTSLTLGLVWASLGGAYLWYLIRRYRKVPLYEGDRTPVSET

SEQ ID NO: 11636 - protein, 510 aa, Escherichia coli O157:H7 EDL933
MRIGIPRERLTNEPRVAATPKTVEQLLKLGFTVAVESGAGQLASFDDKAFVQAGAEIVEGNSVWQSEIILKVNAPLDDEIALLNPGTTLVSFIWPAQNPELMQKLAERNVTVMAMDSVPRISRAQSLDALSSMANIAGYRAIVEAAHEFGCFFTGQITAAGKVPPAKVMVIGAGVAGLAAIGAANSLGAIVRAFDTRPEVKEQVQSMGAEFLELDFKEEAGSGDGYAKVMSDAFIKAEMELFAAQAKEVDIIVTTALIPGKPAPKLITREMVDSMKAGSVIVDLAAQNGGNCEYTVPGEIFTTENGVKVIGYTDLPGRLPTQSSQLYGTNLVNLLKLLCKEKNGNITVDFDDVVIRGVTVIRAGEITWPAPPIQVSAQPQVAQKAAPEVKTEEKCACSPWRKYALMALAIILFGWLASVAPKEFLGHFTVFALACVVGYYVVWNVSHALHTPLMSVTNAISGIIVVGALLQIGQGGWVSFLSFIAVLIASINIFGGFTVTQRMLKMFRKN

SEQ ID NO: 11637 - protein, 115 aa, Escherichia coli O157:H7 EDL933
MSTTIEKIQRQIAENPILLYMKGSPKLPSCGFSAQAVQALAACGERFAYVDILQNPDIRAELPKYANWPTFPQLWVDGELVGGCDIVIEMYQRGELQQLIKETAAKYKSEEPDAE

SEQ ID NO: 11638 - protein, 248 aa, Escherichia coli O157:H7 EDL933
MLSIKDLHVSVEDKAILRGLSLDVRPGEVHAIMGPNGSGKSTLSATLAGREDYEVTGGTVEFKGKDLLALSPEDRAGEGIFMAFQYPVEIPGVSNQFFLQTALNAVRSYRGQETLDRFDFQDLMEEKIALLKMPEDLLTRSVNVGFSGGEKKRNDILQMAVLEPELCILDESDSGLDIDALKVVADGVNSLRDGKRSFIIVTHYQRILDYIKPDYVHVLYQGRIVKSGDFTLVKQLEEQGYGWLTEQQ

SEQ ID NO: 11639 - protein, 481 aa, Escherichia coli O157:H7 EDL933
MVLLAMGLVIYLATSKYGNIRLGEGKPEYSTLSWLFMFICAGLGSSTLYWGVAEWAYYYQTPGLNIAPRSQQALEFSVPYSFFHWGISAWATYTLASLIMAYHFHVRKNKGLSLSGIIAAITGVRPQGPWGKLVDLMFLIATVGALTISLVVTAATFTRGLSALTGLPDNFTVQAFVILLSGGIFCLSSWIGINNGLQRLSKMVGWGAFLLPLLVLIVGPTEFITNSIINAIGLTTQNFLQMSLFTDPLGDGSFTRNWTVFYWLWWISYTPGVAMFVTRVSRGRKIKEVIWGLILGSTVGCWFFFGVMESYAIHQFINGVINVPQVLETLGGETAVQQVLMSLPAGKLFLAAYLGVMIIFLASHMDAVAYTMAATSTRNLQEGDDPDRGLRLFWCVVITLIPLSILFTGASLETMKTTVVLTALPFLVILLVKVGGFIRWLKQDYADIPAHQVEHYLPQTPVEALEKTPVLPAGTVFKGDN

SEQ ID NO: 11640 - protein, 321 aa, Escherichia coli O157:H7 EDL933
MSDYQMFEVQVSQVEPLTEQVKRFTPVATDGKPLPAFTGGSHIIVQMSDGDNQYSNAYSLLSSPHNTSSYQIAVRLEENSRGGSRFLHQQVKVGDRLTISTPNNLFALIPSARKHLFIAGGIGIPPFLSHMAELQHSDVDWQLHYCSRNPESCAFRDELVQHPQAEKVHLHQSSTGTRLELARLLADIEPGTHVYTCGPEALIEAVRSEAARLDIAADTLHFEQFAIEDKTGDAFTLVLARSGKEFVVPEEMTILQVIENNKAAKVECLCREGVCGTCETAILEGEADHRDQYFSDEERASQQSMLICCSRAKGKRLVLDL

SEQ ID NO: 11641 - protein, 192 aa, Escherichia coli O157:H7 EDL933
MEYRSLTLDDFLSRFQLLRPQINRETLNHRQAAVLIPIVRRPQPGLLLTQRSIHLRKHAGQVAFPGGAVDDTDASVIAAALREAEEEVAIPPSAVEVIGVLPPVDSVTGYQVTPVVGIIPPDLPYRASEDEVSAVFEMPLAQALHLGRYHPLDIYRRGDSHRVWLSWYEQYFVWGMTAGIIRELALQIGVKP

SEQ ID NO: 11642 - protein, 474 aa, Escherichia coli O157:H7 EDL933
MSRLVVVSNRIAPPDEHAASAGGLAVGILGALKAAGGLWFGWSGETGNEDQPLKKVKKGNITWASFNLSEQDLDEYYNQFSNAVLWPAFHYRLDLVQFQRPAWDGYLRVNALLADKLLPLLQDDDIIWIHDYHLLPFAHELRKRGVNNRIGFFLHIPFPTPEIFNALPTYDTLLEQLCDYDLLGFQTENDRLAFLDCLSNLTRVTTRSAKSHTAWGKAFRTEVYPIGIEPKEIAKQAAGPLPPKLAQLKAELKNVQNIFSVERLDYSKGLPERFLAYEALLEKYPQHHGKIRYTQIAPTSRGDVQAYQDIRHQLENEAGRINGKYGQLGWTPLYYLNQHFDRKLLMKIFRYSDVGLVTPLRDGMNLVAKEYVAAQDPANPGVLVLSQFAGAANELTSALIVNPYDRDEVAVALDRALTMSLAERISRHAEMLDVIVKNDINHWQECFISDLKQIVPRSAESQQRDKVATFPKLV

SEQ ID NO: 11643 - protein, 454 aa, Escherichia coli O157:H7 EDL933
MTMSHNVTPNTSRVELRKTLTLVPVVMMGLAYMQPMTLFDTFGIVSGLTDGHVPTAYAFALIAILFTALSYGKLVRRYPSAGSAYTYAQKSISPTVGFMVGWSSLLDYLFAPMINILLAKIYFEALVPSIPSWMFVVALVAFMTAFNLRSLKSVANFNTVIVVLQVVLIAVILGMVVYGVFEGEGAGTLASTRPFWSGDAHVIPMITGATILCFSFTGFDGISNLSEETKDAERVIPRAIFLTALIGGMIFIFATYFLQLYFPDISRFKDPDASQPEIMLYVAGKAFQVGALIFSTITVLASGMAAHAGVARLMYVMGRDGVFPKSFFGYVHPKWRTPAMNIILVGAIALLAINFDLVMATALINFGALVAFTFVNLSVISQFWIREKRNKTLKDHFQYLFLPMCGALTVGALWVNLEESSMVLGLIWAAIGLIYLACVTKSFRNPVPQYEDVA

SEQ ID NO: 11644 - protein, 240 aa, Escherichia coli O157:H7 EDL933
  misc_feature (148)..(148): Xaa can be any naturally occurring amino acid
  unsure (1)..(240): unsure at all Xaa locations
MTELPIDENTPRILIVEDEPKLGQLLIDYLRAASYAPTLISHGDQVLSYVRQTPPDLILLDLMLPGTDGLTLCREIRRFSDIPIVMVTAKIEEIDRLLGLEIGADDYICKPYSPREVVARVKTILRRCKPQRELQQQDAESPLIIDEXRFQASWRGKMLDLTPAEFRLLKTLSHEPGKVFSREQLLNHLYDDYRVVTDRTIDSHIKNLRRKLESLDAEQSFIRAVYGVGYRWEADACRIV

SEQ ID NO: 11645 - protein, 571 aa, Escherichia coli O157:H7 EDL933
MSSMTTTDNKAFLNELARLVGHSHLLTDPAKTARYRKGFRSGHGDALAVVFPGSLLELWRVLKACVTADKIILMQAANTGLTEGSTPNGNDYDRDIVIISTLRLDKLHVLGKGEQVLAYPGTTLYSLEKALKPLGREPHSVIGSSCIGASVIGGICNNSGGSLVQRGPAYTEMSLFARINEDGKLTLVNHLGIDLGETPEQILSKLDDDRIKDDDVRHDGRHAHDYDYVHRVRDIEADTPARYNADPDRLFESSGCAGKLAVFAVRLDTFEAEKNQQVFYIGTNQPEVLTEIRRHILANFENLPVAGEYMHRDIYDIAEKYGKDTFLMIDKLGTDKMPFFFNLKGRTDAMLEKVKFFRPHFTDRAMQKFGHLFPSHLPPRMKNWRDKYEHHLLLKMAGDGVGEAKSWLVDYFKQAEGDFFVCTPEEGSKAFLHRFAAAGAAIRYQAVHSDEVEDILALDIALRRNDTEWYEHLPPEIDSQLVHKLYYGHFMCYVFHQDYIVKKGVDVHALKEQMLELLQQRGAQYPAEHNVGHLYKAPETLQKFYRENDPTNSMNPGIGKTSKRKNWQEVE

SEQ ID NO: 11646 - protein, 397 aa, Escherichia coli O157:H7 EDL933
MTKVTRAVIVGGGIGGAATALSLARLGIKVVLLEKAHEIGEIGAGIQLGPNAFSALDSLGVGEVARQRAVFTDHITMMDAVNAEEVVCIETGQAFRDHFGGPYAVIHRVDIHASVWEAVLTHPDVEYHTSTNVVDIRETEDDVTVFDDRGNSWTGDILIGCDGVKSVVRQSLLGDAPRVTGHVVYRAVIDRADMPEDLRINAPVLWAGPHCHLVHYPLRGGKQYNLVVTFHSRQQEEWGVKDGSKEEVLSYFEGIHPRPRQMLDKPTSWRRWSTADREPVAKWGTKRITLVGDSAHPVAQYMAQGACMALEDAVTLGKALAQCEGDAAQAFALYESVRIPRTARIVWSTREMGRVYHAAGVERQVRNLLWKGKSQAEFYRGMEWLYGWKEDNCLQPR

SEQ ID NO: 11647 - protein, 405 aa, Escherichia coli O157:H7 EDL933
MSPIEKSSKLENVCYDIRGPVLKEAKRLEEEGNKVLKLNIGNPAPFGFDAPDEILVDVIRNLPTAQGYCDSKGLYSARKAIMQHYQARGMRDVTVEDIYIGNGVSELIVQAMQALLNSGDEMLVPAPDYPLWTAAVSLSSGKAVHYLCDESSDWFPDLDDIRAKITPRTRGIVIINPNNPTGAVYSKELLMEIVEIARQHNLIIFADEIYDKILYDDAEHHSIAPLAPDLLTITFNGLSKTYRVAGFRQGWMVLNGPKKHAKGYIEGLEMLASMRLCANVPAQHAIQTALGGYQSISEFITPGGRLYEQRNRAWELINDIPGVSCVKPCGALYMFPKIDAKRFNIHDDQKMVLDFLLQEKVLLVQGTAFNWPWPDHFRIVTLPRVDDIELSLSKFARFLSGYHQL

SEQ ID NO: 11648 - protein, 400 aa, Escherichia coli O157:H7 EDL933
  misc_feature (163)..(163): Xaa can be any naturally occurring amino acid
  unsure (1)..(400): unsure at all Xaa locations
MSSKLVLVLNCGSSSLKFAIIDAVNGEEYLSGLAECFHLPEARIKWKMDGNKQEAALGAGAAHSEALNFIVNTILAQKPELSAQLTAIGHRIVHGGEKYTSSVVIDESVIQGIKDAASFAPLHNPAHLIGIEEALKSFPQLKDKNVAVFDTAFHQTMPEESYXYALPYNLYKEHGIRRYGAHGTSHFYVTQEAAKMLNKPVEELNIITCHLGNGGSVSAIRNGKCVDTSMGLTPLEGLVMGTRSGDIDPAIIFHLHDTLGMSVDAINKLLTKESGLLGLTEVTSDCRYVEDNYATKEDAKRAMDVYCHRLAKYIGAYTALMDGRLDAVVFTGGIGENAAMVRELSLGKLGVLGFEVDHERNLAARFGKSGFINKEGTRPAVVIPTNEELVIAQDASRLTA

SEQ ID NO: 11649 - protein, 714 aa, Escherichia coli O157:H7 EDL933
MSRIIMLIPTGTSVGLTSVSLGVIRAMERKGVRLSVFKPIAQPRTGGDAPDQTTTIVRANSSTTTAAEPLKMSYVEGLLSSNQKDVLMEEIVANYHANTKDAEVVLVEGLVPTRKHQFAQSLNYEIAKTLNAEIVFVMSQGTDTPEQLKERIELTRNSFGGAKNTNITGVIVNKLNAPVDEQGRTRPDLSEIFDDSSKAKVNNVDPAKLQESSPLPVLGAVPWSFDLIATRAIDMARHLNATIINEGDINTRRVKSVTFCARSIPHMLEHFRAGSLLVTSADRPDVLVAACLAAMNGVEIGALLLTGGYEMDARISKLCERAFATGLPVFMVNTNTWQTSLSLQSFNLEVPVDDHERIEKVQEYVANYINADWIDSLTATSERSRRLSPPAFRYQLTELARKAGKRIVLPEGDEPRTVKAAAICAERGIATCVLLGNPAEINRVAASQGVELGAGIEIVDPEVVRESYVGRLVELRKNKGMTETVAREQLEDNVVLGTLMLEQDEVDGLVSGAVHTTANTIRPPLQLIKTAPGSSLVSSVFFMLLPEQVYVYGDCAINPDPTAEQLAEIAIQSADSAAAFGIEPRVAMLSYSTGTSGAGSDVEKVREATRLAQEKRPDLMIDGPLQYDAAVMADVAKSKAPNSPVAGRATVFIFPDLNTGNTTYKAVQRSADLISIGPMLQGMRKPVNDLSRGALVDDIVYTIALTAIQSAQQQ

SEQ ID NO: 11650 - protein, 338 aa, Escherichia coli O157:H7 EDL933
MIIERCCELALRAPARVVFPDALDQRVLKAAQYLHQQGLATPILVANPFELRQFALSHGVAMDGLQVIDPHGNLAMREEFAHRWLARAGEKTPPDALEKLTDPLMFAAAMVSAGKADVCIAGNLSSTANVLRAGLRIIGLQPGCKTLSSIFLMLPQYSGPALGFADCSVVPQPTAAQLADIALASAETWRAITGEEPRVAMLSFSSNGSARHPCVANVQQATEIVRERAPKLVVDGELQFDAAFVPEVAAQKAPASPLQGKANVMVFPSLEAGNIGYKIAQRLGGYRAVGPLIQGLAAPMHDLSRGCSVQEIIELALVAAVPRQTEVNRESSLQTLVE

SEQ ID NO: 11651 - protein, 759 aa, Escherichia coli O157:H7 EDL933
  misc_feature (177)..(177): Xaa can be any naturally occurring amino acid
  unsure (1)..(759): unsure at all Xaa locations
MDDQLKQSALDFHEFPVPGKIQVSPTKPLATQRDLALAYSPGVAAPCLEIEKDPLKAYKYTARGNLVAVISNGTAVLGLGNIGALAGKPVMEGKGVLFKKFAGIDVFDIEVDELDPDKFIEVVAALEPTFGGINLEDIKAPECFYIEQKLRERMNIPVFHDDQHGTAIISTAAILNXLRVVEKNISDVRMVVSGAGAAAIACMNLLVALGLQKHNIVVCDSKGVIYQGREPNMAETKAAYAVVDDGKRTLDDVIEGADIFLGCSGPKVLTQEMVKKMARAPMILALANPEPEILPPLAKEVRPDAIICTGRSDYPNQVNNVLCFPFIFRGALDVGATAINEEMKLAAVRAIAELAHAEQSEVVASAYGDQDLSFGPEYIIPKPFDPRLIVKIAPAVAKAAMESGVATRPIADFDVYIDKLTEFVYKTNLFMKPIFSQARKAPKRVVLPEGEEARVLHATQELVTLGLAKPILIGRPNVIEMRIQKLGLQIKAGVDFEIVNNESDPRFKEYWTEYFQIMKRRGVTQEQAQRALISNPTVIGAIMVQRGEADAMICGTVGDYHEHFSVVKNVFGYRDGVHTAGAMNALLLPSGNTFIADTYVNDEPDAEELAEITLMAAETVRRFGIEPRVALLSHSNFGSSDCPSSSKMRQALELVRERAPELMIDGEMHGDAALVEAIRNDRMPDSPLKGSANILVMPNMEAARISYNLLRVSSSEGVTVGPVLMGVAKPVHVLTPIASVRRIVNMVALAVVEAQTQPL

SEQ ID NO: 11652 - protein, 282 aa, Escherichia coli O157:H7 EDL933
MRNKLSFDLQLSARKAAIAERIAAHKIARSKVSVFLMAMSAGVFMAIGFTFYLSVIADAPSSQALTHLVGGLCFTLGFILLAVCGTSLFTSSVMTVMAKSRGVISWRTWLINALLVACGNLAGIACFSLLIWFSGLVMSENAMWGVAVLHCAEGKMHHTFTESVSLGIMCNLMVCLALWMSYCGRSLCDKIVAMILPITLFVASGFEHCIANLFVIPFAIAIRHFAPTSFWQLAHSSADNFPALTVSHFITANLLPVMLGNIIGGAVLVSICYRAIYLRQES

SEQ ID NO: 11653 - protein, 412 aa, Escherichia coli O157:H7 EDL933
MMYGVYRAMKLPIYLDYSATTPVDPRVAEKMMQFMTMDGTFGNPASRSHRFGWQAEEAVDIARNQIADLVGADPREIVFTSGATESDNLAIKGAANFYQKKGKHIITSKTEHKAVLDTCRQLEREGFEVTYLAPQRNGIIDLKELEAAMRDDTILVSIMHVNNEIGVVQDIAAIGEMCRARGIIYHVDATQSVGKLPIDLSQLKVDLMSFSGHKIYGPKGIGALYVRRKPRVRIEAQMHGGGHERGMRSGTLPVHQIVGMGEAYRIAKEEMATEMERLRGLRNRLWNGIKDIEEVYLNGDLEHGAPNILNVSFNYVEGESLIMALKDLAVSSGSACTSASLEPSYVLRALGLNDELAHSSIRFSLGRFTTEEEIDYTIELVRKSIGRLRDLSPLWEMYKQGVDLNSIEWAHH

SEQ ID NO: 11654 - protein, 396 aa, Escherichia coli O157:H7 EDL933
MLDAQTIATVKATIPLLVETGPKLTAHFYDRMFTHNPELKEIFNMSNQRNGDQREALFNAIAAYASNIENLPALLPAVEKIAQKHTSFQIKPEQYNIVGEHLLATLDEMFSPGQEVLDAWGKAYGVLANVFINREAEIYNENASKAGGWEGTRDFRIVAKTPRSALITSFELEPVDGGAVAEYRPGQYLGVWLKPEGFPHQEIRQYSLTRKPDGKGYRIAVKREEGGQVSNWLHNHANVGDVVKLVAPAGDFFMAVADDTPVTLISAGVGQTPMLAMLDTLAKAGHTAQVNWFHAAENGDVHAFADEVKELGQSLPRFTAHTWYRQPSEADRAKGQFDSEGLMDLSKLEGAFSDPTMQFYLCGPVGFMQFAAKQLVDLGVKQENIHYECFGPHKVL

SEQ ID NO: 11655 - protein, 301 aa, Escherichia coli O157:H7 EDL933
  misc_feature (43)..(44): Xaa can be any naturally occurring amino acid
  unsure (1)..(301): unsure at all Xaa locations
MSIDKSYCGFIAIVGRPNVGKSTLLNKLLGQKISITSRKAQTXXHRIVGIHTEGAYQAIYVDTPGLHMEEKRAINRLMNKAASSSIGDVELVIFVVEGTRWTPDDEMVLNKLREGKAPVILAVNKVDNVQEKADLLPHLQFLASQMNFLDIVPISAETGLNVATIAAIVRKHLPEATHHFPEDYITDRSQRFMASEIIREKLMRFLGAELPYSVTVEIERFVSNERGGYDINGLILVEREGQKKMVIGNKGAKIKTIGIEARKDMQEMFEAPVHLELWVKVKSGWADDERALRSLGYVDDL

SEQ ID NO: 11656 - protein, 410 aa, Escherichia coli O157:H7 EDL933
MAKVSLEKDKIKFLLVEGVHQKALESLRAAGYTNIEFHKGALDDEQLKESIRDAHFIGLRSRTHLTEDVINAAEKLVAIGCFCIGTNQVDLDAAAKRGIPVFNAPFSNTRSVAELVIGELLLLLRGVPEANAKAHRGVWNKLAAGSFEARGKKLGIIGYGHIGTQLGILAESLGMYVYFYDIENKLPLGNATQVQHLSDLLNMSDVVSLHVPENPSTKNMMGAKEISLMKPGSLLINASRGTVVDIPALCDALASKHLAGAAIDVFPTEPATNSDPFTSPLCEFDNVLLTPHIGGSTQEAQENIGLEVAGKLIKYSDNGSTLSAVNFPEVSLPLHGGRRLMHIHENRPGVLTALNKIFAEQGVNIAAQYLQTSAQMGYVVIDIEADEDVAEKALQAMKAIPGTIRARLLY

SEQ ID NO: 11657 - protein, 306 aa, Escherichia coli O157:H7 EDL933
MSTLGHQYDNSLVSNAFGFLRLPMNFQPYDSDADWVITGVPFDMATSGRAGGRHGPAAIRQVSTNLAWEHNRFPWNFDMRERLNVVDCGDLVYAFGDAREMSEKLQAHAEKLLAAGKRMLSFGGDHFVTLPLLRAHAKHFGKMALVHFDAHTDTYANGCEFDHGTMFYTAPKEGLIDPNHSVQIGIRTEFDKDNGFTVLDACQVNDRSVDDVIAQVKQIVGDMPVYLTFDIDCLDPAFAPGTGTPVIGGLTSDRAIKLVRGLKDLNIVGMDVVEVAPAYDQSEITALAAATLALEMLYIQAAKKGE

SEQ ID NO: 11658 - protein, 406 aa, Escherichia coli O157:H7 EDL933
MRKEMNEFPVVLVINCGSSSIKFSVLDASDCEVLMSGIADGINSENAFLSVNGGEPAPLAHHSYEGALKAIAFELEKRNLNDSVALIGHRIAHGGSIFTESAIITDEVIDNIRRVSPLAPLHNYANLSGIESAQQLFPGVTQVAVFDTSFHQTMAPEAYLYGLPWKYYEELGVRRYGFHGTSHRYVSLRAHSLLNLAEDDSGLVVAHLGNGASICAVRNGQSVDTSMGMTPLEGLMMGTRSGDVDFGAMSWVASQTNQSLGDLERVVNKESGLLGISGLSSDLRVLEKAWHEGHERAQLAIKTFVHRIARHIAGHAASLRRLDGIIFTGGIGENSSLIRRLVMEHLAVLGVEIDTEMNNRSNSFGERIVSSENARVICAVIPTNEEKMIALDAIHLGKVNAPAEFA

SEQ ID NO: 11659 - protein, 447 aa, Escherichia coli O157:H7 EDL933
MTTILKHLPVGQRIGIAFSGGLDTSAALLWMRQKGAVPYAYTANLGQPDEEDYDAIPRRAMEYGAENARLIDCRKQLVAEGIAAIQCGAFHNTTGGLTYFNTTPLGRAVTGTMLVAAMKEDGVNIWGDGSTYKGNDIERFYRYGLLTNAELQIYKPWLDTDFIDELGGRHEMSEFMIACGFDYKMSVEKAYSTDSNMLGATHEAKDLEYLNSSVKIVNPIMGVKFWDESVKIPAEEVTVRFEQGHPVALNGKTFSDDVEMMLEANRIGGRHGLGMSDQIENRIIEAKSRGIYEAPGMALLHIAYERLLTGIHNEDTIEQYHAHGRQLGRLLYQGRWFDSQALMLRDSLQRWVASQITGEVTLELRRGNDYSILNTVSENLTYKPERLTMEKGDSVFSPDDRIGQLTMRNLDITDTREKLFGYAKTGLLSSSAASGVPQMENLENKGQ

SEQ ID NO: 11660 - protein, 390 aa, Escherichia coli O157:H7 EDL933
MKFVDEASILVVAGDGGNGCVSFRREKYIPKGGPDGGDGGDGGDVWMEADENLNTLIDYRFEKSFRAERGQNGASRDCTGKRGKDVTIKVPVGTRVIDQGTGETMGDMTKHGQRLLVAKGGWHGLGNTRFKSSVNRTPRQKTNGTPGDKRELLLELMLLADVGMLGMPNAGKSTFIRAVSAAKPKVADYPFTTLVPSLGVVRMDNEKSFVVADIPGLIEGAAEGAGLGIRFLKHLERCRVLLHLIDIDPIDGTDPVENARIIISELEKYSQDLAAKPRWLVFNKIDLLDKVEAEEKAKAIAEALGWEDKYYLISAASGLGVKDLCWDVMTFIIENPVVQAEEAKQPEKVEFMWDDYHRQQLEEIAEEDDEDWDDDWDEDDEEGVEFIYKR

SEQ ID NO: 11661 - protein, 103 aa, Escherichia coli O157:H7 EDL933 [sequence omitted]

SEQ ID NO: 11662 - protein, 328 aa, Escherichia coli O157:H7 EDL933
MSHVELQPGFDFQQAGKEVLAIERECLAELDQYINQNFTLACEKMFWCKGKVVVMGMGKSGHIGRKMAATFASTGTPSFFVHPGEAAHGDLGMVTPQDVVIAISNSGESSEITALIPVLKRLHIPLICITGRPESSMARAADVHLCVKVAKEACPLGLAPTSSTTATLVMGDALAVALLKARGFTAEDFALSHPGGALGRKLLLRVNDIMHTGDEIPHVKKTASLRDALLEVTRKNLGMTVICDDNMMIEGIFTDGDLRRVFDMGVDVRQLSIADVMTPGGIRVRPGILAVEALNLMQSRHITSVMVADGDHLLGVLHMHDLLRAGVV

SEQ ID NO: 11663 - protein, 1517 aa, Escherichia coli O157:H7 EDL933
  misc_feature (382)..(382): Xaa can be any naturally occurring amino acid
  misc_feature (1285)..(1285): Xaa can be any naturally occurring amino acid
  unsure (1)..(1517): unsure at all Xaa locations
MTRKPRRHALSVPVRSGSEVGFPQSLGEVHDMLYDKSLERDNCGFGLIAHIEGEPSHKVVRTAIHALARMQHRGAILADGKTGDGCGLLLQKPDRFFRIVAHERGWRLAKNYAVGMLFLNKDPELAAAARRIVEEELQRETLSIVGWRDVPTNEGVLGEIALSSLPRIEQIFVNAPAGWRPRDMERRLFIARRRIEKRLEADKDFYVCSLSNLVNIYKGLCMPADLPRFYLDLADLRLESAICLFHQRFSTNTVPRWPLAQPFRYLAHNGEINTITGNRQWARARTYKFQTPLIPDLHDAAPFVNEIGSDSSSMDNMLELLLAGGMDIIRAMRLLVPPAWQNNPDMDPELRAFFDFNSMHMEPWDGPAGIVMSDGRFAACNXDRNGLRPARYVITKDKLITCASEVGIWDYQPDEVVEKGRVGPGELMVIDTRSGRILHSAETDDDLKSRHPYKEWMEKNVRRLVPFEDLPDEEVGSRELDDDTLASYQKQFNYSAEELDSVIRVLGENGQEAVGSMGDDTPFAVLSSQPRIIYDYFRQQFAQVTNPPIDPLREAHVMSLATSIGREMNVFCEAEGQAHRLSFKSPILLYSDFKQLTTMKEEHYRADTLDITFDVTKTTLEATVKELCDKAEKMVRSGTVLLVLSDRNIAKDRLPVPAPMAVGAIQTRLVDQSLRCDANIIVETASARDPHHFAVLLGFGATAIYPYLAYETLGRLVDTHAIAKDYRTVMLNYRNGINKGLYKIMSKMGISTIASYRCSKLFEAVGLHNDVVGLCFQGAVSRIGGASFEDFQQDLLNLSKRAWLARKPISQGGLLKYVHGGEYHAYNPDVVRTLQQAVQSGEYSDYQEYAKLVNERPATTLRDLLAITPGENAVNIADVEPASELFKRFDTAAMSIGALSPEAHEALAEAMNSIGGNSNSGEGGEDPARYGTNKVSRIKQVASGRFGVTPAYLVNADVIQIKVAQGAKPGEGGQLPGDKVTPYIAKLRYSVPGVTLISPPPHHDIYSIEDLAQLIFDLKQVNPKAMISVKLVSEPGVGTIATGVAKAYADLITIAGYDGGTGASPLSSVKYAGCPWELGLVETQQALVANGLRHKIRLQVDGGLKTGVDIIKAAILGAESFGFGTGPMVALGCKYLRICHLNNCATGVATQDDKLRKNHYHGLPFKVTNYFEFIARETRELMAQLGVTRLVDLIGRTDLLKELDGFTAKQQKLALSKLLETAEPHPGKALYCTETNPPFDNGLLNAQLLQQAKPFVDERQSKTFWFDIRNTDRSVGASLSGYIAXTHGDQGLAADPIKAYFNGTAGQSFGVWNAGGVELYLTGDANDYVGKGMAGGLIAIRPPVGSAFRSHEASIIGNTCLYGATGGRLYAAGRAGERFGVRNSGAITVVEGIGDNGCEYMTGGIVCILGKTGVNFGAGMTGGFAYVLDESGDFRKRVNPELVEVLSVDDLAIHEEHLRGLITEHVQHTGSQRGEEILANWSTFATKFALVKPKSSDVKALLGHRSRSAAELRVQAQ

SEQ ID NO: 11664 - protein, 305 aa, Escherichia coli O157:H7 EDL933
MQCGISDGLPGFSYADADGKFSGIDVDVCRGVAAAVFGDDTKVKYTPLTAKERFTALQSGEVDLLSRNTTWTSSRDAGMGMAFTGVTYYDGIGFLTHDKAGLKSAKELDGATVCIQAGTDTELNVADYFKANNMKYTPVTFDRSDESAKALESGRCDTLASDQSQLYALRIKLSNPAEWIVLPEVISKEPLGPVVRRGDDEWFSIVRWTLFAMLNAEEMGINSQNVDEKAANPATPDMAHLLGKEGDYGKDLKLDNKWAYNIIKQVGNYSEIFERNVGSESPLKIKRGQNNLWNNGGIQYAPPVR

SEQ ID NO: 11665 - protein, 462 aa, Escherichia coli O157:H7 EDL933
MTANSPLQRVGQEKGIAMGSQELQRKLGFWAVLAIAVGTTVGSGIFVSVGEVAKAAGTPWLTVLAFVIGGLIVIPQMCVYAELSTAYPENGADYVYLKNAGSRPLAFLSGWASFWANDAPSLSIMALAIVSNLGFLTPIDPLLGKFIAAGLIIAFMLLHLRSVEGGAAFQTLITIAKIIPFTIVIGLGIFWFKAENFAAPATTAIGATGSFMALLAGISATSWSYTGMASICYMTGEIKNPGKTMPRALIGSCLLVLVLYTLLALVISGLMPFDKLANSETPISDALTWIPALGSTAGIFVAITAMIVILGSLSSCVMYQPRLEYAMAKDNLFFKCFGHVHPKYNTPDVSIILQGALGIFFIFVSDLTSLLGYFTLVMCFKNTLTFGSIIWCRKRDDYKPLWRTPAFGLMTPLAIASSLILVASTFVWAPIPGLICAVIVIATGLPAYAFWAKRSRQLNALS

SEQ ID NO: 11666 - protein, 278 aa, Escherichia coli O157:H7 EDL933
MKKNRAFLKWAGGKYPLLDDIKRHLPKGECLVEPFVGAGSVFLNTDFSRYILADINSDLISLYNIVKMRTDEYVQAARELFVPETNCAEVYYQFREEFNKSQDPFRRAVLFLYLNRYGYNGLCRYNLRGEFNVPFGRYKKPYFPEAELYHFAEKAQNAFFYCESYADSMARADDASVVYCDPPYAPLSATANFTAYHTNSFTLEQQAHLAEIAEGLVERHIPVLISNHDTMLTREWYQRAKLHVVKVRRSISSNGGTRKKVDELLALYKPGVVSPAKK

SEQ ID NO: 11667 - protein, 425 aa, Escherichia coli O157:H7 EDL933
MKPMHIAMALLSAAMFFVLAGVFMGVQLELDGTKLVVDTASDIRWQWVFIGTAVVFFFQLLRPAFQKGLKSVSGPKFILPAIDGSTVKQKLFLVALLVLAVAWPFMVSRGTVDIATLTMIYIILGLGLNVVVGLSGLLVLGYGGFYAIGAYTFALLNHYYGLGFWTCLPIAGLMAAAAGFLLGFPVLRLRGDYLAIVTLGFGEIVRILLLNNTEITGGPNGISQIPKPTFFGLEFSRTAREGGWDTFSNFFGLKYDPSDRVIFLYLVALLLVVLSLFVINRLLRMPLGRAWEALREDEIACRSLGLSPRRIKLTAFTISAAFAGFAGTLFAARQGFVSPESFTFAESAFVLAIVVLGGMGSQFAVILAAILLVVSRELMRDFNEYSMLMLGGLMVLMMIWRPQGLLPMTRPQLKLKNGAAKGEQA

SEQ ID NO: 11668 - protein, 401 aa, Escherichia coli O157:H7 EDL933
  misc_feature (51)..(51): Xaa can be any naturally occurring amino acid
  misc_feature (145)..(145): Xaa can be any naturally occurring amino acid
  unsure (1)..(401): unsure at all Xaa locations
MFHLDTLATLVAATLTLLLGRKLVHSVSFLKKYTIPEPVAGGLLVALALLXLKKSMGWEVNFDMSLRDPLMLAFFATIGLNANIASLRAGGRVVGIFLIVVVGLLVMQNAIGIGMASLLGLDPLMGLLAGSITLSGGHGTGAAWXKLFIERYGFTNATEVAMACATFGLVLGGLIGGPVARYLVKHSTTPNGIPDDQEVPTAFEKPDVGRMITSLVLIETIALIAICLTVGKIVAQLLAGTAFELPTFVCVLFVGVILSNGLSMMGFYRVFERAVSVLGNVSLSLFLAMALMGLKLWELASLALPMLAILVVQTIFMALYAIFVTWRMMGKNYDAAVLAAGHCGFGLGATPTAIANMQAITERFGPSHMAFLVVPMVGAFFIDIVNALVIKLYLMLPIFAG

SEQ ID NO: 11669 - protein, 562 aa, Escherichia coli O157:H7 EDL933
  misc_feature (353)..(353): Xaa can be any naturally occurring amino acid
  unsure (1)..(562): unsure at all Xaa locations
MASSGTSSTRKRFTGAEFIVHFLEQQGIKIVTGIPGGSILPVYDALSQSTQIRHILARHEQGAGFIAQGMARTDGKPAVCMACSGPGATNLVTAIADARLDSIPLICITGQVPASMIGTDAFQEVDTYGISIPITKHNYLVRHIEELPQVMSDAFRIAQSGRPGPVWIDIPKDVQTAVFEIEAQPAVAEKAVAPAFSEESIRDAAAMINAAKRPVLYLGGGVINAPARVRELAEKAQLPTTMTLMALGMLPKAHPLSLGMLGMHGVRSTNYILQEADLLIVLGARFDDRAIGKTEQFCPNAKIIHVDIDRAELGKIKQPHVAIQADVDDVLAQLIPQVEAQPRAEWHQLVADXQREFPCPIPKACDPLSHYGLINAVAACVDDNAIITTDVGQHQMWTAQAYPLNRPRQWLTSGGLGTMGFGLPAAIGAALANPDRKVLCFSGDGSLMMNIQEMATASENQLDVKIILMNNEALGLVHQQQSLFYKQGVFAATYPGKINFMQIAAGFGLETCDLNNEADPQAALQEIINRPGPALIHVRIDAEEKVYPMVPPGAANTEMVGE

SEQ ID NO: 11670 - protein, 548 aa, Escherichia coli O157:H7 EDL933
MDSQRNLLVIALLFVSFMIWQAWEQDKNPQPQAQQTTQTTTTAAGSAADQGVPASGQGKLISVKTDVLDLTINTRGGDVEQALLPAYPKELNSTQPFQLLETSPQFIYQAQSGLTGRDGPDNPANGPRPLYNVEKDAYVLAEGQNELQVPMTYTDAAGNTFTKTFVLKRGDYAVNVNYNVQNAGEKPLEISTFGQLKQSITLPPHLDTGSSNFALHTFRGAAYSTPDEKYEKYKFDTIADNENLNISSKGGWVAMLQQYFATAWIPHNDGTNNFYTANLGNGIAAIGYKSQPVLVQPGQTGAMNSTLWVGPEIQDKMAAVAPHLDLTVDYGWLWFISQPLFKLLKWIHSFVGNWGFSIIIITFIVRGIMYPLTKAQYTSMAKMRMLQPKIQAMRERLGDDKQRISQEMMALYKAEKVNPLGGCFPLLIQMPIFLALYYMLMGSVELRQAPFALWIHDLSAQDPYYILPILMGVTMFFIQKMSPTTVTDPMQQKIMTFMPVIFTVFFLWFPSGLVLYYIVSNLVTIIQQQLIYRGLEKRGLHSREKKKS

SEQ ID NO: 11671 - protein, 330 aa, Escherichia coli O157:H7 EDL933
MKTAYIAKQRQISFVKSHFSRQLEERLGLIEVQAPILSRVGDGTQDNLSGCEKAVQVKVKALPDAQFEVVHSLAKWKRQTLGQHDFSAGEGLYTHMKALRPDEDRLSPLHSVYVDQWDWERVMGDGERQFSTLKSTVEAIWAGIKATEAAVSEEFGLAPFLPDQIHFVHSQELLSRYPDLDAKGRERAIAKDLGAVFLVGIGGKLSDGHRHDVRAPDYDDWSTPSELGHAGLNGDILVWNPVLEDAFELSSMGIRVDADTLKHQLALTGDEDRLQLEWHQALLRGEMPQTIGGGIGQSRLTMLLLQLPHIGQVQCGVWPAAVRESVPSLL

SEQ ID NO: 11672 - protein, 548 aa, Escherichia coli O157:H7 EDL933
MNGAQWVVHALRAQGVNTVFGYPGGAIMPVYDALYDGGVEHLLCRHEQGAAMAAIGYARATGKTGVCIATSGPGATNLITGLADALLDSIPVVAITGQVSAPFIGTDAFQEVDVLGLSLACTKHSFLVQSLEELPRIMAEAFDVASSGRPGPVLVDIPKDIQLASGDLEPWFTTVENEVTFPHAEVEQARQMLAKAQKPMLYVGGGVGMAQAVPALREFLATTKMPATCTLKGLGAVEADYPYYLGMLGMHGTKAANFAVQECDLLIAVGARFDDRVTGKLNTFAPHASVIHMDIDPAEMNKLRQAHVALQGDLNALLPALQQPLNINDWQQYCAQLRDEHAWRYDHPGDAIYAPLLLKQLSDRKPADCVVTTDVGQHQMWAAQHIAHTRPENFITSSGLGTMGFGLPAAVGAQVARPNDTVVCISGDGSFMMNVQELGTVKRKQLPLKIVLLDNQRLGMVRQWQQLFFQERYSETTLTDNPDFLKLASAFGIPGQHITRKDQVEAALDTMLNSDGPYLLHVSIDELENVWPLVPPGASNSEMLEKLS

SEQ ID NO: 11673 - protein, 298 aa, Escherichia coli O157:H7 EDL933
MAAIAFIGLGQMGSPMASNLLQQGHQLRVFDVNAEAVRHLVDKGATPAANPAQAAKDAEFIITMLPNGDLVRSVLFGENGVCESLSTDALVIDMSTIHPLQTDKLIADMQAKGFNMMDVPVGRTSANAITGTLLLLAGGTAEQVERATPILMAMGSELINAGGPGMGIRVKLINNYMSIALNALSAEAAVLCEALNLPFDVAVKVMSGTAAGKGHFTTSWPNKVLSGDLSPAFMIDLAHKDLGIALDVANQLHVPMPLGAASREVYSQARAAGRGRQDWSAILEQVRVSAGMTAKVKM

SEQ ID NO: 11674 - protein, 810 aa, Escherichia coli O157:H7 EDL933
MSVIAQAGAKGRQLHKFGGSSLADVKCYLRVAGIMAEYSQPDDMMVVSAAGSTTNQLINWLKLSQTDRLSAHQVQQTLRRYQCDLISGLLPAEEADSLISAFVSDLERLAALLDSGINDAVYAEVVGHGEVWSARLMSAVLNQQGLPAAWLDAREFLRAERAAQPQVDEGLSYPLLQQLLVQHPGKRLVVTGFISRNNAGETVLLGRNGSDYSATQIGALAGVSRVTIWSDVAGVYSADPRKVKDACLLPLLRLDEASELARLAAPVLHARTLQPVSGSEIDLQLRCSYTPDQGSTRIERVLASGTGARIVTSHDDVCLIEFQVPTSQDFKLAHKEIDQILKRAQVRPLAVGVHNDRQLLQFCYTSEVADSALKILDEAGLPGELRLRQGLALVAMVGAGVTRNPLHCHRFWQQLKGQPVEFTWQSDDGISLVAVLRTGPTESLIQGLHQSVFRAEKRIGLVLFGKGNIGSRWLELFAREQSTLSARTGFEFVLAGVVDSRRSLLSYDGLDASRALAFFNDEAVEQDEESLFLWMRAHPYDDLVVLDVTASQQLADQYLDFASHGFHVISANKLAGASDSNKYRQIHDAFEKTGRHWLYNATVGAGLPINHTVRDLIDSGDTILSISGIFSGTLSWLFLQFDGSVPFTELVDQAWQQGLTEPDPRDDLSGKDVMRKLVILAREAGYNIEPDQVRVESLVPAHCEGGSIDHFFENGDELNEQMVQRLEAAREMGLVLRYVARFDANGKARVGVEAVREDHPLASLLPCDNVFAIESRWYRDNPLVIRGPGAGRDVTAGAIQSDINRLAQLL

SEQ ID NO: 11675 - protein, 220 aa, Escherichia coli O157:H7 EDL933
MELYLDTANVAEVERLAHIFPIAGVTTNPSIIAASKESIWEVLPRLQKAIGDEGILFAQTMSRDAQGMVEEAKRLRDAIPGIVVKIPVTSEGLAAIKILKKEGITTLGTAVYSAAQGLLAALAGAKYVAPYVNRVDAQGGDGIRTVQELQALLEMHAPESMVLAASFKTPRQALDCLLAGCESITLPLDVAQQMLNTPAVESAIEKFEHDWNAAFGTTHL

SEQ ID NO: 11676 - protein, 441 aa, Escherichia coli O157:H7 EDL933
MTHDNIDILVVDDDISHCTILQALLRGWGYNVALANSGRQALEQVRERVFDLVLCDVRMAEMDGIATLKEIKALNPAIPVLIMTAYSSVETAVEALKTGALDYLIKPLDFDNLQATLEKALAHTHIIDAETPAVTASQFGMVGKSPAMQHLLSEIALVAPSEATVLIHGDSGTGKELVARAIHASSARSEKPLVTLNCAALNESLLESELFGHEKGAFTGADKRREGRFVEADGGTLFLDEIGDISPMMLVRLLRAIQEREVQRVGSNQTISVDVRLIAATHRDLAAEVNAGRFRQDLYYRLNVVAIEVPSLRQRREDIPLLAGHFLQRFAERNRKAVKGFTPQAMDLLIHYDWPGNIRELENAVERAVVLLTGEYISERELPLAIASTPIPLAQSLDIQPLVEVEKEVILAALEKTGGNKTEAARQLGITRKTLLAKLSR

SEQ ID NO: 11677 - protein, 449 aa, Escherichia coli O157:H7 EDL933
MSEIVVSKFGGTSVADFDAMNRSADIVLSDANVRLVVLSASAGITNLLVALAEGLEPGERFEKLDAIRNIQFAILERLRYPNVIREEIERLLENITVLAEAAALATSPALTDELVSHGELMSTLLFVEILRERDVQAQWFDVRKVMRTNDRFGRAEPDVAALAELAALQLLPRLNEGLVITQGFIGSENKGRTTTLGRGGSDYTAALLAEALHASRVDIWTDVPGIYTTDPRVVSAAKRIDEIAFAEAAEMATFGAKVLHPATLLPAVRSDIPVFVGSSKDPRAGGTLVCNKTENPPLFRALALRRNQTLLTLHSLNMLHSRGFLAEVFGILARHNISVDLITTSEVSVALTLDTTGSTSTGDTLLTQSLLMELSALCRVEVEEGLALVALIGNDLSKACGVGKEVFGVLEPFNIRMICYGASSHNLCFLVPGEDAEQVVQKLHSNLFE

SEQ ID NO: 11678 - protein, 241 aa, Escherichia coli O157:H7 EDL933
  misc_feature (11)..(11): Xaa can be any naturally occurring amino acid
  unsure (1)..(241): unsure at all Xaa locations
MMRSVTMKPVXLVVBDDTAICALLQDVLSEHVFTVSVCHTGQEAILRIEGDPDIALVVLDMMLPDTNGLRVLQQIQKLRPTLPVVMLTGMGSESDVVVGLEMGADDYICKPFTPRVVVARLKAVLRRVGALAVNDEKSAGLSFNGWYLDTMRCQLHNPLQQHVELTQGEYGLLLALAQNARRVLSREQLLAFTHSDSVEVFDRTIDVLIMRLRRKIELNPHQPMLIKTLRGLGYVFAADVH

SEQ ID NO: 11679 - protein, 470 aa, Escherichia coli O157:H7 EDL933
MVDQVKVVADDQAPAEQSLRRNLTNRHIQLIAIGGAIGTGLFMGSGKTISLAGPSIIFVYMIIGFMLFFVMRAMGELLLSNLEYKSFSDFASDLLGPWAGYFTGWTYWFCWVVTGMADVVAITAYAQFWFPDLSDWVASLAVIVLLLTLNLATVKMFGEMEFWFAMIKIVAIVSLIVVGLVMVAMHFQSPTGVEASFAHLWNDGGWFPKGLSGFFAGFQIAVFAFVGIELVGTTAAETKDPEKSLPRAINSIPIRIIMFYVFALIVIMSVTPWSSVVPEKSPFVELFVLVGLPAAASVINFVVLTSAASSANSGVFSTSRMLFGLAQEGVAPKAFAKLSKRAVPAKGLTFSCICLLGGVVMLYVNPSVIGAFTMITTVSAILFMFVWTIILCSYLVYRKQRPHLHEKSIYKMPLGKLMCWVCMAFFVFVVVLLTLEDDTRQALLVTPLWFIALGLGWLFIGKKRAAELRK

SEQ ID NO: 11680 - protein, 268 aa, Escherichia coli O157:H7 EDL933
MFTDTINKCAANAARIARLSANNPLGFWVSSAMAGAYVGLGIILIFTLGNLLDPSVRPLVMGATFGIALTLVIIAGSELFTGHTMFLTFGVKAGTISHGQMWAILPQTWLGNLVGSVFVAMLYSWGGGSLLPVDTSIVHSVALAKTTAPAMVLFFKGALCNWLVCLAIWMALRTEGAAKFIAIWWCLLAFIASGYEHSIANMTLFALSWFGNHSEAYTLAGIGHNLLWVTLGNTLSGAVFMGLGYWYATPKANRPVADKFNQTETAAG

SEQ ID NO: 11681 - protein, 722 aa, Deinococcus radiodurans R1
MAGPIPFFLPLSPPVPKESRMKTLFLAPTRNGVGLSSTALGLARALERQSLKVAFLKPIAQTYEPRTDDSVHFARAVAHLTTPDPIPLTRAEELLSQGGEEDLMEQVIALAREAAGEGSDVLIAEGLALNERNVYAGTLNARLARNLEADTVLVSSLAGVTPAELADELEIAAQGYRRSDGSGLAGFVLNFAPRELDFGSLMAELRSRSRVLASGELPLLGVVSLDPALRQLRTLDVARALDAEIINAGEAESRRVSSTVVTARSVPQMTNLFTSGALIVTPADREDVIMAAALSHLSGTPLAGLMYTSGSAPEATIQQLCEVALTSSLPVLRVPTNSFETASRLVHLDFRVPHDDPRRMDRMLDYIADRLDTVPLGARLRAPGVAGERRLPPSAFRYELIQRARAANKRIVLPEGDEPRTVKAAIRCTEKGIARCVLLAPPEKVRQVAQGQGLELPEGLEIIDPETVRGKYVAPMVELRKSKGLTEPQAEAQLEDSVVLGTMMLALGEVDGLVSGAVHTTASTVRPALQLIKTAPGSSLVSSVFFMLMPEQVLVYGDAAINPDPNAQELADIAIQSADSAHAFGIPVRVAMLSYSTGESGSGEDVEKVKEATKLVRERRPELLVDGPLQYDAASVPSVGRSKAPDSPVAGRATVFIFPDLNTGNTTYKAVQRSAGVVAVGPMLQGLRKPVNDLSRGALVDDIVYTIALTAIQATQSAADCG

SEQ ID NO: 11682 - protein, 438 aa, Deinococcus radiodurans R1
MAFRDVLNIEVAAGNGGDGSMSFHRAKYMEKGGPDGGHGGRGGSIILRAIEGVESLERLVGRRKFKAENGRYGEGRLRQGADGQDTYIDVPVGTTAFDEDSGKVIADLVNVGQEKVIAKGGLGGRGNSTFTSSTRQAPRFAELGTPGQKRRVRLELRLIADVGLVGYPNAGKSSLLAALSRANPAIADYPFTTLSPILGVVQREDEQGVSLDERFTMADIPGIIEGASEGKGLGLEFLRHISRTRLLVYVLDVTRNPVEELQQLQAELRAYDPSLLDNVALVALNKVELVEPDLAQMVEDELAEQGLPVLQVSAKEGTGLNTLRETLFQLLPEFELWAQSNALEVEPDTVVDEALQIVFREDAPAKGEGAPERVWEVHGGGFEERIVRFSRYLEDAAEYLGNLFKRQGLYNALRRAGAREGDTVEIGTFRFEYFDDEE

SEQ ID NO: 11683 - protein, 378 aa, Deinococcus radiodurans R1
MMIYLDYAATHPLTPAALAAYAEAAALPGNPASVHAAGQAAREKLEEGRARMAAAFDVDPRTLTLNSGGTEGDNHVLLGAAQAWQERHGSPGHLVTTPTEHSAVLAPARHLAAHGWDVTWLEPDSAGHYSPEQLGAALRDDTALVSIHHANNEIGTVQPTAALAAVAAARGVPYHTDAVQAPGVLPVNLAEWGVTYATFSAHKWGGPRGVGALYVQRGAELPPVTLGGGQEGGLRPGTQNTAGAYAAGVALTEAAEAQPATFAHLRDLQTAFMDAVREIPGLTFNHPADGSPKVVSLTIPGADGEALLMNLDMLGVSASAGSACSAGTMQASHVLTAIGLTEADARASLRFSFGAATTRGEVQQAAAALRQAAEWSRG

SEQ ID NO: 11684 - protein, 310 aa, Deinococcus radiodurans R1
MGTSSAASAAEPRAGSGITTAFLGLGAMGFPMAAHLAAQAASGGGRALVWNRTEAKAQDHAARAGSEAVSLADTAQADVLFTCLPTSAEVDEIIAALSPHLRPGTVWVDCTSGHPDAARRQRETLDALGVKFLDAPVSGGTSGAEAGTLTVMLGGPADEIDAASPHLAFAGKVVRVGETGAGFAVKAVNNMLLAVNLWAAGEGLAALGRSGVDLGAALSVINASSGRSNASENLIPQRVLTREFPVTFALGLLAKDTGIALDVVQSAKASAPTLAQVAGLIRAAAHVVGPQEDHTAALKLLEQMNAQEIR

SEQ ID NO: 11685 - protein, 388 aa, Deinococcus radiodurans R1
MTSPFRLSARAQSLKPSATVAVTSRALELQRQGLDVISMSVGEPDFDTPPHVKAAGIAAIEEGKTKYTPVSGIPELREAISAKFRRENGLDYAPNAVTVTSGGKQALFNAFFALLNPGDEVLIPAPHWVSYPEMVALTGAVPVTVPTTPQQGFQLDPDALAAAITPRTRMVILNSPGNPTGAVFPPETLRAVADLATQHGLMIVTDEIYEHLVYDAEQVSIGTYAPEHTLTINGASKAYAMTGWRIGYAGGPREVIAAMNALQSQSTSNASSVSQYAALAALEQHEETMRFIDRARTAYRERRDRIVAGLNALGLPTPTPQGAFYVMADTRAIHTDELEAARIILDEAQVAVVPGTDFAAPGQVRLSYATSMDNIEEVLRRLEGVVRR

SEQ ID NO: 11686 - protein, 311 aa, Deinococcus radiodurans R1
MTDFSASPDLQDPTTHAGFVAIVGKPNVGKSTLLNAFLGTKVAPTSPRPQTTRRGVRGIYTLDNRQLIFVDTPGLHKPKDALGKYMNSEVHSALSDVDAVVWVVDLRHPPTDEDRLVANSVRDLPKPLFLVGNKTDAAKYPEEAMKLYGALLEGRGSDLPVSETMLSAQNSVNAVATLREQLLEVLPENPFFFPQGAASDQSREMWAAEIIREEAMKKLRDELPYAVATRVNRWTEREDGLQRIEGEIIVEKNAHKGMVIGAGGKQLREIGQAARKQLEVFLNHKVYLGLEVIVIPGWREDEEALRELGYE

SEQ ID NO: 11687 - protein, 301 aa, Deinococcus radiodurans R1
MNISILGIPMDLGAGRRGVDMGPSALRNAHLAHTLRDLGHDVTDLGDIEVALPETLDKHETGGLVFFEPILDACRTAAERVMALPGGTFPLTLGGDHSVSMGTVTGNGLRGRPQRTGVIWVDAHTDYNTPESSPSGNIHGMPVAHLTGRGDERLTRLGGLVTGEWGIRPEDVVMIGIRSVDARERELLREAGIKAYTMKDVDQLGITRIHEETQERLNDVERLHVSFDADALDPGVCPGVGTPVPGGLSYREGHLLMELLSESGRVTSMDIVEVNPILDTRNQTAEVMVGMAASLLGQRIL

SEQ ID NO: 11688 - protein, 402 aa, Deinococcus radiodurans R1
MSKEKIVLAYSGGLDTSIILKWLQTERNYDVVCFTADLGQGDEVEEARVKALNTGAVAAYALDLREEFVRDYVFPMMRSSALYEGYYLLGTSIARPLIAKKMVEIAEKEGAVAISHGATGKGNDQVRFEMSAYALKPDIVTVAPWRDWDFQGRADLEAFAREHGIPVPTTKKDPWSMDANMLHISYEGGPLEDPWTEPPTHMFKLTVNPEDAPSEAEYVEIEYVNGDPVSINGEQLSPAALLTKANEIAGRHGVGRIDLVENRFVGMKSRGVYETPGGTLLYHARRAVESLTLDREVLHQRDALGPKYAELVYNGFWFAPEREALQVYFDHVAKSVTGTARLKLYKGNCIVAGRKAERSLYDKDLVSFEAGGDYNQHDAGAFIKLNSLRMRVQKRVEDKGKK

SEQ ID NO: 11689 - protein, 120 aa, Deinococcus radiodurans R1
MERIMFRAKIHRATVTQADLDYVGSVTIDQDLLDAADILVNEKVDIWNITNGNRLHTYALSGPRGSGVIGINGAAAHLMRPGDMVIIAAFGNFSEEEARTLEPKVVLVDAKNRLLELQPV

SEQ ID NO: 11690 - protein, 213 aa, Deinococcus radiodurans R1
MSPTPSAAAFAAAPLPESRRAVHRGETLYYAGDPSPTLYRLETGLLRAVRLSPQGRNLTVRHIQPGDIFGEEVLHGQPRTHQLVALTDAVVTPLHVEQLSVRDLWDVTRSLSLQLQRAVQGGIHVQDGDLRERIARYLLSLADSSLGGTHPGGQRFVRATHELIAEGTGATRESVSKLIGEMRDDGLLLPAYRCLTLTDEAELRRLSGLTEPS

SEQ ID NO: 11691 - protein, 133 aa, Deinococcus radiodurans R1
MCRVSIVGGGGPYLASRSTPAENLKGHAGKRATAACGLLLVRARRFEMATGRVKWFNAEKGFGFIETEGSADVFAHYSAINSSGFRKLNEGDEVEFEIEPGQNGKGPQAKNIVVTKAAPAPAYGDRPRRDDRW

SEQ ID NO: 11692 - protein, 655 aa, Deinococcus radiodurans R1
MTRRAPVRRFSGRWSSRSGSWKAGLLTLHLLTLPVLVQGTAAATTAHVTASANAPTTPAPQPPTWTPNKGNPRLMPENYTVNRFFADLQAGKVERVKLDGAGNTQVFFKEPAGGPNPRWLLLPPDAATLARLRGSGVTMQVTPGGSRFAWLGQALPLVLTALILAVLWRSLRGNGGGGASSFAKSKAAIISEGQIKLTFADVAGCDEAKQDLQEVVDFLRQPEKYHQLGARIPHGVLLVGPPGSGKTLLAKAVAGEAKVPYFSISGSDFVEMFVGVGAARVRDLFEQARKSSPCIVFIDEIDAVGRKRGMNIQGGNDEREQTLNQLLVEMDGFGSGQDVIILAATNRPDVLDAALLRPGRFDRQVVVDAPDVRGREQILRIHSRKKPLDVSVDLGVIARRTAGMVGADLENLLNEAALLAAREGRNRITGRDVDEARDRVLMGPERRSMVVREADRKVTAYHEVGHALAAQLLPNAHRVAKLTVVPRGRAAGYMLPDADDRLHVTRAALEDMIAVALAGRAAEEVVYGEVTTGAQNDFQQATGLARRMVTEWGMSGRIGKVALASDEGNYLGGGPQPLPTSEHTSQVVDEEVRALIDAAYARVLALLREYLPQVHQIVTVLMQRETLSGEEFATLLAGGSLEPLPPVGQVALAPA

SEQ ID NO: 11693 - protein, 875 aa, Deinococcus radiodurans R1
MTIGHSSFRMRAVKPCPHSGGFPLNPERFTEASAVAINAAQQLAQENHNQNLTHFHVLRTLLDNDTASRALTLAGGDLNTARAALDAEIAKLPKVQGSDGQLYLDPALNRAFQKADTLAAQLGDSFVAADTLLLALRGEYRGRGLPDEVSLNRAVTEQRKGKTVTNKTSEQQFDALNKYGTDLTQRARDGKFDPVIGRDEEIRRVMQILLRRSKNNPVLIGEPGVGKTAIAEGLAMRIVKGDVPEGLRDKKIVSLEMGSLLAGAKFRGEFEERLKGVIDEVVKSAGEIILFVDEIHTIVGAGKTEGSPDAGNMLKPALARGELHLIGATTLDEYREIEKDAALERRFQPVFVDEPSVEDTISILRGIKERYQVHHNVEITDPALVAAATLSNRYITDRQLPDKAIDLIDESAARLRMALESSPERIDQLSRRKLQLEIEREALKREKDVDSQNRLLDIENQLKTLTDELNEVRSRWEAERGEVAALREKREKLDAVRTQIEKARRDYDLEEAARLEYGELPALEKDVQDLEKKLKSAEFAHMEVTEEDIAAVVSRWTGIPVSKLMEGEREKLLHLEEQLHGRVIGQDRAIVSVSDAIRRARAGLNDPNRPLGSFMFLGPSGVGKTELAKALAEFLFDSSDAMVRIDMSEYMEKHTVARLIGAPPGYVGFEEGGQLTEAVRRRPYAVILFDEIEKAHPDVFNVLLQVLDDGRLTDGQGRTVDFRNTLIIMTSNIGSPLILEMQQRGEDAETIKSAVMDELRGEFRPEFLNRVDDIIVFDALTAKDLQSIVDIQLGGLRRRLAERRITLHLTEDAKDKLAELGYDPAYGARPLRRTISQYIETPLAREILGGQIQDGSVLNVDYGDGGFTFNSGSLN

SEQ ID NO: 11694 - protein, 393 aa, Deinococcus radiodurans R1
MSKAVIVAASRTPTGKFLGALTDVPAVELGAITLRETLRRSGMPAELVEEVIMGQVVQAGCGQNPARQAALRAGVSHEAGALTINKVCGSGLKAVMLAAQSIRAGDQQAVLAGGMESMSNAPHLLPGARKGYRLGHATVLDANTHDGLWCSINDEGMGLTGERVAEKYSIGREEQDAYATGSHRKAVAAAQGGLFKDEIVPVTIKGRKGDVIVDTDEGPRADTSEETLGKLKPAFKKDGSVTAGNAPGLNDGAASLLVVSEELAQAHELTPLAEIVDYASGGLAPEWVMMTPVPATQKLLKKMNIQAGDVDLWELNEAFSVQSLAVARELGLDAERVNVNGGAVALGHPIGASGARILVTLLSALKQQDKELGVATLCMGGGNGLALAVRRLG

SEQ ID NO: 11695 - protein, 394 aa, Deinococcus radiodurans R1
MAICPELHYAGMSMIAHVINPGISGVKLACAVIEPGQNPAFPSHLQVSLTREELPLEAAPDELGLDALAERILEQTAAWPAPDAVVGRGGLMGRVPAGTYHVTPELARYVLENVSGSQPADDPNPGIGAPLALRVAQARGVPAYIVDPQSVDELLPEAHMTGVPGVRREARFHALNARAVARRAAYEVGKQFREARVVVAHLGVTTSVTAFDQGRAIDTTGTAPDGGPMGARQSGPLPTRAVIRLLQTQSESELLRLLTRGSGFFALTGTADLSEIERRQEQGEDSVVQTAIAAFVHQVCKAIGEQTAALPGRPDAVALTGGIARWDAVVDRIERRLAWVAPFIVLPGELELEALAEGAGRVLLGLEGVREWTPEGVTLRPAAPLVQVETVEEV

SEQ ID NO: 11696 - protein, 194 aa, Deinococcus radiodurans R1
MTAPHDPLDDIQADPWALWLSGRTRTALELPHYRRAAVLVALTREADPRVLLTVRSSELPTHKGQIAFPGGSLDAGETPTQAALREAQEEVALDPAAVTLLGELDDVFTPVGFHVTPVLGRIAPEALDTLRVTPEVAQIITPTLAELRAVPLVRERRTLPDGTEVPLYRYPWRGLDIWGMTARVLHDLLEQGPG

SEQ ID NO: 11697 - protein, 325 aa, Deinococcus radiodurans R1
MNRTRLLLLAALTLSSATVQNAGAQNTGAQSASTVRLGYFPNLTHAPALVGLERGTFQKALGKTRLDARTFVSGTTLSEAFAAGQIDIAYIGPGPAISAASRGVPVQILAGAAEAGAVLVARKDSSIRTAHDLDGKIVAVPSLGNTQDISLRHLLGENGLKDKAAGGSVTVVPIPPADVVAAFAGKRADAALVPEPWGAALEAQGHRVIGNEKTVWRGGNYPSAILIVNTRFAQANPDLVAAFLKAHASAVAFLNKSPAAAQNAVNRQLQKLTGETLDLRVLQRAYARTRFTTAIDPAALQEYADLNVEAGYIRRAPDLKTLIRH

SEQ ID NO: 11698 - protein, 544 aa, Deinococcus radiodurans R1
MTAPAPTPAQTAAQTPTAPLRVLICDEMNPGNLDHEGFQIDYQGNLEREETLRRLPDYDALITRSRTKVDRELLDAAGPRLKVIGRGGVGVDNIDLEYASRRGLLVLNAPESNNVSAAELAVMHLMAAARGLTRSDRKTRAGEWDRKFLGLELTDKTLGIVGLGRIGSIVADRAQGLHMNVVAYDPYVPENKFERLGVQRAASLDELLGQVDALTVHTPLTDETRGMIGERELALLKRDAIVVNAARGGIIEEQALVNALHAGHLFAAGVDVFVDEPPTAEHIFLGAPNLGITAHLGANTREAQERVGAEIVSRVLDALHGDVSKGAVNAPALDAKTMEQLGGYLDLGEKLGRILAQLLPGAHEVEVTFRGEFPTDPSPVVTAVLMGYLSGSTDEHPNMINARALARERGVTLSVREEEDSPDYQTEVIVRVLNRSGEKERTRKVGGTVFGKSPRLTRLRDYRVELEPEGFILIASNLDKPGAVAKLSNLLGTWGINIAGMALGRSEKGGQALFTLTLDDSLTPEQLQAIRDLDVIESAFLVRV

SEQ ID NO: 11699 - protein, 473 aa, Deinococcus radiodurans R1
MSQPQPPSRLLVMKFGGTNMQSAHAIRHSASLAGRSVREGVKVVVVVSAMAGVTNGLLHLADAAQSGDIARANDEIAALRTRHFTAAQELGAAPDSETVRELRELHETLRQAVYGVYLLRELTPRSRDLIVAFGERLSAPLMSLALEQSGLRARHLTGGEAGILTDTNFGNARPLPGTYERVGDRLSGFLSAGVTPVIAGFMGETEQGAITTLGRGGTDFSATIVGKALGADEVWAWKDVDGVMSADPRVVGDASNIGVLSYGEVMELAYFGAKVLHPLAVTPLQDSGIPLRVKSAADPDFAGTLVRSQAEEIPGRPVKAVTAIKNVSLLTVTGAGVLGVPEVIASVFTAIARENITLLMVSQSSSMSNVSLAVPSADAARALQALRAGLSSELNVEETNGVAVLAIVGSGMRGQQGVSARLFTALASEDINILMISQGSSELNISVALSGEEVDRATAAVHAAFTLSQPVGA

SEQ ID NO: 11700 - protein, 402 aa, Deinococcus radiodurans R1
MRLGTGGLVMPEAVIVSTARTPIGKAYRGFLNDTHGSDLGAHAVKHAIERAGVNPADIEDVIMGAGNPEGATGSNIARQIALRAGLPVTVSGVTVNRFCSSGLNTIALAANHVMAGQGDVFVAGGLESISLTQNEHANTFHLRGEWLLEHKPDIYMSMLQTAEVVAERYGISRERQDEYGYQSQMRTAAAQQAGKFDHEIVPMTATMKVQDKATGEISTQEVTRKLDEGNRPDTTLEGLAKLKPVFEGGVITAGNASQLSDGAAAVVVMNSDVARERGLQPLGVFKGFAVAGCEPDEMGIGPVLAVPKLLKRHGLSVDDIDLWELNEAFAVQTLYCRDKLGIDPEKFNVNGGAISIGHPYGMSGARLTGHILLEGQRRGAKHVVVTMCVGGGMGAAGLFEVL

SEQ ID NO: 11701 - protein, 332 aa, Deinococcus radiodurans R1
MSLPTSTTPESFMNSRRSPLLVFSGQSNRPLAQAICDNLGVPLGRSRTEKFTNDNLIVHYEESLREGDVFIVQTFSTPVSDAIMELMLMIDAAKSASAGRVTAVIPYYSYARSDKKDSPRISIAGRLVADLLQEAGADRVLTMTLHSPQVHGFFKVPVDHLSADVVLSQHFKKCVPDAHNGVVLAPDAGSIKRASQIARRLDSGLAMIDKERLSDTEVRPRALIGDVDGKTVFIVDDEISTAGSLVETVSIARSMGAKDVYVAVTHGVYSGPAIERIAALDVTQVASCNTVLVPQDKLDRAGGKLAVLDVAPLFASAIANIHTGASVSTLFT

SEQ ID NO: 11702 - protein, 592 aa, Deinococcus radiodurans R1
MEQTGKQGQNRGEMTGAKALWATLAGHGITTVFGYPGGAIMPVYDALTFYPEVRHILARHEQGAIHAAEGWAKATGEIGVCMATSGPGATNLVTGLADAMLDSVPLLAITGNVAQHLMGTDAFQEADITGITMPITKHNYVVRDVDELPRVIAEAIRIARSGRPGPVLVDIPKDVQLAAFAGDIPTPHTRPQAPEASAESIASARELLRNAKKPVLVMGGGSLDASAELTALAHAWGLPVITTLMGLGAYPASDPLWLGMPGMHGSVAANRAISECDVLLAVGMRFDDRVTGRVSGFAPHAQIIHVELDAAEIGKIVRTHLPIRSDAKTAARQLAEGAEKLELGEWLSQIEEWKGRAVPPQQWGAAYAVGQVTARLRPDDILSSDVGQHQMLAAQLARFEKPRRWLNSGGLGTMGFGFPAAIGAALAEPGVVSMVVAGDGGFQMTAQELATLKMYDIRNVKICIINNSYLGMVRQWQELFHGKRYSEVWLGDSNPDFVKLAGAYDVPAYRASSAEELPAAIDAWLSDPKSSLLEVVVPHEHGVFPMVPAGAALHEMMETEPVRTDISAEATEVNEATWQEMTEQEAEEMNQG

SEQ ID NO: 11703 - protein, 259 aa, Deinococcus radiodurans R1
MIVARSAGATSRRWGACAEHGAWGILWGMLPGAFGTLPAEVQAQLTVAGRSGRWARGGLIFHPDDPAETLHLVTRGTVRLYRLGSGAREVTLDVHGPGALLGTPALLRDPDSAAAYGMYAEAMDEVETLQLGQGTLHRLFQQQPAALLALTEQLTRQTRSVQERLAGLVFLEVSQRLALALLALAEREGGWEGGTLALRDRISHQDLAHSVGSTRETITKLLGDFRTRGLLDLGYRRIVLTDRAGLEQAARQPLGPLQP

SEQ ID NO: 11704 - protein, 390 aa, Deinococcus radiodurans R1
MRDFKTMIAPVTDGDGWAVRWHMHVGLPKEIKVKENRVALTPGGVATLVRRGHRVTVERGAGAGSGLPDQEYEQAGATLGSAADAWGAEMVVKVKEPIESEYGYLRDDLLLFTYLHLAADRPLTDALMQAGTTAVAYETVQLPDGSLPLLTPMSEVAGRLSVQAGAYHLQKPAGGKGVLLGGVPGVTPGHVTIVGGGVVGTNAAKMAMGLGAKVTILDVSHRRLTYLDDVFFGRLTTMMSSEANLRALLPQTDLLIGAVLIPGAKAPNLVTRDMLGLLEPGSVIADVAIDQGGCVETMHPTTHDEPTYLVDDIVHYGVANMPGAVPRTSTFALTNATFPYALALAEHGLGALKRDPALAAGLNTHQGKVTCAGVADAFGLSGQDVEAVLA

SEQ ID NO: 11705 - protein, 399 aa, Deinococcus radiodurans R1
MSEKIVIVAAKRTPIGSFMGSLKDVSAVDLGVTAAGAVLSGVSDEVKADIADVIVGCVLQAGQGMNVARQVGRGAGLPDAVPGQTINRMCGSGLQSVVSAIQGLKSGDGQIYLAGGTESMSRAPYLLPKAREGYRLGHGEILDTILTDGLTDVFHNYHMGTTAENLAEKYGISREDQDAFALESQKRAAAAIEGGYFGDEVVPVEVPTRKGPVTFDKDEHPRATSLEALAKLRPAFKKDGGTVTAGNASGINDGAAMVLVTTESYAQERGLPILAEVKGYSNVGVDPAIMGIGPAYAVPLAVKRAGLSMSDVDLFELNEAFAAQSLAVLRDLGQQGAEVDPAHVNLTGGAIALGHPIGASGARVLTTLIHQLRRTGKETGVASLCIGGGMGIALVLQAR

SEQ ID NO: 11706 - protein, 252 aa, Deinococcus radiodurans R1
MSEHQLEIRNLHATVGDKEILRGINLVVPRGELHAIMGPNGNGKSTLAKVIVGDPEYTVTQGEVLVDGQNILEMEPDERARLGVFLAFQYPVEIPGVTIANFLRLAMQARKGEGEEVSFTEFYGKLQSALKTLEWDESIVERYLNEGMSGGEKKRNEILQMLMLEPNYIIMDETDSGLDVDALKIVAKGVNSMRGENLGGLIITHYQRLLDYITPDKVHIIVNGRVVQSGGPELAKKLDTEGYDWVKELATA

SEQ ID NO: 11707 - protein, 428 aa, Deinococcus radiodurans R1
MVAGRKAFALQAGDALSPDKPAEAQPAQVKTDLAANRQDAVFRYAQNGVQVTKTITLHPRNFKVDVRTEVRNGPAQVNMLFPGLGKADNPRVQAVPVGGQPASVQGSGTLSVQNIQYAALQENPSQIAHALIVRPQQGTKVDVQLTGGPQGLVTATLPATSSLEVYGGKNELIHLYQSGYTELPGLFQPNFFGQISLLIVKLMEALYKVIGNWGLVIMALTILLRLVMWPLMQAQGRTTARMQLVQPLQKEIQEKYKGKTDPESQRAMQMEMAQLMRDYQVNPAGCFSTLLPFPVLIALWATIRNFEFDSGFLWLPDLATPDPFYILAVIYLFVNLGQLYVSTRKTPEMFRQQAMIYLVFLYFALTFPSGVTLYIILSTIIGIVQQIIINKQVEHETASLGQTVQKVAPGTRPASKTTVTKTIDAPKK

SEQ ID NO: 11708 - protein, 231 aa, Deinococcus radiodurans R1
MNYPSLVWHLKRTELFADFELAELEQVAATTPYRSYQPGEVIYRMDDPADALYFVRSGLVKISKLFPNGKEAILGVVGQHDTFGELLLQPEERRPTQAEALERTTLIVLPRQELQKLLSTKPDLAMKLIRLMAARLFEAQAWTATVSAYSAPERVASLLYRLAREFGRPHSQGVELNLKLNQEDIARMVGATRETVSHSLSRLKKGGAIVRARSPIIVQMDALKAFIDQEH

SEQ ID NO: 11709 - protein, 399 aa, Deinococcus radiodurans R1
MRDAVIVSAVRTPVGRGVKGTLANTRPDDLAALVMNEAIKRAGVDAGVVEDVYLGCAIPEAEQGLNVARLAALRAGLPDSVGGVTVNRFCSSGLQTIAMAAAAIQTGQADVMLAGGVESMSMLPMSGHNPSPNPDLVDDRPGAYIGMGMTAENVAAKYGVSREDQDKFAYASHQKAAAAQDAGKFDAEIVPVPVRKDSVKGTKLKSDTVMFDKDELIRRDANLEDMAKVRPAFKLGGSVSAANSSPFSDGAAAVLLMSGEKAQELGVKPLAKFIGFAVAGVAPEVMGIGPVAAVPKVLKQTGLTLDDIDLIELNEAFAAQSLAVVRELGIDESKLNVNGGAIALGHPLGCSGAKLTTTAIYELGRRGGGKALITMCIGGGMGAAGIIEVYPAETAQAAD

SEQ ID NO: 11710 - protein, 344 aa, Deinococcus radiodurans R1
MPRILVVDDDAAIVKLISVILSRAGHEVRSCSHPVEALDLLKVFTPDLIISDVVMPYMTGLEFLEQVRDHENLSAMPFILLSSHAERTDVRRGMNLGADDYLPKPFTPQGLTTAVDARLRRVGLTAQAESGTQAKGLGTAQVLWQGQQVSWVSRKALELFFYLLEHKEVTSWEAAEALWPEKDESRASSLFHTTLHRLRKSLNNEAVTSQNRKYALAAGLNPEYDVQRYELLAGQAEAGSLGYEELKELVGQYGTFLPGADSPWVDDVRSRLEQTQMNLLGLAARAASLAGKPKEAAQYHQRALTLDPLSEQDWKGLQASLDTLGDPRARMAEQREAWWAMDFD

SEQ ID NO: 11711 - protein, 398 aa, Deinococcus radiodurans R1
MWTLVLNSGSSSLKFALLNPASGEVRLSGLAERLGTPAAAVKLEHSGQQESRSLEGGSYDAALGEVLRELETLGMRSAVRAVGHRVVHGGERFSAPVLVTPEVLEAVRACVPLAPLHNPANIVGIEAAQQAFPKLPHVAVFDTAFHQTMPEVAYRYAVPEAWYSQHGVRRYGFHGTSHAYVAGRAAEMLQRPLPTLNLITAHLGNGASVCAVAGGRSVDTSMGLTPLEGLIMGSRSGDVDPGLHDYLARQAGLSLSEITAALNKESGLLGLSGLTNDMRELEKAALTGHRGARLALGAFIYRLAKCMAGMAVALGRVDGVVFTGGIGENSRTVRGETLRRLGVLGLHLDEEANKALPRGDVGVISLPGGPVALVIPTHEELMIARETAVIVGGRGYAL

SEQ ID NO: 11712 - protein, 852 aa, Deinococcus radiodurans R1
MGAFGWEQDRGAPFSGRSPRILTRMTDAPRPTAGADAPARPPAAPLVAPNFITEIIERDLEAGKYPRVVTRFPPDPSGYAHLGHVFASLLDFNTARQYGGQFNLRMDDTNPELARQEYVDSIADDLKWLGLDWGEHFYYASDYFDRYYAYAEQLIRQGDAYVESVSPEELSRLRGNATTPGTPSPYRDRSVEENLDLLRRMKAGEFADGEHVLRAKIDLTAPNMKLRDPVLYRIVNKPHFRTSDEWHIYPAYDFEHPLQDAIEGVTHSMCSLEFVDNRAIYDWLMEKLNFDPRPHQYEFGRRGLEYTITSKRKLRELVQAGRVSGWDDPRMPTLRAQRRLGVTPEAVRAFAAQIGVSRTNRTVDIAVYENAVRDDLNHRAPRVMAVLDPVKVTLTNLDGEKTLSLPYWPHDVVRDSPDGLVGMPGGGRVAPEEAVRDVPLTRELYIERDDFSPAPPKGFKRLTPGGTVRLRGAGIIRADDFGTDEAGQVTHIRATLLGEDAKAAGVIHWVSAERALPAEFRLYDRLFRVPHPEGENADVEDDSAGPAEHEAEPGAGQETAPVSQGFMRYLTPDSLRVLRGYVEPSVAGDPADTRYQFERQGYFWRDPVELERVDSREDALVFGRIITLKDTWGKQGGGTQQKAEGKKRPSTKGRGPDEVRGEGSSSPAKAHAPKAQPLTPEQDAEFTRLLGLGASEGDARTIARDPALLAFVGGAAPGDTFAQVASWTVNELVAGLRAGEVKVRAADLAPLAEGVASGQLSARIAREALARAAASGDAPLTIIEREGLNAGLSAEALQQVVAQVIAANPDKAEAYRGGKTALLGFFTGQVMRATAGKADPQALAAALKDALA

SEQ ID NO: 11713 - protein, 560 aa, Deinococcus radiodurans R1
MDVVVGTPGRLIDHLERGNLDLSAVQFAVLDEADEMLSVGFADAIETILQKTPEERQTMLFSATLNNDIKRLSRNYLKDPLIVDMVGEGKSQAAQTVEHLKVKVGRSRTRVLADLLTVYNPEKAIVFTRTKREADELANELIHRGLESEALHGDLAQTQRERALGAFRSGRVGVLVATDVAARGLDIPEVDLVVQYHLPQDPESYVHRSGRTGRAGRTGTAIIMYGDRENREVMGLERITGVRFKERPLPTPSEVAQASARASSEMVRRVDPEAAQGFQAEAEQLFSELGLEALARALAKISGVTEPAKAASLLSGEEGLTTLILHGERLSVPRTVALIARAVDVDTRRLGKVRQWRGGTVADVPSEFVEKLMAAAPLDGQVEVQVAQELPELFEQPTRERRDGGGYQGGRGYRDRDEGGRGGYGRGGNSGGGRGGYGNRGGNSGGRGEGGGRWSRERDERGPAPRGTSPTASSCPTAEPDPTKTPATWRGIFIAACPYCGKGRPLWSVTFTLLKLPPTRTMTQGLVIACVVMLPAPGAVSSTRRFRVFPCTSAPVARTP

SEQ ID NO: 11714 - protein, 563 aa, Deinococcus radiodurans R1
MFCPQWKFTFLINQRPCAAGQLSRRGFAPSFAAFSGAAMSDIEALKKELPPFQIFDLIPQYAAAGQIDPEKIDLLKWAGVYPQRPQEDGFLMMRVKVPTAELHTDALRVVAGISEDFGRGLLDVTDRQAFQFHWLRIQDIPEILDRLETVGLHTKGACGDTVRAVIASPLAGLDAREKIDVRPLAAAMEGTLSGNHDFEDLPRKFKISITATPELEGIHLINDIGFLAHEVDGEIGFDVWVGGGLGAVPHLAERLGVFIRPDEVVEVGRAIVGAYRDHGYRVNRKKSRLKYLIKDLGPAKFREIVETEYLGRPLRDGPSAPVARFGGSDVLGVNPQKDGLNYVVLTTTVGRITPEKARRLADLAEQYGNGYLRTTAFQNMMIPNVPDEHVGALVAELQELELAPKATLRGTTIACTGTQFCRLAQTETKARVAGMIDVLEPRHNDLDVPFVINLTGCSNACTRYQVADLGFMGALRANKETGGEDEVYNVHLAGSIGQAQRTGTKLRGIVPAERLTEYTDRVISDFKANKTPGESFVEYADRVGADRFVPDTVLDGGKELVNA

SEQ ID NO: 11715 - protein, 461 aa, Deinococcus radiodurans R1
MPCWGPFPALFGCPAGQLRPPRRVRQVADAGSTCPRIEIMPPTSDRDVVIVAAVRTPIGAIRGSLATVRPDDLAALVIREVVARSGVPATEIEEVIFGCANQAGEDNRNVARMAALLAGLPETVAGVTVNRLCASGLAAVNMAARAIRNGDGDVYVVGGVESMTRAPLSMPKGSAAFANGNVTAYDTTLGWRYPNPAMEALFPLEAMGETAENIVGRSREGAYAGGEITREQQDAFALESQRRAVAAINAGKFKDEIVPVEIKGRKGVTVFDTDEHPRMKKGAESYELATDPDTLAGLKPAFRKGGSVTAGNASGLNDGAAALVLMSAERARALGVKPLARWVGGAAAGVEARVMGLGPIPATRKLLERTGVQKDDLDLIELNEAFAAQALACMRELDLDPEKVNVNGGAVALGHPLGMSGARLVVALTHELGRRQGRYGLATLCVGVGQGEAALIERVAE

SEQ ID NO: 11716 - protein, 304 aa, Deinococcus radiodurans R1
MSGPAHLPYGGIPTFARAPLVQPDGDWQADVAALGVPFDIALGFRPGARFAPRALREASLRSVPPFTGLDGKTRLQGVTFADAGDVILPSLEPQLAHDRITEAARQVRGRCRVPVFLGGDHSVSYPLLRAFADVPDLHVVQLDAHLDFTDTRNDTKWSNSSPFRRACEALPNLVHITTVGLRGLRFDPEAVAAARARGHTIIPMDDVTADLAGVLAQLPRGQNVYFSVDVDGFDPAVIPGTSSPEPDGLTYAQGMKILAAAAANNTVVGLDLVELAPNLDPTGRSELLMARLVMETLCEVFDHV

SEQ ID NO: 11717 - protein, 403 aa, Deinococcus radiodurans R1
MLTPEQKAIVKATVPALEAHGETITRTFYASMFAAHPELLNIFNPANQQTGKQARSLAASVLAYAAHIDHPEALGGMVGRIAHKHVSLEVLPEHYPIVGQYLLGAIAGVLGDAAKPEILDAWAAAYGELADLMIGIEKGMYDAGAGQPGGWRDFRPFRVARKVAESRVITSFVLEPVGGGALPAYQPGQYLSLKVKVPGQERWQIRQYSLSDAPSPDHYRISVKREGGGLVSEYLHGAVQEGDELLVHVPAGDFVLQQSERPVVLISAGVGITPMLAMVQTLAQAGSQRPVTFIHAAQNGSVHAFRDDVARLTHEYPHFRKVVFYDEAGPDDQLGTHHDVAGRLSLDAVRGALPAGEAEFYYCGPAGFAGAVEAILDDLQVPAERRFTETFGPSQSFAPVILG

SEQ ID NO: 11718 - protein, 602 aa, Deinococcus radiodurans R1
MTPRSGPRPAASARRDARQRDPRQLRRLLAYARPYRLPFVLGVLATLISSGLGLVFPRLFGTLIDASFLKVGSTDTGPLDRTVLSLLGIFALSACFGAAQAYLLARVGAGVVADLRRALFSHLLSLSPRFFGNHRTGDLTSRLTSDVGTVQAVTSTALAQLASQGFTLIGSVLLLVQTSPRLSLLTLAIIPLVIGTAVTIGRRIRRVSREVQDAVAAANGQAEEAISGVRVVQSFTAEGLEEERYGQGVLASFRAALRRARLQALMTGVMSFLTFGALALVLWFGGRQVMSGALTPGNLVTFLFYALQVGGTVAALTGVFNQFQEALGASSRIFELLDERSDLPGPAAPRPLSRAEGRVRFVDVGFTYAGAPALQDITFDVPAGQVVALVGPSGAGKTTLVNLIPRFWDVTAGRVEVDGHDVRAYALADLRRQVGLVPQETLLFSGTVAENILYGRPGASQAEVEAAAHAAHAHEFICELEGGYGAVVGERGVKLSGGQRQRVAIARAILKDPRILILDEATSALDNESEALVQAALERLMVGRTTFVVAHRLSTIRSADRILVMDAGRVVADGTHEGLMAAGGLYRELYELQFRQQQEARR

SEQ ID NO: 11719 - protein, 183 aa, Citrus unshiu
MRDGSLKGLFCTAPKSIRSVRRNSGSFNVTAFTEEQEALVVKSWNAMKKNSGELALKFFLRIFEIAPSAKKLFTFLKDSDIPVEQNPKLKPHATTVFVMTCESAVQLRKAGKVTVRESNLKDLGATHFKYGVADEHFEVTKYALLEPIKEPVPEMWSPELKNAWAEAYDQLAAAIKIEMKPPS

SEQ ID NO: 11720 - protein, 161 aa, Marchantia polymorpha
DSATHSVTFFAKIFEIAPGAKALFSFLKDSDIPFDKNPKLKAHALTVFRLTGDSACMLGEKGAIDALHPKLKELGKKHVGYGVIAAHFDVVKAALLSTIESLLPEDWPAEKKVATCGAWSQAYDELAGVMINEMQAIRDAEKAPAAEEAPEAPAAESKALP

SEQ ID NO: 11721 - protein, 328 aa, Pseudomonas fluorescens
MKLLIQPNNRLISFSPGANLLEVLREDGVAISYSCMSGRCGTCRCRVTDGSVIDSGTGSGLPHLVDEHYVLACRSVLTNNCAIEIPEADEICHHPARIIKGTVVAIESPTHDIRRLRVRLAKPFEFSPGQYATLQFSPEHARPYSMAGLPDDQEMEFHIRKVPGGRVTEYVFEHVREGTSIKLSGPLGTAYLRQNHTGPMLCVGGGTGLAPVLSIIRGALKLGMTNPILLYFGVRSQQDLYDAERLHNLAADHPQLTVHTVIAMGPINESQRAGLVTDAIEKDISSLAGWRAYLCGAPAMVEALCTVTKHLGISPEHIYADAFYPGEI

SEQ ID NO: 11722 - protein, 486 aa, Glycine max
MASDSPFPVTAQNINPKVLKCEYAVRGEVVTLAQNLQKDLQANPGSHPFDEILYCNIGNPQSLGQQPITFFREVLALCDHPAILDKSETQGLFSTDAIQRAWQIVDQIPGRATGAYSHSQGVKGLRDTIAAGIEERDGFPANPDDIFMTDGASPAVHNMMQLLIRSENDGILCPIPQYPLYSASIALHGGCLVPYYLDEATGWGLEIPELKKQLEAAKSKGINVRALVVINPGNPTGQVLGEANQRDIVEFCKQEGLVLLADEVYQENVYVPEKKFHSFKKVSRSMGYGENDITLVSFQSVSKGYHGECGKRGGYMEVTGFSAEVREQIYKVASVNLCSNISGQILASLVMSPPKVGDESYDSFMAEKENILASLARRAKTLEDAFNKLEGVTCNKAEGAMYLFPQIRLSEKAIKAAEAANATPDNFYCKRLLNATGVVVVPGSGFGQVPGTWHFRCTILPPEEKIPAIVTRLTEFHEKFMDEFRD

SEQ ID NO: 11723 - protein, 556 aa, Sinorhizobium fredii
MYRYDEFDHAFVSARVEQFRDQVQRRLSGELAEDAFKPLRLMNGVYLQLHAYMLRVAIPYGTLSSRQMRMLAHIARKYDRGYGHFTTRQNIQYNWPALSDTPDILNDLASVEMHALQTSGNCIRNVTADHFAGAAADEVADPRPYAEILRQWSSVHPEFSFLPRKFKIAVTGAERDRAAIQVHDIGLHLKKDESGKLGFAIYVGGGQGRTPMIAKKIRDFLPEEDLLSYTTAIMRVYNLHGRRDNKYKARIKILVHETGAEELARQVEVEFASLKDTELKLPDADIQAIAAYFAPPALPNRAEGWGNLARWKKADEGFAQWVHQNVQPHKHPDYGMVTISLKPIGGIPGDATDSQMDLVADIAEEYAFDEIRVSHEQNLILPHVALADLEPLYRALVASGLATANAGLITDIIACPGLDYCALANARSIPVAQEISNRFGSFERQAEIGELKIKISGCINACGHHHVGHIGLLGVEKKGAELYQITLGGSGDENTSIGEIIGRGFEPEKVTDAVETIVDTYLGLRRDKSETFLEAYRRVGPQPFKDALYGGAQEAA

SEQ ID NO: 11724 - protein, 155 aa, Solanum peruvianum
GPVGKEMLMPKDPNATVIMLATGTGIAPFRSFLWKMFFEKHEDYKFNGTAWLFLGVPTSSSLLYKEEFEKMKEKAPENFRLDFAVSREQTNEKGEKMYIQTRMAQYAEELWTLLQKDNTFIYMCGLKGMEQGIDEIMSSLAERDGIVWADYKKQL

SEQ ID NO: 11725 - protein, 155 aa, Solanum peruvianum
GPVGKEMLMPKDPNATVIMLATGTGIAPFRSFLWKMFFEKHEDYKFNGTAWLFLGVPTSSSLLYKEEFEKMKEKAPENFRLDFAVSREQTNEKGEKMYIQTRMAQYAEELWTLLQKDNTFIYMCGLKGMEQGIDEIMSKLAERDGIVWADYKKQL

SEQ ID NO: 11726 - protein, 155 aa, Solanum chilense
GPVGKEMLMPKDPNATVIMLATGTGIAPFRSFLWKMFFEKHEDYKFNGTAWLFLGVPTSSSLLYKEEFKKMKEKAPENFRLDFAVSREQTNEKGEKMYIQTRMAQYAEELWTLLQKDNTFIYMCGLKGMEQGIDEIMSSLAERDGIVWADYKKQL

SEQ ID NO: 11727 - protein, 155 aa, Solanum chilense
GPVGKEMLMPKDPNATVIMLATGTGIAPFRSFLWKMFFEKHEDYKFNGTAWLFLGVPTSSSLLYKEEFEKMKEKAPENFRLDFAVSREQTNEKGEKMYIQTRMAQYAEELWALLQKDNTFIYMCGLKGMEQGIDEIMSSLAERDGIVWADYKKQL

SEQ ID NO: 11728 - protein, 155 aa, Solanum chilense
GPVGKEMLMPKDPNATVIMLATGTGIAPFRSFLWKMFFEKHEDYKFNGTAWLFLGVPTSSSLLYKEEFEKMKEKAPENFRLDFAVSREQTNEKGEKMYIQTRMAQYAEELWNLLQKDNTFIYMCGLKGMEQGIDEIMSSLAERDGIVWADYKKQL

SEQ ID NO: 11729 - protein, 340 aa, Capsicum annuum
MSTFSSYQLQQHNTPSLLDSVFLPSSPLKMSGFFEEPNNSCVVQNCFSQFYQPEFPTNNVNVNENSYCLDQNTNVTNKSSSSISLDMDSSSVTDKMESGNNKPNVTSPMDKKRKSREGSSSMTSANSKNVTQGDNGKKNKSNSKLVAKDEKKANEEAPTGYIHVRARRGQATDSHSLAERVRREKISERMKMLQSLVPGCDKVTGKALMLDEIINYVQSLQNQVEFLSMKLASLNPMYYDFGMDLDALMVRPDDQNLSGLETQLPNIQQASTTTSQAAEVIPNTNSGYPFLDNSASLMFQQAHFPNSIHQGIGQLLWGAEDQRQKIINQSGFSNNFCSFH

SEQ ID NO: 11730 - protein, 359 aa, Glehnia littoralis
MAGMKSSPSQDEEACVLAIQLATSTVLPMILKSAIELDILNTISKAGPGNYLSPSDLASKLLMSNPHAPIMLERILRVLATYKVLGCKRSELSNGEVEWLYCWTPVCKFLSNNEDGASIAPLLLVHQDKVPMKSWYHLTDAVLDGGTAFNKAYGMNIFDYASQDPQFNKVFNRSMAGHSTITMKKIVETYNGFEGLKSIVDVGGGSGATLNMIISKYPTIKGINFDLPHVVGDSPIHPGVEHVGGDMFASVPKGDAIFLKWIFHSWSDEDCLRILKNCYEALADNKKVIVAEFIIPEVPGGSDDATKSVVHLDAIMLAYVPGGKERTEKEFESLATRAGFKSFRKVCCAFNTWIMEFSK

SEQ ID NO: 11731 - protein, 285 aa, Bradyrhizobium japonicum
RSELEQLPLWGFDGSSTQQAEGHSSDCVLKPVAVFPDAARTNGVLVMCEVMMPDGKTPHASNKRATILDDAGAWFGFEQEYFFYKDGRPLGFPASGYPAPQGPYYTGVGFSNVGDVARKIVEEHLDLCLAAGINHEGINAEVAKGQWEFQIFGKGSKKAADEMWMARYLMLRLTEKYGIDIEFHCKPLGDTDWNGSGMHANFSTEYMRTVGGKEYFEALMAAFDKNLMDHIAVYGPDNDKRLTGKHETAPWNKFSYGVADRGASIRVPHSFVNNGYKGYLMTEAP

SEQ ID NO: 11732 - protein, 281 aa, Bradyrhizobium japonicum
NELEQLPLWGFDGSSTQQAEGHSSDCVLKPVAVFPDAARTNGVLVMCEVMMPDGKTPHASNKRATILDDAGAWFGFEQEYFFYKDGRPLGFPASGYPAPQGPYYTGVGFSNVGDVARKIVEEHLDLCLAAGINHEGINAEVAKGQWEFQIFGKGSKKAADEMWMARYLMLRLTEKYGIDIEFHCKPLGDTDWNGSGMHANFSTEYMRTVGGKEYFEALMAAFDKNLMDHIAVYGPDNDKRLTGKHETAPWNKFSYGVADRGASIRVPHSFVNNGYKGYLMS

SEQ ID NO: 11733 - protein, 428 aa, Carnobacterium maltaromaticum
MKKQIQVGILGFGTVGSGVIRILKDHNEKIGQVTGEEISIKKVLVRNIEKNRGLISEGIELTTNADDILNDSEIAVVLEVMGSIDVAKEYISRALKAGKHVVTANKDLIALHGKELVALAKENQCDLYYEASVAGGIPILRTIVDSLASDNIKKVLGIVNGTTNFMLTKMTAENKSYEEVLKEAQDLGFAESDPTNDVDGIDAARKMVILTRLAFGMHVDLDQIETRGIRHVKSIDIETAKQLGYKIKLIGSAEEANGSVVVDVGPVLVPQDHPLAGVHNENNAVVVQGAAVGETMFYGPGAGELPTATSVVSDLITVAKNIRLGTTGNVFNSYQLETKLTPDEEVYAKYYLAIEMLDKTGLFLELTKIFAASDVGFDKIIQEPQASQTSKVVIITHKMNKKQQKEILKQVEQAKDMDLLVHFKVMEG

SEQ ID NO: 11734 - protein, 393 aa, Carnobacterium maltaromaticum
MTVLSEKFNQQTYKIEVSDIRRFDERVSVIEDMLKLTLGEPDFNTPEHVKLAGISAIENNDSHYTGMAGDLELRKAVATFMQKKYQVSFAPENEILVTVGATEALSASLLAVLNPGDKIIVPTPIYPGYEPLITLARAEPIYIDTTSNGFVLTPEIIEAAMLEHGDQVKAIILNYPSNPTGVTYNREEVKAIADAVKKYSIFVISDEIYSELTYGETHVSIAEFARDQTILINGLSKSHAMTGWRIGFILAPQELIGQIVKVHQYLVTSATTMAQKAAIAALTAGADDALPMKIEYMKRRDFLYEKMKNLGFEIARPNGAFYIFAKIPDGYTQNSMNFCVDLAEKNKLAIIPGSAFGAAGEGFVRLSYAASMEKLELAMERLTAYMATNKPTP

SEQ ID NO: 11735 - protein, 257 aa, Methanocaldococcus jannaschii
MRDTMEILRTENIVKYFGEFKALDGVSISVNKGDVTLIIGPNGSGKSTLINVITGFLKADEGRVYFENKDITNKEPAELYHYGIVRTFQTPQPLKEMTVLENLLIGEICPGESPLNSLFYKKWIPKEEEMVEKAFKILEFLKLSHLYDRKAGELSGGQMKLVEIGRALMTNPKMIVMDEPIAGVAPGLAHDIFNHVLELKAKGITFLIIEHRLDIVLNYIDHLYVMFNGQIIAEGRGEEEIKNVLSDPKVVEIYIGE

SEQ ID NO: 11736 - protein, 257 aa, Methanocaldococcus jannaschii
MRDTMEILRTENIVKYFGEFKALDGVSISVNKGDVTLIIGPNGSGKSTLINVITGFLKADEGRVYFENKDITNKEPAELYHYGIVRTFQTPQPLKEMTVLENLLIGEINPGESPLNSLFYKKWIPKEEEMVEKAFKILEFLKLSHLYDRKAGELSGGQMKLVEIGRALMTNPKMIVMDQPIAGVAPGLAHDIFNHVLELKAKGITFLIIEHRLDIVLNYIDHLYVMFNGQIIAEGRGEEEIKNVLSDPKVVEIYIGE

SEQ ID NO: 11737 - protein, 385 aa, Thermus thermophilus
MRGLSRRVQAMKPDAVVAVNAKALELRRQGVDLVALTAGEPDFDTPEHVKEAARRALAQGKTKYAPPAGIPELREALAEKFRRENGLSVTPEETIVTVGGSQALFNLFQAILDPGDEVIVLSPYWVSYPEMVRFAGGVVVEVETLPEEGFVPDPERVRRAITPRTKALVVNSPNNPTGAVYPKEVLEALARLAVEHDFYLVSDEIYEHLLYEGEHFSPGRVAPEHTLTVNGAAKAFAMTGWRIGYACGPKEVIKAMASVSRQSTTSPDTIAQWATLEALTNQEASRAFVEMAREAYRRRRDLLLEGLTALGLKAVRPSGAFYVLMDTSPIAPDEVRAAERLLEAGVAVVPGTDFAAFGHVRLSYATSEENLRKALERFARVLGRA

SEQ ID NO: 11738 - protein, 1527 aa, Mycobacterium leprae TN
MTAKRVGLYNPAFEHDSCGVAMVVDMYGRRTRDIVDKAITALLNLEHRGAQGAEPRSGDGAGILIQVPDAFLRAVVDFELPAASSYATGIAFLPQSSKDAAAACAAVEKIAVAEGLHVLGWRNVPTDASSLGALSRDAMPTFRQVFMAGATGLTLERRAYVIRKRAEHELGTKGPGQDGPGRETIYFPSLSSQTFVYKGMLTTPQLKAFYRDLQDERLTSALGIVHSRFSTNTFPSWPLAHPFRRIAHNGEINTVTGNENWMRAREALMKTDIFGSKADMEKLFPICTPGASDTARFDEALELLHLGGRSLVHAVLMMIPEAWERHESMDPARRAFYQYHASLMEPWDGPASMTFTDGVVVGAVLDRNGLRPSRIWITDAGLVVMASEAGVLDLDPSIVVRRMRLQPGRMFLVDTAQGRIVSDEEIKAKLAAEHPYQEWLDKGLVPIDELPAGKYVRMPHHRLVMRQLAFGYTYEELNLLVAPMVRAGSEPIGSMGADTPIAVLSRRPRMLYDYFHQLFAQVTNPPLDAIREEVVTSLQGTTGGEYDLLSPDENSCHQIWLPQPILRNYELAKLVNLDPADEVNGRPHGMRSTVVSCLYPVADAGAGLAAALTEVRAQASAAIVGGARVIILSDRNSDEQMAPIPSLLSVAAVHHHLVRDRTRTHVGLVVESGDAREVHHMAALIGFGAAAVNPYLVFESIEEMLDRGVIDGIDRKTALNNYIKATGQGVLKIMSKMGISTLASYVGAQLFQAVGISEDVLDEYFSGLSCPTGGITLDDIAAEVAVRHRVAYLDRPDERAHRELEVGGEYQWRREGEYHLFNPETVFKLQHATRSGQYKIFKEYTRLVDDQSERMASLRGLLKFRSGVRTPVPLDEVEPASEIVKRFSTGAMSYGSISAEAHETLAIAMNRLGGRSNSGEGGEDVNRFEPDPNGDWRRSAIKQVASARFGVTSHYLTNCTDIQIKMAQGAKPGEGGQLPGRKVYPWIAQVRNSTPGVGLISPPPHHDIYSIEDLAQLIHDLKNANPSARVHVKLVSENGVGTVAAGVSKAHADVVLVSGHDGGTGATPLTSMKHSGAPWELGLAETQQTLLLNGLRDRIVVQVDGQLKTGRDVMIAALLGAEEFGFATAPLVVAGCIMMRVCHLDTCPVGVATQNPLLRKRFNGKPEFVENFFMFIAEEVREYMAQLGFRTFNEAVGQVGALDTTPVREHWKAHSIDLTPVLHEPESAFMNQDLYCSSRQDHGLDKVLDQQLIAVSRDALDFGKPVRFSTTIGNVNRTVGTMLGHELTKAYGAQGLPDGTIDITFEGSAGNSFGAFVPKGITLRVYGDANDYVGKGLSGGRIVVRPSDSVPLNYVAEDNIIGGNVILFGATSGEVYLRGVVGERFAVRNSGAHAVVEGVGDHGCEYMTGGKVVILGRTGRNFAAGMSGGEAYVYDSDGELPANLNFEMVELEPLDFDDAAWLYATIQAHVDATDSAVGQRILAGWSEQQRYFVKVMPKDYKRVLQAIALAERNGVDVNKVIMEPAHG

SEQ ID NO: 11739 - protein, 67 aa, Mycobacterium leprae TN
MPQGTVKWFNAEKGFGFIAPEDGSADVFVHYTEIQGSGFRTLEENQKVEFEIGHSPKGPQATGVRSV

SEQ ID NO: 11740 - protein, 142 aa, Mycobacterium leprae TN
MLRTMLKSKIHRATVTQAYLHYVGSVTIDADLMGAADLLEGEQVTIVDINNGARLVTYAIAGERGTGVIGINGAAAHLVHPGDLVILISYGTMEDAEAHAYQPRIVFVDADNKPIDLGHDPGSVPLDISVAAELFDPRIGAR

SEQ ID NO: 11741 - protein, 327 aa, Mycobacterium leprae TN
MLSHDWTDNRKNLMLFSGRAHPELAEQVAKELDMHVTTQDAREFANGEIFVRFHESVRGCDAFVLQSCPAPVNTWLMEQLIMIDALKRGSAKRITAVIPFYPYARQDKKHRGREPISARLVADLLKTAGADRIVTVDLHTDQIQGFFDGPVDHMRGQNLLTGYIKNNYPDTNMVVVSPDSGRVRIAEKWGDALGGVPLAFIHKTRDLRVPNQVVSNRVVGEVEGRTCVLIDDMIDTGGTVAGAVQLLRNDGASDVIIAATHGVLSPPAAERLAQYGTREVIVTNTLPIGEEKRFPQLTVLSIAPLLASTIRAIFENGSVTGLFDGEA

SEQ ID NO: 11742 - protein, 326 aa, Mycobacterium leprae TN
MMTRQFKIQRACSVLATAMMLAACGHAELLTVASMPTLPPPTPVGMEQVPPELLLPQDNTEEDCDPTASLRPFPTKAEADAAVAEIRARGRLIVGLEIGSNLFSFRDPITGEITGFDIDIAGEVARDIFGTPSHMEYRILSTAARITALQKSEVDIIVKTMTITCKRRKLVNFSTVYLDAKQRILAPRDSPITKPSDLSNKRVCMTRGTTSLHQVSEVVPPPIIVSAENWADCLVAMQQREIDAISTDDAILAGLVEEDPYLHIVGPNMATQPYGIGINLNNTTLVRFVNGTLERIRRDGTWITLYRKWLTVLGPAPAPPTPRYVD

SEQ ID NO: 11743 - protein, 260 aa, Mycobacterium leprae TN
MTTLIVKDLYVSVEHPNAAESECQIPILNGVDLTVKSGETHALMGPNGSGKSTLSYAIMGHPKYRVISGAITLDGADVLTMSVDERARAGLFLAMQYPVEVPGVSVSNFLRSAATVIRGEPPKLRHWVKEVKAAMGALEIDPVFAERSVNEGFSGGEKKRHEILQLELLKPKIAILDETDSGLDVDALRVVSDGVNRYADSEHGGILLITHYTRILRYIRPEFVHVFVGGRIVESGGSELADELEQNGYVRFSQPAATGV

SEQ ID NO: 11744 - protein, 302 aa, Mycobacterium leprae TN
MDMAEFRSGFVCLIGRPNTGKSTLTNALVGTKVAITSMKPQTTRHTIRGIVHREGNFQIVLVDTPGLHRPRTLLGKRLNDLVRDTYTEVDLIGLCIPADEATGPGDRWIVNQIRSVAPKTILVVIVTKIDKVPKDRLSAQLVAVSDLVADSAEIVPVSAVTGEQVDVLIDVLAAALPPGPAYYSAGELTDEPEELLMAELIREAVLEGVHDELPHSLAVVIDEVSPRAGRGDLIDVHAVLYVERPSQKGIVIGKSGARLREVGIAARRQIEKLLGTNIYLDLHVNVAKNWQRNPKQLGRLGF

SEQ ID NO: 11745 - protein, 544 aa, Mycobacterium leprae TN
MNRDSKTPTQNRFSHRKAFHPHMTAPTSTAEPAFAKLGVRDEIVRALAERGIQQPFAIQELTLPLALAGDDVIGQARTGMGKTFAFGVPLLQRISVTTTARPLSGAPRGLVVVPTRELCLQVADDLATVAKYLTADDDNRRFSVVSIYGGRAYEPQIEALQTGADVVVSTPGRLLDLCQQGHLQLSGLSVLVLDEADEMLDLGFFPDIERLLGQIPTDRQSMLFSATMPDPIITLARTFMDQPIHIRAEAPHSLAVHDTTQQFVYRAHALDKVELISRILQARGRGATMIFTRTKRTAQKVTNELNERGFAVGAVHGDLGQIARENALEAFRTGNVDVLVATDVAARGIDIDDVTHVINYQCPEDEKMYVHRIGRTGRAGRTGVAVTLVDWDELHRWETIDKALGLGTPDPAETYSNSPHLYTELAIPAEASGTVGTPRKAQVKRRKTDRDGDKSGTSAQAAKAARTSNSVQRHRIRGGQPVTGHPTNNPSADSLATNGKVVAETLPNSSSGSPSTNVRRRRHRRKPTEVAENGLDKNLAVQAN

SEQ ID NO: 11746 - protein, 677 aa, Mycobacterium leprae TN
MDDRRLRTLPNEAYWIAVCGLLAFVVASARADSRGSGGTNNILQADHSMARAVHLMRHRGPDELSTWSDPDIDGFSGGVAFGFNRLSIIDIAHSHQPLRWGPPETPNRYILVFNGEIYNYLELRDELVIRHGAAFATDGDGESIVAGFHYWGTEILTRLRGMFAFALWDTIAHELFCARDPFGIKPLFMATGTNGTAVASEKKCLLELAEVIRFDTQIDTRALQHYTVLQYVPEPETLHRGVHRLESGCYARIRPEQLDPATTRYFVPQFAATPITSSTEQTRYGEITAVLADSVAKHMRADVTVGSFLSGGIDSTAIAALAIRHNPRLITFTTGFEHEGFSEIDVAAASAEAIGARHIVKVVTPNEFVAALPEIVWYLDEPIADPALVPLFFVAREARKHVKVVLSGEGADELFGGYRIYREPLSLKPFDYLPGPLRRSMGKVSKSLPEGMRGKNLLHRGSLTLEERYYGNARNFSEAQLQAVLPRFHTGWTHTDVTAAVYAESVGWDPVARMQHIDLFTWLRGDILAKADKMTMANSLELRVPFLDPEVFAVASRLPMQAKITRTTTKYALRRALESIVPAHVLHRPKLGFPVPIRHWLRAGELLEWAYALVNSSQAEHLVNLAAVHRMLDEHRGGISDHSRRLWTVLIFMLWHAIFIEHSVVPQISEPQYPVQP

SEQ ID NO: 11747 - protein, 393 aa, Mycobacterium leprae TN
MTTSVIVTGARTPIGKLMGSLKDFSASDLGAITIAAALKKANVAPSIVQYVIIGQVLTAGAGQMPARQAAVAAGIGWDVPALTINKMCLSGLDAIALADQLIRAGEFDVVVAGGQESMTKAPHLLMDSRSGYKYGDVTIVDHLAYDGLHDVFTNQPMGALTEQRNDVEKFTRQEQDEFAARSHQKAAAAWKDGVFADEVVPVSIPQSKGDSLQFTEDEGIRANTSAESLAGLKPAFRCGGTITPGSASQISDGAATVVVMNKEKAQQLGLTWLVEIGAHGVVAGPDSTLQSQPANAIKKAVDREGISVEQLDVVEINEAFAAVALASARELGIAPELVNVNGGAIAVGHPLGMSGARITLHVALELARRGSGYGVAALCGAGGQGDALILRAV

SEQ ID NO: 11748 - protein, 498 aa, Mycobacterium leprae TN
MATLAESPEPKSGASRAGVLGEEAGYHKGLKPRQLQMIGIGGAIGTGLFLGAGGRLAKAGPGLFLVYAVCGVFVFLILRALGELVLHRPSSGSFVSYAREFFGEKAAYVVGWLYFLDWAMTAIVDTTAIATYLHRWTIFTALPQWTLALLALAVVLVMNLISVEWFGELEFWAALIKVCALMAFLVVGTIFLGGRYPVDGHNTGLSLWTSHGGLFPTGVAQLIVVSSGVMFAYAAVELVGTAAGETVEPKKIMPRAINSVIARIAIFYVGSVILLALLLPYSAFKASESPFVTFFSKVGFYGAGDLMNIVVLTAALSSLNAGLYATGRVMHSIAINGSGPKFTARMSKNGVPYGGILLAAVICLCGVALNAFNPGQAFEIVLSVAALGIIAGWGTIVLCQLRLHKMAKAGIMRRPRFRMPLAPYSGYLTLAFLFAVLVVMAFDKPIGTWTVASLIVIVPALIAGWYSIRKRVMTIARERMGYTGPFPAIANPPVKSSD

SEQ ID NO: 11749 - protein, 505 aa, Mycobacterium leprae TN
MATLAESPEPKSGASRAGVLGEEAGYHKGLKPRQLQMIGIGGAIGTGLFLGAGGRLAKAGPGLFLVYAVCGVFVFLILRALGELVLHRPSSGSFVSYAREFFGEKAAYVVGWLYFLDWAMTAIVDTTAIATYLHRWTIFTALPQWTLALLALAVVLVMNLISVEWFGELEFWAALIKVCALMAFLVVGTIFLGGRYPVDGHNTGLSLWTSHGGLFPTGVAPLIVVSSGVMFAYAAVELVGTAAGETVEPKKIMPRAINSVIARIAIFYVGSVILLALLLPYSAFKASESPFVTFFSKVGFYGAGDLMNIVVLTAALSSLNAGLYATGRVMHSIAINGSGPKFTARMSKNGVPYGGILLAAVICLCGVALNAFNPGQAFEIVLSVAALGIIAGWGTIVLCQLRLHKMAKAGIMRRPRFRMPLAPYSGYLTLAFLFAVLVVMAFDKPIGTWTVASLIVIVPALIAGWYSIRKRVMTIARERMGYTGPFPAIANPPVQPSERSHSQNP

SEQ ID NO: 11750 - protein, 399 aa, Mycobacterium leprae TN
MMPERIILAYSGGLDTSVAINWIGKETSHEVVAVVIDLGQGGEDMEVVRQRALDCGAVEAIVVDARDEFAEGYCLPTVLNNALYMDRYPLVSAISRPLIVKHLVAAARAHGGSIVAHGCTGKGNDQVRFEVGFASLAPDLEILAPVRDYAWTREKAIAFAEENAIPINVTKRSPFSIDQNVWGRAVETGFLEHLWHAPTKEVYSYTDDPTINWNTPDEVIVGFEHGVPVSIDGSPVSMLGAIEALNRRAGAQGVGRLDVVEDRLVGIKSREIYEAPGAMVLITAHAELEHVTLERELGRFKRQTDRRWAELVYDGLWYSPLKTALESFVAATQQHVTGEVRMVLHGGHIAVNGRRSAESLYDFNLATYDEGDTFDQSAARGFVYVYGLPSKLAARRDLR

SEQ ID NO: 11751 - protein, 479 aa, Mycobacterium leprae TN
MPRFVDRVVIHTWAGSGGNGCASIHRSKFKPLGGPDGGNGGRGGSVVFVVDPHVHTLLDFHFRPHITAPSGKQGMGNNRDGAAGADLEVKVPDGTVVLDEDGRLLADLVGAGTRFQAAAGGRGGLGNAALASRTRKVPGFALLGEQGESRDLTLELKSVADVGLIGFPSAGKSSLVSVISAAKPKIADYPFTTLVPNLGVVSVGEHAFTVADVPGLIPGASAGRGLGLDFLRHIERCAVLVHVVDCTSVEPGRDPILDIAALEAELAAYTPTLQGDTTLGDFAERPRAVVLNKIDVPDARELAEFVCDNIAAERGWPVFSVSTVTRENLQSLIFGLWQMISAYHAARSEPAPGRSLIRPVPVDDSGFTVEPDGQGGFVVTGTRPERWIHQTNFDNAEAVGYLADRLARLGVEDELLRVGAQPGCTVSIGGMTFDWEPQKPAGHPVAMSGRGTDARLESTDPVGTAERKVARHQRHKHGG

SEQ ID NO: 11752 - protein, 371 aa, Mycobacterium leprae TN
MRVGIPTETKNNEFRVAITPAGVAALTHRGHEVLVQAGAGEGSAIADAEFKAAGAQLISTPEQVWTEVDLLLKVKEPMPAEYVHLRHGQILFTYLHLAASRPCTDALLASGTTSIAYETVQTADGALPLLAPMSEVAGRLSAQVGAYHLMRTHRGCGVLMGGVPGVEPADVVVIGGGTAGYNAARIANGMGATVTVFDVNINRLRELDAEFGGRLRTRYSSAYDLEGAVKHADLVIGAVLVPGAKAPRLISNSLVAHMKPGAVLVDIAIDQGGCFEDSQPTTHDQPTFAVHDTLFYCVANMPSAVPKTSTFALTNATMPYILKLADQGWQEACQSDPALAKGLSTHNGALLSEQVATDLGLAFTEPASVLA

SEQ ID NO: 11753 - protein, 528 aa, Mycobacterium leprae TN
MDLPVVLIADKLAQSTVAALGDQVEVRWVDGPDRTKLLAAVPEADALLVRSATTVDAEVLAAAPKLKIVARAGVGLDNVDVDAATARGVLVVNAPTSNIHSAAEHALALLLAASRQIAEADASLRAHIWKRSSFSGTEIFGKTVGVVGLGRIGQLVAARIAAFGAHVIAYDPYVAPARAAQLGIELMSFDDLLARADFISVHLPKTPETAGLIDKEALAKTKPGVIIVNAARGGLVDEVALADAVRSGHVRAAGLDVFATEPCTDSPLFELSQVVVTPHLGASTAEAQDRAGTDVAESVRLALAGEFVPDAVNVDGGVVNEEVAPWLDLVCKLGVLVAALSDELPASLSVHVRGELASEDVEILRLSALRGLFSTVIEDAVTFVNAPALAAERGVSAEITTGSESPNHRSVVDVRAVASDGSVVNIAGTLSGPQLVQKIVQVNGRNFDLRAQGMNLVIRYVDQPGALGKIGTLLGAAGVNIQAAQLSEDTEGPGATILLRLDQDVPGDVRSAIVAAVSANKLEVVNLS

SEQ ID NO: 11754 - protein, 625 aa, Mycobacterium leprae TN
MSAPTKPHARPQGAGNSVPNTVKPATQFPSKPAVAKLERVSPEQLTGAQSVIRSLEELDVEVIFGIPGGAVLLVYDPLFYSKKLRHVLVRHEQGAGHAASGYAHVTGKVGVCMATSGPGATNLVTPLADAQMDSVPVVAITGQVGRSLIGTDAFQEADISGITMPITKHNFLVRAGDDIPRVLAEAFHIASSGRPGAVLVDIPKDVLQGQCKFSWPPKMDLPGYKPNTKPHNRQIRAAAKLIADARKPVLYVGGGVIRGEATEQLRDLAELTGIPVVSTLMARGAFPDSHHQNLGMPGMHGTVAAVAALQRSDLLIALGTRFDDRVTGKLDSFAPDAKVIHADIDPAEIGKNRHADVPIVGDVKAVIVELIAMLRHYEVPGNIEMTDWWSYLDGVRKTYPLSYSPQSDGTLSPEYVIEKLGEIVGPEAVYVAGVGQHQMWAAQFISYEKPRTWLNSGGLGTMGFAIPAAMGAKIARPEAEVWAIDGDGCFQMTNQELATCAIEGAPIKVALINNGNLGMVRQWQALFYQERYSQTDLATHSHRIPDFVKLAEALGCVGLRCECEEDVVDVINQARAINNRPVVIDFIVGADAQVWPMVAAGASNDEIQAARGIRPLFDDESEGHV

SEQ ID NO: 11755 - protein, 410 aa, Mycobacterium leprae TN
MIRQAPIAGILKCVMAYLDHAATTPMHPAAIEAMTTALGTVGNASSLHTSGRVARRRIEESRELIADKLAARPSEVIFTAGGTESDNLAVKGIYWARRDAQPCHRRIVTTEVEHHAVLDSVNWLVEHEGAEVTWLPTAADGSVSAFGLREALQQHNDVALVSVMWANNEVGTVMPVVELAAVAAEFGVPMHSDAIQAVGQLPVKFGVSGLSAMSVAAHKFGGPPGVGALLLRRDISCVPLLHGGGQERDIRSGTPGVASVVGMAAAAQIAVDGLEINSIRLQVLRDRLIEGVLATIDDVALNGARDRMRLPGNAHFIFRGCEGDVLLMLLDANGIECSTGSACTSGVPQPSHVLIAMGADPASARGSLRLSLGHNSVEVDVEEVLRVLPGAVDRARRASLAAAGAGGVGV

SEQ ID NO: 11756 - protein, 572 aa, Mycobacterium leprae TN
MFLSADVSCIEIVDINCSELRNDRRIPPQLALFCTNAANKAESAVTSHGQLPIMANRRWAPHTRRQSGRATSTCSSLMRFSASESRAHSRFECYTLVRWSIRGQGGRAISKLGFWSVVMLGINSIIGAGIFMTPGEVIKIAGPFAPIAYTLAGIFAAVLAIVFATAAKYVKTNGSSYAYTTAAFGHRIGIYVGVTHAITASIAWGVLASSFVSTLLRVAFPEKIWADNDELISVKTLTFLVFIAVLLAINIFGNLVIRWANGISALGKIFALSVFIAGGLWTIITQHVNNYVTSRSAYQPTTYSLLGVTEIGKSTAASMTLATIVALYAFTGFESIANAAEEMNTPDRTLPKAIPLTILTVGVIYILALVVAMLLGSDKIVATNHTVKLAAAVGNNTFRTIIVVGALVSMFGINVAASFGAPRLWTALSDGRILPTRLSSKNRFGVPIVAFGITAFLTLAFPLSLRFDSLNLTGLAVIARFIQFIIVPIALFALARSRTTNSVYVKRNVFTDKVLPITAVVVSAGLMVSFDYRSIFLTRGGPNYFSISLIAITFIGIPAVAYLHYYRTSGIK

SEQ ID NO: 11757 - protein, 548 aa, Mycobacterium leprae TN
MSTDPVLTHSIHAGRLVVRRLKASGVDTVFTLSGGHLFSIYDGCRSESIRLIDTRHEQTAAFAAEGWSKVTRQPGVAVLTAGPGVTNGMSAMAAAQQNQSPLVVLGGRAPALRWGMGSLQEIDHVPFVAPLARFAATAQSADAAGRLVDEALQAAVVAPSGVGFVDFPMDYVFSMADDVGGGPGALANLPVAPAANPEALDRAAGLLAAAHRPVIMAGTNVWWGHAEAALLRLAEECQIPVLMNGMARGVVPADHPLAFSRARGKALGEADVALVVGVPMDFRLGFGKVFGSQTQLVVADRAEPDRDYPRPVAAGLYGDLPAILSALAGVGGTDSQDWIRALRTAETATRDLEKAELDDDRLPLHPMRVYAELASLLDRDAIVVIDAGDFGSYAGRVIDSYLPGCWLDSGPFGCLGSGPGYALAAKLARPNRQVVLLQGDGAFGFSGMEWDTLVRHNVPVVSVIGNNGIWGLEKHPMEALYGYSVVAELRPGTRYDEVVRALGGHGELVSVPGELRPALERAFVTGLPSVVNVLTDPSVAYPRRSNLA

SEQ ID NO: 11758 - protein, 569 aa, Mycobacterium leprae TN
MTAPKIEAVYTVGAYLLDRLAELGVTEIFGVPGDYTLEFLDHIVAHPTIRWVGNANELNAGYAADGYGRLRGISALVTTFGVGELSAANAIAGSYAEHVPVVHIVGAPPKDAQSTHRALHHSLGDGDFEHFIRISSEITCSQANLTTATACKEIDRVLSEVRKHKRPGYILLSTDVARFPTEPPAAPLPGHTDGTSPRALSLFIDAATKLIADKRMTVLADLLVHRLQVVKELETLLTADVVPYATLMWGKSLLDESSPNFLGIYAGAASTEAVRAAIEQAPVLVTAGVVFTDMVSGFFSQRIDPARTIDVGQYQSSVADKVFTPLEMGDALEALASILVRRGVSSPPVELPPGNPTADTPSPTQRLTQQILWDRLCAALTPGNVVLADQGTAFYGMVEHRLPRGVTFIGQPLWGSIGYTLPAALGAGLAHRNRRTVLLLGDGAAQLTIQELGSFYREGLSPVIVVVNNDGYTIERAIHGATAPYNNIARWRWTDIPGALGVANHSSFRAETYGELDEAFAVAAELKDQMVFVEVIVPKLDLPSLLTALTRPAQDSNRIFQLPNPGWDN

SEQ ID NO: 11759 - protein, 498 aa, Mycobacterium leprae TN
MTSRGNHGSKTSSDKHLGDSDFVVVANRLPVDQVRLPDGTAIWKRSPGGLVTALEPLLRQRRGAWVGWPGVINDNVDLDLTIKSIVQDGLTLYPVRLNTHDVAEYYEGFSNATLWPLYHDVIVKPIYHCEWWERYVDVNRRFAETTSRTAAYGGTVWVQDYQLQLVPKMLRIMRPDLTIGFFLHIPFPPVELFMQIPWRTEIIEGLLGADLVGFHLTSGAQNFLFLSRHLLGANTSRGLVGVRSRFGEVQLKSHTVQVGAFPISIDSKEIDQATRDRNVRRRAREIRAELGNPRKILLGVDRLDYTKGIDVRLRAFAELLAEGRAKRDDTVLVQLATPSRERVESYKILRNDIERQVGHINGEYGEVGHPVVHYLHRPIPRDELIAFYVASDVMLVTPLRDGMNLVAKEYVACRNDLGGALVLSEFTGAAAELRQAYLVNPHDLEGVKDTIEAALNQLAEEARRRMRSLRRQVLAHDVDRWARSFLDALAEAPARDAT

SEQ ID NO: 11760 - protein, 266 aa, Mycobacterium leprae TN
MPVSAGCTARVQGTVPLVFDVGPSWLRPLVDNIAVMPGVYQRLLPADVLAIVTAARAIPSVALRRDGREAAVLVLFSGPESGPPDGGAPDDADLLLTVRASTLRHHAGQAAFPGGASDPTDDGPVATALREAHEETGIDLARLHPLATLERMFIAPSRFHVVPVLAYSADPGPVAVVNEAETAIVARVPLCAFINPANRLMVYRRAHGHRWYGPAFLLNDMLVWGFTGQVIAAMLDVAGWAQSWDVTDVREVGEAMALVDSQGDPR

SEQ ID NO: 11761 - protein, 224 aa, Mycobacterium leprae TN
MDEILARAGIFQGVEPSAVAALTKQLQPVDFPRGHTVFTEGEPGDRLYIIVSGKVKIGRRSPDGRENLLTIMGPSDMFGELSIFDPGPRTSSATTITEVRAVSMDRDALRAWIADRPEIAEQLLRVLARRLRRTNNNLADLIFTDVPGRVAKQLLQLAQRFGTQEGGAMRVTHDLTQEEIAQLVGASRETVNKALADFAHRGWIRLDGKSVLISDSERLARRAR

SEQ ID NO: 11762 - protein, 421 aa, Mycobacterium leprae TN
MALVVQKYGGSSVADADRIRRVAERIVQTKKQGNDIVVVVSAMGDTTDDLLDLAQQVCPEPPARELDMLLTAGERISNALVAMAIESFGAQARSFTGSQAGVITTGTHGNAKIIDVTPTRLQFALDEGRIVLVAGFQGVSQDTRDITTLGRGGSDTTAIAMAAALGADVCEIYTDVDGIFSADPRVVHNARKLDTVTFEEMLEMAACGAKVLMLRCVEYARRHNIPVHVRSSYADKPGTVIVGSIKDVPMEDPILTGVAHDRSEAKVTIVGIPDIPGYAAKVFRAVADADVNIDMVLQNVSKVEDGKTDITFTCSRDSGPIAVAKLGSLRDEIGFTQLLYDDHIGKVSLIGAGMRSHPGVTATFCEALAAVGVNIELISTSEIRISVLCRDTELDKAVFALHEAFGLGGEDEVTVYAGTGR

SEQ ID NO: 11763 - protein, 848 aa, Mycobacterium leprae TN
MDSFNPTTKMQVALTSALQAASSAGNPEIRPVHLLLAMLMQNDGIAAPLLETVGVEPDIVRNEAQRLLERLPQASGCSSQPQLSRESLAAITTAQQLATEMDDEYVSTEHLMLGLAMGDSDVAKLLTGHGASPQVLREAFVKIRGSARVTSSDPEFTYQALEKYSTDLTAQSGEGKLDPVIGRDNEIRRVVQVLSRRTKNNPVLIGEPGVGKTAIVEGLAQRIVAGDVPESLRDKTLVALDLGSMVAGAKYRGEFEQRLKVVLDDIKFSAGQIITFIDELHTIVGAGATGESAMDAGNMIKPMLARGELRLVGATTLDEYRRYIEKDAALERRFQQIFVGEPSVEDTVGILRGLKDRYEVHHGVRITDSALVAAAALSDRYITARFLPDKAIDLVDEAASRLRMEIDSRPVEIDEVERLVRRFEIEEMALVNEEDEASKERLETLRAELADQKERLAELTARWQNEKNAIDVVRELKEQLETLRGESERAERDGDLAKAAELRYGRIPEVEKKLEAAVPTAQAREDVMLKEEVGPDDIANVVSAWTGIPAGRLLEGETAKLLRMEDELGKRVVGQKKAVHAVSDAVRRSRAGVADPNRPTGSFLFLGPTGVGKTELAKALADFLFDDQRAMVRVDMSEYGEKHSVARLVGAPPGYIGHDQGGQLTEAVRRRPYTVVLFDEVEKAHSDVFDVLLQVLDEGRLTDGQGRTVDFRNTIPILTSNLGSGGSEEQVMAAVRSVFKPEFINRLDDVLIFDGLNPEELVRIVDIQLEQLGKRLAQRRLQLEVSLPAKRWLAQHGFDPVYGARPLRRLVQQAIGDQLAKMLLAGEVHDGDTLPVNVRPDGEALILG

SEQ ID NO: 11764 - protein, 620 aa, Mycobacterium leprae TN
MARAVGIDLGTTNSVVSVLEGGDPVVVANSEGSRTTPSTVAFARNGEVLVGQPAKNQAVTNVDRTIRSVKRHMGSDWSIEIDGKKYTAQEISARVLMKLKRDAEAYLGEDITDAVITTPAYFNDAQRQATKEAGQIAGLNVLRIVNEPTAAALAYGLDKGEREQTILVFDLGGGTFDVSLLEIGEGVVEVRATSGDNHLGGDDWDDRIVNWLVDKFKGTSGIDLTKDKMAMQRLREAAEKAKIELSSSQSTSVNLPYITVDSDKNPLFLDEQLIRAEFQRITQDLLDRTRQPFQSVVKDAGISVSEIDHVVLVGGSTRMPAVTDLVKELTGGKEPNKGVNPDEVVAVGAALQAGVLKGEVKDVLLLDVTPLSLGIETKGGVMTKLIERNTTIPTKRSETFTTADDNQPSVQIQVYQGEREIASHNKLLGSFELTGIPPAPRGVPQIEVTFDIDANGIVHVTAKDKGTGKENTIKIQEGSGLSKEEIDRMVKDAEAHAEEDRKRREEADVRNQAETLVYQTEKFVKEQRETENGSRVPEDTLNKVEAAVAEAKTALGGTDISAIKSAMEKLGQDSQALGQAIYEATQAASKVGGEASAPGGSNSTDDVVDAEVVDDERESK

SEQ ID NO: 11765 - protein, 437 aa, Mycobacterium leprae TN
MTLYQQISVDGSGTMSDVTTHQLPMHTPGYHRQRAFAQSSKLQDVLYEIRGPVSQHATRLETEGHRILKLNIGNPALFGFDAPDVIMRDMIQALPYAQGYSDSQGILPARRAVVTRYELVDGFPRFDVDDVYLGNGVSELITMTLQALLDNGDQVLIPSPDYPLWTASTSLAGGTPVHYLCDETQGWQPDIADVESKITERTKALVVINPNNPTGAVYSNEILNQIVDLARKHQLLLLADEIYDKILYDDTKHISVASIAPDLLCLTFNGLSKAYRVAGYRSGWLAITGPKDHASSFIGGINLLANMRLCPNVPAQHAIQVALGGHQSIEDLVLPGGRLLEQRDVAWTKLNEIPGVSCVKPTGALYAFPRLDPEVYGIVDDEQLVLDLLLQEKILVTQGSGFNWPAPDHLRLVTLPWSRDLAAAIDRLGNFLVSYRQ

SEQ ID NO: 11766 - protein, 367 aa, Mycobacterium leprae TN
MTEAQTTVGVVAESGSDERRVALVPKAVASLVNSGLAVVVESGAGEGALLPEQLYTEAGARIGDAWAADIVVKVAPPAAAEVGRLRRGQTLIGFLASRNADNWIGELKRAGVQAFALEAIPRISRAQVMDALSSQANVTGYKAVLLAASESTRFFPMLTTAAGTVKPAIVLVLGVGVAGLQALATAKRLGARTTGYDVRPEVAEQVRSVGAQWLDVGIEASGAGGYARELTADERAQQQKALEKAISGFDVVITTALVPGKPAPRLVTAAAVEAMKPGSVVVDLAGETGGNCELTEPGQTVIKHDVTIAAPLNLPATMPEHASELYSKNIKALLDLLIKDGKFAPDFDDEVVAESCVTRDREDSIDV

SEQ ID NO: 11767 - protein, 380 aa, Mycobacterium leprae TN
MSLLPFDFVSLDIVYYPVSWIMWVWYKLFAAVLGPSNFFAWALSVMFLVFTLRALLYKPFVRQIRTTRQMQELQPRIRALQRKYGKDRQRMALEMQKLQREHGFNPILGCLPMLAQIPVFLGLYHALRSFNRTTGGFGQPHMSVTENRMTGNYVFTPVDVGHFLDANLWGAPIGAYMTQRSGLDAFIDFSRPAVILVGIPMMVLAGVATYFNSRASIARQSAEAAENPQTALMNKIALYVFPFGVVVGGPFLPLAIILYWFSNNIWTFGQQHYVFSMIEKEDEAKKQKAIERRTANAPAPGSKPKYVSTTAPVSVNGFSKDTMISDDGAKLGSQEADSIDWVTETKTATTPADKPDCVGYNNNPTSHTRRSGQRTKRRKR

SEQ ID NO: 11768 - protein, 321 aa, Mycoplasma pulmonis UAB CTIP
MNKEKTIIFSMPNTHVLAQEICDELKMKLHSVNKTIFADGEVLLSSKETVRSKDVFIVASTSHPANNNIMDLLIFVDSLKRASAKTINVILSYYGYARQDRKAEGRQPIAAKLLADLLQVAGISRIVVVDLHNPSIQGFFNIPVDDIKAQYILSKEFTIKDEKFTIVSPDHGGTIRARIMAEIISNDVKIAIIDKRRVSTNKTEVLGVIGDINNENAVIVDDIIDTGGTIVNAAEVLKKNGAKKISIVASHGIFSKGFDIFEDADVIDEVIVTNSIDNYELAKKYKKLKIVSLAPFLSKVIRSIMDSKSVSDIYAKYLESK

SEQ ID NO: 11769 - protein, 318 aa, Mycoplasma pulmonis UAB CTIP
MNFNDYIISRVKKLKEKKRILLVDGNDPRSLEAAKELQKYPNIEVSLLVESKSDVKDGFNFVVLDQDQKQYESFCQDLFESRKGKDSLESVQKALKTRPFYAMMLLKKGFFDGVVGGLLYTTADILKAAFKVVGPKAGVKTISSLMIMSKGEDTKIFADISINVNPSADQLVDIAKNSVEFLEQMGIEAFPSFLSFSTQGSAVSDETKKVVEAKEKFNALALKAKALGEIQFDAAVDLKTRSSKYKNPEFSQESNLLIFPDLEAGNIGYKIAQRMGKYGAFGPIVTGTKLPINDLSRGASVEDVANTVLITALQSEGK

SEQ ID NO: 11770 - protein, 393 aa, Mycoplasma pulmonis UAB CTIP
MKILVINAGSSSIKFALFEKENLNQIASGIAERIGIENGIISISFDKKYQFEIDMKDHLEAAKKLLELFEQISLIKNADEIELIGFRVVHGGIELNKASKLDQETISIIEKSAKYAPLHNPGALQAIKAFQLALPKAKLSVNLDTAFHSSIDKINYSYPINYELAQKLGIRKFGFHGISHRFITNKLEKILNKKSVNFVNLHIGNGASLCAVKVSKSIDTSMGFTPLAGIMMGTRSGDIDPSIHEFVCKEENMSIEEFTSILNKQSGISGVSQISSDLRDVEEQYAKGNAQAIFALDLYSQKIADYAAIYLNKIAPQIDAIVFTAGVGENSAFVRKNVISRIKIKNIELDEALNSQKVGEYQLISTKNSEIPVYVIRTNEELMIASDAKKLNS

SEQ ID NO: 11771 - protein, 418 aa, Mycoplasma pulmonis UAB CTIP
MKFIDEITLNVKAGKGGNGMIAFRREAHVDRGGPSGGDGGNGGNIYFVGDLGKNTLLHLYLQKSIVGNNGVNGGRKNLYGAAGEDKFIKVPVGTVVYEGQKVIADIVEEKPYLIAKGGRGGRGNTKFKTAKNKAPRISENGLPGESKKLTLVLKVLADVGFVGKPSAGKSTLLSVISNAKPTIADYDFTTLVPQLGLVKYFDNSFVVADLPGLIKGAHQGKGLGIRFLKHIERCKVIANVIDFGDENKNPLQDYQEIRNELKLYNLNLEEKDEVIVANKKDQECFEKKLEEFSKHYPNKKIIAISALKQENLDKLKEALWQSVKNTKDIVFELSEDEEVFINFEADFNVVHLGEGQYLVEGPKIHHFYQRIPLNTHDNLMRFNLILKKMGVWDELIKQGIQIGDSVKIYDYEFVWGNE

SEQ ID NO: 11772 - protein, 293 aa, Mycoplasma pulmonis UAB CTIP
MKILFSTIIGRPNVGKSTLLNNILEYDLAIVSSKPQATRDQIMGIYSDDDYQLIFTDTPGIYKTKTKFGENLNAQSYESLKDIDLVIFLSPANEEIGPGDEFICEKIKNFTNKIALITKIDLENSEEVLKKKAEKLKSLGFKEIFAISSKDHGSIKKLINEIKKYSYEGERQFDEDMITEKSEKFIAKESIREACIDLLEQELPHSILVEIDSFSEEEREEKNLVEIHSTIYVNKESQKGILIGKGGSKIKKIGISARKKIQRKLGVNVKLFLKIKVKKNWVNQEKIFKKFDN

SEQ ID NO: 11773 - protein, 132 aa, Frankia sp. EAN1pec
MPTGKVKWFDVDRGFGFLSRDDGDADVFVHKAALPSGVDRLKPGDRVEFGIAAGRKGDQALSLRILSAPPSVAKAAANASRRSPDELHSMVEDMIKVLDDVQRDLRRGRYPDRRAAQKVAKVVHAVANELER

SEQ ID NO: 11774 - protein, 524 aa, Frankia sp. EAN1pec
MAPRQGTRWPTLRCVRHMLGIGEFTAPGSEYPAQADLLIASNRGPVSFVVGDDGLLHPRRGGGGLVSGLAQVVQDTPEDGREIVWVCAALSDADRRAARSAPGGRIDRSGYDTGGASVRMLDLDRVLFDRAYNAVANRTLWFVLHLLHAPATEPSFGASFRKDWAAYEAYNAAFADALAELAAPGACVLVQDYHLTLVPARLRQMRPDLRIAHFSHTPWSPPEYFRMLPDDVSAAILHGMLGADRLGFLAPAWAAAFRDCCAEILGAEVVGDTVTAGGRTVRTSLYPLGVDAAELRDRAARPDVRARAAELRELAGGCRLVVRVDRTELSKNIVRGLDAYRELLRSHPEWHGRVMHLVCAYPSRHDLPEYREYTAAVQRLAAEIEDEFGTDTWLPVHLEINDDFPRSLAAMTLADVLVVNPIRDGMNLVAKEGMVVSADGGVLVLSREAGACSQMGADAVVVNPFDVTATAEAMHTALVMPAAERRERARRLAAVAGELPPRAWFRAQLDEIRGHAPAEPDRAG

SEQ ID NO: 11775 - protein, 149 aa, Frankia sp. EAN1pec
MFRTMLNSKIHRATVTQADLHYVGSVTIDADLMAAADLLPGEQVTIVDINNGARLETYAISGPAGSGIIGINGAAARLVHPGDLVIIISYGIMDDAEARRHVPKVLFVDAENRIVGQGGDPAAALPGDPSSLRGDVLDPAGARGLGGGA

SEQ ID NO: 11776 - protein, 870 aa, Frankia sp. EAN1pec
MNADRLTARSQEALSSAISRATGDGSPLVDPLHLLTALLEAPDGVGAALLEAVGTPAADIRSRAEAAVGRLPRAAGANVAPPQLSRQLVAVLNNAERQAARLGDEYTSVEHLVVALAEEGGEASRILAEAGATPDALRGAFDRVRGGARRVTSRDPEGAYRALEKYSIDLTARARDGKLDPVIGRDTEIRRVVQVLSRRTKNNPVLIGEPGVGKTAIVEGLALRVAAGDVPESLRGRRIVSLDLGSMVAGSKLRGEFEERLTSVLTEIREAEGQIITFIDELHTVVGAGAAEGAMDAGNMLKPMLARGELRMIGATTLDEYRTRIEKDPALERRFQPVMVGEPSVEDTIGILRGLKERYEVHHGVRITDSALVAAATLSDRYVTARFLPDKAIDLMDEAASRLRMEIDSRPVAVDELERAVRRLEIEDMALSKENDDASRERRDRLQRELAEKREELSALTARWQREKNSISEVQKIKEELENARRAAEMAERDLDLAKAGELRYGTIPTLEKRLAEATGALAGSDSPGGAMLSEEVGPDDVAEVVASWTGIPAGRMLEGETSKLLRMETELHRRVIGQDEAVRTVADAVRRARAGIADPDRPTGSFLFLGPTGVGKTELAKALADFLFDDERAVVRIDMSEYAEKHSVARLIGAPPGYVGFESGGQLTEAIRRRPYSVILLDEVEKAHPDVFDVLLAVLDDGRLTDGQGRTVDFRNTILILTSNLGSVYIADPTLPPQVRHDSVMVAVRDAFKPEFLNRLDDVLVFEQLGRDDLTKIVDIQIDRLRRRLADRRISLEVTDAAKVWLADAGYDPVYGARPLRRLVQTSIGDQLARELLAGQIRDGDGVVVDVDGQRSALSVHSAARAQAI

SEQ ID NO: 11777 - protein, 612 aa, Frankia sp. EAN1pec
MARAVGIDLGTTNSVVSVLEGGEPTVIANAEGSRTTPSVVAFAKNGEVLVGEVAKRQAVTNVERTIRSVKRHMGTDWKMTVDSKEFTPQEISARILQKLKRDAEAYLGESVSDAVITVPAYFDDAQRQATTEAGTIAGLNVLRIVNEPTAAALAYGLDKGEKEQTILVFDLGGGTFDVSLLEIGDGVVEVKSTSGDTQLGGDDWDQRITDHLIKTFNGQHGVDLGKDKMALQRLREAAEKAKIELSQSTQTSINLPYITASAEGPLHLDVSLSRAELQRMTQDLIDRCKGPFQQAVKDAGIKISDVDHVVLVGGSTRMPAVVDLVRELTGGKEPNKGVNPDEVVAVGASLQAGVLKGEVKDVLLLDVTPLSLGIETKGGIMTKLIERNTTIPTKRSEIFTTAEDSQPSVQIQVFQGEREMAAYNKKLGMFELTGLPPAPRGMPQIEVTFDIDANGIVHVSAKDLGTGKEQSMTITGGSALPKDDINRMVQDAEQYAEEDRQRREEAETRNRAESLVYSTERFLAENGDKIEAGVKSDVEEKLSTLRGAVGGTDIAAIREAADELTKASQAMGESMYAQAAGAQGAPGAPGAGAGQADDDVVDAEIVDEEDKK

SEQ ID NO: 11778 - protein, 278 aa, Frankia sp. EAN1pec
MSDPAPSGDPSSQDAHSASADGDAPPASADGDTRPASGGGAPVPPWLTALMAAVGDGIPVQTRHARQTRPGGRAAAVLILFGEGPDGPDVLLLQRAADMRDHAGQPAFPGGGADETDASRAATALREAEEEVGLDPAGVEVLATASPLYLAASHFLVTPVLAWWRTPTAVDAVDPAETSSVARVPVAELADPANRILLWHPSGFGSPAFRVRGMTVWGFTAGVLDALLRLGGWERPWDTETKVDVPEITVAISAAMALPHAVVEPRGPLDEAGGTVGR

SEQ ID NO: 11779 - protein, 246 aa, Frankia sp. EAN1pec
MGVPGRALRPVSWHAQGVDDLLARVPLFAGLSEPDRQALSDHLDRQDVTRGDVLFREGDVGDRVFVVLSGKVKIGRQSADGRENLLYVMGPGDLFGELSLFDPGPRTATATAVTDASLVALEHTALRPWLRSRPEAGALLLRVLARRLRRTNDTMADMVFTDVPGRVAKALLDLADRFGEPAQPGNEAAGVRVEHGLTQEELAQLVGASRETVNKALADFATRGWLRLDSRAVVLLDRERLARRAR

SEQ ID NO: 11780 - protein, 67 aa, Frankia sp. EAN1pec
MAQGTVKWFNGEKGFGFIAQDGGGPDVFVHYSAIDSAGFRSLDENQRVEFDVTQGQKGPQAEHVRPV

SEQ ID NO: 11781 - protein, 324 aa, Frankia sp. EAN1pec
MGYQTENRRNLMLFAGRSHPELAAEVARALDVQPVPTNAYEFASGEIFVRFEESVRGCDAFVLQCHTAPVNTWLMEQLIMVDALKRASAKRITVVAPFYPYARQDKKHRGREPISARLVADLFKTAGAHRLMSVDLHTAQIQGFFDGPVDHLFALPLLADYIESKLDTSEVTVVAPDSGRVRVAERWTDRLGCPLAIIHKRRDPNVPNQVKMFDVVGEVRGRTCVIVDDMIDTAGTITKAAESLKEHGATDVIAAATHGVLSGPAADRLKNSEISEVVLTNTLPLPSEARIDKITELSIAPLIAAAIKAVFEDGSVTGLFGGDA

SEQ ID NO: 11782 - protein, 671 aa, Frankia sp. EAN1pec
MGENVAISHPLGARHGLSWAQPVVITPPSHQAADRLAPPRHRAAGAARHIASGFSVGHRSEQTRSVPLSVTSTQTPNNEPISDGSDTTSPAETPSLADTPSLAPTFAEIGVRAETVAALAEVGIIRPFAIQELTLPLALERTDIIGQARTGTGKTLAFGIPIVQVVTAPDEGADGRPQALVVVPTRELCVQVTADIARAGLGRGLRVLSVYGGRAYEPQLSALRAGVDIVVGTPGRLLDLARQKALDLAGVRALVLDEADEMLDLGFLPDVERILAFLPEQRHTMLFSATMPGPVISLARRFMTRPVHVRAEQPDEGRTVPNTQQHVFRAHALDKMEVLARVLQAESRGLAMVFVRTRRTADKVAEDLARRGFAAAPVHGDLGQGQREQALRAFRAGKVDVLVATDVAARGIDVGGVTHVVNYQCPEDEHAYLHRIGRTGRAGGSGVAVTFVDWDDLPRWTLVNRALALPFEEPLETYSTSEHLFELLAIPAGVKGTLPHSARTRAGLAAEEIEDLGEKGRGARRRTREREDERPARPARARVRQRTRGAGAAAAATGLTVADGSQADGPALDGPALDGQAGLDNGLTGTVDVPVAPVRAISGDTARADAVLSESGEDAATDPTAEPARRRRRRRGGRGRGTGTVRDTDVESMDDDTAGPGADHTPQAESA

SEQ ID NO: 11783 - protein, 439 aa, Frankia sp. EAN1pec
MTIDGGRGFGRPMRIAMLGCGVVGTEVVRLLGTHTEDLGARVGAPLEIVGIAVRDPDRIRSAAVDRELLTTDAGALVARDDVDIVIEVVGGIEPVRSWLLSALRSGKSVVSANKALLASHGSTLHDAAAAAGVDLYYEAAVAGAIPLLRPLRESLAGDRIRRVLGIVNGTTNYILTRMDETGASFAEALAEAGELGYAEADPSADIDGFDAAAKAAIIAQLAFHTRVTIDDVYREGIGAVTAADIASARELGCTIKALAIAERAGDRPGVSVRVHPAMIPRSHPLAGVREAFNAVFVEAEAAGQLMFYGRGAGGAPTASAVLGDVVAVARNRIAGRQGPGESAYAALPILPMGPTITSYHVQLDVTDKAGVLAAVAGAFARHDVSIRSVRQDGRGDDASLVLVTHPAADAALSTTVEDLRVLDGVRAVSGVVRVEGVES

SEQ ID NO: 11784 - protein, 394 aa, Frankia sp. EAN1pec
MPGSVIVAGARTPIGKLSGALKDFTAVDLGGIAIRAALERAGLAGDAVDYVILGQVIQAGAGQAAARQAAVKGGIPMTVPSTSINKVCLSGLNAISLADLYISSGQYDVIVAGGMESMTRAPHLLPALRGGVKYGDTTLTDSIAVDALTCGFDQVSMGLATDRYNSRYGITREEQDEFSARSHQRAAAAAKNGLFENEIVPVEVPQRRGDPIVVSADEGVRAETTAESLAKLRPAFDKAGSITAGSASQISDGAAAVVVTSRAKAEELGLPIIAEVGHHGYVSGPDPSLHSQPSNAILAALAKEKLTPADLDLVEINEAFAAVGIQSMRELGIGPDITNVNGGAIAVGHPVGMSGTRVALTLLLELQRRGGGIGAAALCGGGGQGDALVLRVPA

SEQ ID NO: 11785 - protein, 419 aa, Frankia sp. EAN1pec
MCGRVRAVVPRPGGAPEWRLPSTDVTYLDHAATTPMRPEAVAAFTAVLTDAGNASSLHAGGRRARRIVEESRESLAEVLGARPSDLIFTAGGTESDNLAIKGLYWSRRAADPRRRRILVSAVEHPAVLDTASWLARRQGAVLETLPVDETGLVAPEVLRAAVESDPASVALVSVMWANSEVGTIQPVAELARVAHAHDIPFHTDAVQAFGQIETSFATSEADALTISAHKIGGPVGVGALLVRRGVEVEPLAHGGGQERDVRSGTLNTPGVAAFAAAAAAVTAELPAERVRLASLRDDLVRRVLAEVPGATLNGAAPGPGRLPGNAHLTFPGCEGDSLLMLLDAHGVECSTGSACSAGVARPSHVLLAMGAGEAHARGSLRFSLGHGSSAADVDALVAVIGPVVARASRAGELAGLSAG

SEQ ID NO: 11786 - protein, 598 aa, Frankia sp. EAN1pec
MTRETRQITGAQSLVHSLEAVGADVVFGIPGGAILPAYDPLFDSTRVRHVLVRHEQGAGHAAEGYAQATGRVGVCMATSGPGATNLVTPIADAYMDSVPIVAITGQVPSAAIGTDAFQEADICGITLPITKHNFLVQSADDIPRTIAEAFHIASTGRPGPVLVDLPKDILQAVTSVLPHEVWPPTLDLPGYRPVTRPHAKQVREAAKMISAARRPVLYVGGGVLKARAAAELRVLAELTGIPVVTTLMARGAFPDSHPQHLGMPGMHGSVAAVTAMQKADLLITLGARFDDRVTGKLSSFAPGAAVIHADIDPAEIGKNRIADVPIVGDCREVIVDLTAALRTEERPDLEGWWRSLDRWRATYPLGYDQPADGSLAPQQVIERIGRIAGPETVFAAGVGQHQMWAAQFISYEHPYTWLNSGGAGTMGYAVPAAMGAKVGRPEATVWAIDGDGCFQMTNQELATCALEGIPIKVAVINNGSLGMVRQWQTLFYDKRYSNTDLGTHPVSARTGVTRVPDFVRLAEALGCVGLRCESPADVDATIEKAMSIDDAPVVVDFVVHPDAMVWPMVAAGSSNDEIRVARDIAPDFDYSGDAEVNL

SEQ ID NO: 11787 - protein, 529 aa, Frankia sp. EAN1pec
MPVVLVAEELSPAGLEVLSGDFEIRHVDGADRSALLPALADVDAVLIRSATKIDAEALAAAPRLKVVARAGIGLDNVDVPAATNRGVMVVNAPQSNIVSAAEHAIALLLAVARRVPAAHESLVGGEWKRSKYVGVELTEKTAGVVGLGRIGVLVAQRLAAFGMKVLAYDPYVSVARASQLGVRLVDLDELLTSSDVITIHLPKTPETLGLIGADELARVKPGVIIVNAARGGLVDEGALADAVRSGRVGGVGLDVYVKEPTTSSPLFGLENVVVTPHLGASTQEAQDKAGLAVARSVRLALSGEFVPDAVNVQAGGVVAEDVRPGLPLAEKLGQLFSGLAAGVAAAITVEVRGEIAAHDVSVLQLAVLKGVFIDIVEEQVTYVNAPLIAKERGVDVALETSEESPDYRNLVTVRGVLPDGTAVSVSGTLVGSRQVEKITAIDGFEVDLRPEDHLAFFRYEDRPGIVGAVGALLGEAHINIANAQVSRLSAGGEALMSLSLDDAVAPDILAEIAKIIGASYARAVSISAG

SEQ ID NO: 11788 - protein, 381 aa, Frankia sp. EAN1pec
MADVPTRAPAGAAAAVNVLVVNAGSSSVKLRLLGSDDRVLAAHDLRAVAGRPDPAELEQAVDALAHAGEVTVTGHRVVHGGSTFTDPVLVDEQVERRLRELVSLAPLHQPAALAALADVSEALPGVPRVACFDTAFHSRMPLEAITYPVPARWREQYGVRRYGFHGLSHAYAARRAGELTGARRVVTAHLGSGASLAAVRDGVSIDTTMGFTPLEGLVMATRSGTVDPGLLLWLQTEQGMTAQELTDVLFHESGMTGLVGSADMRAILTGARRAGTPEALGMAVYLHRLRAETAAMTASLGGLDALVFTGGVGEHAGPVRSGAATGLAFLGVAVDEERNLSYTGGDLDISAPDAPVRTLIIEAREDIEIARAARELLASLT

SEQ ID NO: 11789 - protein, 323 aa, Frankia sp. EAN1pec
MRMSLIRSKRRTAPTDAIDSTTRAASGSRPRRPLRSAALLLAAALAGSLALSACGDDDSSDEPAAATATTFPAGSTMAKLQSAGTITVGTKFDQPLFGLKNLRGEPEGFDVEIARIITDALGIPADKVKFVETVSANREPFIEQHRVDLVVATYTINDKRKQVVDFAGPYYVAGQTLMVRAGETAITGKDTLAGKKVCSVSGSTPAERIRTQAPDAELTLFDVYSKCAEALKAGQVDAVTTDNAILLGLMDSDPGAFKLVGEPFSTEPYGIGIAKGDDEFRTFINDTLEAAYTDGRYETAYKDTIGKVEPDMPTPPAVDRYTS

SEQ ID NO: 11790 - protein, 638 aa, Frankia sp. EAN1pec
MSMEFAAWNSMYSAMHAQEERRPFSRATVRRIAGFARPHRRTLGLFLVTSIAGAVLAVATPVLAGRVVTAIVDGSRPRTVIVLAALIAAIAVAEAALGVLNRWLSAGIGEGLILDLRTAVFDHVQRMPIAFFTRTRTGALVSRLNNDVIGAQRAFSDTLSGVVGNLVALLLTLVVMISLSWQITLLALVLLPVFVLPARRMGSRLARLEREAAHHNAVMGSRMTERFSAPGATLIKLFGRPADESAQFARRAQRVRDIGLRTAMVQWVFVTALTLVSALALALVYGLGGYYALRGELEPGAVVALALLLTRLYAPLTSLASARVEAMSALVSFERVFEILDLEPLIVERPDARVLPAGPVSVEFDHVHFAYPSADAVSLASLEEVAVLDERENGEVLHDVSLRAEPGQMIALVGSSGAGKSTIAQLIPRLYDVGSGAIRLSGVDVRDLTADSLRETIGMVTQDDHLFHDTVRANLLLARPEATEAELWDVLGRARLADLVTQLPDGLDTVVGERGYRLSGGERQRLTIARLLLAHPRVVILDEATAHLDSTSEAAVQEALGEALAGRTALVIAHRLSTVRSADVILVIEAGRIVERGSHPELIAAGGRYAELYRTQFEQRDPVAEVPLQPAPALAGAE

SEQ ID NO: 11791 - protein, 400 aa, Frankia sp. EAN1pec
MTERVVLAYSGGLDTSVAIGWIGAETGAEVIALAVDVGQGGEDLEAIRQRAFTCGAVESIVVDAREEFAASFVAPAIRANALYMDRYPLISSLSRPIIVKHLVEAAKQHGADAISHGCTGKGNDQVRFEVGVMALAPGLRVLAPVRDSGMTRDKAIAFAEERGLPIDVSKKSPYSIDQNLWGRTAECGVLEDPWAQPPEDVFVYTADPTVSRPSDEVTISFTDGLPTGLDGRALSLVDLVAELNTRAGAQGVGRIDMIEDRLVGIKSREIYECPAAITLLTAHRDLEDLTLERDVARFKRGIDQRWGEIVYDGLWFSPLRAALDAFVDSASVGVTGDVRIRLAGGVAQVVGRRSPGSLYDHALATYDAGDQFDQTDARGFIELWGLPTKVWAAREQRLNP

SEQ ID NO: 11792 - protein, 356 aa, Frankia sp. EAN1pec
MSSKSKSYQAEYIWIDGTEPEPLMRSKTRIVKGGKEPEIWGFDGSSTNQAPGSNSDCVLQPVFTCPDPLRGGDNVLVLCEVQLTDFTPHPTNTRAAARAVAEKYADMSPMFGIEQEYTFFQNGRPLGWPASGFPEAQGPYYCGVGGEKMPGRDIVEKHTQACLDAGLAIEGTNAEVMMGQWEFQIGVLPTPAIGDHIWVGRWLLHRIAEDFGASVSFAAKPMAGDWNGAGAHTNFSTKQTMESWDAIVAVCEALGTRVMEHVTHYGDGIELRLTGKHETAPWNKFSWGASDRGASIRIPWAVEKAKKGWIEDRRPNANMDPYVVSSLIVDTCCSALAGDKPTLFVPSQTADATVKV

SEQ ID NO: 11793 - protein, 409 aa, Frankia sp. EAN1pec
MPPRGPATSGQLLRDGRSVTLVPAYLDHASTTPLHPVAREALLAALDDGWADPARLYREGRRARMLLDAARETVAGVLGARTSEISFTASGTAAAHQALLGTAAARRRAGRVVVVSAVEHSSVLHAAQRHERAGGEVVTIGVDGLGRADPAAFEAALDAHPGTAVAALQHANHEVGTVQPVAAVARALRRRGVPLLTDAATTVGRVPVDLAELGADLLTASAHKFGGPPGVGILAVRTGTRWANPLPADEREHGRVPGFPNVPAVVATAAALAVRATEIDAEAPRLAGYTERLRRRLPELVEDVELLGPGGADPAVGLPHIVAFSCLYVAGEALLDELDRAGIAVSSGSSCTSDTLTPSHVLVAMGALTHGNLRVSFGRDSTDADLEALLDALPPAVRAVRERAGAAGL

SEQ ID NO: 11794 - protein, 397 aa, Frankia sp. EAN1pec
MENAVIVDVVRTPSGRGKPGGALSETHPVELLATTLKALTSRNDFDPALIDDVIAGCVGQAGEQSANIGRSAVLSAGYPESVPATTVDRQCGSSQQALHFAAQGVMAGAYDVVVACGVESMSRVPMRFAAAGKDPRGPGMIARYPEGLANQGIGAELIAARWKLTREELDEFSALSHQRAAATAEAGGFDNEIVPVEALAPDGSTFTHTVDQTVRPTTTAEGLAALKPSFYTEQFAQRFPEIGWHITPGNSSPLTDGASAALIMSESKAVELGLRPRARFHAFALAGSEPLIMLTGPAPATRKILARSGLRIDDIDAYEVNEAFASVPLFWAKEFDADPARLNPRGGAIALGHPLGGSGVRLMATMVNYLEATGGRYGLQTMCEGGGMANATIIERL

SEQ ID NO: 11795 - protein, 659 aa, Frankia sp. EAN1pec
MISRVSIGHIHASAPAKSGPPKDTPPKPAPPPMPGWRRFLIPVGLLVTVMLLIAPSLFATQPDSLTYSDFVGRVDSGVVRSVTIDDRGGVDGTLTDGTDFTTQIPTALDTTALERQLAAKKVQITATRTGTSFWSVVLSFLPLLLLIGFFVWSGRMARRQLSGGGALGMFGRSRAKITEADRPDTRFSDVAGYEGAKQEISEVVAFLRNPDQYLEVGAHGPRGVLMVGPPGTGKTLLARAVAGEAEVPFLSITGSGFVEMFVGVGASRVRDLFTEARKRAPSIIFIDEIDAIGGRRGSSAFGGSNDEREQTLNQLLAEMDGFESTSGVVVLAATNRPETLDHALLRPGRFDRQVTVPLPTQSERAEILAVHTRGKALTDDADLTRIARGTPGFSGADLASLVNEAAINAVRDGRSVVSAADLDAARDRILLGRRDASNALLPDEKRSVAVHESGHALVAALCDDADPVAKVTILPSGMALGVTQQLPEAERHLYSEAYLLDSLAVRLGGRAAELVVFGHGSTGASNDLAGATQLATRMVREFGLSEEIGPVGYSSDGPNFLGGDDLMARPYSEQTQRVIDAEVARLLREAQARAVDLLRMHRNALDALTARLLERETVDGTVVEELAAASMASFTRSPNGDGSGEGPDGGIPPQISLQT

SEQ ID NO: 11796 - protein, 260 aa, Frankia sp. EAN1pec
MSVLEIRNLHVSVDTDTEGPREILRGVDLTVRKGETHAIMGPNGSGKSTLSYSIAGHPKYTVTEGTVTLDGEDVLAMSVDARARAGIFLAMQYPVEVPGVSVSNFLRSSATAVRGEAPKLRTWVKEVKQAMAGLEMDPAFAERSVNEGFSGGEKKRHEILQMTLLAPKVAILDETDSGLDVDALRIVSAGIEAVRAKGETGILLITHYTRILRYVKPEFVHVMAGGRIVDEGGPELAATLEDSGYDRYVKGVEPAAAAVS

SEQ ID NO: 11797 - protein, 310 aa, Frankia sp. EAN1pec
MDIELADPATDFRSGFACLVGRPNAGKSTLTNALVGTKVAITSGRPQTTRHAIRGIINRPDAQLILVDTPGLHRPRTLLGQRLNDVVRTTLSEVDVIGFCMPADEPLGRGDRFIADELGRMAGRTPVVAILTKVDAVGDPDRVGARLLEVSGLGDFADIVPVSAVSSFQVGTLADVLVSRLPEGPRLYPDGELTDEPEQVMVAELIREAALEGVRDELPHSLAVVVEEMIPRENRPEDRPLLDVHVNVYVERPSQKAIVIGAGGSRLRDVGTRARTQIEALLGTPIYLDLHVKVAKDWQRDPKQLRRLGF

SEQ ID NO: 11798 - protein, 687 aa, Frankia sp. EAN1pec
MRTAVDNWSTMRSFQRDRSVTRASLRPGTVRRIVGFARPYRRLLAGFGVLIVLGAATGAVTPLLFKAIIDDGIVPGRAGVVQTLAGVVAALAVGEALLGLSQRWFSARIGEGLIYEMRSQVFDHVQRQPIAFFTRTQTGALITRLNNDVLGAQSAFTNTLSAVLSNILSVAFVLIAMISLSWQITVVALVLLPVFVVPARLLAPRLAALTRESYGLNAEMNTMMTERFNVAGAMLTKLYGEPDREVRTFRRRAGRVRDIGVTQAMYGRIFFVSLTLVASLATAIVYGVGGTFAARGSLEVGTIVALTAYLTRLYGPLTQLSNVHVDVMTALVSFERVFEVLDLRPAIEDAPDAVELPAGPVAVEFDHVGFRYPAATEVSLASLESTAVLDSRTPEPVLHDVTFQVGPGELVALVGPSGAGKTTISQLVGRMYDARDGAVRIGGLDVRAVSGRSLRAAVGVVTQDAHLFHDTIRANLLFARSDATEERMWAALDAAHIGRAVRDLPDGLDTVVGDRGYRLSGGEKQRLAIARLLLKEPAVVVLDEATAHLDSESEAAVQRALTAALAGRTSLVIAHRLSTVRRADRILVVDGGRIAESGTHDELMALGGLYAELHHTQFATQDDAGTGGRPGSRAAADAADAAVVGEVGEAGTPAAAGVTGPPADWSSGARVTLDPPNGGVAALPAAR

SEQ ID NO: 11799 - protein, 593 aa, Frankia sp. EAN1pec
MCGLSGELRFDGREADVAAVGRMTAAMEARGPDGVGLWATGPVAFGHRRLKIIDLSERGAQPMVDTALGLTAVFNGCIYNYQELRDRLVDAGYRFFSTSDTEVILKAYHHWGPRCVDHFAGMFAFAVYERDTGRLVLVRDRLGIKPLYVTRDPHRLRFASTLPALLAGGGVSSDIDLVAFHHYLSFHSVVPPPHTILTGVRKLPQATIRTVEADGTTRDEVYWRPDSTRQEEHASWTADDWRDAIGERLRTAVRRRMVADVPVGVLLSGGLDSSLIVALLAEAGQRDLATFSVGFEAAGGESGDEFHYSDIIARRFGTDHHQIRVPGDRLLPAIDAAVAAMSEPMVSHDCVAFYLLSQEVARHVKVVQSGQGADEVFAGYSWYPPLATVPRGDAVDAYLRVFADRPHAELPAMVESHHLIEGDASRHFVAERFAEPGAETSVDAALRIDSTVMLVDDPVKRVDNMTMAAGLEARTPFLDHELVELAAACPPELKLASGGKGVLKDLSRPLMPVDVIDRPKGYFPVPAIRHLGGPFLARVADALTDPVARGRGLFRKDWVDEMLADPNSNRTTLGANALWQAALLEMWLQTQGV

SEQ ID NO: 11800 - protein, 506 aa, Frankia sp. EAN1pec
MNGRPTAIGRTTAGQARGDRTTDDETAVTGRTAHAAQPTLARVLSGRMLLFLVLGDVLGSGIYALTGQIAADVGGMIWAPFLIAFALAFLTGTAYAELVGKYPRAAGAALYANEAFRRPFLTFMVGFTVLAAGITSTATAARAIGGKYLAEFVAAPTVVVAVVFILLTAVLNARGIEESARVNLVLTVIELTGLLLIVGIGVHALATGAGEPGRAFELRAEGPAPLALLAGTTLAFYAMLGFENSVNLVEEARRPRRDLPRALFGGMFIAGTVYLFVAFTCAMLVDPDILTGSGAPLLEVVKASDVPVPSKLFAAVALVAVANTALMNMVMASRLVYGMAAQGTIPTVFARVLPGRRTPPIAIGFVTALTVALASTGQLAGLADTTVLLLLLVFFVVNISALVLRREPVPPGAYRAPTWAPALGALSCAALATPLVHREGTVYLRALGLLALAVVLVLAQKVVSGRFRACELSGAARPAPSQPYPTATGTADFSGSRTSSPTAWRA

SEQ ID NO: 11801 - protein, 404 aa, Frankia sp. EAN1pec
MRTAVICEPVRSAVGGYGGVLRSLSSHELGAAVVRGLLDRTGLSSPDIDDVLFGSCYPTMEAPALGRVVALDAGLSVGVSGLQLDRRCGSGVQTVITAAMQVQTGAADAVIAGGAESMSNAAFYSTEMRWGSPGGAVVLHDALARGRTTAGGARFPVPGGMIETAENLRKDYGISRAEQDELALRSHQRAVDAQRSGKFTEEIIPVTVTTRRGDVVVDADEHPRADTSIEKLASLRPILGRSDPSATVTAGNSSGQNDGAAACIVTHPAAAERLGLRPLARLVSWAVAGVAPNRMGIGPILATAKALDRAGLKLADMDLIELNEAFAAQVIACGREWRFTGSDWERLNVNGSGISLGHPVAATGGRILATMLREMHRRDARYGLETLCIGGGQGISAIFERIDG

SEQ ID NO: 11802 - protein, 341 aa, Frankia sp. EAN1pec
MSTDTLAARHRYHPLRVLRLVRETSEARSIVFEVPSELTEVFAYEAGQFVTLRVTLDGETHVRSYSMSSSPLLDGELRVTVKRVPGGLISNWLNDTLGEGDVLEVNPPGGSFSLDRGDHDIVAFAAGSGITPVFSIVRTALATSHRRIRVLYANRDRAAAIFGDELDALAAQYPGRLTVEHHEDLVRGFVHRDQVDRAAGDVETAAYYICGPGGFMDVVEAGLRDLGADPSRVHIERFTPAEEPPPAGPADDITVTIKLGGKTVTTAHRRDSTLLQTARYAGLRAPSSCETGSCATCMARVVQGRAEMRINDALTPDEVAEGWVLTCQAMPVTPVIEVVYE

SEQ ID NO: 11803 - protein, 288 aa, Frankia sp. EAN1pec
MDEIAAHAQCRRWAQNFTGPGLALADRALLRPRLQAPFLVGDPPGRPSTAAQDPGFYTLRVARVVRETKNTTSFFLAIPEEFADRFRHRAGQYITLRFDLDAEIHLRPYSISSVAGRDEQMRVTVQRVRGGLVSNWMNDDLGRGDEVVTTAPMGHFTLPGLGPGGYSVIAFAEKIGIAPILSIAATALHQPLPRVHVLYTTADSAPAVFDAGLRALEREHGDRLTVRRCYNAQASQLQDRDILGLSTVTESESLFYVCGSERFTDRVEQTLLAGGTAPDRIRVEPFTT

SEQ ID NO: 11804 - protein, 369 aa, Frankia sp. EAN1pec
MPTDTRAERHRYHPLRVLRVVRETTEARSFVFAVPPELVDVFAYQAGQFVTLRVVLGGAAHLRSYSMSSSPPLDGELCVTVKRVPGGLISNWLNDTVDAGDVLEVGPPGGSFVLDRGGHDIVAFAAGSGITPILSIIRTALATSDRRVRVLYANRDRTAAIFGDELDALASQYPGRLAVEHHEDLVRGFVDRGDVARVVDAGGGGNAGGGGAGGGGAGGGGASGGGAGHVGGAAYYVCGPEGFLDVVEAGLVDLGADRARVHVERFTPVAEPLPAGPPDDITVTIRLGGRTVTASHRHGSTLLQTARFAGLRAPSSCETGSCATCMARLAQGRAEMRVNDALTPDEVAEGWVLTCQAVPVTPVVEVVYE

SEQ ID NO: 11805 - protein, 430 aa, Frankia sp. EAN1pec
MTAADTPPPVRPAGTLPTLVVGGGIGGLSAALAVARAGRAVHVVERADQFVELGAGIQLAANATRVLAGLGVLGDVEAVSVAPHRLVMRHALTGDPLTALDVGARYRGRYGFPYLVVHRNDLLTVLLEHCQAHPRVTIETGRTVTDVRTVTDLRTGAEHAEVECEDGGVHRADAVVGADGVHSRLRTHIAADEVVHSGHATYRRLAPPERDIPPDVQVWVGPELHLVQYPVRRHELFNQAAVFRSPTFGTRPDWGGPDELDAAFADACAPVRTAVAELDRNRHWPVQDREPLPHWVDGRLALLGDAAHPMQQYLAQGACQAMEDAFALATALGPATGDAVPAALRAYQDVRLPRATRCQRAARVWGGLWHTTDPLAVALRDRVLRQRRADDYSDTDWLYARPDPTRPALAAPPPRPTSTSPPGAARRRAR

SEQ ID NO: 11806 - protein, 381 aa, Frankia sp. EAN1pec
MRDAVIVEALRTPTGKRNGSLSGVHPTDLSAHVLASLAERAGVDPALVDDVVWGCVGQVGEQTFDIARNAALGAGWPETVTGVTVDRQCGSGQQAVHFAAAGLIAGQYDVVVAGGVESMSRVPMGSSLMDKVPFGERYLARYNGAFPDQGIGAEMIAERWGLSRTQLDEFALLSHERAAAAQDDGRFDEQIIPVTLTDGTVASKDEGIRRGGTVEGLAGLRTAFKPDGVITAANSSQISDGSSALLMTTSEKAAELGLCPIARVHTAVLAGTDPVIMLTAPIPATQKVLAKSGLKLDDIGAFEVNEAFASVPLAWLADIGADPKALNPNGGAIALGHPLGGSGTRLMTTLIYHMRDNGIRYGLQTMCEGGGQANATILELL

SEQ ID NO: 11807 - protein, 568 aa, Frankia sp. EAN1pec
MAVKVYERILQLFEAEGIKTIFGIPDPNFVHMFHLAEERGWTVVSPHHEESAGFMAEAVSRMTGKAAVAIGTLGPGVANLAGAMMCAKVENSPVIFLGGQRARITEQRVRRGRIQFVRQAGLFEPSVKYCASIEYADQTDEVIREGLRKALSGTPGPVYIEYPSHIIQEELDVPPPLPPAAYRLVNQTAGPDRIAEAVQYIRAAKQPVLLVGHGVHTSRAGESVRALAEAMACPVIQTSGGTSFIKGLEDRTFPYGFSAASIDAVVKSDLCLAIGTELGEPVHYGRGRHWVANEANRKWILIEQDPEAIGVNRSIDVPLVGDLRAVVPQLVDALKDTPRTPTPELDGWIRQDAAQLAELAETAPAGMSPVHPARLIVEATKVFPPDGIMVRDGGATTIFGWTYSQAKPHDVMWNQNFGHLGTGLPYAVGAGVADGGKRPMMLITGDSSFQFHIAELETAARLNLPLVCVVAVDYAWGLEVGVYKRTFGQGSLETGVHWSKNTRLDKVAEGFGCYGEYVERDEDIAPAIKRAYASGKTAVIHVAVDPKANSEEMPSYDEFRTWYAEGTQ

SEQ ID NO: 11808 - protein, 568 aa, Frankia sp. EAN1pec
MPVKVYERILQLFEAEGIKTIFGIPDPNFVHMFHLAEERGWTVVSPHHEESAGFMAEAVSRMTGKAAVAIGTLGPGVANLAGAMMCAKVENSPVIFLGGQRARITEQRVRRGRIQFVRQAGLFEPSVKYCASIEYADQTDEVIREGLRKALSGTPGPVYIEYPSHIIQEELDVPPPLPPAAYRLVNQTAGPDRIAEAVQYIRAAKQPVLLVGHGVHTSRAGESVRALAEAMACPVIQTSGGTSFIKGLEDRTFPYGFSAAAVEAVVESDLCLAIGTEIGEPVHYGRGRHWVANEANRKWILIEQDPEAIGVNRSIDVPLVGDLRAVVPQLVDALKDTPRTPTPRLEAWVTQEAARLAELAETALSGMSPVHPARLIVEATKAFPADGIMVRDGGAITIFGWTYSQAKPHDVIWNQNFGHLGTGLPYAVGASVADGGKRPVMLITGDSSFQFHIAELETAARLNLPLVCVVSVDYAWGLEVGVYKRTFGQGSLETGVHWSEDVRLNKVAEGFGCYGEYVERDEDIAPAIKRAYASGKTAVIHVAVDPKANSEEMPNYDEFRTWYAEGMQ

SEQ ID NO: 11809 - protein, 307 aa, Frankia sp. EAN1pec
MSPESMSPESTRVGWIGTGVMGASMCGHLLRRGYRVTVTTRSRDSADGLLAAGATWADSPAEVAAGSDVVFSMVGLPADVREVLLGPAGALAGAAPGAVLVDMTTSEPALAVEIGRAAGEIGVHALDAPVSGGDVGARNATLSIMVGGPVGVFEAVRPGFEAMGATIVRQGDHGAGQHTKMVNQILIASTMVAMSEGLLYASRVGLDVAGVLESVGSGAAGSWSLSNLAPRVVGGDFAPGFFVDHMVKDLGIALAEARRARLALPGLALANQLYVALQAQDRGRDGAQALVHALASLSGLEWPPHPA

SEQ ID NO: 11810 - protein, 403 aa, Frankia sp. EAN1pec
MREAVICEPVRTAVGRYGGALAALSAQALGAAVLRGLLDRTGLRSADIDDVIFGSCYPTMEAPALGRVVALDAGLDVTVAGLQLDRRCGSGMQAVTTAAMQVQTGVADVVIAGGAESMSNAPFYSTRMRRGSGGGDVTLHDALARGRVTAGGANFPVPGGMIETAENLRREYGISRSEQDEFALRSHVRAVDAQAAGRFADEIVSVSVPGRGGSVVVDVDEHPRADASLDTLAALRPIMGRTDPEATVTAGNSSGQNDAASACVVTHPEAARRLGLRPLGRLVSWAVAGVEPARMGIGPVAATAKALERANLKLADIDLIELNEAFAAQVLACTREWGLTTADLDRLNVNGSGISLGHPVAATGGRILATLLHEMERQDARYGLETLCIGGGQGITAIFERVG

SEQ ID NO: 11811 - protein, 218 aa, Frankia sp. EAN1pec
MDGWRRQMVEQGSALLHAALDHADGLRARIEQLPGLHVMTDELCGAEASHDLDRLQIVIDTAGLEISGYQAADWLRQHAQLDMGMSDHRRVCAQFTFADDARSGRRLLAALRRLVDAAPDLERPTPVEVPDPTELELETVDLPRDAFFGPTEAVPPELAVGWVAAEQLTPYPPGVPVVPPGERITGPVLRYLLSGVSAGMAVPDAADRALATIQVTRT

SEQ ID NO: 11812 - protein, 397 aa, Frankia sp. EAN1pec
MSEHEAVIVSTARTAIGTAGKGSLVDVDAFELGTQAVAEAVRRSGIDSADIDDVVLGESLYGGGDIARYAAIEAGFANAAGVAHNRHCASGLVAVQTAAASIISGMDRVIVAGGTNSSSTSPRAKRRRPGTDEVEDWYSPTHRNTAEAPNFDMSITVGWNAAVKAGVSREEMDAWALRSHQRAVAGIDAGSFTDEIFPIEVPRRDGTSFTFAVDEHPRRTTSMEKLASLKPLHPEIEGFSITAGNAAGANDGAAAMVITDGGYAAEHGLEPLGIVRAWASVGVPPAETGIAPTLAIPKALKRAGLTVADVDLWEINEAFASVAVAASRILEIDDSRVNFLGSGCSLGHPIATTGARQIITLIHELRRRGGGVAVSAMCAGGGMASALVLEVPAPRSS

SEQ ID NO: 11813 - protein, 459 aa, Frankia sp. EAN1pec
MVRGIDTGHEKQAAGERTTGDESGVDPRTDPRADTGPVLARTIGTGDAVVIGLGAMLGAGVFAAFAPAARAAGAALLFALATAAIVAYCNATSSARLAALYPQAGGTYVYGRRRLGDFWGYLAGASFITGKTASCAAMALTVGAYTWPGHERLVAGTATAALTAVNYSGMRRAAWLTRLIVVVVLTVLVVVVVVCVTSGAAEPVRLSPTGRDGPAGPASPSLWPGLPQAAGLLFFAFAGYARIATLGEEVRDPRRTIRRAIPTALGITLVVYAAVAVALLLVLPVAALGASAAPLTDAVRAAGMPGLAPVVRVGAAVGALGSLLALILGVSRTTLAMARDGHLPTPLAAVHPRFGVPHRAELTVGAAVTALVLTTDLRGAIGFSSFGVLLYYAVANAAAWTLSPTEGRPVRAVPVVGLLGCLLLAFSLPGTSVLGGSAVLAAAAVVYAARHAGGHPARQ

SEQ ID NO: 11814 - protein, 398 aa, Frankia sp. EAN1pec
MGMAGRRALVIGGGIAGPAAAIALARAGILPTVFEADADPESAGSLLLGVAPNGLRGLELLGVQGLDEAGHPSAGNHFVDVHGRHLGTIEAPARVIRRSELRRVLLRELDRRGIPVVPASRFDSVDDRGEASVRAYFADGSSAVGDFLLGCDGLRSRVRRHVAPETPWPTFAGLVTVGGFADRVGRSYKTGMLEFTVVGTGTFIHYGTAGGEVMWAMSMVSADPWPSPRTDAGQEQVRRRLLTQLEHAPAHLRSVVDATDRLERLPLSVLEPVGTWYRRNVCLLGDAAHAMLPHAGQGASMAIEDAIVLGRCLRDAPTAPIGFAAYRAARAERVAHVHRLARRNRPRTPPPNAPARWMRDHIVPVAMKVGLRQMAAMYDYRIAWDEPSPGRDPLSTVF

SEQ ID NO: 11815 - protein, 329 aa, Frankia sp. EAN1pec
MPRAPLFQRATVTRTVHETADARTFVLAPREGSFTYRAGQFVTFRVQIDGEELLRSYSMSSAPETDSELMTTVKRVPGGRVSNWLIDNVSAGDEVEVTEPKGIFCLQESDVPLLGFCGGSGITPIISLAKSALSGTDRTVRLLCADRDQPSMIFERALAELVEKYPDRLSVVRHLDADRGFLDDAAIKAFVGADGNADCYICGPEPFMDLVERAFPGPGRVFVERFGTPASSEPAGEEVEGTVTIILGRKKISVTRREGETFLESARRGGLAPPFSCESGTCATCIAKLVEGTATMRVNDALTQDEIDDGYVLTCQGVPDSSSAVVRYE

SEQ ID NO: 11816 - protein, 379 aa, Frankia sp. EAN1pec
MRDAVIVEAVRSPLGKRNGGLSAVAPVDLGASLLQALVARTGLDPAVVDDVVWGCVTQVAEQSVNIGRNTVLAAGWPETVPGTTVDRQCGSSQQAVHFAAASVIAGYYDVVVAGGVESMSRVPMGSQTIGAWPFGDGFRTRYPDIEPNQGIAAEMIAEKYGFSREALDEFSLRSHELAAAAQDNDAFAAEIVPVDAAPGVVADEGIRRGGDVTTLGKLSTPFKPDGVISAGNSSQISDGASALLITSSEKAAELGLRPIVRIHSAVVVGDDPVMMLTGPIPATARILRRSGLSLGDIGTFEVNEAFASIPLAWLAETGADPARLNPRGGAIALGHPLGGSGGRLMSTMINHMRDNGIRYGLQTMCEGGGLANATILELL

SEQ ID NO: 11817 - protein, 387 aa, Frankia sp. EAN1pec
MKGVTVRDAVIVEAVRTPIGRRNGTLRGVHPVDLASDVLRTLTERAQVAPELVDDVIFGCVTQIADQSTNVARLAVLAAGWPESIPGVTLDRACGSSQQAVHFAAAGVMAGQYDLVVAGGVESMSRVPLGSARAVGEPFGPRVRARYQRDSFSQGLGAEEIAHRWGLSRTRLDEFALESHHRAMAAVDSGAFDAQLVPVEGPDGVLTADEGVRRETTLEKLGALKPAFREDGVIHAGNSSQISDGSAALLITTSERAAELGLRPLARFHAGTVAGDDPVIMLTAPIPATEKVLKRAGLTIADIGVYEVNEAFASVPLAWEIETGADHARLNPLGGAIAVGHPLGASGAILMTRMIHHMRDHGIRYGLQTMCEAGGMANATVIELIGA

SEQ ID NO: 11818 - protein, 491 aa, Frankia sp. EAN1pec
MSSFTDLGVPARLTDVLTRLAIETPTPIQRATLPDALAGRDVLGRGRTGSGKTLAFLLPVVARLSGGPRAQAGAPRALVLAPTRELAAQIDTALRPLAAAAGLTSCTVFGGVGQEPQVAAIRRGVDIVVACPGRLEDLLAQGRCSLAQVKIVVLDEADHMADLGFLPAVRRLIGQTAAGGQRMLFSATLDKAIDTLVRQYLSRPAVHEADSAQSPVGTMAHHLLHVERDSRLPVLVDLSSAPGRAVVFTRTKHGAKALARQLNRAGVRAVELHGNLSQNARTRNLDDFHTGRASALVATDIAARGIHVDNVALVIHADPPADHKAYLHRSGRTARAGNSGTVITLATTEQIREVTQLARAAGIRPTTTRVASAAHPILATLAPGARSLSSPVVAAQAETRSTPAQRRPVGEDRGTEPTPRTGRRRGRRPAGNHGGRAADHGRRAGRSTASRSPAVTARTSSPEHEAGPSPAKRSSSRPTHSAAAFSARRAR

SEQ ID NO: 11819 - protein, 506 aa, Frankia sp. EAN1pec
MSDIDLLDLPLVLLSNRGPVSFDRDASGRTVNRGAGGLVSALSGLAEHLDDAVWVCGAATPEDAAVAGENDGGAILVQTQPTPHVVEGQPDGPSIRVRLVVTDPDAYADFYSVWSNPILWFIQHGLYGRSLAPVLTRAEHDAFENGYAAVNRAYADAVADEVQSRGGKALVLLQDYHFYLVAEHVREQCPDVVLTHFVHIPWPGPDEWRVLPGNIRERLLRGLLGSDVVGFHTRRYARNFVLCAGELLGLPINLDDLTVTVNNRVVSARYYPISVDPAALDATLASEDVAAHMAMLRYVFLDEDRQLVLRVDRTDPSKNVVRGFLAFGTLLDQHPELVGRVSFLALLQPSRTDVPEYADYIALIGAVVAEINAKHTKEGRQPIDLRMVEDFALAVAAYSICDVLMVNAIADGMNLVAKEVAVVNRRGGVLALSEMAGSHEELGEFAVTLHPFDVQQMADALYTALTMPMEERHRRLAAAAEQVRTHDVRRWLNDQLADLRHLAGFS

SEQ ID NO: 11820 - protein, 541 aa, Frankia sp. EAN1pec
MPTFVDRVVLHAAAGDGGHGCCSIHREKFKPLGGPDGGNGGRGGNVLLRVDSGVTTLLDFHFHPHQRAGGGRPGQGSNRHGADGDDLVLSVPDGTVVLSPDGEQIVDLVGAGSTYVLAHGGRGGRGNASLASARRKAPGFAELGEPGEQLDAVLELKSVADVALVGFPSAGKSSLVSVLSAARPKIADYPFTTLVPNLGVVQAGDHRPFTVADVPGLIPGASQGRGLGLEFLRHIERCSLIVHVLDCATLEPGRDPLTDLDVIEAELAAYTTDLSDRPRLVVLNKVDVPDAAELAELVTPDLQARGLAVHQISTASRHGVRGLALALAELVASLRAAVPSPAATRIVLRPRAVDEPDFTVRAEGDGFVVGGTKPLRWVRQTDFSNEEAIGYLADRLARLGVEKELAKRGAFPGVAVTIGAVTFDWEPTLSGREALLAAGGGDGDGYGEAGYGAVDTAVTIATVGGSGGTRAGARGGAVVSDLPLGPRGTDLRLRTSKRLTRAQRTALSDSADDFDDGAGFSDSAAFGDSGGSGGDADGGRG

SEQ ID NO: 11821 - protein, 94 aa, Frankia sp. EAN1pec
MIRSWRSPRRFGTPRGCTAASERGATVSEGTVKWFNAEKGFGFISVDGGGPDVFAHFSSIVGDGYKSLEEGQRVSFDIEQGQKGPQAAKVQPLS

SEQ ID NO: 11822 - protein, 261 aa, Frankia sp. EAN1pec
MAGAALPGRLRERLAWRVARLAEVRDETPTARTLVLDVPGWPGHLSGQRVDVRLTAADGYSTRRSYSLAAPGAGDRVELTVQRVPGGEVSPYLTEIFSVGDPVEIRGPIGGWFVWRPADPEPVLLVAGGSGIVPLMAMVRARRSAASRVPFRLICSVRSPADLYYADELREAARADPGLDVTRCYTRVVPDHWTSPPRRLRPADLAEAGWPPDLTPTCYVCGPTGFVEAVADALVEIGHEPERIRTERFGPSGSSHPAGTV

SEQ ID NO: 11823 - protein, 369 aa, Frankia sp. EAN1pec
MCMAQAGDRDVARERGSAGPVPPYAARAAGADDPGADAPGYSGLATFAGLPWMPGLGDLRARRPDVAVVGAPFDIATTHRPGARFGPRALRAQAYNPGTYHLDLGIEIFDWLDVVDAGDAHCPHGLTEVSHRNIRAKVGDVARLGVIPVIIGGDHSITWPAASGVAEAVGWGEVGLLHFDAHADTADIIDGNLASHGTPMRRLIESGAVRGRNFVQVGLRGYWPPPDVFAWMREQGMRWHLMHEIWERGSREVVAEAIAQAVDGCRALYLSVDIDVLDPGFAPGTGTPEPGGMNPADLLRAVRQIALDTPIVAADIVEVSPPYDHAETTVNSAHRVAMEIFAALAHRRRSAAGGTADLPAGLPKAKAGS

SEQ ID NO: 11824 - protein, 365 aa, Frankia sp. EAN1pec
MLAVFGSPGRYVQGRDATAALGPEMARLGLTGPAVIVTSGAPLRLLEDTWRTSLDGAGIPYSVHLFGGECSDQEIDRVVSAARDPEATVIVGAGGGKVLDTARAAAAALDLPVVTCPTTASSDAPCSALSVVYSQDGTFERYLFYPRNPDLVLVDTTAVAAAPARLLVAGIGDALATWYEARTVGEARRANQLDGAQTATAGALAELCRRILFDDAAAAIRAVRAGAVTPALERVVEANTLLSGLGFESGGLAVAHSVHNGLTVAAETHRYLHGEKVAFGLIVQLVVEGRPEEELAEVLAFCGGVGLPRTLAQVGLADPPIELLRGIAVRALADGETAHNEPFDLDPPMIVDAILAADAAGRASR

SEQ ID NO: 11825 - protein, 402 aa, Frankia sp. EAN1pec
MAAMSRISHRIAGIAPSATLAVDATAKAMRAAGRDVIGFGAGEPDFPTPEHIVAAAEKACREPRMHRYTPAAGLPELREAVAEKTRRDSGLVVEPSQVLITNGGKQAVYQAFATLLDPGDEVLLPAPYWTTYPEAIRLAGGVPVDVVTGPEAGYRVTVEQLEAARTPRTKVLLFCSPSNPTGAVHTPEEVRAIGRWAAEAGIWVLSDEIYEHLVYGDARFASMPVEAPELADRWVVVNGVAKTYAMTGWRVGWLIGPLDVVKAATNLQSHATSNVSNVAQAAALAAVAGPLDAVHEMRTAFDRRRKTMHEMLVQIPGVRCPLPDGAFYAYPSLEGVLGRTLRGRTPATSADLCQFILEEAGVAIVPGEAFGTPRFARLSYALGDTDLVEGVRRLGALLSEAV

SEQ ID NO: 11826 - protein, 586 aa, Frankia sp. EAN1pec
MTSPARPPRAARPQSPSRPKGQGQWALGYSEPLNPNERMKKDQDGLAVRERILNEYPHTGFDGIDPQDLRGRFRWWGLYTQRRPGISGGRTAVLEPEELDDRYFMQRIRLDGGRMTSEQLRIIADISTRYGRDVADVTDRQNIQLHWIRIEDVPAIWGALEAAGMTTEESCGDTPRVILGCPLAGVDADEVIDATGVIDQVVERFVGDTTLSNLPRKFKSAMSGCPDQCTLHEINDIAFVGVVHPELGPGYDLWVGGGLSTNPKLGVRLGTFVTPERVPEVWHGVIQLFRDYGYRRMRTRARLKFLVADMGVEWVRSTLEKEYLDAALPDGPAPLPPRNEGRDHIGVHQQRDGFFAVGFAPRAGRLTGTTLTAVANLADRFGQGRIRATTTQKLVILDVPGEDLDALEAELAALDLVVRPSVFRRGTMACTGIEFCKLAIVETKGNARDLIVELERRLPDFDEPIGININGCPNACARFQVADIGLKGSLVPDDNGEMVEGFQVHLGGHLGTRSRLGRKSRGLKVTADGLVDYVVGLLETYQEHRADGDTFADWAERADEALLTGVGSGSASAGPAAGRRAEGGAT

SEQ ID NO: 11827 - protein, 649 aa, Frankia sp. EAN1pec
MTRPPAGGARPMAGPGRFFAAGGEKPEDFAASTRRVLRLLGRQRALLIPAVALAVVGIALTVTGPRLLGHATDLVFAGLLSSRLPAGTTKAEAVARLRAEGHGTQADLLSSVDVTPGEGMDFGAIGRVLLVVLIVYLVAGLCTVLQARLANKALQRMLSDLRADVQEKITRLPLRYFDRRQRGEVLSRVTNDIDNLGQNLQQSLSQMIASVLTIIGVLAMMIWISWILALIAVVTVPVSIVITTRIGKFAQPQFVSQWKTTGRLNGHIEEMYTGHALVRAFGRQEESAEIFREHNERLYEASWRAQSISGLMQPAMMFIGNLNYVLVAVVGGLRVASGALSIGDVQAFIQYSRQFSQPLTQLASMGNMVQSGIASAERVFDLLDAPEQEPDPLAPARPEENHGRVAFEHVAFRYEPDKPLIDDLSLVAEPGHTVAIVGPTGAGKTTLINLLMRFYEVTEGRITLDGVDIAEMSRADLRRSIGMVLQDTWLFGGTIAENIAYGAEGATREQVVEAARAAHVDRFVRTLPDGYDTVLEDEGVGVSGGEKQLITIARAFLAEPLILVLDEATSSVDTRTEVLIQRAMSRLRAGRTAFVIAHRLSTIRDADTILVMEDGAIVEQGDHDALLEADGAYARLYKAQFAQAVVETG

SEQ ID NO: 11828 - protein, 397 aa, Frankia sp. EAN1pec
MRDAVVVEAVRSPIGRGRASGSLAPVHPIDLLAHSISAAVERSGVDPALIDDVIAGCVTQSGEQAANIARWATLAAGLPESVPGTTVDRQCGSSQQAVHFAAQGVIAGAYDMVLACGVESMGRVPMGSATLPGDSHGTRINARYPDGLISQGISAELIGARRGLGRAEMDEFALASHQRAATAARDGLFTPEIAPVKVTGPDGSVVEFSADEGIRPASSTQALAGLRPAFYDEATAARFPEIGWNVTAGNASQISDGSAALLITTSERARELGLRPLARLHSFAVVGDDPFLMLRGVIPATRRVLERSGLSLDDIDLFEVNEAFAAVVLDWRAEIGASAEKVNARGGAIALGHPLGASGARIMTTLVHALHQTGGRFGLQTMCEAGGLANATIIERL

SEQ ID NO: 11829 - protein, 422 aa, Frankia sp. EAN1pec
MALLVAKFGGSSVADADRIKRVADRIVQTRRAGNDVVVVVSAMGDTTDDLLDLAEQVSPLPPARELDMLLTAGERISMALLAMAITKLGAEARSFTGSQAGVITDSVHGRARIIDVTPGRIRTALDEGAIAIVAGFQGVSQDTKDITTLGRGGSDTTAVALAAALGADACEIYTDVDGVFTADPRIVPDARRIERISYEEMMEMAACGAKVLMLRCVEYARRYSVPVHVRSSFSSKPGTWVTETPEAQLVEQAIIRGVAHDSSEAKVTVKGCPDKPGVAAAVFRAVADADVNLDMIVQVGSVAGSGRTDISFTLPMADGRTALGALEKVREQIGFERTLYDDHIGKLSLIGAGMKSHPGVSARFFGALADSGVNVEIISTSEIRISVVVRDTDLPVAVRAVHAAFELGNPDESAVVYAGTGR

SEQ ID NO: 11830 - protein, 406 aa, Frankia sp. EAN1pec
MIYLDHNATTPVDPRVVEVMLPLFTERFANPASKHAPGQEATRIVERARREVASLAGARPREVVFTSGATEAANLAIGGVLATAEPGRRRILVGATEHPAVLGAADAAAAAANATVAERIAVHPDGTVDVDDLRRRLGPDVALVAVMAANNETGAVNDLRPLVEPVHSAGALLLCDVTQALGRIPVELEQTGVDLAVASAHKLYGPKGVGALIASKDAWPRLAPRVHGGGQERGLRAGTLNTAGIAGFGAAARIAAESMADDGRHQGELTALLTALLTENLAKRLGPGAVELNGPDRARLPNTVNLRFVGAGADEVQACAPRVAISAGSACSGGGDEPSHVLLAMGRTATEARESLRFSLGRATTTEEIRTAADLVARAVLRVRSLSQSTPIQDEVRDDNRALRTA

SEQ ID NO: 11831 - protein, 357 aa, Frankia sp. EAN1pec
MTVGRILLDAAASLTTPLLPDDYLGLIDPLWSRRGLRGRVETVRREAAGVATLVIRPGAGWNEHRAGQYVRIGVNVDGVWHWRPYSVSSAPGDPGGVISITVKALPDGKLSGRLVERVRPGAIVRLEKPRGCFVLPQVLPSRLLFVTAGSGITPVMSMLRGFAQDGEMPDAVVVHSAPTRDDVIFGTELRELAARFPTLRLHEHHTRVPGGPARRLTMAALPAICPDWAERPAWVCGPPGMLADAEAWWRRAGIADRLRVERFRPAGAPGGGTGGRVRFARSGRQAQAGGNKSLLAVGEDAGVLMPSGCRMGICHSCLAQLTSGRVRDLRTGREHGAQGELVQTCVSGAAGDVEIDL

SEQ ID NO: 11832 - protein, 404 aa, Frankia sp. EAN1pec
MEFAQSDKLADVCYDVRGPILDEATRLEAAGQRILKLNIGNPAPFGFSAPPSVLAAVVENLAAAQGYSDSKGLLPAREAVVRYAAGKGMTSVTPDDVYLGNGVSELIMMSLQALLNNGDEVLLPAPDYPLWTAVVSLTGGRPVHYLCDESAGWNPDLDDIIRKITPRTRAIVIINPNNPTGAVYDRPVLEELIEVARRHHLMLFSDEIYDRILYDGAEHHSPAALAPDLFCVTFNGLSKAYRLAGFRSGWMTLSGPRQHASSYIEGLNILANMRLCANVPGQFALQAALAEGSGAGDLVLPGGRLLEQRDTVVKLLNDIPGVSCVPPRGALYAFPRIDPEVYPIDDDESFVLDLLQAERILLVQGTGFNWPRPDHVRLVTLPCVDDLTDAVGRIDRFLTTYART

SEQ ID NO: 11833 - protein, 461 aa, Frankia sp. EAN1pec
MLDPLYHLAANAIVFFHKGFGPIFGADSFFAWAFSVVLLVICVRILIFPLFVKQVKSQRTMQMMQPRIKEIKEKYGHDKQQMQLEIMKLQKEHGNPLLGCLPILLQIPLFISLFHVFTHLAPMNEGPGGSLVWRPRVGLSADQVEQIASAKLWGISLSNSFGSSQESLDFLGANGTHAKILAVVLIVLMGATTFFTQRQIMARTGPVDPQQAMVQKILLYGSPLMLAIFGFRFPIAVLLYWLTTNLWSMGQQFFVIKKMPPLKPLGAGGKVPGARTAPTDNAVVSRPAPGARAGAKSKSRPRPATTSLTKGADSGAGGQAAGENGRDSGSGVSAGSGERVSSAPPGTRSRSGSSASKPKTPAKAVGSKATPKATTPKATTAEAAGGAGKAAATSEIADSGRETTPGSATAAAGTSRSNGVAESEGAPRSTPPPVPAGMRRAPGGSRPAKRRGKGKRPGGRR

SEQ ID NO: 11834 - protein, 864 aa, Pinus sylvestris
GESGKSFDYTRSIKSTTESVPEQQITAYLSRIQRGGRIQPFGCVLAVEETTFRIIAYSENAVEMLDLAPQSVPSMEKPQQDVLTIGTDVRTLFTAASAHSLEKAAVAQEISLMNPIWVHCKNSRKPFYAIVHRIDVGMVIDLEPLRTGDAFMSAAGAVQSQKLAVRAISRLQSLPCGDVGLLCDTVVENVRELTGYDRVMVYKFHEDEHGEVVAEIRRSDLEPYLGLHYPATDIPQASRFLFMQNRVRMICDCMATPVKVIQSEELMQPLCLVGSTLRAPHGCHAQYMANMGSIASLVMAVIINGNDDEGGGSGRNSMKLWGLVVCHHTSPRAVPFPLRYACEFLMQALGLQLNMELQLAAQLTEKHILRTQTLLCDMLLRDAPMGIVTQSPSIKDLVKCDGAALYYGGMCWMLGVTPTEAQIKDIADWLLEHHGDSTGLSTDSLADAGYPGAASLGDAVCGMASARITSKDFLFWFRSHTAKEMKWGGAKHHPDDKDDARRMHPRSSFKAFLEVVKRRSLPWDNVEIDAIHSLQLILRGSFRDIDDSGTKTMVHSRLNDLRLQGIDELSSVASEMVRLIETATAPILAVDYNGLVNGWNAKVAELTGLPVGEAMGMSLVQDLVFEQSVERVEKMLHNALRGEEEKNVEMMLKTFGPQKEKEAVILVVNACSSRDFTDNIVGVCFVGQDVTSQKVVMDKFIRIQGDYRSIVQSPNPLIPPIFASDEYACCSEWNAAMEKVTGWTHDEVIGKMLVGEIFGGCCRLKGQDAVTKFTIVLHSAIDGQEIEKFPFAFFDKQGKYVEALLTANKRTDADGRITGSFCFLQIASSELQHALEVQRQQEKKCFARLKELAYIRQEIKNPLY

SEQ ID NO: 11835 - protein, 864 aa, Pinus sylvestris
GESGKSFDYTRSIKSTTESVPEQQITAYLSRIQRGGRIQPFGCVLAVEETTFRIIAYSENAVEMLDLAPQSVPSMEKPQQDVLTIGTDVRTLFTAASAHSLEKAAVAQEISLMNPIWVHCKNSRKPFYAIVHRIDVGMVIDLEPLRTGDAFMSAAGAVQSQKLAVRAISRLQSLPCGDVGLLCDTVVENVRELTGYDRVMVYKFHEDEHGEVVAEIRRSDLEPYLGLHYPATDIPQASRFLFMQNRVRMICDCMATPVKVIQSEELMQPLCLVGSTLRAPHGCHAQYMANMGSIASLVMAVIINGNDDEGGGSGRNSMKLWGLVVCHHTSPRAVPFPLRYACEFLMQALGLQLNMELQLAAQLTEKHILRTQTLLCDMLLRDAPMGIVTQSPSIKDLVKCDGAALYYGGMCWMLGVTPTEAQIKDIADWLLEHHGDSTGLSTDSLADAGYPGAASLGDAVCGMASARITSKDFLFWFRSHTAKEMKWGGAKHHPDDKDDARRMHPRSSFKAFLEVVKRRSLPWDNVEIDAIHSLQLILRGSFRDIDDSGTKTMVHSRLNDLRLQGIDELSSVASEMVRLIETATAPILAVDYNGLVNGWNAKVAELTGLPVGEAMGMSLVQDLVFEQSVERVEKMLHNALRGEEEKNVEMMLKTFGPQKEKEAVILVVNACSSRDFTDNIVGVCFVGQDVTSQKVVMDKFIRIQGDYRSIVQSPNPLIPPIFASDEYACCSEWNAAMEKVTGWIHDEVIGKMPVGEIFGGCCRLKGQDAVTKFTIVLHSAIDGQEIEKFPFAFFDKQGKYVEALLTANKRTDADGRITGSFCFLQIASSELQHALEVQRQQEKKCFARLKELAYIRQEIKNPLH

SEQ ID NO: 11836 - protein, 864 aa, Pinus sylvestris
GESGKSFDYTRSIKSTTESVPEQQITAYLSRIQRGGRIQPFGCVLAVEETTFRIIAYSENAVEMLDLAPQSVPSMEKPQQDVLTIGTDVRTLFTAASAHSLEKAAVAQEISLMNPIWVHCKNSRKPFYAIVHRIDVGMVIDLEPLRTGDAFMSAAGAVQSQKLAVRAISRLQSLPCGDVGLLCDTVVENVRELTGYDRVMVYKFHEDEHGEVVAEIRRSDLEPYLGLHYPATDIPQASRFLFMQNRVRMICDCMATPVKVIQSEELMQPLCLVGSTLRAPHGCHAQYMANMGSIASLVMAVIINGNDDEGGGSGRNSMKLWGLVVCHHTSPRAVPFPLRYACEFLMQALGLQLNMELQLAAQLTEKHILRTQTLLCDMLLRDAPMGIVTQSPSIKDLVKCDGAALYYGGMCWLLGVTPTEAQIKDIADWLLEHHGDSTGLSTDSLADAGYPGAASLGDAVCGMASARITSKDFLFWFRSHTAKEMKWGGAKHHPDDKDDARRMHPRSSFKAFLEVVKRRSLPWDNVEIDAIHSLQLILRGSFRDIDDSGTKTMVHSRLNDLRLQGIDELSSVASEMVRLIETATAPILAVDYNGLVNGWNAKVAELTGLPVGEAMGMSLVQDLVFEQSVERVEKMLHNALRGEEEKNVEMMLKTFGPQKEKEAVILVVNACSSRDFTDNIVGVCFVGQDVTSQKVVMDKFIRIQGDYRSIVQSPNPLIPPIFASDEYACCSEWNAAMEKVTGWTHDEVIGKMLVGEIFGGCCRLKGQDAVTKFTIVLHSAIDGQEIEKFPFAFFDKQGKYVEALLTANKRTDADGRITGSFCFLQIASSELQHALEVQRQQEKKCFARLKELAYIRQEIKNPLY

SEQ ID NO: 11837 - protein, 385 aa, Pinus sylvestris
EPYLGLHYPATDIPQASRFLFMKNRVRMICDCCAPPMKVIQDKRLRRPLSLCGSTLRAPHGCHAQYMANMGSIASLVMSVTINENGDDSEGNGLQQQQKGRKLWGLVVCHHTSPRVIPFPLRYACEFLMQVFGIQLNKEVELAAQLREKHILRVQTVLCDMLLRDAPVGIVSQTPNIMDLVKCDGAALLYGKRLWLLGTTPTEAQILDISDWLLEHHRDSTGLSTDSLAEAGYPGAASLGDAVCGIAAVRITSKDFLFWFRSHTAKEVKWGGAKHDPNDKDDGRRMHPRSSFKAFLEVVKRRSLPWEDVEMDAIHSLQLILRDSFQDIDDSDNKTMIHSRLNDLRLQGIDELSAVTNEMVRLIETATVPILAIDSNGLVNGWNTK

SEQ ID NO: 11838 - protein, 189 aa, Vitis vinifera
MDKKPCNSQDAEVRKGPWTLGEDLILINYIANHGEGVWNSLAKSAGLKRTGKSCRLRWLNYLRPDVRRGNITDEEQQLIMELHAKWGNRWSKIAKHLPGRTDNEIKNFWRTRIQKHIKNAETFTAQSSDQTHDQATTSQVMGAAHVADSYSPPSYPANLEAFPGPSSAESNDNFWTMEDIWSMQLLNGD

SEQ ID NO: 11839 - protein, 517 aa, Capsicum chinense
NYAFSSSQFMTSPFSDLLSDNNDDNNNNRNWGFSYQRIMNSINKDEVPKFKSFPPSSLPMISSSSPASPSSYLAFPHSLSPSVLLDSPVLFNNSNTLPSPTTGSFGSLNSKEDNSRTSDFSFHSRPATSSSIFHSSAPRNSLDDLITRQQQTTEFSTAKIGVKSEVAPIQSFSQENMQNNPAAMHYCQPSQYVREQKAEDGYNWRKYGQKQVKGSENPRSYYKCTFPNCPTKKKVERNLDGHITEIVYKGSHNHPKPQSTRRSSAQSIQNLAYSNLDITNQPNAFLENAQRDSLAVTDNSSASFGDEDVDQGSPISKSGENDENEPEAKRWKGDNENEVISSASRTVREPRIVVQTTSDIDILDDGYRWRKYGQKVVKGNPNPRSYYKCTFLGCPVRKHVERASHDLRAVITTYEGKHNHDVPAARGSGSYSMNKPPSGSNNNMPVVPRPSLLANNSNQGMNVSNTLFNTAQVEPPITLQMLQSSGSSSYSGFGTSSGSYMNQMQPTNNSKLISKEE

SEQ ID NO: 11840 - protein, 390 aa, Chlamydomonas reinhardtii
MAAASTTNPDPLASEGTFHKIKDLGSGSFGHVALYSRLGHDEPVAVKCLPVRVVDYNMVKREVRSHCSLNHPHVILFKRLGLTPDKRYLFMVMEYADCGDLFKYVQQHGRLPEADARWFFQQIILGLDYCHRRGVVNRDLKLENLLLRSAAEVPPPPGQLEQPRNLHIKVADFGLCKASVNSLPKSRVGTLYYLAPEVLRASADRPYDAKLSDIWSVGVILYVLLFKAYPFGVISDRDNKAQRDAILRRIANAEWQLPAHPVIGEACRDLLSRILVSDPAKRITMEGIMSHSWFREDLPEGALEFNEGLVEEQAADPPRCEQSMEEIDAILSAAEDPLHGGGLGAGLAGGGGAAGGGTAAGVMAMIGSSGIDDEIDELHAEHPSQFGMND

SEQ ID NO: 11841 - protein, 255 aa, Chlamydia muridarum Nigg
MLHLYDLHVCCEEKKILEGLSLSIRPGELHIIMGPNGAGKSTLAKVLSGDDSVEVASGRMTLSGSDLIEMSPEKRAHAGMFISFQHPPEIPGVNNRLFLKEACNACRKARNQEVLEDSAFNELLASLEETYGFPGFHFFPDRNVNEGFSGGEKKKNELWQMLILEPKMVVLDEPDSGLDVDALKGICSVVQTYRRKHPETAFCIVTHNPRLGDLLHPDHVHILLNGRVVFSGDMHLMEELERKSYQELLDVVTRE

SEQ ID NO: 11842 - protein, 605 aa, Chlamydia muridarum Nigg
MIKNRKIVLRKSSLPLFSLDKFLSTIRKEPSFSNTEEVLVKVSLSFKHLVPKLVTCLKEGYSFNTLKKDFIAGLTAGILAFPLAIAIAIGIGVSPLQGLLASIIGGFLASALGGSRVLISGPTSSFISILYCIGVKYGEDGLFTITLMAGIFLIIFGLAGLGTFIKYMPYPVVTGLTTGIAVIIFSSQIRDFLGLQMGDGVPLDFIGKWVAYWDYLWTWDSKTFAVGLFTLLLMIYFRNYKPRYPGVMISIIIASTLVWILKIDIPTIGSRYGTLPSSLPGPVFPHISITKMLQLMPDALTIAVLSGIETLLAAVVADGMTGWRHQSNCQLIGQGIANIGTSLFAGMPVTGSLSRTTASIKCGASTPIAGIIHAICLTFILLLLAPLTIKIPLTCLAAVLILIAWNMSEIHHFIHLFTAPKEDILVLLTVFILTVMTTITSAVQVGMMLAAFLFMKRMSDLSDVISTAQYFDESEQPQNDLLFSKNEVPPFTEIYEINGPFFFGIADRLKNLLNEIEKPPRIFILCMTRVPTIDASAMHALEEFFLECDRQGTLLLLAGVKKTPLNDLRRYHVDELIGVDHIFSNIKGALLFAKALIKLESKSSQ

SEQ ID NO: 11843 - protein, 867 aa, Chlamydia muridarum Nigg
MEKFSDAVSEALEKAFELAKDAKHSYVTENHLLKSLLQNPGSLFCLVIKDVHGNLGLLTSAVDDALHREPTVVEGAAIPKPSPSLQQLLLNAQEEARSMGDEYLSGDHLLLAFWKTTKEPFASWRKTVKTSPEALKELIIKLRQGSRMDSPSAEENLKGLEKYCKNLTILAREGKLDPVIGRDEEIRRTIQVLSRRTKNNPMLIGEPGVGKTAIAEGLALRIVQGDVPESLKDKHLYVLDMGALIAGAKYRGEFEERLKSVLKGVEASEGACILFIDEVHTLVGAGATDGAMDAANLLKPALARGTLHCIGATTLNEYQKYIEKDAALERRFQPIFVTEPSLEDAVFILRGLREKYEIFHGVRITEGALNAAVVLSYRYITDRFLPDKAIDLIDEAASLIRMQIGSLPLPIDEKERELSALIVKQEAIKREQAPAYQEEANEMQKAIDRVKEELAALRLRWDEEKGLIAGLKEKKNSLENLKFAEEEAERTADYNRVAELRYSLIPSLEKEIRLAEEALNQRDGRLLQEEVDERLIAQVVANWTGIPVQKMLEGESEKLLVLEESLEERVVGQPFAITAVSDSIRSARVGLSDPQRPLGVFLFLGPTGVGKTELAKALAELLFNKEEAMIRFDMTEYMEKHSVSKLIGSPPGYVGYEEGGSLSEALRRRPYSVVLFDEIEKADKEVFNILLQIFDDGILTDSKKRKVNCKNALFIMTSNIGSQELADYCAKKGTIVDKEAVLSVVAPALKNYFSPEFINRIDEILPFVPLTTEDIVKIVGIQMNRVALRLLERRISLTWDDSVVLFLSEQGYDGAFGARPLKRLIQQKVVTMLSKALLKGDIKSGMSVELTMAKDVVVFKTKTNSVV

SEQ ID NO: 11844 - protein, 787 aa, Chlamydia muridarum Nigg
MRMNKRTLLFVSLVSAAFLGCQIFFGYQDLKSCQDLAEKQRAISEQILASTEQLSVVPWTASAEESESVNQYAVRLGNRLLVLTKGGAHSEVHSKGTSWKLIDQTSTFGGILVSLYGEDGQEVLSKGGSVYLPNQQDALPVLVAEFRRNQEPLVFFGEYKNGKLSNKAGTIYGTSLVFLNTGNEFVPLGIYNSKEECVESLDLPMARAVVFADKENLTTSGSYYMLANEYMQVIVSQESGAIEGINLPFASDREGNKSIVNEIGFDRELAAGSPSEASFPGVQAIDSQRQNVSSVVGGYYPLLRRGTLSDTRKMVSPQYQALNIVSGRELSSPVATGFRVVSFDNKTLVLESGDGGIRKTYTLGEQPYAFDLEIQTTRGQEDLWITSGVPEVEIMSNAFVPAVKYHAVKKNKSDLINVKLPKAKDSLLVRNDASPQWILNSNGYFGVILTPKTPLPTGYASSFIPGNAVPTRLTQLSPKDQAYPASKYPGYTAMLPLPKEAGRYQFMVYAGPLSEPTLKALDRAHTNHKGESPEYVDAIAFRGFFSFITEPFAALLFIIMKFFQFLTGSWGISIILLTIVLKLVLYPLNAWSIRSMRRMQKLSPYIQDIQQKYKREPKRAQMEIMALYKVNKVNPITGCLPLIIQIPFLIAMFDLLKSSFLLRGASFIPGWIDNLTAPDVLFSWETPIWFIGKEFHLLPILLGIVMFAQQKISAIKRSGPVSDQQRQQEAMGTMMALLFTFMFYNFPSGLNIYWLSSMLLGVIQQWATNKILDEKHLQHEVIVNKKR

SEQ ID NO: 11845 - protein, 437 aa, Chlamydia muridarum Nigg
MFKEKKAPLVCKFGGTSVGTSSSIQRVCEIIRKEKPSFVVVSAVAGVTDLLEEFCRAPVGQKSQFTAMIREKHESIAKELGIDVAIEPFLGPLKQFEGAGHLQQEDQAKILAIGEDLSASLICSYCRANSLQLEQLEARQVILTDSQFLRAEPDLALMQTMWGELVLKENTIYLMQGFLGATASGATTVLGRGGSDFSASLVGELCEARELRIYTDVRGVHTADPKILKDTQLIDFLTFEEMQELASSGSKVLHQDMLKPCIRAKVPIFVTSTFDLTKEGTWICASLNEGVEGPEIKALSLKANQALWFVEYHSPLMRLENVLRCVRGLGSIPGVVMAQNSGVYFTVDWEENNQSMTEALREFGAVSCEGPVSLVALVGAKLTSWSMTGVFDALQGTPVLYWSQTDTVINLIINEESGVVVTKLLHDYVLGLNRSGL

SEQ ID NO: 11846 - protein, 658 aa, Chlamydia muridarum Nigg
MFNMSEKRKSNKIIGIDLGTTNSCVSVMEGGQPKVIASSEGTRTTPSIVAFKGSETLVGIPAKRQAVTNPEKTLASTKRFIGRKFSEVESEIKTVPYKVAPNSKGDAVFEVENKLYTPEEIGAQILMKMKETAEAYLGETVTEAVITVPAYFNDSQRASTKDAGRIAGLDVKRIIPEPTAAALAYGIDKEGDKKIAVFDLGGGTFDISILEIGDGVFEVLSTNGDTHLGGDDFDEVIINWMLGEFKKQEGIDLSKDNMALQRLKDAAEKAKIELSGVSSTEINQPFITIDANGPKHLALTLTRAQFEHLASSLIERTKQPCAQALKDAKLSASDIDDVLLVGGMSRMPAVQAVVKEIFGKEPNKGVNPDEVVAIGAAIQGGVLGGEVKDVLLLDVIPLSLGIETLGGVMTPLVERNTTIPTQKKQIFSTAADNQPAVTIVVLQGERPMAKDNKEIGRFDLTDIPPAPRGHPQIEVTFDIDANGILHVSAKDAASGREQKIRIEASSGLKEEEIQQMIRDAELNKEEDKKRREASDIKNEADGMIFRAEKAIKDYQDKIPADLVKEIEEQIEKVRQAVKEDASTTAIKAASDELSARMQKIGEAMQAQSASAANAQGGPNINSEDLKKHSFSTRPPAGDNSSSTDNIEDADVEIVDKPE

SEQ ID NO: 11847 - protein, 328 aa, Chlamydia muridarum Nigg
MYVPDVAEDLCLDIFHKQKQVISRYFANFHCDVVRQLTERLLCHQGAVFFSGIGKSGCIARKLVATMQSFGEKAFFLSGDLLHGDLGVVSSGDIVCLFSNSGETREILEWIPHLKNRQVFLVGITSSPCSSLAVFSDFVVMLPKLEELDPFNLIPTTSTTCQLLFSDLLAMTVLRCRKISLSDYGKNHPSGQIGLKANGKVRDYLSPRTEVPFCSPSITVSEALTVLSSYGYGCVCVVNEQFELLGIFTDGDLRRGLSECGGAILECPLEQVMTRKPKVISEDSDVLLGLEMMESGNPVTVLPVVDAQHQRFIVGLLHMHTLARAGLL

SEQ ID NO: 11848 - protein, 335 aa, Chlamydia muridarum Nigg
MFVDQITLELRAGKGGNGVVAWRKEKYLPKGGPYGGNGGNGGSILIEAVTNMYSFEEYRNLRFLKAGDGQAGASNNRTGKNGKDFVLKVPEGTLLRDAETGELIHDFTKDGERIVVCQGGRGGKGNVFFKTSTNRAPTKATPGKPGEIRLVELELKLIADIGLVGFPNAGKSTLFNTLARTEVKVGAYPFTTLHPSLGLVHQEGYLYQKPWIMADIPGIIEGASQNRGLGLDFLRHIERTRLLLFVVDISGIERSSPEKDLQILIGELLAYKEDLKNKSMVIALNKIDQLLPDEREERLALLKQQFPDQEFILLSGLTGEGVDVLHDLFKSKLSE

SEQ ID NO: 11849 - protein, 795 aa, Chlamydophila pneumoniae J138
MNKRTLLFVSLIGIAFVGCQIFFGYNEFRSCKNLAEKQRKISEQTLAAVESVGLSVASWDTDVNGEEHKNNYAVRVGDKLFLLHNGEAAQSVYSSGESWSFVDHKCGFDNIHLALYRQQGSSFNPTNTGKVFLPTNHEGLPVLVVEFRNNKEPLVFLGEYAQGRISNKDSTIFGTALVFWRSGSDYIPLGLYDSREEKLVSLDLPITRAVIFGNDQDSAKSSDTANHYVLFNDYMQIIVSEESGSIEGINLPFASTNNKSIVNEIGFDRDLASEKSPEALFPGLSSKLPDGQQAKNSIGGYYPLLRRGLLSDSKKLLPLEYHALNVVSGRELATPVALRYRVLSYTPHSIQLESLDRSVQKVYKLPENPEEKPYVFETAITLTKETEDVWVTSGVPEVEIMSNASAPTIKYRVIKKNKGSLDKVKLPKVKEPLAVRRGVYPQWILNSNGYFGIILTPLSEIASGYGSLYISGSTAPTRLSAISPKNQLYPVSKYPGYETLLPLPKDAGTHRFLVYAGPLAEPTLKVLDKTITQEKGENPEYLDSISFRGVFAFITAPFAALLFIIMKFFKLVTGSWGISIILLTVFLKLLLYPLNAWSIRSMRRMQILSPYIQQIQQKYKNEPKRAQMEIMGLYKTNKVNPITGCLPLLIQLPFLIAMFDLLKSSFLLRGASFIPGWIDNLTAPDVLFSWQTSIWFIGNEFHLLPILLGIVMFLQQKVTSLHKKGPVTDQQKQQQVMGNMMAILFTAMFYNFPSGLNIYWLSSMILGVVQQWITNKILDSKHLKNEVVLNNKKHR

SEQ ID NO: 11850 - protein, 845 aa, Chlamydophila pneumoniae J138
MFETFTNRAKQVIKLAKKEAQRLNHNYLGTEHILLGLLKLGQGVAVNVLRNLGIDFDTARQEVERLIGYGPEIQVYGDPALTGRVKKSFESANEEASLLEHNYVGTEHLLLGILHQSDSVALQVLENLHIDPREVRKEILKELETFNLQLPPSSSSSSSSSRSNPSSSKSPLGHSLGSDKNEKLSALKAYGYDLTEMVRESKLDPVIGRSSEVERLILILCRRRKNNPVLIGEAGVGKTAIVEGLAQKIILNEVPDALRKKRLITLDLALMIAGTKYRGQFEERIKAVMDEVRKHGNILLFIDELHTIVGAGAAEGAIDASNILKPALARGEIQCIGATTIDEYRKHIEKDAALERRFQKIVVHPPSVDETIEILRGLKKKYEEHHNVFITEEALKAAATLSDQYVHGRFLPDKAIDLLDEAGARVRVNTMGQPTDLMKLEAEIENTKLAKEQAIGTQEYEKAAGLRDEEKKLRERLQSMKQEWENHKEEHQVPVDEEAVAQVVSLQTGIPSARLTEAESEKLLKLEDTLRRKVIGQNDAVTSICRAIRRSRTGIKDPNRPTGSFLFLGPTGVGKSLLAQQIAIEMFGGEDALIQVDMSEYMEKFAATKMMGSPPGYVGHEEGGHLTEQVRRRPYCVVLFDEIEKAHPDIMDLMLQILEQGRLTDSFGRKVDFRHAIIIMTSNLGADLIRKSGEIGFGLKSHMDYKVIQEKIEHAMKKHLKPEFINRLDESVIFRPLEKESLSEIIHLEINKLDSRLKNYQMALNIPDSVISFLVTKGHSPEMGARPLRRVIEQYLEDPLAELLLKESCRQEARKLRATLVENRVAFEREEEEQEAALPSPHLES

SEQ ID NO: 11851 - protein, 565 aa, Chlamydophila pneumoniae J138
MKVPWAFKNFIPKLYTSIKEGYSFNTFKKDFQAGITVGILAFPFAIAIAIGVGVSPIQGLLASIIGGLLASAMGGSNVLISGPSSAFISILYCLSAKYGAEALFTVTLLAGVFLIAFGLTGLGTFIKYMPYPVVTGLTTGLAIIIFSSQIKDFLGLQMGANIPADFLPKWIAYWDHLWTWDSKSFAVGLFTLLIMIYFRNYKPRYPGVMIAIVTATTLVWLLKIDIPTIGSRYGTLPTAIPLPKIPQLSITKILQLMPDALTIAVLSGLETLLSAVVADGMTGWRHQSNCQLVAQGVANIGTSLFSGIPVTGSLSRTAASIKSEATTPIAGIVHSIFICFILLLLAPLTVKIPLTCLAAVLILIAWNMSEIHHWIHLLTAPKKDIVVLLTVFILTVMTTITAAVQVGMMLAAFLFMKQMSDLSDVISTAKYFDKDSDFLSKAEVPQNTEIYEINGPFFFGIADRLKNLLNDIEKPPKIFILCMTRVPTIDASAMHALEEFFLECDRQGTLLLLAGVKKTPLADLKRYHLDELIGVDHIFSNIKSALLFAQALTNLESKTSTRHLV

SEQ ID NO: 11852 - protein, 397 aa, Xylella fastidiosa 9a5c
MSASFSPHTITLIKSTVPLLAEHGTTIIEAMYHRLFEDPQIEALFNQANQKNGTQIHALAGAILAYARNIDNPGVLASAIERIAQKHVGYAIHPEHYPHVATALLGAIKKVLGDVATSEVLEAWGEAYWFIANLLKDREAVIREGIMTKNGGWIHWRRFVISKRIPESETITSFMLHPEDGGPVVPHQAGQYLTFRFDAAGMPGMKRNYSISCGPNSDHYRITVKREHGTGASAFLHDQAKVGTIIECTPPVGDFFLPSVIERPIVLLSGGVGLTPMVSMMEQIAEAHPDAQVWYVHGTQNRETHAMDAHIRALVSRHKHMKATTFYTQRREADDAEAGFITIDWLRANTPFQKADFYLCGPRPFLRTFVRDLIGAGVPAVQVHYEFFGPMDEEMAA

SEQ ID NO: 11853 - protein, 563 aa, Xylella fastidiosa 9a5c
MCSIFGIFNLQPSDNLQRLRHQALECSQRQRHRGPDWSGVYVDVGAILVHERLAIVDPAGGAQPLLSEDGTLALAVNGEIYNHAVLKGTLQQPYVFQTHSDCEVINALYREETPTSFLNRLNGIFAFALWDKTTGRGLIARDPMGVVPLYWGHDQDGRLRVASEMKALIEHCPDVAQFPPGHWYDTTTGTLVKYYERSWKNYSAVEGVQVSLQELREAFERAVHRQLMTDVPYGVLLSGGLDSSLVAAVAARYARHRIETNDQSEAWWPRLHSFAIGLKDSPDLSAANVAAEALNTVHHGFEYTLQEGLDVLPEVIRHIETYDVTTIRASTPMFLLARRIKAMGVKMVLSGEGSDEIFGGYLYFHKAPNAREFHEELVRKLNALYYYDCLRANKAMMAWGVEPRVPFLDREFLDVAMRMDAQHKMVDKTSDGPQQMEKGILRAAFDGYLPPSILWRQKEQFSDGVGYGWIDGLKAHAETQVSDHALATAETRFQVNPPQTKEAYYYRSIFERFFPSPAAAETVPGGKSIACSSPAAIAWDASFATMADPSGRAVSGVHQQALL

SEQ ID NO: 11854 - protein, 861 aa, Xylella fastidiosa 9a5c
MRMDKLTSRFQNALADAQSLAVGRDHTIIEPVHVFSALLDQQGGSTRPLLMQAGVNVPLLRERLTEILEALPKVSGQTVNVSPSNELSRLFHRTDKLAQQHGDQFMASEWFVLAVVDDSGGLGQALRAAGAEKKKIEAAIDKLRGGETVQTENAEEQRQALEKYTIDLTARAESGKLDPVIGRDEEIRRTIQVLQRRTKNNPVLIGEPGVGKTAIVEGLAQRIVNGEVPEGLRSKRLLSLDLGALIAGAKFRGEFEERLKGVLNDLAKNEGRVILFIDELHTMVGAGKADGAMDAGNMLKPALARGELHCIGATTLDEYRKYIEKDAALERRFQKVFVGEPTVEDTIAILRGLKEKYALHHGVEITDPAIVAAATLSNRYITDRQLPDKAIDLMDEAASRIRMEIDSKPEELDRLERRLIQLKIQREMLKKEKDEASKQRLADLERDIEVLDREFSDLEEVWRSEKAALQGATKIKESIEQAKLDLEAAQRRQDYAKMSEIQYGVLPALEKQLVAASQAEQHDFTLVQEKVTAEEIAEVVSRWTGIPVSKMLEGERDKLLRMEADLGRRVVGQEEAIKVVSDAVRRSRTGLSDPNRPSGSFLFLGPTGVGKTELCKALAEFLFDSQDAMVRIDMSEFMEKHSVARLIGAPPGYVGYEEGGYLTELVRRRPYSLILLDEVEKAHSDVFNILLQVLDDGRLTDGQGRTVDFRNTVIVMTSNLGSHQIQELSGDDSPEVYTQMKAAVMEVVQAHFRPEFINRLDDIVVFHPLDKAQIKQIARIQLQGLEKRLAESELKLDLDDRALELLGNVGFDPVYGARPLKRAIQSQLENPLAQQILAEAFVSGDTVQVGVDGGKLVFAKV

SEQ ID NO: 11855 - protein, 764 aa, Xylella fastidiosa 9a5c
MSNDTFKQAAIDYHCTQPAGKIKVVATKPMLTQRDLSLAYSPGVAFACQAIVENPQQASELTARGNLVAVISNGTAVLGLGNIGPLAGKPVMEGKGVLFQKFAGIDVFDIEIDESDPDKLVDIIASLEPTFGGVNLEDIKAPECFIVERKLRERMSIPVFHDDQHGTAIIVGAAVLNAMVITGKKIGEVKLATTGMGAAGVSCVNMLVSLGLNPDNILAYDREGVIHTGRTDLDPEKQRYARDTDKRTLAEIVEGADIFLGLSAAGILTPEMVATMAPDPVIFALANPIPEIMPEAVCAVRTDAIIGTGRSDYPNQINNVLCFPYLFRGALDVGATTINEEMKIACVKAIAALARCEASDLGAAYGGETPSFGREYLIPRPLDPRLLVELSSAVAQAAMDSGVATRPITDMSAYHDKLSQFVYRTSLMMKPVYDRARADKQRVVYAEGEEEVILRAVQNVIDEGLAFPILIGRPDVIESRIQRMGLRMKAGVDFEVTNIHDDPRFNDYWQYYHGVTERRGVTVSAAKELMRSRPTLIASVMVARGEADALLTGAVGRFHKRLGYARSVIPLEPRVSSTAAMTGVINQHGAFFFVDTHVQEDPSAEQIAEATLQACYRLKLFGIEPSVALLSHSNFGSHDSRDALKMRQVRELLLKRSPRLNIDGEMQADTAWDEVLRERIMPNTTLKGRANLFVFPNLEAANIAYNLVRVFTDGVAIGPILMGISKAVHILTSSTTSRRVMNMTAIAAVDAQIRKQFEGGKRGG

SEQ ID NO: 11856 - protein, 401 aa, Xylella fastidiosa 9a5c
MSKKNIVLAFSGGLDTSFCIPYLKEQGYAVHTVFADTGGVNEEERDFIEKRAAELGVASHLTVDGGPAIWDGFVKQLVWTGETYQGQYPLLVSDRYLIVDAVLQRADALGTCAVAHGCTGMGNDQVRFDLAIKAQGNYTIIAPIREIQKEHTQTRLYEQKYLEERGFGVRAKQKNYTINENLLGITLSGGEIDKWEAPGEGARGWCAPRSAWPADPLTVAIKFVEGEAVAVDGKPLSGPQILMKLNKLFASYGVGRGIYTGDTVIGLKGRIVYEAPGLTALLTAHRALEDAVLTKQQNRFKPHIARKWVELVYEGFFHDPLKTDLETFLKSSQANVNGEIVLETRGGRVDAVAVRSPHILTSKGVTYAQTADWGIEEAEGFIKLFGMSSTLYAQVNRSLRS

SEQ ID NO: 11857 - protein, 868 aa, Xylella fastidiosa 9a5c
MSASPTAERWIVLKFGGTSVSRRHRWDTIAMVVRKRLEEHGTRVLIVVSALSGVTNELTAIAQGVVDSAQRVAALEQRHRDFLAELGLDAQAVLGTRFTVLWDLLQDARAVTRSLDWQAELLGQGELLSSTLGAAYLGASGVDIGWMDARDWLTALPPQPNQSEWSQRLSVSCQWKSDVEWRTRFDAQRAQVLITQGFISRHQDGGTAILGRGGSDTSAAYFGALLGAACVEIWTDVPGMFSANPKEVPDARLLTRLDYYEAQEIATTGAKVLHPRSIKPCRDTGVPMLILDTERPDVLGTRIDAEVEPVLGVKAISRRDGIVLVSMEGIGMWQQVGFLADVFTLFKKHGLSVDLIGSAETNVTVSLDPSENLVNTDVLTALSTDLSQVCKVKIIVPCAAITLVGRGMRSLLHKLSEVWATFGKERVHMISQSSNDLNLTFVIDETDADGLLAVLHFKLIESGAMPVQERAVFGSPWREIIGHVRTRVMPWWHSARMRLLAMRDEEGIGPCYVYHLPTVRERARQLNAVAAVDQRYYAIKANPHPAILRTLIEEGFGLECVSLGELRHVFAVVPHLVPSRVLFTPSFASRVEYEQAFLLGVNVTLDNVEALRLWPEVFRDRTLWLRIDLGYGDGHHEKVTTGGKTSKFGLSVTRIDEFIDVAKTLNIIVTGLHAHLGSGVERGDHWSRMYDELAGFASRIGSVSTLDIGGGLPIPYRPDDEPFDVEAWGVSLAEVKALHPKLQLVIEPGRFLVAEAGVLLTRVTQVIEKDGIRRVGLEAGMHTLIRPALYDAWHDVENLSRLDEIPHVLCDVVGPICESSDVFGRCRHLPAATASGDLMLIADAGAYGFSMASTYNLRGLPAEVVLDA

SEQ ID NO: 11858 - protein, 580 aa, Xylella fastidiosa 9a5c
MSEITSTDARAQPEKKDFIRQIIREDLAHGTHTHIRTRFPPEPNGYLHIGHAKAICLDFGVAAEFGGHCTLRMDDTNPSKEDPAFAAAIQDDVSWLGFHWNALRHTSDYFEVLYLAAEKLITDGKAYVCDLNSEQVREYRGTLTEAGRPSPWRERSPDENLELFRQMRAGTFPDGTRTLRAKIDMASGNINLRDPALYRIKHVEHQNTGNTWPIYPMYDFAHALSDAIEGITHSLCTLEFEDHRPLYDWCVNHVDLPNNSHLLKPLLDKGFPQEPSQPRQIEFSRLNINYTVMSKRKLTALVDEKLVEGWDDPRMYTLQGLRRRGYTPAAMRLFVERIGISKQNSIIDFSVLENCLRENLDTIAPRRMATIAPLKLVLTNLPEDHEEQLIFPNHPKDDTQGTRTMPFSRELWIERDDFSEIPPKGWKRLVPGGEVRLRGAGIARVDEVVKNAAGDIIALHGWLDPTSRPGMEGAHRKVKGTIHWVSAPHAVAAEIRLYDRLFSVEKPDDNTDGKTYRDVLNPDSKRVVHGYIEPAAAQTAPEHAFQFERLGYFVTDRHDHDAAHPVFNRSVTLRDTWQRD

SEQ ID NO: 11859 - protein, 333 aa, Xylella fastidiosa 9a5c
MAVSSLQHNHLSDTALIASARRVIEIEREALTLLNERIGTPFVAACRLILNSHGRVISTGMGKSGHIARKIAATFASTGTPAFFVHPGEAGHGDLGMITDSDVILALSYSGESDEVRMLLPVLKRQGNPIIAMTGRPQSTLAQAADVHLDVSVTTEACPLDLAPTSSTTTSLVIGDALAVALLDVRGFTAEDFARSHPAGHLGRRLLLHITDVMHSGNDLPAVHEEATLSEALLEMTRKRLGMTAIVDNEGRLQGVFTDGDLRRALDSNIDVRNARINEVMTRHPKTINADQLAAEAARLMEANKINGLIVVDPQQRAVGALNIHDLLHAKIV

SEQ ID NO: 11860 - protein, 278 aa, Xylella fastidiosa 9a5c
MLKIDTLHASVAGKEILKGLSLDIAPGQVHAIMGPNGAGKSTLGHILAGRDGYDITAGQVTFDNRPLLTLQPEERAAAGLFLAFQYPVEIPGVNNTYFLRSALNAQRKARGEEELDSIQFLKRVREKLAVLHLKDELLHRGVNEGFSGGEKKRNEIFQLAVLEPKLAILDETDSGLDIDALKTVADGVNALRSPERSFLVITHYQRLLDYIKPDVVHVLAEGRIVETGGPELALELEQHGYTWLKNHVIPTSEAMPPFPHDPHTDTPRLKRPTRRENV

SEQ ID NO: 11861 - protein, 139 aa, Xylella fastidiosa 9a5c
MFAVVSIHQGERIIEYKGRIRTHAAVDANSHGHIESGHTFLFTLNDDYVIDANDAGNIARWINHSCSPNCEAVVEEDTGGNRRKDKIFIQAIRDIASGEELTYNYGIVLAERHTARLKKIWACLCGSDHCTHTMLQPKR

SEQ ID NO: 11862 - protein, 483 aa, Xylella fastidiosa 9a5c
MLKKHLFIVKPIEPTNHTGTGKGETQLKRSLTAGQLVMLGIGAVIGAGIFVLSGHAAAEYAGPAVVLSYILAGIACALAGLCYAEFAAMLPVSGSAYSYAYATLGEFTAWFIGWNLVLEYMFSASTVAVGWSGYLNSFLSSFGYGLPASLSSAPLDVVDGRLIYSGGLINLPAVAIVAAISGLCYVGITQSAFVNSITVAIKVSVIVLFIAFAARYVNPDNWVPFVPDNAAPGKYGMEGVIRGAAVVFFSYIGFDAVSTTAGEAKNPQRDMPIGILGSLAICTVIYIAFSGVLTGLMHYSQLDTPKPVATALETYPTLSWLKHVVEIGAIAGLSSTMLMMLMAQPRIFYAMSQDGLLPKLLSKVHPKFQTPHVGTLLVGACACTLAGLFPISLLGDLVSMGTLLAFATVCIGIVVLRRTRPDLPRPFRVPMYWVIAPAGAAACLYLFWQPFTEHWPLMVGWTVLGLVMYGLYGYHHSKLRRGG

SEQ ID NO: 11863 - protein, 477 aa, Xylella fastidiosa 9a5c
MFKQLWATKLSQPSQDSAEGLSLQRVLGVWGLTALGIGAVIGGGIFVITGQAAANHAGPAIMLSFALAAICCTFCALAYAEFAAMVPVSGSAYTYTYATFGELAAWFIGWMLVLEYGVSAAAVAVSWSGYFLSLLQHLGIDLPAALVNAPLDGTLHATGAIANLPAATIVLLLTWLCYFGIRKSSKINIAMVALKSGLILLIIGVGWKYVNPDYWQPFIPPNQGPGKYGWDGVLHGASMVFFAYIGFEAVSVAAQESHRPQRDLPISMMSALAICTVLYIMMAAVMTGLVPYTQLGTDEPVVTAVAAHPQLGWLRVVVEIGALVGLSSVVLVMLIGQPRIFMIMAGDGLLPPIFSTIHSKHRTPHINTVITGLGIALLAAVFPLDVLGELTSMGTLIAFAAVCAGVLILRCTRPDLPRPFRMPAAWLFCSAGVLSCITLLSAMTRHNWMLMSVWTVLGFALYFGYGYRHSKLHREST

SEQ ID NO: 11864 - protein, 298 aa, Xylella fastidiosa 9a5c
MTQTVPYRCGRIAVIGRPNVGKSTLTNALVGTKISIVSNRPQTTRHRLLGIATFPEGQIVLVDTPGLHREQKHPMNRLMNRTARGSLEDVDAALLVTESTHWNEEDTLAYNLLNDTGIPVVLVINKIDRFKDKSALLPFLTHINENHTFTTIHPVSALKRKGLETLVSDLLALLPEGDPMFSEDEITDRSQRFLASELVREQVMRQLGEELPYATTVEIEYFTENTGLFRIGALIWVERESQKAIVIGKGGARLKEIGVKARQQMERLFQTKVFLETWVRVRKDWSNNEAALKTFGYE

SEQ ID NO: 11865 - protein, 638 aa, Xylella fastidiosa 9a5c
MGKIIGIDLGTTNSCLAIIEGGKGRVIENSEGDRTTPSIVAYTKDGEVLVGAAAKRQAVTNPKNTFYAVKRLIGRKFGDAEVQKDLDLVPYKITQHDNGDAWVATADAKKLAPQEISAKVLEKMKKTAEDFLGEKVTEAVITVPAYFNDSQRQATKDAGRIAGLDVKRIINEPTAAALAYGLDKKGGDRKIAVYDLGGGTFDVSIIEIAEVDGEKQFEVLATNGDTFLGGEDFDKRVIDYLVDEFNKDQGIDLRKDPLALQRLKDAAERAKIELSSSQQTEVNLPYITADASGPKHLNIKLTRAKLEALVDDLVRKSIEPCRIALNDAGLRTSDVQEVILVGGQTRMPKVQQAVADFFGKEPRKDVNPDEAVALGAAIQGGVLAGDVKDVLLLDVTPLSLGIETMGGVFTKIIEKNTTIPTKASQVFSTAEDGQSAVTVHVLQGEREQARFNKSLAKFDLAGIEPAPRGQPQIEVSFDIDANGILHVSAKDKKTNKEQKVEVKAGSGLSDSEIQQMVADAEAHREEDKKFQELVQARNHADGLIHSTRSAIKEHGSKVGGEVIGRVEASLAELEAAVKGDDKNQIEAKSKTLEEVAQSLHMAATAEQQSGSTGAGAGSSAKVDDVVDAEFTEVKGDKK

SEQ ID NO: 11866 - protein, 67 aa, Xylella fastidiosa 9a5c
MQSGTVKWFSDQKGFGFISPDDGTPEVFAHYSGINSKGFRSLHEGQRVTYDVTQGPKGPQASNITPI

SEQ ID NO: 11867 - protein, 106 aa, Xylella fastidiosa 9a5c
MYAVLVTGGKQYRVVQGETLRVEKLDVETGSDVTFNSVLLMGSSDGIHVGEALKDASVTAKVVAHGRARKVRIIKFRRRKHHMKHQGHRQYYTEIQITGISGPAKQ

SEQ ID NO: 11868 - protein, 564 aa, Xylella fastidiosa 9a5c
MRRHLALFSGWLIALAVSSAATLTLPSAFKQMIDHGFSSEGQINRTFALLLLVAVILAVGTAARLFSVSLLGEKIITDLRSHLYAHLIGLDASFHDRNRSNELVSRLATDSELLRSIIGSTMSVATRSTVTAIGSLIMLFITSPRLASLSLVVIPLVILPIVLGAQHLQKAARTSQDRIADTNSFAAETLRALRTVQAYAREHYERTRFDRTLETSLQAARQRIHIQTWVTAASIVLIFSAIVGVLWAGAHDVIAGRMSAGTLGEFVLYALIGGGSIGALAEVWNELQRAAGGMGRIFELLKEKNTLTVPATPALLPQPLRGEIRFERVGFHYPQRPETPALDDIDLHIRPGETIAFVGPSGAGKSTLLSLLLRFYDPTHGRILIDGVDLRQTDPKVLRTHIALVQQQPTLFTASAMENIRYGRLDATTAEIEIASRSSEADGFIRALPQSYATELGEHGMSLSGGQQQRIAIARALLKEAPILLLDEATNALDAQNEQAVQQALERLMTGRTTLIIAHRLVTILKADRIVVMDQGRIVAQGTHSELIAAGGLYAKLARLQFIE

SEQ ID NO: 11869 - protein, 85 aa, Xylella fastidiosa 9a5c
MAVIHSIVQEFVMSDTSDDRQIGTVKWFNDNKGFGFITSNNGPDLFVHYRAIQGNGFKSLQEGQKVSFVAVQGQKGMQADQVQVL

SEQ ID NO: 11870 - protein, 312 aa, Xylella fastidiosa 9a5c
MVFSGNANKPLTQSICKELGVRMGKSLVSRFSDGEEQVEIEESVRRQEVFVVQPTCAPSAENLMELLVIIDALKRASVSSVTAVIPYFGYSRQDRRMRSLRVPITAKVAAKMISAIGADRVLTIDLHADQIQGFFDVPVDNVYASPLLLADIWRAYGTDNLIVVSPDVGGVVRARAMAKRLGDTDLAIIDKRRPRANVATVMNIIGEVNGKTCVLVDDLVDTAGTLCAAAVALKQNGATKVVAYITHPVLSGPAVDNINNSELDELVVTDTIPLSDAARECRKIRQLSVAELLAETIRRIAFGESVSSLYVD

SEQ ID NO: 11871 - protein, 104 aa, Xylella fastidiosa 9a5c
MLVMERIQAEIEEHPLVLFMKGTLEFPMCGYSSRATQALLAAGARHLHIVNVLAEAEIRANLPRFSNWPTFPQLFIHGELIGGCEIILELFESGDLKRIVSEAD

SEQ ID NO: 11872 - protein, 1489 aa, Xylella fastidiosa 9a5c
MVSSTRQRIEESMLYDASDERDACGFGMVAQLDDQPSRALLEIAIAALSRMTHRGGVAADGLTGDGCGLLIRKPDAFLRALAGEAGIMLGPRYAVGMVFLPGERAAAAHCRQVLEAELQRVGVRLCGWREVPINRSVCGQLARDTLPHIEQVFVDIDPKHSEDAFGVALFLARRRAERQLCDYHDFYVATLSPYAISYKGMVLPDKLPVFYPDLQRSELSSSVIVFHQRFSTNTLPRWPLAHPFRLLAHNGEINTIEGNRRWAQARSKVWQSPRFDMAEFDPVISMKGSDSQSLDNMLELLIAGGMDLLQALRILVPPATRTLEFKDADLASFYEFYGLNTEPWDGPAGIVAYDGRYAACMLDRNGLRPARWMLTADRHFLVASEAGVWELPVERVIRKGKLGPGEMMAIDLKRGDLLDSDAIDRINRARAPYKQWLQQGVTYLQTELIDPSLVEEPFSDQTLCSYQKLFQLSTEEVEQVLRPLAETEQEATGSMGDDTPMAVLSVQIRPLYDYFRQAFAQVTNPPIDPLRESIAMSLTTQLGRETNIFHAGPETVNHVILDSPVLSQRKLRQLLKMPQYLEKNRLIDLSYSVEEGLQAGLKRMCDEAEQAARDGIVMLLLSDRYPVPERPVAHALLATGAVHHHLCRVGLRCDVNLIIETGTARDPHHMACLLGFGATAVYPYLSYQTLFNLGRRGILKLQKAGEQSQIGRSYRKGIYKGLSKIISKMGICTIASYRGAQLFEIVGLDPDVVALCFPDTPARIGGVSLMQLHTEACELTARAWNDRIAPEVGGLLKYVHGGEYHMYNPDVVMTLQHATRTGDAADWRRYMDAVHTRPPSALRDLLQLKKAEIPTPLDHVAPATDVLCRFDTAAISLGALSPEAHEALAVAMNRLGGRSNSGEGGEDPARYGTERRSKIKQVASGRFGVTPEYLINAEVLQIKIAQGAKPGEGGQLPGHKVNDLIARLRYAKPGIGLISPPPHHDIYSIEDLAQLIYDLKQVNPQALVSVKLVSHVGVGTIAAGVVKAGADLITVSGHDGGTGASPISSIRYAGVPWELGVAEVHQALVANDLRERTMLQTDGGLKTGLDVVKAALLGANSFGFGTAPMIVLGCKYLRICHLNNCATGVATQDERLRANHFTGLPERVENFFRLLAEEVRQWLSYLGAMSLDDIIGRTDLLQQLEVSSREGVRVNLSRLLTNACYEGTHCAAKRLYESPDSLSVQIDSLLADAIANKTGGDYRFLIHNTDRSVGTRLSGAIARVHGNHGMEDAPLHLRFRGTAGQSFGAFNVGGLHLELEGEANDYVGKGMAGGCLVVRPPRGARFEARHTPILGNTCLYGATGGELFAAGRVGERFAVRNSGALAVIEGAGDHCCEYMTDGVVLVLGKVGLNFGAGFTGGLAYILDIERDFVDRYNHELIDIHRVSVEGFENYRQHLRHLVVRHRALTGSIWAQQILDEFRDYIGKFWFVKPKAASIESLAESLRSAA

SEQ ID NO: 11873 - protein, 565 aa, Xylella fastidiosa 9a5c
MNQTRVLLIFSWLTVATLLWMDWGKNKNETLEISASQNLGVDSNLELEHAVPQINAGAVPVQKDSQLIAVAPKVPVINVKTDVLQLKLDGFSVLAADLLRFPQSKDRGAKPIKLLTDDPNYPYSATTGWVSQSNSPVPNLSTFLPEQPGVSYKLANDQDRLVVPFVWTAANGVSIRRTFTFERGRYAILIRDEIRNGGETPWNAYVFRKLSRVPIPNILNRAMTNPDSFSFNGAVWYSEKGGYERRAFKDYMNDGGLNREIGGGWIALLQHHFFTAWIPQKDQASLYLLAQNGSRDIAELRGPAFTVAPGQSTTTEARLWVGPKLVEQITKEHVKGLDRVVDYSRFQLMALIGQGLFWILSHLNSLLHNWGWAIVGLVVLLRIAMYPLSAAQYKSAAKMRKFQPRLQQLKERYGEDRQKFQQAMMELYKKEKINPMGGCFPILIQMPIFFALYWVLVESVELRQAPWLGWIQDLTTRDPYFILPLLNIVIMWATQKLTPTPAGMDPIAGKMMQVMPLIFGVMMAFVPSGLALYWVINGGLNLLIQWWMIRQHADFSRKRSRGNIK

SEQ ID NO: 11874 - protein, 420 aa, Mycobacterium tuberculosis CDC1551
MSLSCQPEEQIRLTVTDSQYRQKVCTARTAEEIFVETIAVKTRILNDRVLLEAARAIGDRLIAGYRAGARVFMCGNGGSAADAQHFAAELTGHLIFDRPPLGAEALHANSSHLTAVANDYDYDTVFARALEGSARPGDTLFAISTSGNSMSVLRAAKTARELGVTVVAMTGESGGQLAEFADFLINVPSRDTGRIQESHIVLFMRSPNMSNTRFSRLANRKADPYAAIRKMVAERAGHQWCLFLDRDGVINRQVVGDYVRNWRQFEWLPGAARALKKLRAWAPYIVVVTNQQGVGAGLMSAVDVMVIHRHLQMQLASDGVLIDGFQVCPHHRSQRCGCRKPRPGLVLDWLGRHPDSEPLLSIVVGDSLSDLELAHNVAAAAGACASVQIGGASSGGVADASFDSLWEFAVAVGHARGERG

SEQ ID NO: 11875 - protein, 625 aa, Mycobacterium tuberculosis CDC1551
  misc_feature (157)..(157): Xaa can be any naturally occurring amino acid
  unsure (1)..(625): unsure at all Xaa locations
MARAVGIDLGTTNSVVSVLEGGDPVVVANSEGSRTTPSIVAFARNGEVLVGQPAKNQAVTNVDRTVRSVKRHMGSDWSIEIDGKKYTAPEISARILMKLKRDAEAYLGEDITDAVITTPAYFNDAQRQATKDAGQIAGLNVLRIVNEPTAAALAYGXDKGEKEQRILVFDLGGGTFDVSLLEIGEGVVEVRATSGDNHLGGDDWDQRVVDWLVDKFKGTSGIDLTKDKMAMQRLREAAEKAKIELSSSQSTSINLPYITVDADKNPLFLDEQLTRAEFQRITQDLLDRTRKPFQSVIADTGISVSEIDHVVLVGGSTRMPAVTDLVKELTGGKEPNKGVNPDEVVAVGAALQAGVLKGEVKDVLLLDVTPLSLGIETKGGVMTRLIERNTTIPTKRSETFTTADDNQPSVQIQVYQGEREIAAHNKLLGSFELTGIPPAPRGIPQIEVTFDIDANGIVHVTAKDKGTGKENTIRIQEGSGLSKEDIDRMIKDAEAHAEEDRKRREEADVRNQAETLVYQTEKFVKEQREAEGGSKVPEDTLNKVDAAVAEAKAALGGSDISAIKSAMEKLGQESQALGQAIYEAAQAASQATGAAHPGGEPGGAHPGSADDVVDAEVVDDGREAK

SEQ ID NO: 11876 - protein, 425 aa, Mycobacterium tuberculosis CDC1551
MLVGLFNAVNVESVPLNFTHLCIRRRFAASLESRSVGLEDRDALRVLQNAFKLDDPELVRRFYAHWFALDASVRDLFPPDMGAQRAAFGQALHWVYGELVAQRAEEPVAFLAQLGRDHRKYGVLPTQYDTLRRALYTTLRDYLGHPSRGAWTDAVDEAAGQSLNLIIGVMSGAADADDAPAWWDGTVVEHIRVSRDLAVARLQLDRPLHYYPGQYVNVHVPQCPRRWRYLSPAIPADPNGRIEFHVRVVPGGLVSNAIVGETRPGDRWRLSGPHGAFRVDRDGGDVLMVAGSTGLAPLRALIIDLSRFAVNPRVHLFFGARYACELYDLPTLWQIAAHNPWLSVSPVSEYNGDPAWAADYPDVSAPRGLHVRQTGRLPDVVSRYGGWGDRQILICGGPAMVRATKAALIAKGAPPERIQHDPLSR

SEQ ID NO: 11877 - protein, 560 aa, Mycobacterium tuberculosis CDC1551
MTPQKSDACSDPVYTVGDYLLDRLAELGVSEIFGVPGDYNLQFLDHIVAHPTIRWVGSANELNAGYAADGYGRLRGMSAVVTTFGVGELSVTNAIAGSYAEHVPVVHIVGGPTKDAQGTRRALHHSLGDGDFEHFLRISREITCAQANLMPATAGREIDRVLSEVREQKRPGYILLSSDVARFPTEPPAAPLPRYPGGTSPRALSLFTKAAIELIADHQLTVLADLLVHRLQAVKELEALLAADVVPHATLMWGKSLLDESSPNFLGIYAGAASAERVRAAIEGAPVLVTAGVVFTNMVSGFFSQRIDPARTIDIGQYQSSVADQVFAPLEMSAALQALATILTGRGISSPPVVPPPAEPPPAMPARDEPLTQQMVWDRVCSALTPGNVVLADQGTSFYGMADHRLPQGVTFIGQPLWGSIGYTLPAAVGAAVAHPDRRTVLLIGDGAAQLTVQELGTFSREGLSPVIVVVNNDGYTVERAIHGETAPYNDIVSWNWTELPSALGVTNHLAFRAQTYGQLDDALTVAAARRDRMVLVEVVLPRLEIPRLLGQLVGSMAPQ

SEQ ID NO: 11878 - protein, 556 aa, Mycobacterium tuberculosis CDC1551
MPDDIAAADPTDTQPHLRRDLANRHIQLIAIGGAIGTGLFMGSGRTISLAGPAVMVVYGIIGFFVFFVLRAMGELLLSNLNYKSFVDFAADLLGPAAGFFVGWSYWFAWVVTGIADLVAITGYARFWWPGLPIWVPALVTVALILAVNLFSVRHFGELEFWFALIKVAAIVCLIAVGAILVATNFVSPHGVHATIENLWNDNGFFPTGFLGVVSGFQIAFFAYIGVELVGTAAAETADPRRTLPRAINAVPLRVAVFYIGALLAILAVVPWRQFASGESPFVTMFSLAGLAAAASVVNFVVVTAAASSANSGFFSTGRMLFGLADEGHAPAAFHQLNRGGVPAPALLLTAPLLLTSIPLLYAGRSVIGAFTLVTTVSSLLFMFVWAMIIISYLVYRRRHPQRHTDSVYKMPGGVVMCWAVLVFFAFVIWTLTTETETATALAWFPLWFVLLAVGWLVTQRRQSRRSFGFHCQVVGVRQQLGRGMARLAMKIHARPKLRSAVVVEPVSAGEPGARRSAKSVRKLASDDSQSAHCPVAVVGLADGGRDPQYHHDGPDR

SEQ ID NO: 11879 - protein, 560 aa, Mycobacterium tuberculosis CDC1551
MIPTMTSAGWAPGVVQFREYQRRWLRGDVLAGLTVAAYLIPQAMAYATVAGLPPAAGLWASIAPLAIYALLGSSRQLSIGPESATALMTAAVLAPMAAGDLRRYAVLAATLGLLVGLICLLAGTARLGFLASLLSRPVLVGYMAGIALVMISSQLGTITGTSVEGNEFFSEVHSFATSVTRVHWPTFVLAMSVLALLTMLTRWAPRAPGPIIAVLAATMLVAVMSLDAKGIAIVGRIPSGLPTPGVPPVSVEDLRALIIPAAGIAIVTFTDGVLTARAFAARRGQEVNANAELRAVGACNIAAGLTHGFPVSSSSSRTALADVVGGRTQLYSLIALGLVVIVMVFASGLLAMFPIAALGALVVYAALRLIDLSEFRRLARFRRSELMLALATTAAVLGLGVFYGVLAAVALSILELLRRVAHPHDSVLGFVPGIAGMHDIDDYPQAKRVPGLVVYRYDAPLCFANAEDFRRRALTVVDQDPGQVEWFVLNAESNVEVDLTALDALDQLRTELLRRGIVFAMARVKQDLRESLRAASLLDKIGEDHIFMTLPTAVQAFRRR

SEQ ID NO: 11880 - protein, 481 aa, Mycobacterium tuberculosis CDC1551
MVGPRTRGYAIHKLGFCSVVMLGINSIIGAGIFLTPGEVIGLAGPFAPMAYVLAGIFAGVVAIVFATAARYVRTNGASYAYTTAAFGRRIGIYVGVTHAITASIAWGVLASFFVSTLLRVAFPDKAWADAEQLFSVKTLTFLGFIGVLLAINLFGNRAIKWANGTSTVGKAFALSAFIVGGLWIITTQHVNNYATAWSAYSATPYSLLGVAEIGKGTFSSMALATIVALYAFTGFESIANAAEEMDAPDRNLPRAIPIAIFSVGAIYLLTLTVAMLLGSNKIAASDDTVKLAAAIGNATFRTIIVVGALISMFGINVAASFGAPRLWTALADSGVLPTRLSRKNQYDVPMVSFAITASLALAFPLALRFDNLHLTGLAVIARFVQFIIVPIALIALARSQAVEHAAVRRNAFTDKVLPLVAIVVSVGLAVSYDYRCIFLVRGGPNYFSIALIVITFIVVPAMAYLHYYRIIRRVGDRPSTR

SEQ ID NO: 11881 - protein, 462 aa, Mycobacterium tuberculosis CDC1551
MIGIGGAIGTGLFLGAGGRLAKAGPGLFLVYGVCGVFVFLILRALGELVLHRPSSGSFVSYAREFFGEKAAYAVGWMYFLHWAMTSIVDTTAIATYLQRWTIFTVVPQWILALIALTVVLSMNLISVEWFGELEFWAALIKVLALMAFLVVGTVFLAGRYPVDGHSTGLSLWNNHGGLFPTSWLPLLIVTSGVVFAYSAVELVGTAAGETAEPEKIMPRAINSVVARIAIFYVGSVALLALLLPYTAYKAGESPFVTFFSKIGFHGAGDLMNIVVLTAALSSLNAGLYSTGRVMHSIAMSGSAPRFTARMSKSGVPYGGIVLTAVITLFGVALNAFKPGEAFEIVLNMSALGIIAGWATIVLCQLRLHKLANAGIMQRPRFRMPFSPYSGYLTLLFLLVVLVTMASDKPIGTWTVATLIIVIPALTAGWYLVRKRVMAVARERLGHTGPFPAVANPPVRSRD

SEQ ID NO: 11882 - protein, 471 aa, Mycobacterium tuberculosis CDC1551
MSLRELMLRRRPVSGAPVASGASGNLKRSFGTFQLTMFGVGATIGTGIFFVLAQAVPEAGPGVIVSFIIAGIAAGLAAICYAELASAVPISGSAYSYAYTTLGEAVAMVVAACLLLEYGVATAAVAVGWSGYVNKLLSNLFGFQMPHVLSAAPWDTHPGWVNLPAVILIGLCALLLIRGASESARVNAIMVLIKLGVLGMFMIIAFSAYSADHLKDFVPFGVAGIGSAAGTIFFSYIGLDAVSTAGDEVKDPQKTMPRALIAALVVVTGVYVLVALAALGTQPWQDFAEQETAGLAIILDNVTHGEWASTILAAGAVVSIFTVTLVTMYGQTRILFAMGRDGLLPARFAKVNPRTMTPVHNTVIVAIFASTLAAFIPLDSLADMVSIGTLTAFSVVAVGVIVLRVREPDLPRGFKVPGYPVTPVLSVLACGYILASLHWYTWLAFSGWVAVAVIFYLMWGRHHSALNEEVP

SEQ ID NO: 11883 - protein, 300 aa, Mycobacterium tuberculosis CDC1551
MTEFHSGFVCLVGRPNTGKSTLTNALVGAKVAITSTRPQTTRHAIRGIVHSDDFQIILVDTPGLHRPRTLLGKRLNDLVRETYAAVDVIGLCIPADEAIGPGDRWIVEQLRSTGPANTTLVVIVTKIDKVPKEKVVAQLVAVSELVTNAAEIVPVSAMTGDRVDLLIDVLAAALPAGPAYYPDGELTDEPEEVLMAELIREAALQGVRDELPHSLAVVIDEVSPREGRDDLIDVHAALYVERDSQKGIVIGKGGARLREVGTAARSQIENLLGTKVYLDLRVKVAKNWQRDPKQLGRLGF

SEQ ID NO: 11884 - protein, 555 aa, Mycobacterium tuberculosis CDC1551
MTTARPAKARNEGQWALGHREPLNANEELKKAGNPLDVRERIENIYAKQGFDSIDKTDLRGRFRWWGLYTQREQGYDGTWTGDDNIDKLEAKYFMMRVRCDGGALSAAALRTLGQISTEFARDTADISDRQNVQYHWIEVENVPEIWRRLDDVGLQTTEACGDCPRVVLGSPLAGESLDEVLDPTWAIEEIVRRYIGKPDFADLPRKYKTAISGLQDVAHEINDVAFIGVNHPEHGPGLDLWVGGGLSTNPMLAQRVGAWVPLGEVPEVWAAVTSVFRDYGYRRLRAKARLKFLIKDWGIAKFREVLETEYLKRPLIDGPAPEPVKHPIDHVGVQRLKNGLNAVGVAPIAGRVSGTILTAVADLMARAGSDRIRFTPYQKLVILDIPDALLDDLIAGLDALGLQSRPSHWRRNLMACSGIEFCKLSFAETRVRAQHLVPELERRLEDINSQLDVPITVNINGCPNSCARIQIADIGFKGQMIDDGHGGSVEGFQVHLGGHLGLDAGFGRKLRQHKVTSDELGDYIDRVVRNFVKHRSEGERFAQWVIRAEEDDLR

SEQ ID NO: 11885 - protein, 363 aa, Mycobacterium tuberculosis CDC1551
MAERTVPETSWASRPADLYGRRSRDRFFTALWGVRALLGGLGAASRWEPSRVQPVRRTNPAVVTKRELVAPDVVALTLADPGGGLLPAWSPGGHIDVQLPSGRRRQYSLCGVPGRRTDYRIAIRRIADGGGGSIEMHEAFDVGDTCEFEGPRNAFHLGLAERDVLFVIGGIGVTPILPMIRAAEQRGIDWRAIYAGRGREYMPFLDEVVAVAPGRVTVWADDEHGRFASVDELLAGAGPTTAVYVCGPPGMLEAVRVARNQHADAPLHYERFSPPPVVDGVPFELELARSRRVLRVPANRSALDVMLDWDPTTAYSCQQGFCGTCKVRVLAGQVDRRGRIIEGDNEMLVCVSRAVSGRVVIDA

SEQ ID NO: 11886 - protein, 371 aa, Mycobacterium tuberculosis CDC1551
MRVGIPTETKNNEFRVAITPAGVAELTRRGHEVLIQAGAGEGSAITDADFKAAGAQLVGTADQVWADADLLLKVKEPIAAEYGRLRHGQILFTFLHLAASRACTDALLDSGTTSIAYETVQTPDGALPLLAPMSEVAGRLAAQVGAYHLMRTQGGRGVLMGGVPGVEPADVVVIGAGTAGYNAARIANGMGATVTVLDINIDKLRQLDAEFCGRIHTRYSSAYELEGAVKRADLVIGAVLVPGAKAPKLVSNSLVAHMKPGAVLVDIAIDQGGCFEGSRPTTYDHPTFAVHDTLFYCVANMPASVPKTSTYALTNATMPYVLELADHGWRAACRSNPALAKGLSTHEGALLSERVATDLGVPFTEPASVLA

SEQ ID NO: 11887 - protein, 528 aa, Mycobacterium tuberculosis CDC1551
MSLPVVLIADKLAPSTVAALGDQVEVRWVDGPDRDKLLAAVPEADALLVRSATTVDAEVLAAAPKLKIVARAGVGLDNVDVDAATARGVLVVNAPTSNIHSAAEHALALLLAASRQIPAADASLREHTWKRSSFSGTEIFGKTVGVVGLGRIGQLVAQRIAAFGAYVVAYDPYVSPARAAQLGIELLSLDDLLARADFISVHLPKTPETAGLIDKEALAKTKPGVIIVNAARGGLVDEAALADAITGGHVRAAGLDVFATEPCTDSPLFELAQVVVTPHLGASTAEAQDRAGTDVAESVRLALAGEFVPDAVNVGGGVVNEEVAPWLDLVRKLGVLAGVLSDELPVSLSVQVRGELAAEEVEVLRLSALRGLFSAVIEDAVTFVNAPALAAERGVTAEICKASESPNHRSVVDVRAVGADGSVVTVSGTLYGPQLSQKIVQINGRHFDLRAQGINLIIHYVDRPGALGKIGTLLGTAGVNIQAAQLSEDAEGPGATILLRLDQDVPDDVRTAIAAAVDAYKLEVVDLS

SEQ ID NO: 11888 - protein, 618 aa, Mycobacterium tuberculosis CDC1551
  misc_feature (113)..(113): Xaa can be any naturally occurring amino acid
  misc_feature (288)..(288): Xaa can be any naturally occurring amino acid
  unsure (1)..(618): unsure at all Xaa locations
MSAPTKPHSPTFKPEPHSAANEPKHPAARPKHVALQQLTGAQAVIRSLEELGVDVIFGIPGGAVLPVYDPLFDSKKLRHVLVRHEQGAGHAASGYAHVTGRVGVCMATSGPGXTNLVTPLADAQMDSIPVVAITGQVGRGLIGTDAFQEADISGITMPITKHNFLVRSGDDIPRVLAEAFHIAASGRPGAVLVDIPKDVLQGQCTFSWPPRMELPGYKPNTKPHSRQVREAAKLIAAARKPVLYVGGGVIRGEATEQLRELAELTGIPVVTTLMARGAFPDSHRQNLXMPGMHGTVAAVAALQRSDLLIALGTRFDDRVTGKLDSFAPEAKVIHADIDPAEIGKNRHADVPIVGDVKAVITELIAMLRHHHIPGTIEMADWWAYLNGVRKTYPLSYGPQSDGSLSPEYVIEKLGEIAGPDAVFVAGVGQHQMWAAQFIRYEKPRSWLNSGGLGTMGFAIPAAMGAKIALPGTEVWAIDGDGCFQMTNQELATCAVEGIPVKVALINNGNLGMVRQWQSLFYAERYSQTDLATHSHRIPDFVKLAEALGCVGLRCEREEDVVDVINQARAINDCPVVIDFIVGADAQVWPMVAAGTSNDEIQAARGIRPLFDDITEGHA

SEQ ID NO: 11889 - protein, 116 aa, Populus tremula x Populus tremuloides
MSKQELDAALKKAKELASSAPVVVFSKTYCGYCNRVKQLLTQVGASYKVVELDELSDGSQLQSALAHWTGRGTVPNVFIGGKQIGGCDTVVEKHQRNELLPLLQDAAATAKTSAQL

SEQ ID NO: 11890 - protein, 347 aa, Thermoplasma acidophilum
MRILEEDLKNSTYRIRIESLDDLWYLRNILSEGDEVSAITFRRVEESADVQRSRERERIPITIRLKVEKIEFQDFDNRLRILGTVIEGPEDTKGKHQSITVTVDSEISITKEWDDQHIDLLKEATDEKYVTVYTAVAMDEDEAQIFLIHPYGIQQVGTVYSGRSGKYAEGNYSEASYFDQIVNALKNYSNSIIILGPGFARDRFARYCAQRGVNVIGSFPANRTDSGAVYEFITSADGAKLLSNERIARDKEIVDEFLVAVKKDMGVYGRDQTESALQMGALSDLIITDEMFRTEDGRRSLSIAQTVGTRIHIVSVSNDPGQIVKKFGGFAGILRYRVQLEHHHHHH

SEQ ID NO: 11891 - protein, 355 aa, Saccharomyces cerevisiae
KKSPSAGSGSNGGNKKISQEEGEDNGGEDNKKLRGALSSAILSEKPNVKWEDVAGLEGAKEALKEAVILPVKFPHLFKGNRKPTSGILLYGPPGTGKSYLAKAVATEANSTFFSVSSSDLVSKWMGESEKLVKQLFAMARENKPSIIFIDQVDALTGTRGEGESEASRRIKTELLVQMNGVGNDSQGVLVLGATNIPWQLDSAIRRRFERRIYIPLPDLAARTTMFEINVGDTPSVLTKEDYRTLGAMTEGYSGSDIAVVVKDALMQPIRKIQSATHFKDVSTEDDETRKLTPSSPGDDGAIEMSWTDIEADELKEPDLTIKDFLKAIKSTRPTVNEDDLLKQEQFTRDFGQEGN

SEQ ID NO: 11892 - protein, 290 aa, Porphyromonas gingivalis W83
  misc_feature (37)..(37): Xaa can be any naturally occurring amino acid
  misc_feature (72)..(72): Xaa can be any naturally occurring amino acid
  misc_feature (91)..(91): Xaa can be any naturally occurring amino acid
  misc_feature (142)..(143): Xaa can be any naturally occurring amino acid
  misc_feature (159)..(159): Xaa can be any naturally occurring amino acid
  misc_feature (168)..(168): Xaa can be any naturally occurring amino acid
  misc_feature (260)..(260): Xaa can be any naturally occurring amino acid
  misc_feature (266)..(266): Xaa can be any naturally occurring amino acid
  misc_feature (273)..(273): Xaa can be any naturally occurring amino acid
  misc_feature (283)..(283): Xaa can be any naturally occurring amino acid
  unsure (1)..(290): unsure at all Xaa locations
SNAVFGVKEWECEVLSNKNVSTFIKEFVVKLPEGETXNFKSGSYAQIKIPKYNIRYADYDIQDRFRGDWDKXDAWSLTCKNEEETVRAYSXANYPAEGNIITLNVRIATPPFDRAANKWKAGIKPGISSSYIFSLKPGDKVXXSGPYGDFHIQDTDAEXLYIGGGAGXAPLRAQILHLFRTLKTGRKVSYWYGARSKNEIFYEEDFREIEREFPNFKFHIALSDPQPEDNWTGYVGFIHQVIYDNYLKDHDAPEDIEYYXCGPGPXANAVKGXLENLGVPRNXLFFDDFG

SEQ ID NO: 11893 - protein, 478 aa, Mycobacterium tuberculosis CDC1551
MVVANRLPVDLERLPDGSTTWKRSPGGLVTALEPVLRRRRGAWVGWPGVNDDGAEPDLHVLDGPIIQDELELHPVRLSTTDIAQYYEGFSNATLWPLYHDVIVKPLYHREWWDRYVDVNQRFAEAASRAAAHGATVWVQDYQLQLVPKMLRMLRPDLTIGFFLHIPFPPVELFMQMPWRTEIIQGLLGADLVGFHLPGGAQNFLILSRRLVGTDTSRGTVGVRSRFGAAVLGSRTIRVGAFPISVDSGALDHAARDRNIRRRAREIRTELGNPRKILLGVDRLDYTKGIDVRLKAFSELLAEGRVKRDDTVVVQLATPSRERVESYQTLRNDIERQVGHINGEYGEVGHPVVHYLHRPAPRDELIAFFVASDVMLVTPLRDGMNLVAKEYVACRSDLGGALVLSEFTGAAAELRHAYLVNPHDLEGVKDGIEEALNQTEEAGRRRMRSLRRQVLAHDVDRWAQSFLDALAGAHPRGQG

SEQ ID NO: 11894 - protein, 672 aa, Mycobacterium tuberculosis CDC1551
MSTVEMDQAAPESAAHHPLPDPGESVPRLALPTIGIFLATLTAFVGSTTAYISGWIPFWVTIPVNAAVTFVMFTVVHDASHYAISSIRWVNGLFGRLAWLFVGPVVAFPAFGYIHIQHHRHSNDDEQDPDTFASHGSLWVLPLRWSMVEYFYIKYYLPRGRSRPVIEVAETLVMMTLFLTGLIVAIVTGNFWTLAIVFLIPQRIGLTVLAWWFDWLPHHGLEDTQRSNRYRATRNRVGAEWLFTPVLLSQNYHLVHHLHPSVPFYRYLRTWRRNEEAYLERNAAISTVFGQQLNPDEYRQWKELNGRLARLLPVRMPARSSSPHAVLHRIPVASVDPITADATLVTFAVPEALRDAFRFEPGQHVTVRTDLGGQGIRRNYSICAPATRAQLRIAVKHIPGGAFSTFVANELKAGDVLELMTPTGRFGTPLDPLHRKHYVGLVAGSGITPVLSILATTLEIETESRFTLIYGNRTKESTMFRAELDRLESRYADRLEILHVLSSEPLHTPELRGRIDRDKLTRWLTSTLRPAGVDEWFICGPLAMATAVRETLIEHGVDSERIHLELFYGFDTPPATRPSYAGATVTFTLSGQRAIFDLVPGDSILEGALGLRSDAPYACMGGACGTCRAKLIEGNVEMDHNFALRKAELDAGYILTCQSHPTTPFVAVDYDA

SEQ ID NO: 11895 - protein, 1529 aa, Mycobacterium tuberculosis CDC1551
MGMTPKRVGLYNPAFEHDSCGVAMVVDMHGRRSRDIVDKAITALLNLEHRGAQGAEPRSGDGAGILIQVPDEFLREAVDFELPAPGSYATGIAFLPQSSKDAAAACAAVQKIAEAEGLQVLGWRSVPTDDSSLGALSRDAMPTFRQVFLAGASGMALERRCYVVRKRAEHELGTKGPGQDGPGRETVYFPSLSGQTLVYKGMLTTPQLKAFYLDLQDERLTSALGIVHSRFSTNTFPSWPLAHPFRRIAHNGEINTVTGNENWMRAREALIKTDIFGSAADVEKLFPICTPGASDTARFDEVLELLHLGGRSLAHAVLMMIPEAWERHESMDPARRAFYQYHASLMEPWDGPASMTFTDGTVVGAVLDRNGLRPSRIWVTDDGLVVMASEAGVLDLHPSTVVRRMRLQPGRMFLVDTAQGRIVSDEEIKADLAAEHPYQEWLDNGLVPLDELPEGKDVRMPHHRIVMRQLAFGYTYEELNLLVAPMARLGAEPIGSMGTDTPVAVLSQRPRMLYDYFHQLFAQVTNPPLDAIREEVVTSLQGTTGGERDLLNPDQNSCHQIVLPQPILRNHELAKLVSLDPNDKVNGRPHGLRSKVIRCLYRVSEGGAGLAAALEEVRGAAAAAIADGARIIILSDRESDEEMAPIPSLLAVAGVHHHLVRERTRTQVGLVVESGDAREVHHMAALVGFGAAAINPYLVFESIEDMLDRGVIEGIDRTAALNNYIKAAGKGVLKVMSKMGISTLASYTGAQLFQAVGISEQVLDEYFTGLTCPTGGITLDDIAADVAARHRLAYLDRPDERAHRELEVGGEYQWRREGEYHLFNPETVFKLQHSTRTGQYKIFKEYTRLVDDQSERMASLRGLLKFRTGVRPPVPLDEVEPASEIVKRFSTGAMSYGSISAEAHETLAIAMNRLGARSNCGEGGEDVKRFDRDPNGDWRRSAIKQVASARFGVTSHYLTNCTDLQIKMAQGAKPGEGGQLPGHKVYPWVAEVRHSTPGVGLISPPPHHDIYSIEDLAQLIHDLKNANPSARVHVKLVSENGVGTVAAGVSKAHADVVLISGHDGGTGATPLTSMKHAGAPWELGLAETQQTLLLNGLRDRIVVQVDGQLKTGRDVMIATLLGAEEFGFATAPLVVAGCIMMRVCHLDTCPVGVATQNPLLRERFTGKPEFVENFFMFIAEEVREYLAQLGFRTVNEAVGQAGALDTTLARAHWKAHKLDLAPVLHEPESAFMNQDLYCSSRQDHGLDKALDQQLIVMSREALDSGKPVRFSTTIGNVNRTVGTMLGHELTKAYGGQGLPDGTIDITFDGSAGNSFGAFVPKGITLRVYGDANDYVGKGLSGGRIVVRPSDDAPQDYVAEDNIIGGNVILFGATSGEVYLRGVVGERFAVRNSGAHAVVEGVGDHGCEYMTGGRVVILGRTGRNFAAGMSGGVAYVYDPDGELPANLNSEMVELETLDEDDADWLHGTIQVHVDATDSAVGQRILSDWSGQQRHFVKVMPRDYKRVLQAIALAERDGVDVDKAIMAAAHG

SEQ ID NO: 11896 - protein, 870 aa, Edwardsiella tarda
MNTDLKALTGKMNQTCHQALEAAAGLCLARGHHEVDIEHVLLKLLETDNTDLARLLQHYGVDAGRFQRDIERALDRLKGGCSRQPMLSPHLPRLLSGAWLMASVNCGESQIRSGHLIMALLDDAVLQQLARAMSPEWAAWSAADLLHQWPALVAGSREATTMSTPGPHAGASPSPALDQYTVNLSERARQGQLDPVLGRDSEIRQMIDILLRRRQNNPILTGEAGVGKTAVVEGLALRIAAGEVPDSLRNVALRMLDLGLLQAGASVKGEFERRLKAVIDEVKACSEPVILFIDEAHTLIGAGGAAGQNDAANLLKPALARGELRTIAATTWSEYKKYFEKDPALARRFQAIKVEEPSEEIAMVMLRGMLTKMRQHHQVRILDEAVTAAVRLSHRYLTGRQLPDKAVSVLDTACARIALGQRTLPAPVEDACRHLEHLQTEITLLEQEQASGLDHGRRLETLQEQARVAREHYQTLEQRWIAECDQVAVIQALQAQLEQEDGPARAEGLTQLEQAVLALEQMQGRAPLVQTCVDESAIAAVISAWTGIPLGKMVQDELEMVRQLQTRLAERVIGQPYALETIARGIRLSRAGLEDPNKPIGVFLLVGSSGVGKTETALALAETLYGGERNLITINLSEFQEAHTVSTLRGSPPGYVGYGEGGVLTEAVRRKPYSVVLLDEVEKAHPDVLELFFQVFDKGVMDDAEGREINFRNTVILLTSNVGSDTLMAYCQDGMTPPEPALLCEALRDELIQTFKPAFLGRLQVVPYYPVRGAVLKQIIRLKLDKIARRFQRNHQATFHYDEALVEGIAERCTQPESGARLIDNILSAQLLSDMADAVLARMAAGEPVSDITVSMDEHGRLTGSLEGSD

SEQ ID NO: 11897 - protein, 605 aa, Oryza sativa Indica Group
MELALVGNPSNGVAKPSCNSVGSLPVVSSNAVIHPPVTSAAGATLGRHLARRLVQIGATDVFAVPGDFNLTLLDYLIAEPGLKLIGCCNELNAGYAADGYARARGVGACAVTFTVGGLSVLNAIAGAYSENLPVICIVGGPNSNDYGTNRILHHTIGLPDFSQELRCFQTITCYQAVINNLDDAHEQIDTAIATALRESKPVYISVGCNLAGLSHPTFSREPVPLFISPRLSNKANLEYAVEAAADFLNKAVKPVMVGGPKIRVAKAKKAFAGIAESSGYPIAVMPSAKGLVPEHHPRFIGTYWGAVSTTFCAEIVESADAYLFAGPIFNDYSSVGYSLLLKREKAVIVQPDRVVVGNGPAFGCILMTEFLDALAKRLDRNTTAYDNYRRIFIPDREPPNGQPDEPLRVNILFKHIKEMLSGDTAVIAETGDSWFNCQKLRLPEGCGYEFQMQYGSIGWSVGATLGYAQAAKDKRVISCIGDGSFQMTAQDVSTMLRCGQKSIIFLINNGGYTIEVEIHDGPYNVIKNWDYTGLIDAIHNSDGNCWTKKVRTEEELIEAIATATGAKKDCLCFIEIIVHKDDTSKELLEWGSRVSAANSRPPNPQ

SEQ ID NO: 11898 - protein, 1137 aa, Oryza sativa Indica Group
MSSSRSNNRATCSRSSSARSKHSARVVAQTPMDAQLHAEFEGSQRHFDYSSSVGAANRSGATTSNVSAYLQNMQRGRFVQPFGCLLAVHPETFALLAYSENAAEMLDLTPHAVPTIDQREALAVGTDVRTLFRSHSFVALQKAATFGDVNLLNPILVHARTSGKPFYAIMHRIDVGLVIDLEPVNPVDLPVTATGAIKSYKLAARAIARLQSLPSGNLSLLCDVLVREVSELTGYDRVMAYKFHEDEHGEVIAECKRSDLEPYLGLHYPATDIPQASRFLFMKNKVRMICDCSATPVKIIQDDSLTQPISICGSTLRAPHGCHAQYMASMGSVASLVMSVTINEDEDDDGDTGSDQQPKGRKLWGLMVCHHTSPRFVPFPLRYACEFLLQVFGIQINKEVELAAQAKERHILRTQTLLCDMLLRDAPVGIFTQSPNVMDLVKCDGAALYYQNQLWVLGSTPSEAEIKNIVAWLQEYHDGSTGLSTDSLVEAGYPGAAALGDVVYGMAAIKISSKDFIFWFRSHTAKEIKWGGAKHEPIDADDNGRKMHPRSSFKAFLEVVKWRSVPWEDVEMDAIHSLQLILRGSLQDEDANKNNNAKSIVTAPSDDMKKIQGLLELRTVTNEMVRLIETATAPILAVDITGSINGWNNKAAELTGLPVMEAIGKPLVDLVIDDSVEVVKQILNSALQGIEEQNLQIKLKTFNHQENNGPVILMVNACCSRDLSEKVVGVCFVAQDMTGQNIIMDKYTRIQGDYVAIVKNPSELIPPIFMINDLGSCLEWNEAMQKITGIKREDAVDKLLIGEVFTHHEYGCRVKDHGTLTKLSILMNTVISGQDPEKLLFGFFNTDGKYIESLMTATKRTDAEGKITGALCFLHVASPELQHALQVQKMSEQAAMNSFKELTYIRQELRNPLNGMQFTRNLLEPSDLTEEQRKLLASNVLCQEQLKKILHDTDLESIEQCYTEMSTVDFNLEEALNTVLMQAMPQSKEKQISIDRDWPAEVSCMHLCGDNLRLQQVLADFLACMLQFTQPAEGPIVLQVIPRMENIGSGMQIAHLEFRLVHPAPGVPEALIQEMFRHSPGASREGLGLYISQKLVKTMSGTVQYLRESESSSFIVLVEFPVAQLSTKRCKASTSKF

SEQ ID NO: 11899 - protein, 606 aa, Oryza sativa Indica Group
METHIGSVDGAAAAADNGAVGCPASAVGCPMTSARPAPVSAGEASLGRHLARRLVQVGVSDVFAVPGDFNLTLLDHLIAEPGLRLVGCCNELNAGYAADGYARARGVGACAVTFTVGGLSVLNAIAGAYSENLPVICIAGGPNSNDYGTNRILHHTIGLPDFSQELRCFQTVTCHQAVVTNLEDAHEQIDTAIATALRESKPVYLSISCNLPGLPHPTFSRDPVPFFLAPRLSNKMGLEAAVEATVEFLNKAVKPVLVGGPKLRVAKAGKAFVDLVDASGYAYAVMPSAKGLVPETHPHFIGTYWGAVSTAFCAEIVESADAYLFAGPIFNDYSSVGYSFLLKKDKAIIVQPERVIVGNGPAFGCVMMKEFLSELAKRVNKNTTAYENYKRIFVPEGQPLESEPNEPLRVNVLFKHVQKMLNSDSAVIAETGDSWFNCQKLKLPEGCGYEFQMQYGSIGWSVGALLGYAQGAKDKRVIACIGDGSFQVTAQDVSTMIRCAQNSIIFLINNGGYTIEVEIHDGPYNVIKNWNYTGLVDAIHNGEGKCWTSKVKCEEELTEAIGMALGEKKDCLCFIEVIAHKDDTSKELLEWGSRVSAANSRPPNPQ

SEQ ID NO: 11900 - protein, 1171 aa, Oryza sativa Indica Group
MASGSRATPTRSPSSARPAAPRHQHHHSQSSGGSTSRAGGGGGGGGGGGGGAAAAESVSKAVAQYTLDARLHAVFEQSGASGRSFDYTQSLRASPTPSSEQQIAAYLSRIQRGGHIQPFGCTLAVADDSSFRLLAYSENTADLLDLSPHHSVPSLDSSAVPPPVSLGADARLLFAPSSAVLLERAFAAREISLLNPLWIHSRVSSKPFYAILHRIDVGVVIDLEPARTEDPALSIAGAVQSQKLAVRAISRLQALPGGDVKLLCDTVVEHVRELTGYDRVMVYRFHEDEHGEVVAESRRNNLEPYIGLHYPATDIPQASRFLFRQNRVRMIADCHAAPVRVIQDPALTQPLCLVGSTLRSPHGCHAQYMANMGSIASLVMAVIISSGGDDDHNISRGSIPSAMKLWGLVVCHHTSPRCIPFPLRYACEFLMQAFGLQLNMELQLAHQLSEKHILRTQTLLCDMLLRDSPTGIVTQSPSIMDLVKCDGAALYYHGKYYPLGVTPTEVQIKDIIEWLTMCHGDSTGLSTDSLADAGYPGAAALGDAVSGMAVAYITPSDYLFWFRSHTAKEIKWGGAKHHPEDKDDGQRMHPRSSFKAFLEVVKSRSLPWENAEMDAIHSLQLILRDSFRDSAEGTSNSKAIVNGQVQLGELELRGIDELSSVAREMVRLIETATVPIFAVDTDGCINGWNAKVAELTGLSVEEAMGKSLVNDLIFKESEETVNKLLSRALRGDEDKNVEIKLKTFGPEQSKGPIFVIVNACSSRDYTKNIVGVCFVGQDVTGQKVVMDKFINIQGDYKAIVHNPNPLIPPIFASDENTCCSEWNTAMEKLTGWSRGEVVGKLLVGEVFGNCCRLKGPDALTKFMIVLHNAIGGQDCEKFPFSFFDKNGKYVQALLTANTRSRMDGEAIGAFCFLQIASPELQQAFEIQRHHEKKCYARMKELAYIYQEIKNPLNGIRFTNSLLEMTDLKDDQRQFLETSTACEKQMSKIVKDASLQSIEDGSLVLEKGEFSLGSVMNAVVSQVMIQLRERDLQLIRDIPDEIKEASAYGDQYRIQQVLCDFLLSMVRFAPAENGWVEIQVRPNIKQNSDGTDTMLFPFRFACPGEGLPPEIVQDMFSNSRWTTQEGIGLSICRKILKLMGGEVQYIRESERSFFHIVLELPQPQQAASRGTS

SEQ ID NO: 11901 - protein, 314 aa, Oryza sativa Indica Group
MASASSVSLMLLVAAAMASAASAQLSATFYDTSCPNALSTIKSAVTAAVNSEPRMGASLVRLHFHDCFVQGCDASVLLSGQEQNAGPNAGSLRGFNVVDNIKTQVEAICSQTVSCADILAVAARDSVVALGGPSWTVLLGRRDSTTANESQANTDLPAPSSSLAELIGNFSRKGLDVTDMVALSGAHTIGQAQCQNFRDRLYNETNIDSSFATALKANCPRPTGSGDSNLAPLDTTTPNAFDSAYYTNLLSNKGLLHSDQVLFNGGSTDNTVRNFSSNTAAFNSAFTVAMVKMGNISPLTGTQGQIRLNCSKVN

SEQ ID NO: 11902 - protein, 587 aa, Oryza sativa Indica Group
MESNGGGGGSPKEAAVVVPSSGDATLGGHLARRLVQVGVSDVFAVPGDFNLTLLDHLIAEPGLRVVGCCNELNAGYAADGYARARGVGACAVTFTVGGLSVLNAIGGAYSENLPLICIVGGPNSNDYGTNRILHHTIGLPDFSQELRCFQPLTCYQAVVNNLDDAHDQIDRAISTAIRESKPVYISVSCNLPAVPHPTFSRDPVPYFLSPRLSNQASLHAALDATLAFLDKAVKPVLVAGPKLRVAKAGGAFVDLADASGYAVAAMPSAKGLVPETLPRFIGTYWGAVSTAFCAEIVESADAYLFAGPIFNDYSSVGYSCLLKKEKAVVVQPDRVTVGNGPAFGCVMMRDFLSELAKRVRKNTTAFDNYKRIFVPEGQLPECEAGEALRVNVLFKHIQRMIGGAEIGAVMAETGDSWFNCQKLRLPEGCGYEFQMQYGSIGWSVGALLGYAQAVQKRVVACIGDGSFQVTAQDVSTMLRCGQRSIIFLINNGGYTIEVEIHDGPYNVIKNWDYVGLVNAIHNGEGRCWATRVRCEEELEAAIATATGDKADSLCFIEVVAHKDDTSKELLEWGSRVSAANSRPPNPQ

SEQ ID NO: 11903 - protein, 647 aa, Pichia stipitis
MTDITQKMNELSVQDGGSGAGNSPGAGNGPSGGNGSRRSQYVPPHLRNRNTSSGSGFGGNGGGRGRGSFGGSNYNNAGNRDNTIFGGSGRSRDRGFGGRGGFRSNQSRPGVGRWVDGKHEPSARNERIELELFGTAEDTSFQSSGINFDNYDDIPVEASGDGVPDPITSFTAPPLDELLVENITMSRFTKPTPVQKYSVPIVAGGRDLMACAQTGSGKTGGFLFPVLSESYINGPAPIAESTGAFSSHKVHPTILVMAPTRELVSQIYDEAKKFAYRSWVKPAVVYGGADIGQQIRNLDKGCDLLVATPGRLKDLLERGRVSLANIKYLVLDEADRMLDMGFEPQIRHIVQECDMPDVQDRQTLMFSATFPTDIQMLARDFLKDYIFLSVGRVGSTSENITQKILYVEDEEKKSVLLDLLSAGDAGLTIIFTETKRMADNLADFLYDQGFPATAIHGDRSQYEREKALAAFKSGAAPILVATAVAARGLDIPNVAHVINYDLPSDIDDYVHRIGRTGRAGNVGIATAFFNRNNKNVVKGLIDLLSEANQEVPDFLAKIGRESAFGGKTGGMRGGRGGSRGPVRDFRRGASGGSSGGWGNSSGSAGGWGAAPSGGNSYNSGYSSRSNSYNSSYGSSGYGNPTSTNSWW

SEQ ID NO: 11904 - protein, 270 aa, Ipomoea purpurea
MVNSSARWSPRVRKGAWSEEEDDLLRKCIQKFGEGKWHLVPFRAGLNRCRKSCRLRWLNYLHPDIKRGHFSLEEADLILRLHKLLGNRWSLIAGRIPGRTANDVKNYWHSHLKKKVVSMHMASSNSSRQDNNWDDEKGKAPQIKENILFRPRPRRFFRTSLSSPALSTLTGKAKAVVYDAPPPPPPHQLQPQPEATSPAADLLMVFNVQQNSNSIATNLPAQTTAPSSHDGVKWWEDLLYDDSHQGLIDWTTDDDFPIDVDLLKLLDTTI

SEQ ID NO: 11905 - protein, 288 aa, Rhizobium etli
FPTLEQLPLWGFDGSSTMQAEGRSSDCVLKPVAIYPDPARTNGVLVMCEVMMPDGVTPHPSNARATILDDEDAWFGFEQEYFFYQNGRPLGFPEQGYPAPQGPYYTGVGYSNVGDVAREIVEEHLDLCLAAGINHEGINAEVAKGQWEFQIFGKGSKKAADQIWMARYLLQRLTEKYGIDIEYHCKPLGDTDWNGSGMHCNFSTKYMREVGGKAYFEALMAQFEKNLMDHINVYGPDNDKRLTGKHETAPWNKFSYGVADRGASIRVPHSFIKNDYKGYLEDRRPNSQ

SEQ ID NO: 11906 - protein, 274 aa, Rhizobium leguminosarum
WGFDGSSTQQAEGRSSDCVLKPVAIYPDPARTNGALVMCEVMMPDGVTPHASNARATILDDEDAWFGFEQEYFFYQNGRPLGFPEQGYPAPQGPYYTGVGYSNVGDVAREIVEEHLDLCLAAGINHEGINAEVAKGQWEFQIFGKGSKKAADQIWMARYLLQRLTEKYGIDIEYHCKPLGDTDWNGSGMHCNFSTKYMREVGGKAYFEALMAQFEKNLMDHINVYGPDNDKRLTGKHETAPWNKFSYGVADRGASIRVPHSFVKNDYKGYLKSR

SEQ ID NO: 11907 - protein, 272 aa, Bradyrhizobium yuanmingense
PLWGFDGSSTQQAEGHSSDCVLKPVAVFPDGARTNGVLVMCEVMMPDGKTPHPSNKRATILDDSGAWFGFEQEYFFYKDGRPLGFPTAGYPAPQGPYYTGVGYSNVGDVARKIVEEHLDLCLAAGINHEGINAEVAKGQWEFQIFGKGSKTAADQMWMARYLMLRLTEKYGIDIEFHCKPLGDTDWNGSGMHANFSTAYMREVGGKEYFEALMAAFEKNLMDHIAVYGPDNDKRLTGKHETAPWNKFSYGVADRGASIRVPHSFVNNGYKGY

SEQ ID NO: 11908 - protein, 274 aa, Bradyrhizobium liaoningense
GFDGSSTQQAEGHSSDCVLKPVAVFPDAARTNGVLVMCEVMMPDGKTPHPSNKRATILDDAGAWFGFEQEYFFYKDGRPLGFPASGYPAPQGPYYTGVGYSNVGDVARKIVEEHLDLCLAAGINHEGINAEVAKGQWEFQIFGKGSKKAADEMWMARYLMLRLTEKYGIDIEFHCKPLGDTDWNGSGMHANFSTEYMRTVGGKEYFEALMAAFDKNLMDHIAVYGPDNDKRLTGKHETAPWNKFSYGVADRGASIRVPHSFVNNGYKGYYEELR

SEQ ID NO: 11909 - protein, 284 aa, Bradyrhizobium liaoningense
AMELEQLPLWGFDGSSTQQAEGHSSDCVLKPVAVFPDAARTNGVLVMCEVMMPDGKTPHPSNKRATILDDAGAWFGFEQEYFFYKDGRPLGFPASGYPAPQGPYYTGVGYSNVGDVARKIVEEHLDLCLAAGINHEGINAEVAKGQWEFQIFGKGSKKAADEMWMARYLMLRLTEKYGIDIEFHCKPLGDTDWNGSGMHANFSTEYMRTVGGKEYFEALMAAFDKNLMDHIAVYGPDNDKRLTGKHETAPWNKFSYGVADRGASIRVPHSFVNNGYKGYYEERR

SEQ ID NO: 11910 - protein, 277 aa, Bradyrhizobium liaoningense
LEQLPLWGFDGSSTQQAEGHSSDCVLKPVAVFPDAARTNGVLVMCEVMMPDGKTPHPSNKRATILDDAGAWFGFEQEYFFYKDGRPLGFPASGYPAPQGPYYTGVGYSNVGDVARKIVEEHLDLCLAAGINHEGINAEVAKGQWEFQIFGKGSKKAADEMWMARYLMLRLTEKYGIDIEFHCKPLGDTDWNGSGMHANFSTEYMRTVGGKEYFEALMAAFDKNLMDHIAVYGPDNDKRLTGKHETAPWNKFSYGVADRGASIRVPHSFVNNGYKGYL

SEQ ID NO: 11911 - protein, 273 aa, Bradyrhizobium yuanmingense
LPLWGFDGSSTQQAEGHSSDCVLKPVAVFPDGARTNGVLVMCEVMMPDGKTPHPSNKRATILDDSGAWFGFEQEYFFYKDGRPLGFPTAGYPAPQGPYYTGVGYSNVGDVARKIVEEHLDLCLAAGINHEGINAEVAKGQWEFQIFGKGSKTAADQMWMARYLMLRLTEKYGIDIEFHCKPLGDTDWNGSGMHANFSTAYMREVGGKEYFEALMAAFEKNLMDHIAVYGPDNDKRLTGKHETAPWNKFSYGVADRGASIRVPHSFVNNGYKGY

SEQ ID NO: 11912 - protein, 288 aa, Bradyrhizobium liaoningense
FPTLEQLPLWGFDGSSTQQAEGHSSDCVLKPVAVFPDAARTNGVLVMCEVMMPDGKTPHPSNKRATILDDAGAWFGFEQEYFFYKDGRPLGFPASGYPAPQGPYYTGVGYSNVGDVARKIVEEHLDLCLAAGINHEGINAEVAKGQWEFQIFGKGSKKAADEMWMARYLMLRLTEKYGIDIEFHCKPLGDTDWNGSGMHANFSTEYMRTVGGKEYFEALMAAFDKNLMDHIAVYGPDNDKRLTGKHETAPWNKFSYGVADRGASIRVPHSFVNNGYKGYLEDRRPNSQ

SEQ ID NO: 11913 - protein, 280 aa, Bradyrhizobium liaoningense
GSELEQLPLWGFDGSSTQQAEGHSSDCVLKPVAVFPDAARTNGVLVMCEVMMPDGKTPHPSNKRATILDDAGAWFGFEQEYFFYKDGRPLGFPASGYPAPQGPYYTGVGYSNVGDVARKIVEEHLDLCLAAGINHEGINAEVAKGQWEFQIFGKGSKKAADEMWMARYLMLRLTEKYGIDIEFHCKPLGDTDWNGSGMHANFSTEYMRTVGGKEYFEALMAAFDKNLMDHIAVYGPDNDKRLTGKHETAPWNKFSYGVADRGASIRVPHSFVNNGYKGYL

SEQ ID NO: 11914 - protein, 304 aa, Medicago truncatula
MTSSNPFFDDIRSRPGVDPPQTEESTEIPELVNDPIQTVVKPNGTVSSSVRELLECPVCLNAMYPPIHQCSNGHTLCSGCKPRVHDRCPTCRHELGNIRCLALEKVAASLELPCKYQGFGCIGIYPYYSKLKHESQCVFRPYNCPYAGSECAVVGDVQFLVDHLKDDHKVDMHSGCTFNHRYVKSNPQEVENATWMLTVFSCFGQYFCLHFEAFQLGMAPVYIAFLRFMGDDDQAKNYTYSLEVGGNGRKMTWQGVPRSIRESHRKVRDSFDGLIIQRNMALFFSGGDRKELKLRVTGRIWKEQ

SEQ ID NO: 11915 - protein, 304 aa, Medicago truncatula
MALSNPLFDDIRSNIDVDPPQKEESTDVGILVNDPAQTALKPTGTVLSSVRELLECPVCLNAMYPPIHQCSNGHTICSDCKPRVHNRCPTCRHELGNIRCLALEKVAASFALPCKFKDFGCIGIYPYYNKPEHESQCSYRPYNCPYAGSECSVVGDINYLVTHLKEDHKVDMHNGSTFNHRYVKSNPQDVENATWMLTVFSCFGKYFCLHFETFQLGMAPVYIAFLRFMGEDSEAKNYSYSLEVGGNGRKMVWQGVPRSIRESHSKIRDSFDGLIIQRNMALFFSGGDRKELKLRVTGRIWKEQ

SEQ ID NO: 11916 - protein, 294 aa, Saccharum officinarum
MEQYEKQEKIGEGTYGVVYKGLDKATNETIALKKIRLEQEDEGVPSTAIREISLLKEMNHDNIVRLHDVIHSEKRIYLVFEFLDLDLKKFMDSCPEFAKNPTLIKSYLYQILRGVAYCHSHRFLHRDLKPQNLLIDRRTNTLKLADFGLSRAFGIPVRTFTHEVVTLWYRAPEILLGAKQYSTPVDVWSVGCIFAEMVNQKPLFPGDSEIDELFKIFRVLGTPNEQSWPGVSCLPDFKTAFPRWQAQDLATIVPNLEPAGLDLLSKMLRYEPSKRITARQALEHEYFKDLEMVQ

SEQ ID NO: 11917 - protein, 642 aa, Desulfococcus oleovorans Hxd3
MAKTIGIDLGTTNSCVAVMEGGEAKVITNPEGGRTTPSIVAINEDGERLVGQVAKRQAITNPENTVFGVKRLIGRKFDSAEVQHDIKVLPYKIEKAGNGDLRINLRDKQYSPAEISSFILADIKHTAEEYLGEKVTDAVITVPAYFSDSQRQATKDAGKIAGLNVLRIINEPTAASLAYGLDKKKDEKIAVFDLGGGTFDISVLEIGDGVFEVKSTNGDTHLGGEDFDLRVVDYLASEFKKDQGIDLRQDKMALQRLKEAAEKAKMELSSSPQTDINLPFITADANGPKHLNIKLSRAKLEELVEDLLDKMAKPCETALKDSGFSASQIDEVILVGGMTRMPAVQDRVKKIFGKAPNKSVNPDEVVAIGAAIQAGVLQGDVNDVLLLDVTPLSLGIETLGGVMTKLIEKNTTIPTKKSQVFSTAADNQPAVSIHVLQGEREMAANNKTLGRFDLADIPAAPRGVPQIEVTFDIDANGIVAVSAKDLGTGKEQSIKITASSGLSKEEIDKLVKDAEAHAEEDKNKRELVEAQNTADALIYQTEKSIKELGEDKLDNATKAEIQAKIEELKKAKETTDTDQIKKLSDELTQASHKLAEAMYQKASQEGQQASGGDAGASADGGTSSAAGGDDDVIDADYEEAGK

SEQ ID NO: 11918 - protein, 104 aa, Desulfococcus oleovorans Hxd3
MYAVIATGGKQYRVEKDEVLRLEKLPGQVGDTVSFDQILLFSDGESVSVGTPVLGNVTVSGKIVEQDRAKKILVFKTKRRKRYRRKQGHRQSFTAVRIETIQAG

SEQ ID NO: 11919 - protein, 333 aa, Desulfococcus oleovorans Hxd3
MKFIDEATITVSSGKGGRGCVSFRRERFVPRGGPDGGDGGSGGSLLFRVNPSKRTLYAFRSKKQFAAPNGAPGEGRQKTGKSGDDLVIEVPPGTLIFDADTGAIIRDMVSPEEDFVFLTGGRGGKGNKHFATSTHQTPRFAQPGEPAQTATVRLELKLLADVGLIGLPNAGKSTLLSVISAARPAIGAYPFTTLSPNLGMVTLAGAEPFAVADIPGLIEGAHTGAGLGIRFLKHIERTRLLVHLIDASAIDPADPVAPFRIINAELAMFSPALAERPQVVVLNKMDLTGAEALAQQFINAAGIKKCFLISAATRSGVEELKKHLFELLCSHDT

SEQ ID NO: 11920 - protein, 559 aa, Desulfococcus oleovorans Hxd3
MEHIRLVLAVVLSVLVLLVWQVFFIGSPEAPVRPDGAPVAPAQEAAAPPNPAAGDVALPRENAPPEQVTPADSALVPTEAPAAPVVVETGLYTVTLNGNGAHISDFVLKNYRETNDPASPAKRLLSDNNPQGSLRVNLEGDTLAGMANGPYSADVADGPVVVSDQPRSVVFTRQFPGGRVVEKRYTFTPDSYMIDLAVTLKNGSETPLSGNLAVTLARYFTDDGSRFVFEGPSALVGHDLEEIKLGDIQKKASLTGSLAWISIQNRYFMSALIPETPTEAAMRLSRTPEQVVTATYLAPARTVGANSTETYRFSVFMGPKSVQILGRAGHALDRAVNFGFFDFIARPCLWLMNFLYRYIPNYGIAIIIITLLFKLVFWPLGNKSYKSMAEMKRLAPLMAEIREKYKDDRKKMNEEVMNLYRTYKINPLGGCLPILVQIPVFFAFYRMLYQAIELRHAPFFGWINDLSAPDRLFNFDVSLPLIAPPVGIPVLTIVMGATMIIQQKLQPPMGDPTQAKIMMLMPIFFTFIFINFPSGLVLYWLVNNTISIFQQYYITRKNA

SEQ ID NO: 11921 - protein, 468 aa, Desulfococcus oleovorans Hxd3
MAGAKANILVVDDELSMRELLDVMLSREGYKVACAEDGTQALSMLGEMKFDLVLCDVRLGDMSGIDVLKAAKKANHDTVVIMISAYATTEVAVAAMNEGAYDFVPKPLDSAELKQTIIRSLSLRTVEQERQALDNSLEDHLYFERIVGSHPKMKHIYNMVRQVAQTRTRILITGESGTGKELIARAIHEQSDRANHPFVVVNCGGIPENLMESELFGHRKGSFTGAVMDKKGLFTIAHKGTIFLDEIGELSMPLQVKLLRVVQDGAFKQVGGTEEISVDARILSATNKNLSQEVIDGNFREDLFYRLNVIELNVPPLRERKSDIRVLAQFFVEKFSKDLGKEVIKLSSYALDMLEKYSFPGNVRELENLIERSVALSTTNIILPESLSLAVHKRRWIEGVPGRRFDLEEVTKGVALDEILADIERAYLKKALESSGGNKNRAAELLGISFRSFRYRLDKLNVPWDEEE

SEQ ID NO: 11922 - protein, 444 aa, Desulfococcus oleovorans Hxd3
MKRILYMTPLLGLAMSVSAWAGEAAITPAANAAAIELVQSHADYLWTLVAACLVFFMQAGFALVETGFTRAKNAVNILMKNLMDFSIGSLVFWAVGFGLMFGASASGWFGTSGFFLSDFSPEGDPWVLAFWMFQVVFCATAATIVSGAMAERTKFIGYIAYSIVLSALIYPVFGSWAWGSLFNGGGWLEGFGFIDFAGSTVVHSVGGWAALAGAIVLGPRMGKYAKDGTARAIPGHNIPLAALGVFILWLGWFGFNPGSTTVADKSIAMIFVNTNLAAATGAVFAMIVSWLKFGKPEISMSLNGALAGLVGITAGCANVSPTSSIIIGAIAGVLVVFSVLFFDKIKVDDPVGAVSVHGVCGAWGTLAAGIFNMGGTSASIIGVQLLGMGTCFAWTFSMAFVMFKLIDKTIGLRVSPEEEAEGLDFSEHGGNAYPDFSVSAYAQK

SEQ ID NO: 11923 - protein, 429 aa, Desulfococcus oleovorans Hxd3
MRKVVIVEGVRTAIGSFGGSLKSVPVVDLGAVVMRGVLKKAGLRPVTSDLMSEAAPDRLRDQGRIELENKAYDWEEGAVPVVIDEVIMGNVLQAGQGQNTGRQAMIRAGLPKETPAMTVNKICGSGLKAVALGASAIMTGQADVVVAGGQENMSLAPMALPKARWGHRMELTGVGEVYDLMVFDGLYEIFYGYHMGVTAENIARLYDIGRKEQDELGVLSHNRARKAITEGIFAQEIVPVVMSSRKGDVVFDTDERPMDTDMAKMSGLKPVFAKDGTVTAGNASGINDAAAAVILMSEEKAKELGLDASVSIKGFAAGGLDPAYMGLGPVPAVRRVMKSTGMTMADMEMIELNEAFASQAIGCMRELGIDTEKPNELGSGISLGHPIGCTGARQTVTALHHMKRKGYTTGLISMCIGGGMGMAMVIERQ

SEQ ID NO: 11924 - protein, 387 aa, Desulfococcus oleovorans Hxd3
MSNIHLDHISVSPLLPEVQEAMIEVIRDFKGNPSSQNVAGELAAEKLEKARQSVADLINCDPREVVFVSGGTESINMAVKGVARANVEKGKHIVTSNIEHNAVNRSVKRLMHLGWKATSVAVNEKGRVAPDEVAKAIREDTILVSIMHSNNEIGTLQPIDEIAKITKEKKVLLHTDAVDSVGVIPFDVQQVGADLVSFASNPYYGPTGVGALYIRKGSRIWPIIDGGVQEHNRRAGTENLIGIVGMGVAAELAKRDMDRRVAHLKKLKALLVKELPNYIDEYYVNGDIDTSLPNLVSVSVKYVEGESLMLMLEDAGYTVSTRSACATGSLRASHVLMSIGLDHADAQGTLVITPGIDNTEEDILGFLKALRDITKALRDISPLYKNR

SEQ ID NO: 11925 - protein, 406 aa, Desulfococcus oleovorans Hxd3
MGLVVQKFGGTSVADIEKIRNVANRVIRTATAGNRVVVVLSAMAGITDSLINLANQAAEDPDGRELDSLLSTGEQTTVALLAMMLTDMGYKARSLLGFQAGIRTNAAATKARIISIDAEKIRTLLAGGYIVVVAGFQGIDDDGNITTLGRGGSDTSAVALAAAIKADVCEIYTDVDGVYTTDPSICEKARKLSRISYDEMLEMASLGAKVLQIRSVEFAKKYNVPVHVRTSFGEEEGTMVLQEDTGMEELVISGVTCSKGEARITFKKVADVPGVASEIFGPIAEARILVDMIIQNTRAGGQTDLTFTVPRGDYKKALAIAQETGKAIGAEEVMGAENLAKVSIIGVGMKNHSGVASTMFSTLAAEGINIQMISTSEIRISCVVEEKYAELAVRVLHTAFGLDKKE

SEQ ID NO: 11926 - protein, 251 aa, Desulfococcus oleovorans Hxd3
MVKRYENLFPSEYRTYIEPFVGSGAVFFHLNPEAAILSDKNKELINSYHAIKKDWRLVYAHLKNHNKNHSKDYYYKIRGSKPRSEFTKAARLIYLNRTCWNGLYRVNCKGEFNVPIGTKTNVILDTDNFHLISVTLSNTELLSDDFQNVIDKAQTDDFLFVDPPYTVKHKNNGFLKYNETLFSWEDQVRLKESLLQANSRKAKILLTNANHKSIINLYKNYFNIRTLTRKSIIAGQPRFRNNCEELVATNY

SEQ ID NO: 11927 - protein, 425 aa, Desulfococcus oleovorans Hxd3
MSSQRMLIIDDEEIVLRSCQRVFADEGFSVVITQNPAEGLRLASESFFDVILCDWKMPGFDGMDVVAELDKRSPESVVVMISGFPSVGRATEALKRGAMDYVSKPFTPEEITAVVQKAVQRKLSEEKKAIGRFEKIIGSLQFPVPGIEDKTPKTIAETVASTIGVGKVTSPWRTVTVLGLLAGAYIGFGGLLSTSVTFDMNAVVGIGLTKFMAGAAFSLGLMLVVIAGAELFTGNNLMISSVLTKDITFIDMIKRWGVVYLANLAGSILIALILLLSGLWKTGNGALGAAAVNVAVAKVSLGFGEALVRGVGCNWLVCLAVWMALASSQTIGKIFAIFFPIMGFVAIGFEHCVANMYFIPAGIFLHHWADSPAIAAVTTDNLTWFAFLWKNLLPVTIGNIIGGGVFVGMSYWGAYLRPAKAPKPV

SEQ ID NO: 11928 - protein, 424 aa, Desulfococcus oleovorans Hxd3
MSNLIAPHGGKGLTVCLLEGSELEAEKKKAEGLKKIPLNPRAKGDLIMLGIGGFSPLTGFMTKADWKGVCDNFLLADGTFWPVPVCLDAAKADADAIAEGEEIALVDPTNNEIMATMKVTEKYEMTEADKKYECEKVFMGEGTPTADDFWKIAKDDHPGVQMVMGQKEVNLAGPVKVLSEGEYPVKYKGIYHRPAESRKIFEERGWKEIAALQLRNPMHRSHEHLCKIAVDVCDGVYIHSLVGNLKPGDIPAEVRVRCIDALVKNYFVEKNVVQGGYPLDMRYAGPREALLHATFRQNYGCSRMIIGRDHAGVGDFYGMFEAQTIFDKIPAPAEPGKALLCTPLKIDWTFYCMKCDGMASLRTCPHSKEDRVMLSGTMLRKGLSEGTPIPDHFGREEVLDILREYYAGLTEKVAIKTHKAATGN

SEQ ID NO: 11929 - protein, 570 aa, Desulfococcus oleovorans Hxd3
MKNGIAPPHGGRLINLVADESRVAGLKEQALNLEEIVLSGRQLCDFDMLATGVFSPLSRFMTRTDYEAVVAQMRLASGELFPLPVCLDVSNERARTLAPGQAVALRDQEGLLLAVMHITDVWQPDREHEARTVYGTTDCAHPGVHHLLRCCGEYYVGGTMEVVQLPIYLDSRQLRKSPAEVRELYRKLSWHRVIGFHTRQPVHRLQFEMTIRAMRTARANLLCLPSVGTIDPDDVDHYTRVRCYKRVAERYPPDSFLLNLVPMAMRMAGPREALLHLIVARNFGCSGFIIGPDHASPPHPDNGVAFYEKDRACRLLETHAGELGMEVIVFNEIVYLPFEDEFVPVDQVADGTQYVSMPGSLIRRRMRAGKTVPDWATFPEVLEELERACPPPARQGFTVFFTGLSGAGKSTIARILYSRFLEIGTRPVTLLDGDIVRHNLSSELTFSKEHRDINVKRIGFVASEITKNRGVAICAPIAPYAATRADVRRVIEAYGGFFEVHVATPIEECEKRDRKGMYAKARAGKIKGFTGVDDPYQAPVCPDLKIDTTDMTPDEAAQAILLFLGEKGYI

SEQ ID NO: 11930 - protein, 371 aa, Desulfococcus oleovorans Hxd3
MKIGIPREIKKLEKRVAVTPAGVEAFVAKGHKIYVETGAGAGLGISDEVFQQAGAAVLSTADDVWHEAEMIIKVKEPIEPEFDRMKPGQILFTYLHLAADSELTRKLLGKKVIGIAYETVQLNDGSLPLFAPMSEVAGRLAVQMGCFCLESKNGGQGLLLSGVPGVPPANVTIIGGGISGLNAAHLAVGMGARVTILDINLNRLRYIEDIFHSRIVTKMSNTRNLEESVSTADLVIGSVLIPGAKAPKLITREVLASMKNGSAFVDIAIDQGGCASTSRPTTHDNPTFVEEGVVHYCVTNMPGAVPMTSTYALTNVTLPYALELADKGCDLALEENESLAKGLNVYHGQLRNEKVAESLGMDCCHVPISCN

SEQ ID NO: 11931 - protein, 846 aa, Desulfococcus oleovorans Hxd3
MNEISAQPRIVYIDDDRNQLALVERFLSGPFEVITAENGEDGLRIISETPPDLVLLDINMPKMDGYEVCTRLQATPKTSFIPVVFLTAMEEEKDRARAFAAGASDFLVKPVKKDALLEKVRAQLATGAAWKDLQADNRQWHKKIESADFAGFKEHVAGQLNLAPDKKERLFETTAADIYTVFAEMGLVESTLSRLMSQYMGLPYTTRISPETIRLGAIPTAFCKANHVLPVMTESGEKGFILSNPFNLDLVDMLKKNFALEKTAAISIAEPSRIDLFFIEAPSQQKSSAVGGPQTPSPATAPKITVRNEADTDHPIVQITDTILNAAVAERASDIHIEPKETETTVRFRVDGDLRHAFTLKKATGMMIISRLKAQSGIDIAEKRKPQDGGFVANLGDRVFNFRLSTTSTPNGESLVMRLLEPYGAANSLSELGMMDGQVAAMVAAANRSSGTILIVGSTGSGKTTTIYSLLHAIDHKKRSIMSVEDPVEYRIPFLNQQQVNEKAGVTFDSLLKAAVRQDPDVLFMGEIRDGFSAKMAVDFASTGHLTITTLHTSNATTALFRLHRLGIDRGTMADTIIVIVAQKLLKKLCPHCKQTVPISPQEREMLAAFTDDVPSVVARSVGCPECRSTGYLGREGVYEVLEFDTQIAEMVRSNAPIAEIRSFAKRRGDLLIDTHAITKVKELLFTPKDIFEKVLAEETPVRERQKPRKPEPATADAGPPASAASVLLVEDDADTRMLITRFLETDGYTVTACADGIDALLCLGKQSFDLILSDIDMPNLDGFKLLEMINQKGVSVPVIFLTSRAGHEDETRGLELGAVDYIKKPVQKDLLRLRVKKTIQGRVSP

SEQ ID NO: 11932 - protein, 537 aa, Desulfococcus oleovorans Hxd3
MCGIAGCFGRKDEPTVKRMLDTLGHRGPNDRGMHAGASFVVGHTRLSIVDVATGRQPILTGDGTKGIVANGEIYNFRKLRMGIADKYQFRTRSDTEVVLHLYEEKGPACVKDLDGMFAFALFDGDAFMLARDPVGIKPLYYGFKQDALYFSSELGAMSFAGLDEVHEFPAGHYYTPKEGFVQYYKVPPIEDDQLTDIEETCEIIRETFIHAVKKRLLADPEVPVGSFCSGGLDSSLVAAIAADEIPRLHTFVVGMKDAFGDVSDDVKAARIAAAHIGSTHHELIFTEDEYYEALPTVINKLESYDPSLVRCAVPCYFTCKMAAEYVTVVLTGEGADELFTGYHYMKHFPEDKLNLEARRCIGNLHNINLQRADRMGMLFSLELRVPFLDEAMVDLSMKIPHELKIREHNGAKIEKWILRKAFENTHYLPDDILWRYKVQYTQGAGCEDLGERLANRMGDDEYEKIKAENPDAVINSKEAAYYFKIFREYHPQDSILGSIGIWTGFDFAEEREKVKGTVDGDLKHEHEEETDDTSQVA

SEQ ID NO: 11933 - protein, 303 aa, Desulfococcus oleovorans Hxd3
MTDPLEPKKDFRSGFIAICGPPNAGKSTLLNLLAGEKISITSDKPQTTRNRILGVVNRKNAQVVFVDTPGIFRPKGKLNTAIVGTAVSALADVDVILLVIDVVKPRKDAEHLTIEHLKHHNKPVVLALNKIDRIKKHKLLEMIDSWQRLYAFERIVPISALESIQTEDLMAELETLLPEGGPLFPEEMLTDAPERFLAAEMIREKVFRLTGQEIPYATAVTIDTFKEKKEGSVIHIQATIHVERDSQKGIVIGKQGAMLKQIGQESRQDIEQMTGARVFLELFVRVQKNWSSDDRRLSEFGYP

SEQ ID NO: 11934 - protein, 371 aa, Desulfococcus oleovorans Hxd3
MIIGILKEIKTEEHRVAMTPAGVEMMTARGHEILVETRAGAGSGFDDDLYRKAGARIIDTAADVFARSDMVMHVKEPQPSEYGLLRKGQILFTFLHLAADRALTDALIKTGAVCIAYETIQKKDGSLPLLTPMSEVAGRMAVQEAAKLLEMSNGGLGVLLGGVPGVEPGNVLVIGGGVVGINAAKMACGLGARVILLDADLGRLRYLSDVMPKNCFLLMSTPAVIRERIQTADVVIGAVLLAGARAPRLVTREMLKTMKKGAVMVDVAIDQGGCFETSRPTTHTDPVFVEEQVIHYCVANMPGAVPRTSTLALTNATLPYALELADKGWQRAMRENPEIALGANVIDGKVTFPGVAQAFDYEYTPAASLIN

SEQ ID NO: 11935 - protein, 485 aa, Desulfococcus oleovorans Hxd3
MSSILIVDDDDQLRQSFAKLLKEEGYSVDMAPSGEAGLEAVRDKAFDLVVLDVQMPGMSGLEAFARIREIDATLPVVVMTAYGTTETAIEATKLGAFDYILKPFDIAGVLDLITQALEAGHMMRARVEMNVAPDSARPGAIIGSSPPMQEVYKAIGRVAQTDATVLIRGESGTGKELVARAIYQHSKRAGKPFLVINCVALPETLLESELFGYEKGAFTGAASRRIGKIEQANGGTVFLDEIGDMPLSIQAKILRLLQERSLEPLGGNASIDVDVRILAATNRNLEKAIENEVFREDLYYRLKVVTVNLPPLRDRVNDVNLLADYFMTLFSKEMKMDNPGLTDEARKMIRHHPWPGNVRELANALKKSLIFSRGYPVRPEDISQVIAGPDQAGPSVTDGSDMDRVVGEWAREMLTAGGDTARFDYLTDRLTAIIIREALQMTRGNRSQAAKLLGLARPTLLSKIDKLNLSIETRVQTDYETGQKS

SEQ ID NO: 11936 - protein, 630 aa, Desulfococcus oleovorans Hxd3
MCGISGIITRSLAENQVLARLERMGQLQRHRGPDDRREQVFDGPEDRRIGLGLARLSILDLETGMQPIVCPEDGAAIVCNGQVYNYLELRRELAGQSFVSKGDIETALHTYRKKGLDFVNDLNGMYGGAIYDPVNHRVVLFRDRFGIKPLYYTTHKGTFVFASEIKPLLAGSGRPARLNEARLATFFTYRYVPGEQTLFEGVLRLPPASFLIYDLRTGKHEIHRYWNYQPDRPEPAMTPEAAQETFYDLFSDAVRIRLRSDVEVGALVSGGIDSSAVASQAVALRGPARLFTIAFEEQAYNELADVNAFLAANSGRFAGCDHIVQSCDRLMLERLPGIVESLEEPVSLGTVLPTDQVCELAGSHLKVVVTGEGADEIFAGYRKFLVEAAAHAYPTLLPADQKELAATYPELLPYLAVRHGDPAKRYIQSELLFDAPFLEQLLGRGGLDTAFPADALPTVDPAGHPVNTAIAFECRARLPDYVILRLDKLSMRHSLETRTPFLDYRLAEFAARLPVHLKLDTFAGMEKVVCRQAFERFGVLDRQTAFRKKKPFTIPLAPWLSEPDRLPEPIQEVVRGDMVARQGIVDPAIFKRLVENITSDNIGPHTLVSEADRVFAVIVFTLWYDRFMEK

SEQ ID NO: 11937 - protein, 245 aa, Desulfococcus oleovorans Hxd3
MLELKDITLRLDDGRAVLDGVSVTLQNRKIYAVTGPNGSGKSSLARIIMGLQQPTAGRILLDGQDITDMDITQRAGLGIGYAFQHPPRFKGIKVRELIKLADGSRNKAGICDMLYSVGLCAQEYLERDADATLSGGEAKRIEIATVLARRLRLAVFDEPEAGIDLWSFQKLADTFREMHGKSDTTIVIISHQERILELADDILLIKEGRLAPVPRDIILTSNNSEANCRCRQSCGKRGEAHVECA

SEQ ID NO: 11938 - protein, 379 aa, Desulfococcus oleovorans Hxd3
MISKRARQITPFLVMDVLEKADEMERQGIDVVHLEVGEPDFDIPLCVKTAVEKALADGRTYYTHSLGDIRLRQAICDHYKNRYGVTVTPSRVIVTSGTSPAMMMAFAALLDPGDEVIISDPHYACYPNFITFAGGQPVTVPVYEADGFQYSPEAIAAAMTERTKAIFINSPSNPTGTLLSRERMAAIARFEPYIISDEVYHGLVYEGREHSILEFTDNAFVLNGFSKLYAMTGLRLGYLIVPEPFVRTVQILHQNFMISANSVVQFAGIAALEQAGDDVARMKAIYNERRLYMIRRLRELGFTIPVEPTGAFYLFVNAGHLSSDSYSLAFDILEKARVGVAPGIDFGKNGEGFLRFSYANSLENIAEGLNRLEPYLERR

SEQ ID NO: 11939 - protein, 562 aa, Desulfococcus oleovorans Hxd3
MSEKNTDFIRRIIDEDLAAGKYPDGLVTRFPPEPNGYLHVGHAKSICLNFGIAEAYANSVCNLRFDDTNPGKENVEYVDSIREDVKWLGFDPGDRVYFASDYFERLYAFAEQLIKDGKAYVCGLSADDIRRTRGTLTEPGTPSPDRNRPAEENLDLFRRMRAGEFADGTYILRAKIDMASPTLCLRDPAIYRIRHESHHRTGDKWCIYPMYDFAHPLSDAIEGVTHSLCTLEFANNRPLYDWFVEQLTDPPRPKQTEFARLNLTYTVLSKRKLSRLVSEGFVSGWDDPRMPTIAGIRRRGVPPGALRNFCDLIGIAKKESLVDVALLEYAVREQLNKTAPRRMAVIHPLKVVIENYPEGEGEEMTAVNNPEDPDAGTRMVPFSRELYIEADDFMEEPPKKFFRLAPGREVRLRYAYFIKCESVIKDASGNIVELRCTYDPATRGGDAPDGRKVKATLHWVSARHAVAAEVRLYDRLFLKENPSDDEGRDFTEFLNPDSLQPLFPCFLEPALTQAAPCRAFQFERLGYFCADAKDATPDRPVFNRTVTLRDTWARIQKQEQKG

SEQ ID NO: 11940 - protein, 479 aa, Desulfococcus oleovorans Hxd3
MAHILIIDDDEGLVHFLRRFFQRKGYDVTACLTGREALAAIPKQSFDLILLDYKMPDINGLDMLAEIRRIEIKTPVILMTAYGTTDLAIETMKLGAYDYLTKPFDRKDLSRIVTEALAVNRQMKERVRIGTGPFTAAEAVDSRSIRMVGHGKQMQEIFKRIGQVAANDVPVLITGESGTGKELVARALYHHSHRNDRPFIAVNCAAIPDNLFESELFGHERGAFTGADRTYIGKMERCDHGTLFLDEISELAPGVQAKLLRALQEGEIERVGGSGPIKVDVRVIAATNRNLEQEIETGGFRKDLYWRLKVITIDLPPLRRRREDIPHLADYFLARFCAEYNRPQCYLSESALTKLTAYSWPGNVRELENCIRRAVLLTAGDVIPDGSLMIPDAETEPLPGDLDTAQLMARLRAMLDDILPQLLKRPGQGLHAHLVEVVETAAITHALDACDNNQVQAAALLGISRNTLRQRLKKQQDPA

SEQ ID NO: 11941 - protein, 465 aa, Desulfococcus oleovorans Hxd3
MKPVDEPKKNVLVVDDEENMRHMLAAMLTREGYQVETAANGAQALEMVAKQPFDFILCDIKMPRMDGLAFLAHRTEHFPDATVIMMSAYGTIDTAVEALKHGAYDYISKPFKSDEVLLALKKASERERLKRENIALRQQIATLGRGYTFGKIIAKSKAMQAVTDLITKVAAHDTTVLVTGESGTGKELVARSLHFNSPRAPNALIPVNCGGIPENLLESELFGHVKGAFTGADKNKTGLCEIAHKGTLFLDEIGELPASLQVKLLRLLQDREIRPVGASATRTIDIRIVAATARNLEADVAEGVFREDLFYRLNVLHIHLPPLRDRQEDIPLLIETFVQEFNKKLDKTITGLAPAALSRLLAHTWPGNVRELENLIERAVVLAEGDTITPDDLPPGFGTDSAGGPGDALAGFDGYSIKAAQKIFEKRLIEKALAKTGGNRTRTSKLLEISHPSLLAKMKEYGIEG

SEQ ID NO: 11942 - protein, 405 aa, Desulfococcus oleovorans Hxd3
MAGHKKRKDMCMRDVVIVSGARTAIGDFAGSLSTLGPVDLGVVALNGALEKAKIDKSLVQEVVCGQCNQAGAPGNTARHIAMGAGLPATSFAFTVHQQCASSMRGTELVAQEIMLGKIDIGAVVGVESMSNAPYLLFGARRGYRLSDGETVQDSLMIGGLVDALLGYHMGVTAENIAEKYKISRQEQDEWALMSHQRAVAAIQKGWFAEEIVPVTIKTKKGDTIFDTDEHPRADTTLERLAALRPAFKKEGTVTAGNASGLNDAGAALVLMAATTAKEMGLAPLARVVASAPGSVSPEIMGMGVVPAVHNALNFAGMKLEQIDYFEFNEAFAAQVIGCNRELKVDPERLNGVGSGISLGHPVGATGARLVVTMINELRRRGKKFGCAALCASGGPAHALIVEIPD

SEQ ID NO: 11943 - protein, 66 aa, Desulfococcus oleovorans Hxd3
MADGIVKWFNEKKGFGFIEVDESNDVFVHYSAITMPGFKTLSEGDRVSFEIEDTDRGPAAKNVVRA

SEQ ID NO: 11944 - protein, 564 aa, Desulfococcus oleovorans Hxd3
MQFTGAQIMMKVLKEEKVETIFGYPGGAVLDVYNELLNTDFAHILVRQEQGAVHAADAYARVSGKTGVCLVTSGPGATNTITGIASAYCDSIPVVIFTGQVPTPLIGNDAFQEVDIVGISRPCTKHNYLVKDVKDLAGVIREAFYIARSGRPGPVLIDMPKDVINAKTTYEPPKPMALKSYNPTYEPNVKQLKKVIDLVKTAKKPVIFSGGGIIFSGAAKELTRFAKKARIPVTSTLMGLGAFPATDDLWLGMPGMHGTYRANLSLSSCDLLIAVGVRFDDRVTGKTSEFAANATIVHIDIDPTSIQKNVRVAIPIVGDCKAAMARLNKMADEDKDLLSDKVKKERTAWAKQIADWKKTKPLAYTQTDVIKPQYVVEQLYELTKGQAIITTEVGQNQMWAAQYYHYTWPGQFITSGGLGVMGFGLPAAVGAQVAAPDKVVIDIAGDGSIQMNIQEMMTAVSHNLPVKIAILNNGFLGMVRQWQELFYDRRYAWTDMAAAPDFVKLAEAYGAVGLRATKPSEVAKVIKKALATPKPVIMDFVVEKEENVYPMVPAGSPITNMILV

SEQ ID NO: 11945 - protein, 226 aa, Desulfococcus oleovorans Hxd3
MDPATVIAEAPLFAGLPADQLEKVARIAQSKPFEKGEMIFSDGQKADGFYVVAQGRIKVFKVSLDGKEQILHIFGPGEPVGEVPVFAGSAFPAGAAALEKSLLLFFPKTVFVRLLEENTPLVLNMLAVLSRRLRQFTVQVENLSLKEVPGRLAGYLLFLAKEQKDTRRVELSISKGQLASLLGTIPETLSRILAKMRDTGLIEVEGAVISLLDIEGLELLAADGRL

SEQ ID NO: 11946 - protein, 332 aa, Desulfococcus oleovorans Hxd3
MKQKKEITDITQQAIDVLKNEAKGILEVAANLDHQFEKAVDLICRSKGRLVVSGIGKSGIVGQKIVATLNSTGTRALFLHPVEAMHGDLGIVGPKDVFLGLSNSGETEELTGLIPTIRNVGCRVIAFTGNTHSSLARQSDIVINVGVKKEACPLGLAPTTSTTALMAMGDALAVSLSIRKDFKSSDFQRFHPGGSLGRRLALNVSEIMLTGDRVPAVPVKTPIEEALAVLDRQNLGALLVVRKNNTLAGILTDGDLRRLYLAKEPLSGGPVDSIMTKNPLTVHPDSPVYDALNILEQHQVTALPVTAAGKKVCGILHLHDILGKGAFKFNGR

SEQ ID NO: 11947 - protein, 417 aa, Desulfococcus oleovorans Hxd3
MKDVVIVSACRTAIGAFGGTLKNMHASRIASIAMKEAIRRAGIDAGIIDDIRFGCCLDPTDSMNVTRTAALLAGIPDSVPAVTINRVCISGMEATLSGMAMIQAGMADVLLTGGVEHMSGVPYVVQDARWGCRLQDTTFVDALIRGLHCGSHIIPHPEDGPLKTGELIERLKGKPYIMGHTAEMVAELYNISREEMDEVALRSHNNVERATKEGDFAEEIVPVEIPQKKGKPPVIFDKDEHFRPGLTMEQLTKLPPAFVPGIGKVTAGNSSGLNDGAAAMVIMSADKAKELGLKPLAKIVASGRGACHPSVMGISPVPAVKNMFDKHPDLSLDAFELIELNEAFAAQYLGCEKELGLNREITNVNGSGIGLGHPVGCTGARIIVSLIHAMKKRGKSVGMATLCGGGGVSMATAVEML

SEQ ID NO: 11948 - protein, 392 aa, Desulfococcus oleovorans Hxd3
MREAVIVSAVRTPLGAFNGALAGVGATRLGAIVIQEAVDRAGIDAAAVNEVIMGMVLPCGYGQNPARQAAVQSGLPWEAECVTVNKVCGSGLKAVMLAAQAIAVGDADVVVAGGMETMSMAPYYLEKARFGYRMGPGAIQDHMVHDGLWDVVNDFHMGISNELCSEKYAVSREDQDRYAAETYRRSLDAVTSGRFADEIVPVPVMGRKGETVLFSTDECPQETSYETLARMKPAFKKDGVGTAGNASVISDGAAAVVVMSREKAAEFGCKPLAVIGAQASYGIDMKYVLMAPVWAIPKCLKKEGLAMGDIDLFEINEAFSGSTVGVIRELGLDPAKVNVNGGSVALGHPIGASGCRVLVTLLYEMARRKAKTGLASLCLGGGEAVALIVKRD

SEQ ID NO: 11949 - protein, 380 aa, Desulfococcus oleovorans Hxd3
MTRPIYLDYNGTTPLDPEVLEAMRPFWETEFGNPSSAHWYGIRPRQAVEAARRQVAGLLGCLAEEVLFTSGGTESNNHAILGMARALRHKGRHIVTSTIEHPAVLEVCQYLEKEGFETTRVAVNELGMVDPAAAEQAIRPDTILVTIMHANNEVGTVQPIAEISERVRARGITMHTDAAQSLGKIPVNVSTLGVDLLSVAGHKIYAPKGIGALYIKKGLALEKFCHGAGQETGRRAGTENVTGIVGLGKACEIATRDLEVNRVHMKDMRDRLHSGISERVADMRLNGHPENRLPNTLSMAFKELEANRLLEEICLEVAASAGAACHSDTVTLSHVLEAMGVPVEWAKGTLRFSTGRMTTAEEIDRTVEVVAEAVARLRKS

SEQ ID NO: 11950 - protein, 544 aa, Desulfococcus oleovorans Hxd3
MSANGSISPSTLSLKDLPWQILWDKEKCTLCGRCTSVCPVRTLELGVFRKRVVKPNIHISHASSSSFEVYYGIRQQTAPANACVGCAMCTLVCPNDAILPVRGDEADKLMFHVNQGGTPRQRGGRRNAPGGILDRIKFIRISMLTDPALDAGRHEFELRTLLGRVLPPEENLAHLRENGWIPPVREIYPLIIGGMSFGALSPNMWEGLQMGVAYLNEEINMPVRMCTGEGGCPPRLLRSRFLQYVILQIASGYFGWDEIVHAIPEMKVDPCAIEIKYGQGAKPGDGGLLMWYKVNKLIAAIRGVPEGISLPSPPTHQTKYSIEEAVAKMIQSMYMAWGFRVPVYPKISATSTALAVLNNLSRNPYAAGLAIDGEDGGTGAAYNVSMNSMGHPIASNIRDCYLNLVKLGKQNEIPLLAGGGVGKSGNLAANAAALIMLGASGVQAGKYVMQAAAGCLGSETDRCNICNIGQCPKGITSQDPRLYRRLDPEDVAQRIVDMFLSFDTELKKIVAPLGRSTSLPIGMADALGIDDIAAAERLRIKYVV

SEQ ID NO: 11951 - protein, 703 aa, Desulfococcus oleovorans Hxd3
MINAIFPFMAWLRGYNLDKFKVDGISGLTVALVLIPQSMAYAQLAGMPSYYGLYASFLPPLVAALFGSSRQLATGPVAVVSLMTSASLEPLATAGSEGYIAYAIMLALMVGIFQFSLGVLRLGLVVNFLSHPVVNGFTNAAAIIIASSQFSKLFGVDVDKAAHHYETIIRVVEAAIHYTHWPTFFMGALAFAIMVILKRINPRIPNVLVAVAVTTIMAWAMGFEHNTTVTLDAIQAPEVHETATAYNGCIDQIRAIVEERTAAMKHLDEAKTAHDAMSVMAAEHDLRVANYKIDQLKEEAHLYRDELRSKLFVADASGSVFYLNDPAAQNLSGRTWRIKLRAAALNPDSITMSGGGAVVGVVPKGLPAMSIPKIDMKIMLHLFPYAAIISLLGFMEAISIAKAMAAKTGQRLDPNQELIGQGLANMIGAAGKSYPVSGSFSRSAVNLQAGAVTGLSSAFTSLAVVIVLLFFTPLLYHLPQAVLAAVIMMAVIGLVNVSGFIHAWKAQWYDGAISIISFICTLAFAPHLDRGIMVGVALSLGVFLYKSMRPTVASLSRKEDDAFRAAMVHGLQKCKYIDLVRFDGPLFFANASYLEDKINDRMMQRKDLRHIVIAANAINDIDASGEETLSLLIDNVRSAGVKISFSGVNESVMRVLERTHLLARIGPENIYPTMEKAVCAIHADAHQNADEPDCPLMTVCRIA

SEQ ID NO: 11952 - protein, 425 aa, Desulfococcus oleovorans Hxd3
MNFEAFGFNPQVAAGIKEAGYAVPTPIQVQAIAPVMENRDVMGMAQTGTGKTAAFVLPILHRLMKGQKGGIRALILAPTRELAEQTHQAIGVLGRKTGLKSATVYGGVGITPQIQKLKKVDIVVACPGRLLDHIGRRTANLSKLEVLVIDEADQLFDMGFFPDIKKILTHLPKQRQTLLFSATMPAEIRKLAADILQNPATVQVGNEAPADTVSHALYPVAQHLKTAFLLDLLKQTQARSVLVFTRTKHRAKNLDQKLAGAGFRSTSLQGNLSQVKRQAALDGFRKGTFQILVATDIAARGIDVTRVSHVINYDVPSTPEAYIHRIGRTGRATCTGEAFTFITGEDRNMVRAINRLLGSEIEQRTLESFNYKAAAPAFTGSAPARTDSAHRPARKKPARQSSPRPKTFEKSGSHGKKPARRHTFL

SEQ ID NO: 11953 - protein, 214 aa, Desulfococcus oleovorans Hxd3
MKFFIDTANIDEIKEAVKMGMADGVTTNPSLIAKESGDFETIIKNICDVVDGPVSAEVISLKTAGMVKEAKQLATLHENIVIKIPMTVDGLKAVRMLADQGIRTNVTLVFSPLQALMAAKAGATYVSPFVGRLDDLASDGMVLVEQIIDIYDNYAIDTEIIVASIRNPLHVLDAALMGADVATIPFGVLKKLAAHPLTDRGIDAFLNDWKKAKK

SEQ ID NO: 11954 - protein, 399 aa, Desulfococcus oleovorans Hxd3
MSDIKKVVLAYSGGLDTSVILKWLIETHDCEVITFSADIGQEEELDYIDDKARATGATGVYIDDLKEEFVKEYVFPAFRANAIYEGQYLLGTSLARPLIAKRQIEIAVAEGADAVSHGATGKGNDQVRFELTYFALKPDIRIVAPWREWDLKSRTALMDFAVKHGIPVPTTPAKPYSTDRNLLHISYEGGILEDPWNPPSDDMFTLSVSPRQAPDEPEIVDIAFEQGNPVSINGQAMSPANLLAALNKLGGKHGIGRADIVENRFVGMKSRGVYETPGGTILRAAHMAMESITMDREVMHLRDSLIPRYAEMIYYGFWFSPEMKVMQQMIDQTQVYVSGEVRLELYKGNSRVLGRRSDNSLYSADFATFEDDSVYHQKDAEGFIRLNALRLRLHALLGR

SEQ ID NO: 11955 - protein, 406 aa, Desulfococcus oleovorans Hxd3
MIYVVSFSVFSSVIMVLVAMLLVLEATLVRKGTVHIVINDDADKALETPVGGTLLSALAGADIFLPSACGGGGSCGQCRCTVEEGGGDILPTELSHLSRQEQNDNVRLACQLKVREDMRIRIPEAIFSIRKYTATVVSNKNVATFIKELVLRIDNDETIEFEAGQYMQIDIPEYDSVCFAGFDVADRFTSAWEQFDLTGLCVTADEPVFRAYSLANPPYEELLRFTIRIATPPPGTDDIPPGIGSSYVFNLKPGDRVTLSGPYGDFLVKPTGREMCFVGGGAGMAPMRSHILHQLNTEQTKRPITFWYGARSVQEMFYHEEFTKLAEQYDNFSYHVALSDPRPEDNWQGMTGFIHQCLYDHYLKDHADPAEIEYYLCGPPLMIDAVMTMLDELGVEPDMIAYDSFS

SEQ ID NO: 11956 - protein, 195 aa, Desulfococcus oleovorans Hxd3
MMEAPELRNVVFLDRDGVINEDFPGYVKNWAEVTFVPGSLEAIQRLTEAGFILMVITNQPAVGRGLMTRSCLDYMIAKMRQEAEHAGGRIVDVFYCPHVPADRCGCRKPLPGLIQQAREKYHVDLLSSVMIGDSAEDIECARTAGCGCSILVRTGNGRQAEKELAEKQVFPTWVAADLLEAALWMIKNHDSDPAA

SEQ ID NO: 11957 - protein, 532 aa, Desulfococcus oleovorans Hxd3
MTMKVLVSDTIDASGVSRLENESGFAVDVKTGLPPEELKSIIGQYDALIIRSATKVTADILEAGAPKLKAVARAGIGLDNVDIPAATKHGVAVMNTPEGNVVTTAEHTIAMMMALTRNIPQGTLSLRSGQWEKKKLQGREVFNKTLGVIGFGKIGSIVADRARQLKMNVIVFDPNIARTTIENEGFEYVSLDDLFARADYITVHVPKLKQTVGLLNKAAFEKMKTGVMVLNCARGGIVDEADLYDALMSGRVAAAALDVFVTEPPGEHPLLKLDNVIATPHLGASTKEAQVNVAEAAAHQIIEFLKNNTVINAVNLPAVSGDLLEKLSPFTTLADRMGRLLAQFSGANITEIKIEYNGDFQGLDLAPVTTAAVKGLLTPLVAYQVNSVNAASLAGEMGIAITTRSETLPIDYTSLITISVTSGAGTHTVAGTIFGKKEARVVRINDFRLEMIPTKGHFAIIHNLDKPGAIGSIGTTLGTFGVNIERMQVGQQGDTLRNIIFLRTGSRIPDDALAAVKELPLVKDVTVFELDE

SEQ ID NO: 11958 - protein, 317 aa, Desulfococcus oleovorans Hxd3
MKEPNNDFKIFSGNANPGLVEKICAYLGRPLGKAKVSRFSDGEVQIEINENVRRKDVFLIQSTCAPVNDNLVELLLMLDALKRSSVSKITAVIPYYGYARQDKKVAPRVPISAKLVADLLTQAGANKIITLDLHAGQIQGFFNVPVDNLFAAPVLITHIKKHFSPDNLVIVSPDAGGVERARAFAKRLDAELAIVDKRRSAPNQAQAMAVIGDVKDKIAIILDDMVDTAGTLTEAAAALDAKGAREVNACCVHPVLSGPAVDRITGSKLKQIIVTDTVPLNENAKQCNKIEVLSIADLVGEAMIRSYRGDSVTSLFV

SEQ ID NO: 11959 - protein, 585 aa, Desulfococcus oleovorans Hxd3
MAIFRLKPRHRSLLGYIKGNRFRLYLAVACMLLTSATTAALAYLIKPAIDQIFITKDAQMLRLIPLAVVIVSLLRGTGMYGQEFFMGRVAEGIIKNFRDNLYARICQLPLAFFHKERTGVLMSRITNDVNLIKIVVSNAVTSMVRDFCTVFFLLGLIFYQIWELALVAFIVLPVAFYPVVAIGRKVRRVSTRSQETIADMNAFLHETFSGNKIVKAFGMEAYEEARFYEKSRSLFVIEMKSIMVRALSSPLMEFVAGAGIAFVIWLGGSRVISGVYTTGTFLSFLAAVMLMYDPVKKISGLNALLQQGLAAVDRVYDILETRSDIVEAPDPVTIQRAPHTVAFEKVSFVYDTGGPVLTDINLTVAPGEVVALVGASGGGKTTLVNLIPRFYDVASGRILIDGTDIRKASIASLREQIAIVTQEPILFNDTVRNNIAYGNQDASEADILQAAKDAYAYDFVVGFPKGFDTMIGELGARLSGGQKQRLCIARALLKDAPVLILDEATSALDSESEAVVQKALANLMKGRTTFVIAHRLSTVHHADRIVVLSDGRITEQGKHEELLARKGDYARLCQMQLSNGGLQEE

SEQ ID NO: 11960 - protein, 527 aa, Desulfococcus oleovorans Hxd3
MKVLVSDKLGEAGIELFKNEPGIEVDVKTDLTPEALIQQIGTYDALIIRSATKVTAEVITAATNLKVIGRAGIGLDNVNVPAATQKGIVVMNTPTGNTITTAEHAIAMMMALSRNIPQATISLKAGRWEKKKLQGQEMMNKTLGLLGFGKIGSIVADRARGLRMNVIVFDPNVNPEKIQEAGYESVSLDELYARSDYITIHVPKMEKTIGLLNADAFSRMKDGIMIINCARGGIIDEAALYDALQSGKVAGAALDVFAKEPPGEHPLLTCENVICTPHLGASTQEAQTNVAVDVARQIIAYLKEGTIINAVNTPSVTGDRLARLKPYLELGRKLGLLLAQIHRGKLQEVAIEYSGEYHDLELGPISTALINGLLEPLVREGVNAVNAPAIAQEMGIKVTETLRAEPFDYLNLMTVRVTTTEQTDTVSGTLFGKIYPRIVEINDFRVDVSPEGHMLIILSENKPGVIGRIGTTFGEGGVNIVRFMVGNEAIEGQKNMVIIKTDEPVPADILETLKSKKVIFEATSVNF

SEQ ID NO: 11961 - protein, 66 aa, Desulfococcus oleovorans Hxd3
MADGIVKWFNDSKGFGFIEQDNGPDVFVHHSAINASGFKTLNEGDRVTFDIVDGKKGPAAANVTVV

SEQ ID NO: 11962 - protein, 620 aa, Streptomyces refuineus subsp. thermotolerans
MCGIVGWADFARDLTAERRVLQAMVDTMALRGPDEEGVWVRPRVALGHRRLSVIDLEGGKQPMVTPETLPDGTPLAAISYSGEVYNFTELRGELAARGHRFRTRSDTEVVLRAYLEWGPEFVRRLNGMFAFAIWDARGEELLLYRDRLGIKPLFYYPTRDGVLFGSEPKAVMAHPESRAVLSLDGLRDVLSFVRVPGQTPMKGLYEVRPGHVLRVRDGHRSEERYWALEARPHTDDVPTTVRVVRELLEDIVSRQMVADVPLCSLLSGGLDSSALTALAQRGLASRGGGRIRSFSVDFVGQVENFAPEPLREAPDAPFAAELVRHVGTDHRVILLDNADLASPRVRSTVMRAWDLPYGEGDLGPSLYLLFREVRKESTVALSGESADEVFGGYLWFHDRRAVQADTFPWHALGERPVAELSTAFLDPGLTAELNLPEYIADQYRTALAEVPHLAGETGEDRRMRIASHLNITRFMPMLLDRKDRLSMANGVEVRVPFCDHRLVEYVFNVPWSMKTYDGREKSLLRGAVADLLPRSVVERRKAPYPSTQDAGYDRAIRQELEKIVAEPSSPVLPLLDLDAVRRHLDTPVEKASSMLVRGLHHETPARLDTWLGSYGVTLDW

SEQ ID NO: 11963 - protein, 922 aa, Blumeria graminis f. sp. hordei
MTVFVGSLFLPDTIHFAIPSQVTEDDLYTIQRKSIGGNNQNLSLPSFPSVRDPTPPQSPTVVKNHDDDKFFARSDNPELRGQVSSSVKLTPNNPNSRAWGAGTVFNQPKSRASSPPPANILRHNRTLRKAKSFGRPSNRHPHLGRHENQDILFASAGWVVVPADQGNGGLRNAVQAAVRDGKLADKMWVGTLGMPTDVLEGTQQKQEIERRLAVEYDSLTVFCKDSDFNGHYTHYSKQILWPVLHYQIPDNPKSKAYEDHSWVYYVRVNQTFADKIIENWKKGDVIWIHDYHLLLVPRMIRQKLPDAKIGFFLHVAFPSSEVFRCLAVRTELLEGMLGANLIGFQIYEYARHFLQTCSRLLCVEATKEGVQLEDRFVDVISLAIGIDPIALDANRADPDVSKWIKTMQKRYQGKKLIVARDKLDHVRGVRPKLLAYELFLNKYPEWRNNVVMIQVATSTTEQAELDATVSDIVTRVNSSWANLAYQPLVYLKQDISYAQYIALLTIADALMITSQREGMNLTCHEFLFCQDGKFEGQNKNGCLILSEFTGSASVFGRNELSVNPWDYCQCADAIRTALEMSEDERKLRWNNLYKAVIHHTAEYWFSSFLTRLDEVYDEQNLRCTTSISRLSVDKLGQDYQSASRRLFILDYEGTLASWGSPNDIILTSPQRTLDILNDISLDDRNIVYVMSARQPEELDRLFKRVPNLGLVAENGCYIKLSNTSNWIENADPAEMREWKESVKGIMRYYHERTPGSWIETRHCSLVFHYRSCEDQESAGRLAGDCASHINDACEGQRVRAVLVEGTVVVEPIEWSKSTAAVTIFGHLGNNFADQDSKIIDFLMVVGNNRDDEVIFRWANELGRLKKVRNVTTVSLGSRTTEANYTLTQGVTGVLSVLQKISTILSNFFTIMSYDKLSQGKAL

SEQ ID NO: 11964 - protein, 183 aa, Ipomoea nil
MRRGTVDPLVLGRVIGDVVDPFTRSVELRVVYNNEVDIRNGCEMRPSQLINPPRVEIGGHDLRTFYTLVMVDPDAPSPTSPTLREYLHWLVTDIPGTTGASFGNEAIFYEPPRPSMGIHRFVFVLFRQLGRQTVYAPVWRQNFNTRNFAEIYNLGLPVAVTYFNGQREGGTGGRSPAEPWAAD

SEQ ID NO: 11965 - protein, 174 aa, Ipomoea nil
MSGGRDPLVVGRVVGDVLDPFTRSVGLRVIYNNREINNGCELRPSHIVSPPRVEIGGDDFRTFYTLVMVDPDAPSPSNPNLREYLHWLVTDIPATTGANFGNEVVCYESPRPSMGIHRFVFVLFRQLGRETVYPPGWRQNFNTRDFAELYNLTSPVAAVYFNGQRESGTGGRRR

SEQ ID NO: 11966 - protein, 267 aa, Mucor racemosus
FFNNKMTQREVYIAAAVRTPLGGFNGSLASLAATKLGSIAIEAAVKKANVPVEAVEEVIFGCVLSAGLGQNPARQAALGAGLKDETVATTVNKVCASGMKAVIMAAQSIMLGNAEVIVAGGMESMSNTPYYLPKQRFGSTYGNTEVVDGIVKDGLTDVYNNYLMGVAAEECAAEYEISREQQDDYAIESYKRAQAAFAAGHYKEEIVPVTVSGGRGKPDRVVEQDDEVAKLNEEKLRAVRPAFQPKNGSVTAPNSSPLSDGASALII

SEQ ID NO: 11967 - protein, 288 aa, Rhizobium leguminosarum
FTIAQPFDAFPTLEQLPLWGFDGSSTQQAEGRSSDCVLKPVAIYPDPARTNGALVMCEVMMPDGVTPHASNARATILDDEDAWFGFEQEYFFYQNGRPLGFPEQGYPAPQGPYYTGVGYSNVGDVAREIVEEHLDLCLAAGINHEGINAEVAKGQWEFQIFGKGSKKAADQIWMARYLLQRLTEKYGIDIEYHCKPLGDTDWNGSGMHCNFSTKYMREVGGKAYFEALMAQFEKNLMDHINVYGPDNDKRLTGKHETAPWNKFSYGVADRGASIRVPHSFVKNDYKGY

SEQ ID NO: 11968 - protein, 290 aa, Ensifer adhaerens
PFWGFDGSSTMQAEGKSSDCVLKPVAVYPDSERKNGVLVLCEVMMPDGKTPHPSNTRATVMEDDDAWFGFEQEYFFYKNGRPLGFPETGFPAPQGPYYTGVGYSNVGDIARKIVEEHLDICLAAGINHEGINAEVAKGQWEFQIFGKGSKKAADEIWLARYLLQRLTEKYGIDIEYHCKPLGDTDWNGSGMHANFSTAYLRDVGGKEYFENLMSAFEDARADHIAVYGPDNHMRLTGKHETQSIHQFSYGVADRGASIRVPHSFVNNDYRGYLEDRRPNSQGDPYQIRFS

SEQ ID NO: 11969 - protein, 289 aa, Bradyrhizobium elkanii
PLWGFDGSSTMQAEGHSSDCVLKPVAVYPDAARENGALVMCEVMMPDGKTPHPSNKRATILDDEGAWFGFEQEYFFYKDGRPLGFPSDGYPAPQGPYYTGVGYSNVGSVARKIVEEHLNLCLAAGINHEGINAEVAKGQWEFQIFGKGSKTAADQMWMARYLMLRLTESYGIDIEFHCKPLGDTDWNGSGMHANFSTKYMREVGGKEYFEKLMGAFEKNLMDHIAVYGPDNDKRLTGKHETAPWNKFSYGVADRGASIRVPHSFINNGYKGYLEDRRPNSQGDPYQIVR

SEQ ID NO: 11970 - protein, 290 aa, Sinorhizobium meliloti
PLWGFDGSSTQQAEGRSSDCVLKPVAVYPDPVRTNGALVMCEVMMPDGKTPHPSNTRATVLDDESAWFGFEQEYFFYKNGRPLGFPEQGYPAPQGPYYTGVGYKNVGDIARQIVEEHLDICLAAGINHEGINAEVAKGQWEFQVFGKGSKKAADEVWLARYLLLRLTEKYGIDVEFHCKPLGDTDWNGSGMHANFSTAYLREVGGKDYFEALMAAFEKNLHDHINVYGPDNHLRLTGKHETAPWDKFSYGVADRGASIRVPHSFVNNGYRGYLEDRRPNSQGDPYQIRFA

SEQ ID NO: 11971 - protein, 290 aa, Rhizobium leguminosarum
LPLWGFDGSSTMQAEGRSSDCVLKPVAIYPDPARTNGALVMCEVMMPDGVTPHASNARATILDDEDAWFGFEQEYFFYQNGRPLGFPEQGYPAPQGPYYTGVGYSNVGDVAREIVEEHLDLCLAAGINHEGINAEVAKGQWEFQIFGKGSKKAADQIWMARYLLQRLTEKYGIDIEYHCKPLGDTDWNGSGMHCNFSTKYMREVGGKAYFEALMAQFEKNLMDHINVYGPDNDKRLTGKHETAPWNKFSYGVADRGASIRVPHSFVKNDYKGYLEDRRPNSQGYPYQNRS

SEQ ID NO: 11972 - protein, 290 aa, Bradyrhizobium elkanii
PLWGFDGSSTQQAEGHSSDCVLKPVACYPDAARENGVLVMCEVMMPDGKTPHPSNKRATILDDDGAWFGFEQEYFFYKDGRPLGFPEEGYPAPQGPYYTGVGYKNVGSVARKIVEEHLNLCLAAGINHEGINAEVAKGQWEFQIFGKGSKTAADQMWMARYLMLRLTESYGIDIEFHCKPLGDTDWNGSGMHANFSTKYMREVGGKEYFEKLMGAFEKNLMDHIAVYGPDNDKRLTGKHETAPWNKFSYGVADRGASIRVPHSFVNNGYKGYLEDRRPNSQGDPYQNRFA

SEQ ID NO: 11973 - protein, 291 aa, Bradyrhizobium japonicum
PLWGFDGSSTQQAEGHSSDCVLKPVAVFPDAARTNGVLVMCEVMMPDGKTPHASNKRATILDDAGAWFGFEQEYFFYKDGRPLGFPSSGYPAPQGPYYTGVGFSNVGDVARKIVEEHLDLCLAAGINHEGINAEVAKGQWEFQIFGKGSKKAADEMWMARYLMLRLTEKYGIDIEFHCKPLGDTDWNGSGMHANFSTEYMRTVGGKEYFEALMAAFDKNLMDHIAVYGPDNDKRLTGKHETAPWNKFSYGVADRGASIRVPHSFVNNGYKGYLEDRRPNSQGDPYEIGSQL

SEQ ID NO: 11974 - protein, 290 aa, Mesorhizobium huakuii
PLWGFDGSSTMQAEGRSSDCVLKPVALYPDPARTNGILVMCEVMMPDGVTPHESNSRATILDDEDAWFGFEQEYFFYKDGRPLGFPESGYPAPQGPYYTGVGYKNVGDVARKIVEEHLDQCLAAGINHEGINAEVAKGQWEFQIFGKGSKKAADQIWMARYLLLRLTETYGIDIEFHCKPLGDTDWNGSGMHCNFSTKFMREVGGKAYFEALMAQFDKNLMDHIVVYGPDNDKRLTGKHETAPWNKFSYGVADRGASIRVPHSFVKNDYKGYLEDRRPNSQGDPYQIVRI

SEQ ID NO: 11975 - protein, 290 aa, Rhizobium leguminosarum
LPLWGFDGSSTQQAEGRSSDCVLKPVAIYPDPARTNGALVMCEVMMPDGVTPHASNARATILDDEDAWFGFEQEYFFYQNGRPLGFPEQGYPAPQGPYYTGVGYSNVGDVAREIVEEHLDLCLAAGINHEGINAEVAKGQWEFQIFGKGSKKAADQIWMARYLLQRLTEKYGIDIEYHCKPLGDTDWNGSGMHCNFSTKYMREVGGKAYFEALMAQFEKNLMDHINVYGPDNDKRLTGKHETAPWNKFSYGVADRGASIRVPHSFIKNDYKGYLEDRRPNSQGYPYRIVR

SEQ ID NO: 11976 - protein, 291 aa, Bradyrhizobium yuanmingense
PLWGFDGSSTQQAEGHSSDCVLKPVAVFPDGARTNGVLVMCEVMMPDGKTPHPSNKRATILDDSGAWFGFEQEYFFYKDGRPLGFPTAGYPAPQGPYYTGVGYSNVGDVARKIVEEHLDLCLAAGINHEGINAEVAKGQWEFQIFGKGSKTAADQMWMARYLMLRLTEKYGIDIEFHCKPLGDTDWNGSGMHANFSTAYMREVGGKEYFEALMAAFEKNLMDHIAVYGPDNDKRLTGKHETAPCNKFSYGVADRGASIRVPHSFVNNGYKGYLEDRRPNSQGDPLLDRCSI

SEQ ID NO: 11977 - protein, 289 aa, Rhizobium tropici
PLWGFDGSSTMQAEGRSSDCVLKPVAIYPDPARTNGALVMCEVMMPDGVTPHESNSRATILDDEDAWFGFEQEYFFYKDGRPLGFPEAGYPAPQGPYYTGVGYKNVGDVAREIVEEHLDLCLEAGINHEGINAEVAKGQWEFQIFGKGSKKAADQIWMARYLLLRLCEKYGIDIEFHCKPLGDTDWNGSGMHCNFSTKFMREVGGKAYFEALMAQFDKNLEAHIAVYGPDNHMRLTGKHETAPWNKFSYGVADRGASIRVPHSFIKNDYKGYLEDRRPNSQGDPYQIRH

SEQ ID NO: 11978 - protein, 290 aa, Bradyrhizobium elkanii
LPLWGFDGSSTQQAEGHSSDCVLKPVACYPDAARENGVLVMCEVMMPDGKTPHVSNNRATILDDEGAWFGFEQEYFFYKDGRPLGFPTDGYPAPQGPYYTGVGYSNVGSVARKIVEEHLNLCLAAGINHEGINAEVAKGQWEFQIFGKGSKTAADQMWMARYLMLRLTESYGIDIEFHCKPLGDTDWNGSGMHANFSTKYMREVGGKEYFESLMKAFDKNLMDHIAVYGPDNDKRLTGKHETAPWNKFSYGVADRGASIRVPHSFVNNGYKGYLEDRRPNSQGDPYRAVR

SEQ ID NO: 11979 - protein, 290 aa, Rhizobium leguminosarum
PLWGFDGSSTQQAEGRSSDCVLKPVAIYPDPARTNGALVMCEVMMPDGVTPHASNARATILDDEDAWFGFEQEYFFYQNGRPLGFPEQGYPAPQGPYYTGVGYSNVGDVAREIVEEHLDLCLAAGINHEGINAEVAKGQWEFQIFGKGSKKAADQIWMARYLLQRLTEKYGIDIEYHCKPLGDTDWNGSGMHCNFSTKYMREIGGKAYFEALMAQFEKNLMDHINVYGPDNDKRLTGKHETAPWNKFSYGVADRGASIRVPHSFVKNDYKGYLEDRRPNSQGYPYQMRLA

SEQ ID NO: 11980 - protein, 290 aa, Bradyrhizobium liaoningense
SLWGFDGSSTQQAEGHSSDCVLKPVAVFPDAARTNGVLVMCEVMMPDGKTPHPSNKRATILDDAGAWFGFEQEYFFYKDGRPLGFPASGYPAPQGPYYTGVGYSNVGDVARKIVEEHLDLCLAAGINHEGINAEVAKGQWEFQIFGKGSKKAADEMWMARYLMLRLTEKYGIDIEFHCKPLGDTDWNGSGMHANFSTEYMRTVGGKEYFEALMAAFDKNLMDHIAVYGPDNDKRLTGKHETAPWNKFSYGVADRGASIRVPHSFVNNGYKGYLEDRRPNSQGDPYQDRSQ

SEQ ID NO: 11981 - protein, 193 aa, Rhizobium gallicum
QLPLWGFDGSSTMQAEGRSSDCVLKPVAVYPDPARTNGALVMCEVMMPDGVTPHPSNSRATILDDEDAWFGFEQEYFFYENGRPLGFPEQGYPAPQGPYYTGVGYKNVGSVAREIVEEHLDLCLAAGINHEGINAEVAKGQWEFQIFGKGSKRAADQIWMARYLLLRLCEKYGIDIEFHCKPLGDTDWKRSGI

SEQ ID NO: 11982 - protein, 289 aa, Rhizobium leguminosarum
GKHPPRTLDGVPTVEQLPFWGDVSSTQQAEGRSSDCVLKPVAIYPDPARTNGALVMCEVMMPDGVTPHASNARATILDDEDAWFGFEQEYFFYQNGRPLGFPEQGYPAPQGPYYTGVGYSNVGDVAREIVEEHLDLCLAAGINHEGINAEVAKGQWEFQIFGKGSKKAADQIWMARYLLQRLTEKYGIDIEYHCKPLGDTDWNGSGMHCNFSTKYMREVGGKAYFEALMAQFEKNLMDHINVYGPDNDKRLTGKHETAPWNKFSYGVADRGASIRVPHSFVKNDYKGYL

SEQ ID NO: 11983 - protein, 288 aa, Rhizobium leguminosarum
PTSITFDEFPTLEQLPLWGFDGSSTQQAEGRSSDCVLKPVAIYPDPARTNGALVMCEVMMPDGVTPHASNARATILDDEDAWFGFEQEYFFYQNGRPLGFPEQGYPAPQGPYYTGVGYSNVGDVAREIVEEHLDLCLAAGINHEGINAEVAKGQWEFQIFGKGSKKAADQIWMARYLLQRLTEKYGIDIEYHCKPLGDTDWNGSGMHCNFSTKYMREVGGKAYFEALMAQFDKNLMDHIDVYGPDNDKRLTGKHETAPWNKFSYGVADRGASIRVPHSFVKNDYKGYL

SEQ ID NO: 11984 - protein, 290 aa, Rhizobium leguminosarum
YTREGSRFDVFPTLEQLPLWGFDGSSTQQAEGRSSDCVLKPVAIYPDPARTNGALVMCEVMMPDGVTPHASNARATILDDEDAWFGFEQEYFFYQNGRPLGFPEQGYPAPQGPYYTGVGYSNVGDVAREIVEEHLDLCLAAGINHEGINAEVAKGQWEFQIFGKGSKKAADQIWMARYLLQRLTEKYGIDIEYHCKPLGDTDWNGSGMHCNFSTKYMREVGGKVYFEALMAQFDKNLMEHIDVYGPDNDKRLTGKHETAPWNKFSYGVADRGASIRVPHSFVKNDYKGYL

SEQ ID NO: 11985 - protein, 115 aa, Paeonia suffruticosa
MHANTGHGNKGVVDKINEKIPGGGHNATSGAGHHQVGPMGKIKAMIPGGGHNTTTTTGTHHTGTHGTGHQVGMVDKIKQKIPGVGHNTTTTHVGGHGGEKKGMAEKIKEKLPGGH

SEQ ID NO: 11986 - protein, 89 aa, Paeonia suffruticosa
MSYQGKGIMERIKDMMPGGGRKTTTTTSTTYGTGEKKGLMQKIKEMMPGGGGHNTTATGGYDTHHSSTATYGQKKGMMQKIKEKLPGGH

SEQ ID NO: 11987 - protein, 286 aa, Bradyrhizobium elkanii
LDASLWGFDGSSTQQAEGHSSDCVLKPVACYPDAARENGVLVMCEVMMPDGKTPHPSNKRATILDDDGAWFGFEQEYFFYKDGRPLGFPEEGYPAPQGPYYTGVGYKNVGSVARKIVEEHLNLCLAAGINHEGINAEVAKGQWEFQIFGKGSKTAADQMWMARYLMLRLTESYGIDIEFHCKPLGDTDWNGSGMHANFSTKYMREVGGKEYFEKLMGAFEKNLMDHIAVYGPDNDKRLTGKHETAPWNKFSYGVADRGASIRVPHSFVNNGYRVIWKTAARTRKAP

SEQ ID NO: 11988 - protein, 286 aa, Bradyrhizobium elkanii
LPLWGFDGSSTQQAEGHSSDCVLKPVACYPDAARENGVLVMCEVMMPDGKTPHPSNKRATILDDDGAWFGFEQEYFFYKDGRPLGFPEEGYPAPQGPYYTGVGYKNVGSVARKIVEEHLNLCLAAGINHEGINAEVAKGQWEFQIFGKGSKTAADQMWMARYLMLRLTESYGIDIEFHCKPLGDTDWNGSGMHANFSTKYMREVGGKEYFEKLMGAFEKNLMDHIAVYGPDNDKRLTGKHETAPWNKFSYGVADRGASIRVPHSFVNNGYKGYLEDRRPNSQGDPY

SEQ ID NO: 11989 - protein, 278 aa, Bradyrhizobium elkanii
  misc_feature (248)..(248): Xaa can be any naturally occurring amino acid
  unsure (1)..(278): unsure at all Xaa locations
FDGSSTQQAEGHSSDCVLKPVACYPDAARENGVLVMCEVMMPDGKTPHPSNKRATILDDDGAWFGFEQEYFFYKDGRPLGFPEEGYPAPQGPYYTGVGYKNVGSVARKIVEEHLNLCLAAGINHEGINAEVAKGQWEFQIFGKGSKTAADQMWMARYLMLRLTESYGIDIEFHCKPLGDTDWNGSGMHANFSTKYMREVGGKEYFEKLMGAFEKNLMDHIAVYGPDNDKRLTGKHETAPWNKFSYGVXDRGASIRVPHSFVNNGYKGYLEDRRPNSQG

SEQ ID NO: 11990 - protein, 289 aa, Sinorhizobium meliloti
LEAASLWGFDGSSTQQAEGRSSDCVLKPVAVYPDPVRTNGALVMCEVMMPDGKTPHPSNTRATVLDDESAWFGFEQEYFFYKNGRPLGFPEQGYPAPQGPYYTGVGYKNVGDIARQIVEEHLDICLAAGINHEGINAEVAKGQWEFQVFGKGSKKAADEVWLARYLLLRLTEKYGIDVEFHCKPLGDTDWNGSGMHANFSTAYLREVGGKDYFEALMAAFEKNLHDHINVYGPDNHLRLTGKHETAPWDKFSYGVADRGASIRVPHSFVNNGYRGYLEDRRPNSQGDPY

SEQ ID NO: 11991 - protein, 288 aa, Sinorhizobium meliloti
LEQLPLWGFDGSSTQQAEGRSSDCVLKPVAVYPDPVRTNGALVMCEVMMPDGKTPHPSNTRATVLDDESAWFGFEQEYFFYKNGRPLGFPEQGYPAPQGPYYTGVGYKNVGDIARQIVEEHLDICLAAGINHEGINAEVAKGQWEFQVFGKGSKKAADEVWLARYLLLRLTEKYGIDVEFHCKPLGDTDWNGSGMHANFSTAYLREVGGKDYFEALMAAFEKNLHDHINVYGPDNHLRLTGKHETAPWDKFSYGVADRGASIRVPHSFVNNGYRGYLEDRRPNSQGDP

SEQ ID NO: 11992 - protein, 273 aa, Sinorhizobium meliloti
PLWGFDGSSTQQAEGRSSDCVLKPVAVYPDPVRTNGALVMCEVMMPDGKTPHPSNTRATVLDDESAWFGFEQEYFFYKNGRPLGFPEQGYPAPQGPYYTGVGYKNVGDIARQIVEEHLDICLAAGINHEGINAEVAKGQWEFQVFGKGSKKAADEVWLARYLLLRLTEKYGIDVEFHCKPLGDTDWNGSGMHANFSTAYLREVGGKDYFEALMAAFEKNLHDHINVYGPDNHLRLTGKHETAPWDKFSYGVADRGASIRVPHSFVNNGYRGYL

SEQ ID NO: 11993 - protein, 245 aa, Mesorhizobium septentrionale
DADGVTPHASNARATILDDEDAWFGFEQEYFFYQNGRPLGFPEQGYPAPQGPYYTGVGYSNVGDVAREIVEEHLDLCLAAGINHEGINAEVAKGQWEFQIFGKGSKKAADQIWMARYLLQRLTEKYGIDIEYHCKPLGDTDWNGSGMHCNFSTKYMREVGGKAYFEALMAQFEKNLMDHIAVYGPDNDKRLTGKHETAPWNKFSYGVADRGASIRVPHSFVKNDYKGYLEDRRPNSQGYPYQNRS

SEQ ID NO: 11994 - protein, 291 aa, Mesorhizobium septentrionale
IPLWGFDGSSTMQAEGRSSDCVLKPVAIYPDPARTNGALVMCEVMMPDGVTPHESNSRATILDDEDAWFGFEQEYFFYQDGRPLGFPESGYPAPQGPYYTGVGYKNVGDVAREIVEEHLDLCLEAGINHEGINAEVAKGQWEFQIFGKGSKKAADQIWMARYLLLRLCEKYGIDIEFHCKPLGDTDWNGSGMHCNFSTKFMREVGGKDYFEALMAHFDKNLDDHIAVYGPDNHLRLTGKHETAPWNKFSYGVADRGASIRVPHSFIKNDYKGYLEDRRPNSQGDPYQNRSA

SEQ ID NO: 11995 - protein, 315 aa, Brassica napus
MISLTVTTPSLRMETEDMHSKSESGNQIVSEAHHHTSSTSINSLNPWLRAAASCNANSSVEEAGDKSIALENQTNLESSNGSKSPSNRDENGNKESQVTASPQQSAADYSEKSQELVHPGSTPPPHPQLVSHTVGWASSNPYQDSYYAGMMGAYPLTYVPHGGMPHSRMQLPPEMAQEPVYVNAKQYQAIMRRRQARAKAELEKKLIKSRKRYLHESRHQHAMRRPRGTGGRFAKKTNTEASQQKDGEKRNACATQSPTSSHSDQHEGCSDEYRTNQSDEMQSSAYKIREEADCSGQQWNNISSNHPSQPLLAIK

SEQ ID NO: 11996 - protein, 574 aa, Aspergillus fumigatus
MANPPHGGVLRTLLARDAPRHDELEMEAEKLPAIVLTERQLCDLELIMNGGFSPLEGFMNQKDYDSVCENVRLADGNLFSMPITLDVSQAVIDEGKLKPGSRVTLRDFRDDRNLAILTIDDIYRPDKAKEAKLVFGGDEEHPAIKYLYNKVQEFYVGGKIEAINKLNHYDYVALRYTPAELRVHFDKLAWNRVVAFQTRNPMHKAHRELTVRAARARQANVLIHPVVGLNKPGDIDHFTRVRAYQALLPRYPNGMAVLGLLGLAMRMGGPREAIWHAIIRKNHGATHFIVGRDHAGPGKNSKGQEFYGPYDAQHAVEKYREELGIEVVEFQQVTYLPDTDEYKPKDEVPPGVKTLDISGTELRNRLRTGAPIPEWFSYPEVVKILRESSPPRHTQGFNIFLTGYMNSGKDAIARALQVTLNQQGGRSVSLLLGDTVRHELSSELGFSREDRHTNIQRIAFVAGELTRAGAAVIASPIAPYEESRNAARDAVTQAGGNFFLVHVATPLEYCEKTDKRGIYAKARRGEIKGFTGVDDPYETPSKADLTVDVSKQTVRSIVHEIVLMLETEGFFDRS

SEQ ID NO: 11997 - protein, 399 aa, Streptomyces collinus
  misc_feature (380)..(380): Xaa can be any naturally occurring amino acid
  unsure (1)..(399): unsure at all Xaa locations
MSSGTTSSVIVAGARTPMGRLLGSLKSFSGADLGGFAIKAALDRAGIGGDQVQYVIMGQVLQAGAGQIPARQAAVKAGIPMNVPALTINKVCLSGLDAIALADQLIRAGEFDIVVAGGQESMTNAPHLLPKSREGYKYGAVEMLDAMAHDGLTDSFEGVAMGESTEKHNTRLGIKRPEQDEIAALSHQRAAAAQKNGLFEAEITPVEIPQRKGDPVLFSKDEGIRGDTTVESLAKLRPAFAKDGTITAGTSSQISDGAAAVVVMSKAKAEELGLTWLAEIGAHGNVAGPDNSLQSQPSNAIQHALKKEGLDVSDLDLIEINEAFAAVAVQSMKDLGVSTEKVNVNGGAIALGHPIGMSGARIVLHLALELKRRGGGVGAXALCGGGGQGDALIVRVPKA

SEQ ID NO: 11998 - protein, 200 aa, Catharanthus roseus
MSEEIISVSDRFLLSLIEEHLLSDNSDDSSSELTSTEENWEEIFADFLNWSGSEIQKRGSPSSESCQSNSMAESCQEDSVVGTPPEAAAGGGCSKDWNRYKGVRRRPWGKFAAEIRDPKKKGSRIWLGTYETPEDAALAYDAAAFNMRGAKARLNFPHLIGSNISGPVRVNPRKRFPAEPSTTSSSSSSENSGGRKKRRY

SEQ ID NO: 11999 - protein, 139 aa, Nocardioides sp. JS614
MLRTMMKSKIHRATVTQADLHYVGSVTVDEDLLDAADLLPGELVHIVDIDNGARLETYTIAGERGSGVIGINGAAARLVHPGDLVILIAYGQMEDVEAKGFEPHVVFVDADNRVVSTGSDPADAPAGSGLLRGDRPAGR

SEQ ID NO: 12000 - protein, 515 aa, uncultured bacterium
MANQFERLKSEKDGLAVKAELEAFARMGWENIPEDDRDHRLKWLGIFFRKRTPGQFMLRLRLPNGILTSGQMRMLGAIIHPYGEQGVADITTRQNLQLRGIPIEEMPQILGYLKEVGLTSIQSGMDNVRNITGSPLAGIDPDELIDVRGLTRKVQDMITNNGEGNPSFSNLPRKFNIAICGCRDNSVHAEINDLAFVPAFKNGRLGFNVLVGGFFSARRCAEAIGLDVWVDPRDVVPLCEAVLLVYRDHGLRANRQKARLMWLIDEWGLEKFRAAVERQIGHPLPRAAEKDEVVWHKRDLLGVHAQKQPGLNFVGLHVPVGRLNALEMMELARLAEVYGSGELRLTVEQNVLIPNVPDSRVAPLLKEPLLKKFSPNPGPLQRGLVSCTGNQFCNFALIETKNRAVALMEELEAELEIPQTVRIHWTGCPNSCGQPQVADIGLMGTTARKDGRVVEAVDIYMGGEVGKDAKLGECVRKGIPCEDLKPVLVELLIEHFGAKPRQHPSAAQASVLVTR

SEQ ID NO: 12001 - protein, 440 aa, uncultured bacterium
MSKLFSTSSPVSRRQFLAGVAALTAGAATAGIPRAQSQSLGQGYWVAQADTPETTSAKLGFIALTDAAPLIIAKEKGFFAKYGMKDVEVVKQASWGTTRDNLVLGSAAGGIDGAHILTPMPYLITTGKVTDGKPVPMYILARLNLDGQCISISNQYRDLQIGLDSSPLKAKFAELRAAGKDPKCAMTFPGGTHDMWMRYWLAAGGIDPTSDVSIIVVPPPQMVANMKSRTMEAFCVGEPWNAQLVNQKEGYTALTTGELWNGHPEKAFALRADWVDAHPKATLALLKAVLEAQIWCDQMENKEEMCRIIGDRRWLGVPVPDILGRSRGTFDYGTGKVVENSPHLMKFWQNYASYPFKSHDLWFLTENIRWGYLPADTDTKALVERVNREELWREAAKAIGQGAAIPPSTSRGVETFFDGVQFDPENPAAYLEKLAIKKLA

SEQ ID NO: 12002 - protein, 153 aa, Cleome spinosa
MSLIPSFFGNRSSRIFDPFSLDMWDPLKDFPFPSSSLSRENSAIASARVDWRETAEAHVFKADLPGMKKEEVKVEIEDDSVLKISGERHVEEDKSDTWHRVERSSGKFSRRFRLPENVKMDQVRASMENGVLTVTVPKVETKNPDVKSIQISG

SEQ ID NO: 12003 - protein, 163 aa, Capsella rubella
MSMIPSFFNNNNNRRSNNFYDPFSLEAWDPFRELTLTTPSSSLLSRDNSAIVNARVDWRETPEAHVFKADLPGLKKEEVKVEIEEDKSVLKISGERHVEKEDKNDTWHRVERSSGQFTRRFRLPENVKMDQINAAMENGVLTVTVPKAETNKADVTRSIQITG

SEQ ID NO: 12004 - protein, 362 aa, Arabidopsis cebennensis
MSMIPSFFNNNRRGNNIFDPFSLDVWDPFKELTSSSLSRENSAIVNARVDWRETPEAHVFKADLPGLKKEEVKVEIEEDSVLKISGERHVEKEDKNDTWHRVERSSGQFTRRFRLPENVKMDQVNAAMENGVLTVTVPKAVTKKADVKSIQITEEVLVIGAHALSLFSLFSFTEAKVDLRQGSISLSGLAVDLRLLKVVAPKLSCGVVAKRVTALAIVFSSRSVPSLRFCSGGDDSYLIALRLESLTAEEVMELKDGSGSDPLSPSIWSLRPLIGFGSFLASLLGPFVVVAAWMEFSERLSTSVQGGCDGGVWRCYVHLRLPFVASMWLRGGSVRLLRFAVKIVSSVAPVGFSVGNRGGGLV

SEQ ID NO: 12005 - protein, 334 aa, Agrobacterium tumefaciens str. C58
MTHKKRPTVYITRKLPDVVETRMRELFDAELNIDDSPRSEEELVAAMQRVDVLVPTVTDRITAAMIEKAGPQLKLIASFSNGIDHVDVDAAARKGITVTNTPNVLTEDSADITMALVLAVPRRMIEGTRVLANGADEWLGWSPTWMLGRRISGKRIGIVGMGRIGTAVARRAKAFGLSIHYHNRKRVNPATEAELEATYWDSLDQMLARVDIVSVNCPSTPATYHLISARRLALMQPTSYIVNTARGDIIDEAAMIQCLREGKIAGAGLDVYENEPQVNPKLIKLAKEGKVVLLPHMGSATIEGRIEMGDKVIINIRTLFDGHRPPNRVLPGRN

SEQ ID NO: 12006 - protein, 633 aa, Agrobacterium tumefaciens str. C58
MAKVIGIDLGTTNSCVAVMDGKDTKVIENAEGARTTPSMVAFSDDGERLVGQPAKRQAVTNPTNTLFAVKRLIGRRYEDPTVEKDKALVPFEIVKGDNGDAWVKAQDKNYSPSQISAMILQKMKETAESYLGEKVEKAVITVPAYFNDAQRQATKDAGRIAGLDVLRIINEPTAAALAYGLDKKEGKTIAVYDLGGGTFDISVLEIGDGVFEVKSTNGDTFLGGEDFDMRLVEYLAGEFKKDQGIDLKNDKLALQRLKEAAEKAKIELSSSQQTEINLPFITADASGPKHLTLKLTRAKFESLVDDLVQRTVAPCKAALKDAGVTAAEIDEVVLVGGMSRMPKVQEVVKQLFGKEPHKGVNPDEVVAMGAAIQAGVLQGDVKDVLLLDVTPLSLGIETLGGVFTRLIDRNTTIPTKKSQTFSTAEDNQSAVTIRVSQGEREMAQDNKLLGQFDLVGLPPSPRGVPQIEVTFDIDANGIVQVSAKDKGTGKEQQIRIQASGGLSDADIEKMVKDAEANAEADKKRRAGVEAKNQAESLIHSTEKSVKEYGDKVSETDRKAIEDAIASLKTAVEAAEPDADDIQAKTQTLMEVSMKLGQAIYEAQQAEAGDASAEGKDDVVDADYEEIKDDKKSA

SEQ ID NO: 12007 - protein, 317 aa, Agrobacterium tumefaciens str. C58
MPAKTIDHAFTATTLTSAATDPTHAGVLSFMRRKYTKNLKGVSTAIWGIPFDAATSNRPGARFGPQAIRRASAIFDNDPQYPFARDLFAHMPTIDYGDCLLDYGNHWKTPDTIEKEARRIISKTDYLLTLGGDHFITWPLLKAHVAKHGRLALVQFDAHQDTWFDDGKRIDHGSFVARAVRDGLIDPDRSIQIGIRTHAPDDFGIRILHGYEVEDMRASDIASLIVKHTGGMPAYLTFDIDCLDPAFAPGTGTPVAGGPTSAKILSVLRGLGQLDIRGSDVVEVAPAYDHADITAIAGATVAMYMLGLRAERLAKAG

SEQ ID NO: 12008 - protein, 261 aa, Agrobacterium tumefaciens str. C58
MFSRRLLLAIAAVSVTLGFSPAAFADALGDISSRGTIRVAVPQDFPPFGSVGTDMAPQGYDIDVANLIGEKLGVKVELVPVTSANRVPYLQTNKVDLVISSLGKNPDREKVIDFSTAYAPFFNGVFAPDSVTVAKAEDLSGKTIGVTRGAVEDLELTKVAPADTTIKRYEDNNGTISAFLAGQVEAVATGNVVAAAILAKNPPKRPELKFLIKNSPCYIGLNKEQPALLEKVNAIIATAKTDGSLNTIAQKWLKTDLPKDL

SEQ ID NO: 12009 - protein, 556 aa, Agrobacterium tumefaciens str. C58
MYRYDEFDHAFVEGRVAQFRDQVERRLSGELAEDAFKPLRLMNGVYLQLHAYMLRVAIPYGTLNSQQMRMLAHIARKYDRGYGHFTTRQNIQYNWPRLSDTPDILSELASVEMHALQTSGNCIRNVTADHFAGAAADEVADPRPYAEILRQWSSVHPEFSFLPRKFKIAVTGAERDRAAIQVHDIGLHLKKNDKGEIGFAVYVGGGQGRTPMIAKKIRDFLPEEDLLSYTTAVMRVYNLHGRRDNKYKARIKILVHETGAEELARQVEVEFAELKNTELKLPDADIAAITAYFAPPALKDRPEGWESLARWKRADEGFARFVEQNVAPHKHPDYGMVTISLKPIGGIPGDATDEQMELVADIAAEYAFDEIRISHEQNIILPHVALADLEPVYRALVGAGLATANAGLITDIIACPGLDYCALANARSIPVAQEISTRFGAPERQAEIGELKIKISGCINACGHHHVGHIGLLGVEKKGAELYQITLGGSGDENTSIGEIIGRGFEPEKVTDAVETIVDTYLGLRLSKEETFLEAYRRVGPQPFKDALYGSAAEAA

SEQ ID NO: 12010 - protein, 393 aa, Agrobacterium tumefaciens str. C58
MPIKSVAIIGAGIAGLTAALAFARHGIDCDIIEQTGELAEVGAGLQLSPNAARILATLGVLPDIEARWTEPVSVDLASGKSLTTLLSLPMGAVARSRWGAPYGVLHRSTLQSALLQAVTRNPLCRLHLGKRIENATADVIAATTFRDHDLIVGADGVWSAARFSVPAAPTATFSGNVAWRFTVAAEEVPSAFNKTTVTAYLGSRGHIVAYPLKEVGGFNIVAIALGADPGATWRAESSGRQKALLLEQFRDFSPDIVRLLDSSENPTFWPLYQAGPGRWHNGRDTVLIGDAAHAMMPFAAQGAAMAIEDAFELAGTMAGSNGEKPLPVPQALAAFEALRLPRIEKARKRASLNRFAYHARGPVRIARDLVFSTRPPEAFLKDFDWLYGYHARG

SEQ ID NO: 12011 - protein, 251 aa, Agrobacterium tumefaciens str. C58
MLEIIDLHAKIADTETEIIKGLNLKVAAGEVAAIMGPNGSGKSTLSYILSGREDYEVTSGDILYNGESILELDAAERAAKGIFLAFQYPVEIPGVATMQFLKVAMNEQRKARGESELTTPDFIRRVKEAAGDLKIDMEMLKRPLNVGFSGGEKKRAEILQMALLEPKLCVLDETDSGLDIDALKIVADGVNALKSPDRATVVITHYQRLLDYIVPDSVHVLYKGKIIRSGDKALALELENNGYADIIGEAA

SEQ ID NO: 12012 - protein, 400 aa, Agrobacterium tumefaciens str. C58
MAFLADILSRVKPSATIAVTQKARELKAKGRDVISLGAGEPDFDTPDNIKEAAIDAIKRGETKYTPVSGIPELRKAIADKFKRENGLDYKPEQTIVGTGGKQILFNAFMATLNPGDEVVIPAPYWVSYPEMVAICGGTPVFVNATLEDNFKLKPEALEKAITPKTKWFVFNSPSNPSGAAYSHDELKALTDVLVKHPHVWVLTDDMYEHLTYGDFKFVTPVEVEPSLYDRTLTMNGVSKAYAMTGWRIGYAAGPLPLIKAMDMIQGQQTSGASSIAQWAAVEALNGTQDFIPENKKIFEGRRDLVVSMLNQAKGISCPSPEGAFYVYPSCAGLIGKTAPSGKVIETDTDFVSELLEAEGVAVVQGSAFGLGPNFRISYATSETLLEEACKRIQRFCADCR

SEQ ID NO: 12013 - protein, 71 aa, Agrobacterium tumefaciens str. C58
MAETGTVKFFNTDKGFGFIKPDNGGADIFVHISAVQASGLSGLSENQKVSFDTEPDRRGKGPKAVNLQIAG

SEQ ID NO: 12014 - protein, 210 aa, Agrobacterium tumefaciens str. C58
MTMTTLKGFTASDFRRRVLQEGEGVAERENGDHVLNPGVVLSGNGIRLKDAAVLIPVIDDGNDARVIFTQRTATLRQHSGQISFPGGGIDAEDRTPEEAALRETEEEIGLSRSFVETVGRLPDYISGTGFRIKPVLSVVRPGFDLTLNPTEVDEVFEVPLSFLMDPANHGRGSRIFQGKERFFYEMPYGERYIWGITAGIVRTIYERFYT

SEQ ID NO: 12015 - protein, 465 aa, Agrobacterium tumefaciens str. C58
MTNIASENAASSPSLMATAMKEGLIAGVISFGMFILYIGIITYQDINNQLIWGTRWGLLAIFVAVAAVGRFLVVGFIKPSLDRRKLSKAKSGVLEISEEKGFFHKHFLKFALVLLLLYPVIAVQLFGFQGSLKFVDNFGIQILIYVMLAWGLNIVVGLAGLLDLGYVAFYAVGAYSYALLSSQFGLSFWVLLPVAGILAGFWGVILGFPVLRLRGDYLAIVTLAFGEIIRLVLLNWTAVTKGTFGISGIAKASVFGIWSFDVGAPNNFAKVFGLSMSSAYYKIFLFYVILLLCMLTAYVTIKLRRMPIGRAWEALREDEIACRSLGIDTVITKLTAFATGAMFGGFAGSFFAARQGFVSPESFVFLESAVILAIVVLGGMGSLTGIAIAALVMVGGTELLREMEFLKHVFGPDFTPELYRMLLFGLAMVIVMLFKPRGFVGSREPTAFLRERKAVSGSFTKEGHG

SEQ ID NO: 12016 - protein, 524 aa, Agrobacterium tumefaciens str. C58
MRIGTPKELYEGEARVGMTPDSAQALQKLGYDCVIEAGAGKAAGFSDDAYRAAGVTVVDSADALFAGSDIIAKVRPPETSEIDRLSSDKTLISFFYPAQNKDLLEQAKEKGANVIAMDMVPRISRAQKMDALSSMANIAGYRAVIEAGNNFGRFFTGQVTAAGKVPPAKVLVIGAGVAGLAAIGTATSLGAITYAFDVRPEVAEQIESMGAEFVYLDFADQQQDGAATGGYAAPSSPEFREKQLEKFRELAPQIDIVITTALIPGRDAPKLWLADMVAAMKPGSVIIDLAAERGGNCDLTVPDQRIVSDNGVIVIGYTDFPSRMAAQASTLYSTNIRHMMTDLTPAKDGKPVHNMEDDVIRGATVTYQGEITFPPPPPKIQAIAAQKPKERVKELTPEEKHAKERAEFKAQTKSQVGLLVIGTAALLLVGLFAPASFMSHFIVFVLACFIGFQVIWNVSHSLHTPLMAVTNAISGIVIIGALLQIGSGNWLVVILASLSVLIATINIVGGFLVTRRMLAMFQKS

SEQ ID NO: 12017 - protein, 196 aa, Agrobacterium tumefaciens str. C58
MTKSLDDAALATLFTEARTHNGWTDKPIGDETLMALYDLTKMGPTSANCSPARFVFVRSQEAKEKLKPALSSGNLEKTMAAPVTVIAAIDSEFYEKLPELFPHADARSWFTSSPAVAEETAFRNATLQAGYLILAARALGLDTGAMSGFDKGKVDAAFFAGTTWKSNFLINLGYGDPSKLFGRLPRLGFEDACVLA

SEQ ID NO: 12018 - protein, 300 aa, Agrobacterium tumefaciens str. C58
MSVGGEEKKRSVAFIGTGLMGGPMARRLLGTGFSVKVWNRSVDKAQALVADGAVLAASPAEAARGADIVITMLSDGNAVGEVLFEAGVAEALAKGAVVIDSSSIAPPIAREHSSRLQAMGIHHVDAPVSGGVPGATAGTLAIMAGGDEALISGLVDVFAPMGRLTYVGPSGAGQLCKLANQQIVAITIGAVAEAMMLVEAGGASREGFRNAIRGGFAESRILELHGERMVKRNFVPGGPSKFQLKDLNGVLATAKDLALTLPLTQQVTREFDDFVGDGGADIDHSGILLYLEKLNNREQG

SEQ ID NO: 12019 - protein, 393 aa, Agrobacterium tumefaciens str. C58
MTLPSIVIASAARTAVGSFNGHFANTPAHELGATVISAVLERAGVAANEVDEVILGQVLMAGEGQNPARQAAMKAGIPQEATAFGINQLCGSGLRAVALGMQQIVTGDAAIIIAGGQESMSMAPHCAHLRGGVKMGDFKMIDTMMKDGLTDAFYGYPMGITAENIARQWQLSRDEQDQFAVASQNKAEAAQNAGRFTDEIVAFTVKGRKADIVIDADEHIRHGASLETMAKLRPAFDKEGTVTAGNASGLNDGAAATLLMSEQQAAKRGIKPLARIASWATAGVDPQIMGTGPIPASRKALAKAGWSINDIGLVEANEAFAAQSCAVVRELGLNPDIVNVNGGAIAIGHPIGASGARVLNTLIFEMRRRNVSRGLATLCIGGGMGVAMCIEAL

SEQ ID NO: 12020 - protein, 104 aa, Agrobacterium tumefaciens str. C58
MFAVIKTGGKQYRVAADAVLTIEKLEAEAGATVEFTEVLVIGEGADAQFGAPFVKGAIVKAEVVEHNRGKKVIAFKKRRRQNSKRSRGHRQHHTVVRITDIVAA

SEQ ID NO: 12021 - protein, 311 aa, Agrobacterium tumefaciens str. C58
MTAEIVQLCPLIPALEEELAQRFTVHRLFEAADKAAFLSEKGAAIRGVVTGGHIGLPADVGAALPNLEIVAINGVGFDKVDLGEAKRRGFRVSNTPDVLTADVADLALGLVLAQARKVPQADQHVRTGQWLKGDMGLSTRVAGRRYGIFGLGRIGQAIAKRLEGFDARISYTARNRRDVAYDYHDSIEELAANCDVLIIAAAATAETRHIVNADVLKALGPQGVLVNVARGSLVDEKALVEALSSGMIGGAALDVFEDEPRVPEALFAFENVTLAPHIGSGTHQTRRAMADLVLANLDAHFAGRELPTPVV

SEQ ID NO: 12022 - protein, 587 aa, Agrobacterium tumefaciens str. C58
MIGSFLSPDDKKLLTRLFKENFKKHVGWYSAAIVAMLLVAGTTSLSAWIMRDIVNSVYLKQGFDVVLEIAFAVAAIFIVKGLATFVQSYYLSKAGNSIVAEQQRKIYDRLLKQGVSFFQNLPSSELLVRVTYNAQAARSVIDTIVTSFVRDLFSLLGLIIVMFAQNFLLSAISMIIGPVAIFSVRLVLRRVRKIMEAELASLGEIVNVVQETSIGVRVIKAFSLEKLMRQRMNKAVSDVEHRANGIAKLEAATSPIMETLSGLAIAVVIAVSGYTVLEKGGSPGDLMAFITALLLAYEPAKRLARMRVQIEGGMIGVRMMFEVLDAPLTLAEKKDAQPLPKASGNVELKNVSFEYVANQPVLKDVSVLFEGGKMTALVGPSGSGKSTIINLMMRLYDPQSGSVEINGMDLRDVSFASLREHVSYVGQETFLFSGTVKHNISVGRDNATDEEIIAAAKAANAHDFIMNMPDGYDSKLGENGSGLSGGQRQRVAIARAMLRDADILILDEATSALDSESEALVRDALERLTLNKTSIVIAHRLSTINRADKIVVMDNGQVVEQGSRRELLATDGLYKRLHSIQFDADVA

SEQ ID NO: 12023 - protein, 320 aa, Agrobacterium tumefaciens str. C58
MSDKKAVVLVPGKINPRVLERLECKVEIVAVPAGAEPVLPEGAAERINAIAVSGVVNAKWIDALPKLEIIANFGVGYDGVDAKHAATRGIVVTNTPDVLNDEVADTTIALLINTVRRLYQAETWLRDGKWVGEGPFALSPFSLRGRKVGLFGMGRIGQEIAKRLEPFKVEIGYHTRSKRDELSYTYYGSLKEMAEAVDILICIVPGTPETHKAINADILAALGAQGVFINVGRGSSVDEDALLQALQSGALGAAGLDVFYAEPKVPEAFLALPNVSLLPHVASASVPTRNAMADLVADNILGWFRDGKVLTPVPETPVKG

SEQ ID NO: 12024 - protein, 330 aa, Gossypium hirsutum
MAKCSVLLFLCLVMVSINVANTMNETCVDDISIVLQIDLYKNSCPEAESIIYSWVENAVSQDSRMAASLLRLHFHDCFVNGCDGSVLLDDTEDFTGEKTALPNLNSLRGFEVIDAIKSELESVCPQTVSCADILATAARDSVVISGGPSWEVEMGRKDSLGASKEAATNNIPGPNSTVPMLVAKFQNVGLSFNDMIALSGAHTLGMARCSTFSSRLQGSNGPDINLDFLQNLQQLCSQTDGNSRLARLDLVSPATFDNQYYINLLSGEGLLPSDQALVTDDYQTRQLVLSYAEDPLAFFEDFKNSMLKMGSLGVLTGTDGQIRGNCRVVN

SEQ ID NO: 12025 - protein, 330 aa, Gossypium hirsutum
MAKCFVLLFLCLVMVSINVANTMNETCVDDISIVLQIDLYKNSCPEAESIIYSWVENAVSQDSRMAASLLRLHFHDCFVNGCDGSVLLDDTEDFTGEKTALPNLNSLRGFEVIDAIKSELESVCPQTVSCADILATAARDSVVISGGPSWEVEMGRKDSLGASKEAATNNIPGPNSTVPMLVAKFQNVGLSFNDMIALSGAHTLGMARCSTFSSRLQGSNGPDINLDFLQNLQQLCSQTDGNSRLARLDLVSPATFDNQYYINLLSGEGLLPSDQALVTDDYQTRQLVLSYAEDPLAFFEDFKNSMLKMGSLGVLTGTDGQIRGNCRVVN

SEQ ID NO: 12026 - protein, 337 aa, Agrobacterium tumefaciens str. C58
MRIVVYSAKPYDRQFLDEAARPGTDLQYCEARLSPETVALADGAVAICAFVNDDLSRPVLEKLAGMGVRLVALRCAGFNQVDLAAAEKLGLTIARVPAYSPYAVAEHTMALILSLNRKIHRAYNRVREGNFALDGLLGFDLHGKTMGIVGTGKIGAIFARIAAGFGCRLIGHDLHPNPDCEALGMTYGTREELFRTSDIVALMCPLTRETRHLIRRETLPLLKKGVMLINTSRGAIIDTPAAITGLKDGTIGSLGIDVYEEEADLFFEDLSNDVLRDDVFARLLTFPNVLVTGHQGFFTQEALKNIADTTIGNIESFVDTGKALHAVSTEQLAGAVS

SEQ ID NO: 12027 - protein, 485 aa, Agrobacterium tumefaciens str. C58
MHSGKTAPAEREVFVEEDLGYHKALKPRQIQMIAIGGAIGTGLFLGAGGRLAQAGPALVFVYALCGFFAFLVLRALGELIMHRPSSGSFVSYAREFYGEKMAFAAGWMYWLNWAMTSVADVTAVALYMNFFKQYVPWLAGIDQWVFAMTALVVVLAMNMLSVKVFGELEFWFSLIKVLALAIFLVVGVYFVIFGTPIEGHVTGFSLITDNGGFFPNGILPAFVIIQGVVFAYASIELIGTAAGETEDPRKVMPRAIRAVVLRLVVFYVGSVLLFTLLLPYTAYKAGESPFVTFFGSIGVEGADVIMNLVVLTAVLSSLNAGLYSTGRILHSMAVSGSAPAALAKMNKNGVPYGGIAVTAVVTVLGVALNAVVPSSAFEIALNLSALGIICAWAVIVLCQLKLWQLSQRGEIVRPDFRMFGAPYTGILTLIFLFGVLVLMAFDYPVGSWTIASLIVIIPALVIGWYLLRDRIYRLAAERAGSGVSH

SEQ ID NO: 12028 - protein, 331 aa, Agrobacterium tumefaciens str. C58
MITRAVKLVEDNAIESAVRTISMERAGLAALEDALRNGLSEPFCKAIETIGQSNGRLIITGVGKSGHIGAKLAATFASTGTPAFFVHAAEANHGDLGMIGGDDVVLAISKGGESAELRSIINYSRRFSIPLIALTCSENSSLARASDIVLLVPNEQEACPLGLAPTTSTLMQLALGDALAVALLEARNFTAGDFKVFHPGGKLGASLTLVSDIMHTGDRVPLVNKGTAMPEAVGVLSRKHFGCVGILDEDGRLCGIVTEGDMARNLSRNLAELVVDDIMTRSPKTVKKSVLATSALATLEKFHIGALIVVDDDNRPIGLVHFHDLLRIGVA

SEQ ID NO: 12029 - protein, 599 aa, Agrobacterium tumefaciens str. C58
MADIDEQKAAKQRSLKPLLGLFPYLRRYRGLMAAALFALVLSSATTLALPLAVRRIIDHGFQTPDGGMINSYFAMLLAIAVVLALASAMRYYYVMTIGERVVADLRRDVFAHLTTLSQQFFDSNRSGELTSRLTADTVQIRSAFGSSASVALRNIIMCCGAVAMMIYTSPGLSGLALLAIPFIVFPLIAFGRSVRARSRTTQDTLANSAAYASETIAASRTVQSFNAEVLANARYGASVEAAYQGARAAIGARSVLTAVAIALVFGSVVGILWYGAQNVLAGSMTAGTLGQFVLYSVIAASGLGQLSEVWGELAQAGGAAERLSELLNERSPVAEPAAPVAMPQPPRGEAEFDNVDFVYPLATGRPIVSGLSLKVAAGETVAIVGPSGAGKSTVFSLLMRFYDPQQGRITIDGVDIRNVSLADLRARLSIVPQDVAIFASSIHDNIAFGRPEATREDVRAAAIAAQADGFIERLGDGYDTQVGERGVTLSGGQRQRIAIARAILRDAPILLLDEATSALDAESETLVQKALDELMKTRTTIVIAHRLATVLKADRILVMDEGRIIEEGTHQSLIRQNGLYARLARLQFQTGPDELRAQA

SEQ ID NO: 12030 - protein, 531 aa, Agrobacterium tumefaciens str. C58
MAPRVLVSDELSETAVQIFRDRGVEVDFQPKLGKDKDKLAEIIGNYDGLAIRSATKATEKLIEAATNLKVIGRAGIGVDNVDIPAASRRGIIVMNTPFGNSITTAEHAIALMFAVARQLPAADSSTQAGKWEKSKFMGVEITGKTLGVIGAGNIGGIVCSRALGLKMHVLAYDPFLSPERAQEMGVTKVELDELLAQADFITLHVPMTDKTRGILNAENLAKTKKGVRIVNCARGGLVDEAALAEAIKSGHVAGAGFDVFEVEPATESPLFGLPNVVCTPHLGASTTEAQENVALQVAEQMSDYLVKGAVSNAINMPSITAEEAPRLKPFIRLADVLGSFVGQVQESATKEIEILYDGATANMNTKALTSALLAGLIRSQVADVNMVSAPVMIKEKGIILSEVKRDKTGVYDGYIKLTVKTENQIRSVAGTVFSDGKPRFIQIKNINMDADVGSHMIYITNTDVPGMIGFMGTTLGEAGVNIANFQLGREKEAGDAIALLYVDGPVSEEVLDKLRANSAIRQVKPLTFNVD

SEQ ID NO: 12031 - protein, 155 aa, Agrobacterium tumefaciens str. C58
MIRIVRAELHGITVTGADLDYHGSITLDPEHCDLAGIRPLEFVDIWNKQSGARISTYVIFGEAGSKCCILNGAAARTCQRGDQVIICSSSYVEETALYDTAPMVLTFTPKNDVKDVLRYRVKETARRPFDFFIETLPRAENSDVDDGSAADRAIA

SEQ ID NO: 12032 - protein, 762 aa, Agrobacterium tumefaciens str. C58
MSDTTKTASTRTSVTDQEALDFHAQGRPGKLEITPTKPMATQRDLSLAYSPGVAVPVKAIAENPATAYDYTTRGNMVAVISNGTAILGLGNLGALASKPVMEGKSVLFKRFADVDSIDLEVDTEDADEFINCVRYLGPSFGGINLEDIKAPECFIIESRLRELMDIPVFHDDQHGTAIIAAAGLINAIELTGRDFKTTKLVCNGAGAAAIACMDLIKAMGFNPENITLCDTKGVIYQGRTEGMNQWKSAHAVKTDRRTLTEAMNGADVVFGLSQKGAFTEEMIRSMAPKPIIFAMANPDPEITPEEVSRIRDDAIMATGRSDYPNQVNNVLGFPYIFRGALDVRARQINDAMKIAAAQALADLAREDVPDDVAAAYQGNRPRFGSQYIIPVPFDPRLISAIPVAVAKAAIETGVAQREIPDLDAYARELSARRDPMASTTQRLYERVRRSPKRVVFAEAEEEQVMRAAISFTAQGLGTAILLGRDDIIKANAERAGIDLDRANIEITNARLSSRVDAYVDYLYARLQRGGFLLRDVQRLIHNDRNHFAACMVAMGDADAVVTGVTRNYSTALEDIRRCINTKPGHRVIGVSLVVSRNRTVFVADTAVHDMPNAEDLADIAEEAAHLARRFGYEPRVAMLAYSTFGQPVGERSDKVREAVKILDKRNVNFEVDGEMSADVALNHQRMQSQYPFARLSGAANVLVMPAIHSASISTKMLQELGGATVIGPLLVGLDKSVQITSMGAKDSDIVNMAAIAAYNAGR

SEQ ID NO: 12033 - protein, 297 aa, Agrobacterium tumefaciens str. C58
MRLSVFCLFLTCFAPVTPLQAADEGDTLQQIAKTAKIRIGYREAEPPFSYQLPNGEITGFSTDLCRAISEDIRSKLKLDKIELEYVKATPATRFILVRSGQIDIECAATTNNSERRKIVDFSYPNFMTATQFLSRKQDNLKSLADLAGRSVTSASGTVNIEQLNAVNRAKNLNISVMPTKTNEEAFDLVVAGKASAFVMDGILLAALAATSENPDLYALSEETLSAPEPYGLVFRRNDPAFKAAVNDSLRHMYTSSTIHGLYEKWFTKPIPPNGMNLNLPMAASLKQAYDHPSEYQD

SEQ ID NO: 12034 - protein, 857 aa, Rickettsia conorii str. Malish 7
MNIDKFTAHAKSVIASSQLLAAKNDHQQILPLHLLSSLLSEETGIIQTLINNTGGNINLLKDQVQLELNKIPKVQVEGGGQVYSSAEALKVLEKASSIAKDNGDSFVTIERIFEALTYDNTIAGKILTNNGINNKKIATAILQFRKGKKADTESAENSYDALKKYGRDVTELAESGKLDPIIGRDEEIRRTVQVLSRRMKNNPVLIGEPGVGKTAIIEGLAQRIFSKDVPESLINCRIIELDMGALIAGAKYRGEFEERLKAVLSEIKESSGEIILFIDELHLLVGTGKTDGAMDASNLLKPMLARGELHCIGATTLDEYRKYIEKDAALARRFQPVYVSEPTVEDTISILRGIKEKYELHHAVRISDSAIVAAATLSNRYITDRYLPDKAIDLIDEACSRMKIELSSKPEELDELDRRIIQIKIELAALKKENDEHSKKKIEHLTTALEKLESQSYDMGAKWQAEKSKLQQTQKLKEELDRSRNELERAERDANLAKASELKYGIIPEIMKKLQEAESMDNKGLLKEIVSESDIASIISRITGIPIDTMLSSERERLLVMEQKLRESVIGQDKAIKGVSDAVRRSRAGIQDINRPLGSFLFLGPTGVGKTELTKALAGFLFDDRNAILRIDMSEYMEKHAISRLIGAPPGYIGYDQGGVLTEAVRRRPYQVILFDEVEKAHPDIFNIMLQILDEGRLTDSQGITVDFKNTIIVLTSNLGAEILVNQKEDEDTYKVKDEVMEYVKAVFKPEFLNRLDEIILFHRLNRNNIHDIVKIQLESLKKILLAQNIILEFDESALNYLAEKGYDPSFGARPLKRLIQREIQNNLAKMILAGEISSGKTVKINSKDKELKVTMS

SEQ ID NO: 12035 - protein, 560 aa, Rickettsia conorii str. Malish 7
MNNNIINLIAAIILSLSIIFGWQYFVVKPEQKKQQQQIAVQKAENLKKQQLKALVEPATGIVVQEESQVQRIKIESESLTGSISLKGLRFDDLILKKYKQDLSKNSPEVRLFSPANTENAYFAEVGLVSNLSSVKLPNNDTIWNSDSEILSPEKPVHLFWVNEDGVKFLVTITVDENYLFTIEQTIVNNSDKELPVQSYGLINRKYIAVEKAVNILHQGPIGCIDENLKEYSYDDIKDKKSEKFAASKVDWIGITDKYWLSSLIPDKSSNYSSNFNYALKQGTERYQVDFISPVQIIKPGENFSIKSRIFAGAKKVDLLDKYEKQYDIKLFDRAIDFGWFYIITKPVFYAMNFFYGYVGNFGVSILIVTVIIKLLMFTLANKSYRSMKKMKNLQPEIDRIKNLYSDDKARLNQEIMALYKKEKVNPVAGCLPILVQIPVFFSIYKVLYVTIEMRQAPFYGWIKDLSASDPTTIFNLFGLLPFSPPSFLMIGAWPILMAITMFLQQKMSPEPADPMQAQVMKFMPLIFLFMFSSFPVGLLIYWSWNNILSIIQQYYINKFN

SEQ ID NO: 12036 - protein, 401 aa, Rickettsia conorii str. Malish 7
MSIISTRLSSIKPSPTLAVVKKTLELKKAGVDIITLGAGEPDFDTPDNIKEGAIKAIKDGFTKYTNVEGMPLLKQAIKDKFKRENNIDYELDEIIVSTGGKQVIYNLFMASLDQGDEVIIPAPYWVSYPDMVALSTGTPVFVNCGIENNFKLSAEALERSITDKTKWLIINSPSNPTGASYNFEELENIAKVLRKYSHVNVMSDDIYEHITFDDFKFYTLAQIAPDLKKRIFTVNGVSKAYSMTGWRIGYGAGSKTLIKAMTIIQSQSTSNPCSISQMAAIEALNGPQDYIKPNALNCQKKRDLALSILKRVKYFECYKPEGAFYLFVKCDKIFGHKTKSGTIIANSNDFAEYLLEEAKVAVVPGIAFGLEGYFRISYATSMEELEKACIRIEKTIDVIPA

SEQ ID NO: 12037 - protein, 339 aa, Rickettsia conorii str. Malish 7
MTNRHLAKFAYREEFKGDTEALAAAVREDASTGSTSQLPLEVQFGKMSNQKTVSVCIIGRPNSGKSTLLNRIIGEKLSIVTPKVQTTRSIITGIITLKDTQVILYDTPGIFEPKGSLEKAMVRCAWSSLHSADLVLLIIDSLKSFDDITHNIVDKLRSLNIVPIFLLNKIDIESKYLNDIKAFLTENHPDSLLFPISALSGKNIDGLLEYITSKAKISPWLYAEDDITDLPMRFIAAEITREQLFLNLQKELPYKLTVQTEKWEDLKDKSVKINQVIVVSRESYKTIILGKNGSKIKEIGAKSRMQMERFFGFPVHLFLFVKVRELWENNQEFYQYMKI

SEQ ID NO: 12038 - protein, 627 aa, Rickettsia conorii str. Malish 7
MGKVIGIDLGTTNSCVAVMEGKEPKVIENAEGERTTPSIIAFANGEKLVGQSAKRQAVTNPRNTIYAVKRLIGRNFIDPMVRKDQGIVPYNIVKADNGDAWVEADNNKYSPSQISAFILQKMKETAENYLGDKVTQAVITVPAYFNDAQRQATKDAGKIAGLEVLRIINEPTAAALAYGFEKSASKTIAVYDLGGGTFDVSILEIADGVFEVKSTNGDTFLGGEDFDTRILNHLIDVFKKENGIDLSKDPLALQRLKEAAEKAKKELSSAVTTDINLPYITADSSGPKHLNIKFTRAELEKLVDDLIEKTIEPCRKALQDAGFKASDIQEVVLVGGMTRMPKVQEAVKKFFGREPHKGVNPDEVVALGAAIQGGVLNKEVTDILLLDVTPLSLGIETLGGVFTRLIDRNTTIPTKKSQIFSTADDNQHAVTIRVFQGEREMAKDNKLLGQFNLEGIPLAPRGLPQIEVTFDIDANGIVHVSAKDKASGKEQKVTIQASGGLSDAEIEQMVKDAEQNADEDKKRKELIEAKNAADSLVYSTEKTLTEYGDKLSSDDKGAVEAALAALKAVLESEDTALIKEKTESLTAASMKIGEAMYKAQSESQPAAESATNDEKIVDADFQDVEKK

SEQ ID NO: 12039 - protein, 465 aa, Rickettsia conorii str. Malish 7
MSFLRKKSFESVKEIGSSSGLSKTLGAFDLILLGLGAMIGTGVFVVTGIIAAKYSGPAVMLSYAIAGITCIFVALVYTELAAMLPTSGSIYTYSYVAFGEVFAWMIGSVIILELGVAAGIVAAGWSGYVQGILAAGGINLPKELTTVPTNGGIINLPAFLISGFIGFILYLGTKDSKRLNAILVFIKMTAIFVFILAAAPHFDATNWSNFMPFGFSNVLVGASILFLAFTGFGTIATAAEECKNPKRDIMIGIIGSLVLTTIVYVTMAGLVTGIAPFDQLNNDQPLAYALTINNSKIGSAIVATGAVCGMMTVLMMNIYGTSRIFYAIARDGLLPKSFAKLHPKYDSPYITIIIFASLAAILGGFCSTELLTQLTSMGALIDYITVTIIVVLFRVTLPDAQRPFRCPLVFIIVPFILIACAYLLFIQIYDGEFNLLTAGRALIYWFITIFVLYIIRSFFMQKEQN

SEQ ID NO: 12040 - protein, 767 aa, Rickettsia conorii str. Malish 7
MDEMNKINYAEALEYHEKDKPGKIAISATKSLVTQQDLSLAYSPGVAAPCLEIAKNLEDVYKYTARGNLVAVISNGTAVLGLGNLGAAASKPVMEGKAVLFKKFADIDAIDLEVNTEDPEEFINAVKYLSYSFGGINLEDIKAPECFIIEEKLKSLMDIPVFHDDQHGTAIITAAGLINAAYLTNRKLEDLKIVVNGAGAAAIACIDLLIALGADKSKIIVCDTKGVVYKGRLEGMNKWKELYASDTKFRTLAESLNNADVFIGLSVKGAVTKDMVSRMASNPIIFAMANPDPEITPEDIQLVRDDAIIATGRSDYNNQINNVMGFPYIFRGALDIRAKTINTEMKIAAAKAIADLARRPVPEEVYKAYSGRKMVFGKEYIIPVPFDPRLITVVAAAVAVAAIESGVARVKDFSIGKYKKELGSRLNPTANYMNFLAEKIHNAPLKRIVFAEGEEEEVISAALMMRDKKYGHPIIIGRVERIEVMLKKIGQDISLDGIQIMNAALSDSLEKYTDYLYKRLQRKGYLYRDCAKLVKTDKNIFAACMLACGDGDALLTGVTQSYIDSLEDIMKVISPKTNRSILGYSIMIAKDNNIIIADNCITEYPNSWELAQIATQTAEIAKNMGITPRVALLSFSTFGNSSKAKTARIREAVNILDNFSKDKEELSGMKVDFEYDGEMSVKVALDGDLRKLYKFCRLSGSANVLIMPGLNSAAISTELLQEFSSNSFIGPITNGFEKPVQILQAAATANEILKIATFACVEAINEV

SEQ ID NO: 12041 - protein, 319 aa, Rickettsia conorii str. Malish 7
MTNTNNYRIIAKRVISSEASALEKLSENIPEDFNRIIEFLLSFKGRIILTGIGKSGYIARKIAASFSSTGMPAFYLHPAEASHGDLGMVTRNDLVIMLSNSGETKELFNIIEYCKNSSIKIAAMTMNKNSTLAKRSDFLLIVPEYPEASVIEVPTISSLIMLSLGDALMTVIHEKRGFTKDDFKIYHPGGTIGANLTKIKHLMRSGDEIPLVYEDTSFAKTIIIMSKKRLGCTLVTDKNQNLVGIITDGDLRRHINDQIHLKTASSIMTKNPIHISSEIFAKEALNLMKAKNITNIPIVDDNIIIGIIHIHDLLRIGVS

SEQ ID NO: 12042 - protein, 410 aa, Rickettsia conorii str. Malish 7
MNPQLNNLTLPIYMDYQATTPIDPRVMEAMLPYFTTKFGNPHSRSHSFGWEAENAVEEARSMVAKLIGADTKEIIFTSGATESNNLAIKGIAKFYSNKKNHIITVVSEHKCVLDACRHLEQEGIKITYLPIKPNGIIDLETLKNAITDQTMLVSVMVVNNEIGVVQPLKEIGKICREKGVFFHSDIAQGFGKIPIDVNAFNIDLASISGHKIYGPKGIGALYVRKKPRVRVTPLINGGGQERGMRSGTLPTPLIVGLGMAAEIAYSEMEKDTKHVNYLFDRFLNNIHKRISEVYLNGDKNQRYKGNLNLSFAGVEGESMILAIKDLAVSSGSACTSASLEPSYVLRSMGIGEELAHTAIRFGIGRFTTEQEVDYAVNLICSKIDKLRELSPLWEMMQEGIDLKKIKWAVH

SEQ ID NO: 12043 - protein, 372 aa, Rickettsia conorii str. Malish 7
MIYLDHNATTFIDPRVKEFIISLMDKELNPSSAHSSGRFAKNLIETVRAQIATALGITLSSREYDITFTSSGTEGNNLIMKNFYDGDIFISAIEHLSIYNHINYAPNIKVISVNTQGLVDLEHLEELLAQSNTSKKLVSIIMANNESGVLQDIAEIGKITKKYEAKFHSDLVQGFGRIPINIKALGLDFATISGHKIGGGQGGAALISSSNFQVTPMIIGGGQEKSVRSGTENVLAIAGFGLASALRTDNISENYIKIKKLQENLEKKLKKYPNVNIVSNNVARLPNTTLITIPNTDAQAKLIGFDLHNICVSSGSACSSGKISKSHVLTNMGLGEEEAKSSIRISLSHTNTVSDIEAFIEAFEEIYDVIPS

SEQ ID NO: 12044 - protein, 414 aa, Rickettsia conorii str. Malish 7
MDYIMKNFNLSEELIIALETMNITEPTEIQKQSIPVAMAGSDILASSQTGSGKTLAYLLPLIDSFIKNKTTALILVPTRELATQIHSTLNKVTTSYKINSAVLIGGEPMPKQFIQLKKNPKVIIGTPGRIIDHLNRGSLKIDRIGITVLDEMDRMLDMGMKEQLEEINKFLPEKRQVLMFSATMPKHIIAVSQKYLNNPVRITVGATNKAAAEIKQESMHVSDKEKFSALTKQLGNREGSVIIFVKTKRSADQLAKMLKYENHTAEAIHGDLSQRQRERVILSFRKSNHRIMVATDVAARGLDIPHTQHVINYDLPMCPEDYLHRIGRTGRAGATGHALSFISPDDVIRWRAIDRLVNKGESTPRSEFRSDKNNRKRSFGKRAGGDGKKFNAFDSSRKRTFDGNSYGNKRKKVS

SEQ ID NO: 12045 - protein, 70 aa, Rickettsia conorii str. Malish 7
MATNIVGKVKWYNSTKNFGFIEQDNGGKDVFVHKSAVDAAGLHSLEEGQDVIFDLEEKQGKAYAVNLRIK

SEQ ID NO: 12046 - protein, 576 aa, Rickettsia conorii str. Malish 7
MDIKLLYRLAKYLRCYKKDLIIVMISLLSVSASLLLIGSVFRNLVDKGLSKDHISSVDNSILYICLLIIILSIASFFRSYFINNVAEKAVNQIRKEAYSNLINYEIEEFEELKIGDIISRLTNDIDQISTLIVNFLSFFIRNSVMLIGSITLMFFESFKLASIVIITIPILLIPLIKFGKHVKVLSKKALESKSLLASDINETFNNIRAIYAFNHQINKIADFDTKLQNYLIYCKTRLKIRALFFAISIAVIFLAITLVVWIGASDIVKGHLSAGQIISFIYYAIIAGVSCGGIFELLSEMHLPVTALERIITIIDKTPIAHNNYLELNNSDPISIEFKNVDFTYHSRPNLRIINNMSLKINANKFLGIVGRSGAGKSTVIQLLLRFYRQENGTILINNQDITLLNPAEIRKLIAYVPQEASIFSGTIKSNIIFGNNEASDDEINEIIKITGIEEFAAKLHDGINAKIGERGVRLSGGQKQRIAIARALLRMPQILLLDEAMSALDTMSEQKLLESIKKIMRGNIIISIAHRISSIESADYILVIDKGGVVAEGSHNDLSKNSEIYRNICREQLTI

SEQ ID NO: 12047 - protein, 111 aa, Rickettsia conorii str. Malish 7
MSLKMLENKNFKFIENEIKNNKVVLFMKGIKKSPACGFSGTVVAILNKLGVEFRDINVLFDAELREDLKKFSDWPTFPQLYINGELVGGCDIARELYQSGELEKMLKAYTR

SEQ ID NO: 12048 - protein, 105 aa, Rickettsia conorii str. Malish 7
MFAVIKAGGKQYKVDRNSIIKVEKIDGELGSKIQFDQILMIGEYSKPSFIGTPIVKGAVVTAEITNQLKDNKIIVFKKKRRKNYRRKAGHRQELTELKILDITKQ

SEQ ID NO: 12049 - protein, 401 aa, Rickettsia conorii str. Malish 7
MALIIQKFGGTSVANIDRIKKIVPIIKTEIAKNNQVIVVVSAMAGVTNQLVTLCNELSSLNNISQFAEYDVALSSGEIVTASLLALALQEEDIKARSFLAWQLPMLTDNNHSKALVESITTDLLEKYLQLNTIPIIAGFQGINKSNRLTTLGRGGSDTTAALIAAAMKADRCDIYTDVEGIFTADPRIIPNAKKIKEIDFLEMLELASSGAQVLHPRAGELVMRYKIDMRVLSTFSPDTEGTLITSKDKNMENGIINSITSNKNLLKISVKSMSLSFLQVANMITQNNNHIEFMQEIKNNEEYSFITNLTDKNNLQALLTNLKDDKQIQYFTFDTEIATISLIGYGIKNDCKLLETILSKLTNDNINVHMIQLSEVKITLFINDQDTEKTIFNLYNLFKIS

SEQ ID NO: 12050 - protein, 374 aa, Rickettsia conorii str. Malish 7
MKIVALKEKAKHETRAVITPEVAGLLVKKGYTVMVEKDIGLHAGFLDEEYVALGAKISSVPLEIISDADIILKVQPSSVTDKYSELEFAKKGAIIVGLLSPYLNHEYIKAAAKKNLTTFAMEFVPRITKAQNMDALSSQSNLVGYRAVIEASYHYTRAFPMMMTAAGTISPCKTLVLGIGVAGLQAIATAKRLGSIVAGYDVRAATKEQVESLGAKFVSPELQEDLQDKSGYAHESSEDYKAKQEEFLAKIIKGYDIVITTAQIPGKKAPLLVTEKMLESMKRGSVIVDIATSTGGNVEDSEPDKIVTKHGVTIIGLSNLATKIATDSSKLYAKNLYNFLTYALQDGKFNMDDALVREMLITKDGKIVSEKLNI

SEQ ID NO: 12051 - protein, 305 aa, Clostridium acetobutylicum ATCC 824
MIRILANDGMNKNAVNGLIDLGYEVVEDHYDKDELLVKIKEFDVLVVRSATKVTKEVIDAATVKGAKLKLIIRAGVGVDNIDVTYARDKGLTVNNTPNASSASVAELAIGHMFAVSRFINTANVTMRQGKWEKKAYTGTEIFGKTLGLIGFGRIAREVAKRAEALGMKVIYNDICGKVVGYDSYEFYDDINGLLREADFVSLHIPYDKKKGYVIGDNEFNAMKDGAFLINCARGGVVSEQALLNAINNGKIRGAALDVFENEPKPCAEILDNPRVSVTPHIGASTKEAQARIGEEIVNIVENTFK

SEQ ID NO: 12052 - protein, 318 aa, Clostridium acetobutylicum ATCC 824
MRISVIEPLGISEEEIRSIAKTITDRGHEIVIYNEKSTDTNVLKERVKDSEVIVLANMPLKAEVINSDSKLKMMSIAFTGVDHVELSALNNKEVVVSNASGYSTESVTELTFGLVFSVLRNIVPLDKVTREGKTKNGFSQSDLSGKTFGVIGTGLIGASVCRIAKAFGCKVIAYSRSKKEELEVIGVNYVTLDELLAKSDVISVHVPQTQETIGMISKEKIKLMKKTAILINVARGPIVDNEALAEALENGTIAGAGIDVFDKEPPLDLGYRLLKAPNTVVLPHVGFATKEAMVRRAHITFENIVKWLDGTPQNIVKY

SEQ ID NO: 12053 - protein, 516 aa, Clostridium acetobutylicum ATCC 824
MKELNEILLGEIEEFRKLGHDFLDGKVSKVDFKGASGGMGVYAHRSGKEFMIRLRIPSGIASRKDLELIRDFARRYELDSVHLTTRQAIQLHGISIDTVCDIMEEGIRNGLYSRGAGGNFPRNVAISPLSGVDKNEAFDVSPYAEAVGKHFLKKIYTYKFPRKLKVAFSNNADDIGHATIADLGFLAIKENEHEYFKVFIGGGLGRNPKVAATFIELAEPKDVLYHVEAMTRLFINEGDYKNKAKARIRYILERMGEEEFIRCYSKYLSEVKSEEKLDLEIDKKAYTKHGIETTVKNKRLISQKQNGLYSVYVHPVGGQLSIKDLEDILKETSNIEDVEIRLSMSEGFYIRNLNGNEAERILEITEHIGGNTRLEYSTACIGVPTCQIGLLESQATLRNIIDYFKKMKFEYDVLPAVHISGCPNSCSCHEISGIGFCGKKKRVSEEVKDVFELYLKGKLKSGATRLGDYYGDVLKEEVPYLLYDIAKIVHESGEEFYNWVESNDEKLKSIVNKYLV

SEQ ID NO: 12054 - protein, 437 aa, Clostridium acetobutylicum ATCC 824
MKIVVTKFGGSSLADSNQFKKVKGIIDSDANRKYIIPSAPGKRTNKDYKITDLLYLCNAHVKNGIPFDDVFKLISQRYTEIVSELNIDMDIAYYLEKVKKNIENGASSDYAASRGEYLNGVILAKYLNAEFIDAAEVIFFDKSGCFDEKKSYEKIKEKVLSCNKAVIPGFYGSSFNGDVKTFSRGGSDVTGSIISAGVNADLYENWTDVSGFLMADPRIVENPKTISKISYKELRELSYMGATVLHEEAIFPVKDSGIPINIKNTNKPSDPGTLILSDTHKEINLGTITGIAGKKNFTVIAIEKALLNSEVGFCRKILSILEMYGVSFEHMPSGVDSVSLVIEDCKLDGKCDKIIEEIKKQCNPDSIEIHPNMALVATVGTGMAKTKGIANKIFTALSKENVNIRMIDQGSSEINVIVGVETVDFEKAVKSIYNAFN

SEQ ID NO: 12055 - protein, 481 aa, Clostridium acetobutylicum ATCC 824
MSKTPIIDGIMKYISEKNNLFCTPGHKGGRGFANSEGGRSLYENIIKIDLTEVDGLDNLHDPQGIIKESEERLRDLYESKKSYFLVNGSTSGNLAMIFSCFNEGDKVIVERNCHKSIFNGIILRKLNPVYIKNYFDEDINAPLSIDEEYFFKIIRENMDAKGIILTYPNYYGVCCDLEAIVREAKKYNMKVLVDSAHGAHFGISEKLPESAVKLGADMVVMSCHKTLPSFTQTAFLHLCGDVEESKVDFYVSSFLSTSPSYMFMSSMDYARCYLEERGKHDYDNLVDLCIKYSKKINEINGLHVLGKSDLRINGKVLNFDATRLVINVEDGCSGFKLYTYLKENRIQPEMCDHRNVVLICSPFDGELQLQNLYNTLRKCNIIKLNDDNKVSVLLSSMPENKFAPYEVLNLESEKINIKDSVGKVCKKALVPYPPGIPVIMPGEVINENVVDIILKAVKDNITVLGIENRNKEITIDVVCED

SEQ ID NO: 12056 - protein, 386 aa, Clostridium acetobutylicum ATCC 824
MSCTINPLVKKIELSPIREISDAALKYSDAINLTVGQPDFTTPEHIKLSAKKAIDNNHTSYTANSGICELRKAASNFINKKYNLNYNSDKEIIVTNGATEAIDISLRTILEKDDEVLLPAPIYVGYEPVINFCGAKPVYMDTSSNNFILNAEILEKYLTPKTKCLILCYPCNPTGSAMDKNALTEIVNLLKNKDIFVISDEIYSELTFKKRHFSIAGFEDMRNKTILLNGVSKSHSMTGWRIGFIFAPEYLTSEIFKLHQYGSTCSCSISQYAALEALTNGFNDSEYMKKEYIKRRDFIYKELVSMDFDVVKPEGAFYIFPSIKKFNMTSLNFSLKLLEKEHLAVVPGSAFSHYGEGYIRISYAASMKDLKEGMIRLRRFIQSVKL

SEQ ID NO: 12057 - protein, 65 aa, Clostridium acetobutylicum ATCC 824
MTGTVKWFNGEKGFGFITGEDGNDVFAHYSQINVDGYKTLEEGQKVSYDVVKGPKGLQAENITLA

SEQ ID NO: 12058 - protein, 462 aa, Clostridium acetobutylicum ATCC 824
MANSNLKKDNLSIIETIALSVAIIAPTAAMSINVSLMSLSASFSEPLIFFISMVIVGLVSYSVIKFNHYFSSSGSLYTFTEKTLGEKFGFLTGWALLLAYVMLAAGCCAELGAFFSKFLNYFGIQIAWLPLSMFFSLGIVILGIIDAKISTRIMLAMEGISILLIFILSIVILFKVGSTKGLSPIPFKTNKNSFSTLASTSVLAFLSFIGFESASSLGEETKNPKKFIPLAIGSAVFVTGIFYLLSSYSQVIGFGVDAKGLKALSTSSLPLTDLSTKYISRTFGIFLLFSASLSCFSCSLGSACAGSRILFAMSKDGIISKKLSIIHKKHCTPYIGIILITIVAMFLQLILFKKDGIEAFNYLATIGSLAIIVSYLFTSIGAVVFFKRTKEIKNLNIFIPILSIAALLYVLYANIYPIPEFPTNTFPYIVLIWLVIGFILNERFNKNAKIAVLDIAKEGLDL

SEQ ID NO: 12059 - protein, 229 aa, Clostridium acetobutylicum ATCC 824
MDKKILTVLKHCILFSKIETQEIDHLFSSINYSIKEYYKDETIAIEGDTCNKIGIVLSGCVEIQKIYESGKSLTITTLEESKIFGEAIIFSNKTSYPSTIIACTKSTIIFIPKASISKLCSDNSLFLNGFMSLLSNKILMLNKKLKNMSYHTIREKISNYILEQYEAQNNLTFKMNKSKKQLSEMLGIPRPSLSREFINLREEGIIDFDRTSITILDINSLKEILEAAE

SEQ ID NO: 12060 - protein, 400 aa, Clostridium acetobutylicum ATCC 824
MKEKVVLAYSGGLDTSVTIPWLKDNYDVEVIAVCVNVGQEDDMDKVKEKAVNSGAAKIYVEDVKEEFVTEYLYNAIKWNATYEGKYLLGTSFARPLIAKKLVEVAHKEGAKYICHGCTGKGNDQVRFETAIAAMDPYIKIIAPWRLWNIDSREAEIDYALSKGVEVPVTKEKIYSEDWNLWHISHEGGDLEDPKNEHKEEMYKCVTPPEEAKDEPAYISIYFEKGVPCKINGEELEPVKLIEKVNKVAGENGIGVVDLVENRLVGMKSRGVYETPGGTLLYEAHAQLERLTVDKDAYHYKQVLALKYSELVYDGLWFTTTREALDAFVDTVEENVTGTVKLKLYKGNMKVSSVESENALYDEGISSFGASDLYDHKDAQGFINLFSLPSKIKAMKKLEKK

SEQ ID NO: 12061 - protein, 103 aa, Clostridium acetobutylicum ATCC 824
MYAVIATGGKQYKVQEGDAIYVEKIAAEVDSTIELNEVLAVSKEDGLVLGKPVVEGAKVVAKVEAQGKSKKIIVFKYKRKKDYRRKRGHRQAYTKLVIEKIQA

SEQ ID NO: 12062 - protein, 424 aa, Clostridium acetobutylicum ATCC 824
MFVDKARIFVKSGDGGDGAVSFRREKYIPLGGPDGGDGGEGGDVILVVDPNMTTLLDFKYKRKYVSERGQNGQGAKCYGRDGKDLYIKVPMGTIIRDVETDKIMADLAHKDDKFVIVKGGRGGKGNVKFCTPTRQAPNFAQPGMPGEERWISLELKLLADVGLIGFPNVGKSTLLSVASKARPKIANYHFTTITPNLGVVDVSGISSFVMADIPGIIEGASEGVGLGFEFLRHIERTRLLVHVVDISGSEGRDPLEDFLKINEELKKYNIKLWDRPQIVAANKADMVYDDDQFNKFREELNKLGYKNVFKISAATRMGVEDLLKECARVLSTIPVTDMEIPEEERFVPEDKHFTYTIRKEGDTYIVEGTFVDRLLASVNVNEPDSFRYFHKVLRNKGVMAELEEMGIKDGDMVRLNDFEFEFLK

SEQ ID NO: 12063 - protein, 615 aa, Clostridium acetobutylicum ATCC 824
MSKVIGIDLGTTNSCVAVMEGGDPAVIANSEGARTTPSVVSFQKNGERLVGQVAKRQSITNPDKTIISIKRKMGTAEKVAIDDKNYTPQEISAMILQKLKADAEAYLGETVTQAVITVPAYFNDSQRQATKDAGKIAGLEVLRIINEPTAASLAYGLDKMDTNQKILVYDLGGGTFDVSVLELGDGVFEVKSTNGNTHLGGDDFDEKIMDYIAEEFKKDNGIDLRNDKMALQRLKEAAEKAKIELSSSTQTNINLPFITADATGPKHIDMNLTRAKFNELTEGLVQDTIEPMKKALSDAGLSINDIDKIVLVGGSTRIPAVQEAVKNYTGKDPSKGVNPDECVAIGAAIQAGVLTGDVKDVLLLDVSPLTLGIETLGGVATPLIERNTTIPTRKSQVFSTAADNQPSVEINIVQGERKMAADNKSLGRFTLDGIAPAPRGVPQIEVTFDIDANGIVNVSAKDKGTGKESHITITASTNLSDEEIDKAVKDAEKFAEEDKKKKENIEVKNNADQIVFQTDKALKDLGDKVSAEDKSNIEAKKEALSKVKDGDDIEAIKKATEDLTQALYAITTKMYEQSGAQGAPGADPNAGASQKTNGGADDNVVDADFKVDNDK

SEQ ID NO: 12064 - protein, 296 aa, Clostridium acetobutylicum ATCC 824
MFKSGFVTIIGRPNVGKSTLLNHIMGEKLSIVSSKPQTTRNNIQTILTGEEYQIVFVDTPGMHNPRHKLGEYMVKVAKESMNEVDVALFVTTPDVEVKRGDLHILEQLKSAKVPVFLVVNKIDETTEERLAATLKNYSEAFEFQEIIPISAQKGKNVDKLIELMVKHLNEGPKYYPDDMIIDKQERFIIAEIIREKALRFLSQEVPHGIAVEILQMKEENEKYKIEATIMCEKDSHKGIIIGKGGEMLKKISQSARKSAEKFLDKRVNMKIWVKVKKDWRDSPFVLGELGYKAPKK

SEQ ID NO: 12065 - protein, 215 aa, Clostridium acetobutylicum ATCC 824
MKLFIDTANVEEIKEVNDMGVICGVTTNPSLVAKEGRDFNEVIREITSIVDGPISGEVIALDAEGMIKEGREIAKIHKNMVVKIPMTEEGLKAVKVLSSEGIKTNVTLIFSAGQALLAARAGATFVSPFLGRLDDIGADSIGLIESIVNIFDIHDIRTEIIAASIRSPKHVIDSAEAGAHIGTVPYKVLKQLIKHPLTDIGIERFMKDWKEAFNK

SEQ ID NO: 12066 - protein, 455 aa, Clostridium acetobutylicum ATCC 824
MDQTKSKNQNLSRGLKNRHVQLLAIGGAIGTGLFLGSGRSIHLAGPSILFAYMITGAICFLVMRALGELLVSNLNYHSFVDFVQDYLGNGAAFITGWTYWFCWISLAMADVTATGLYVQYWIPSLPRWVPSLVILLILLIMNLTAVRLFGEMEFWFALIKVVAILALIIVGIFMIIKGFSTSAGAASFTNLWKHGGWFPNGSNGFILSFQMVVFAFTGIELVGLTAGETEDPEHVIPKAINNIPVRIIIFYIGALAVIMSIYPWNSINPDKSPFVQVFAAVGVAAAATIVNFVVLTSAASACNSGIFSTSRMVFSLANENNAPESMKKLTSHKIPSNATIFSAAVILIAVILNYIMPEGVFVLITSISTFCFIFIWAIIVICHIKYRKANPELASKNNFKMPLYPIANYIILAFFAFVIVTLALNSETRVALFVTPVWFIVLGIIYFISKSKKKN

SEQ ID NO: 12067 - protein, 256 aa, Clostridium acetobutylicum ATCC 824
MFEDDFQTVSKAAKAKTSFLQKNFIGYFLASMLAGMYVGFGVLLIFTIGGMLKGMAFSKIVMGASFGIALSLVILAGSELFTGNNMVMTAGMLSKTIKLSKAIKLWIVCFIGNWIGAILLAVMFYASGLLNGSTSKFIAAAAASKMNTAILPLFFRGILCNILVCLAVWCGFKCKSESGKLIMIFWCLFAFITCGFEHSVANMTLLTLGLLAPHKAAVSLGGYFYNISIVSLGNMVGGILFVALPYFIISRQKKGV

SEQ ID NO: 12068 - protein, 320 aa, Clostridium acetobutylicum ATCC 824
MDINTKNLKKNAFRVTKRRGITASRIRVPGGHLEAKFLSMIQNIAENYGDGSVHITSRQGFEIPGIKFEDMPKVNELLQPIIEGLNINQETALQGYSASGTRNITACVGNRVCPYGCYDTTSFAQRIEKAVFPHDLHFKIALTGCPNDCAKVRMHDFGIMGMTEPHYESDTCVSCGACVKVCKKKSVGALSAVNYKVVRRGEKCIGCGECVLKCPTGAWTRSEKTYYRLTLLGRTGKKNPRLGEDFIKWVDEDSIIKIILNTYDYVTKYIDPNAPGGKEHIGYIVDRTGFEEFKKWALKDVKLPSIAEVYTPIYWNGIKY

SEQ ID NO: 12069 - protein, 384 aa, Clostridium acetobutylicum ATCC 824
MIKINNRLKSIDEYHFKKIEDKKRELIKKGKQIIDLGIGDPDLEVSNRVQNEIIKSLGIKDFNKYPPYSGIEKLKSRVIKYYRDIFQVNLDLDEIIITIGSKEGISSIIPSICDIGDYVIVPNPGYQVYTAASYLWGAVPYKIPLTDKNDYLPNLNVIPQNIALKSKLFFINYPNNPTGAEANKDFFKDIVEFCKKRNIVLVNDSAYNEIIKKESTPISLLQSDEDKKMIEIGSFSKTYNMTGFRVGYVVGNKGVIKALLKVKSNIDSGQFMPVQYAAAEAINLDRNEIKKSREIYDKRRSTAKKILSKKGIKYFDASAAFYIWCSVPKGYSTDEFCDKLLSEYGVVVTPGYCFGNLGYGFFRIALTTKIENIETALSKFEDFQ

SEQ ID NO: 12070 - protein, 333 aa, Clostridium acetobutylicum ATCC 824
MDLIESIWECAKQDKKRIILAEGEEKRNLIAADKIIKEGLAELVLVGDENKIKEKASELNLDISKAEIMDPETSLKTETYARDFYELRKHKGMTIEKSEKMVRDPLYFATMALKDGYVDGMVSGAVHTTGDLLRPGLQIIKTAPGVKIVSGFFVMIIPDCDYGEEGLLLFADCAVNPNPTSDELADIAITTAETARKLCNVEPKVAMLSFSTMGSAKGEMVDKVKNAVEITKKFRPDLAIDGELQLDAAIDSEVAALKAPSSNVAGNANVLVFPDLQTGNIGYKLVQRFAKAKAIGPICQGFAKPINDLSRGCSSEDIVNVVAITVVQAQRGI

SEQ ID NO: 12071 - protein, 401 aa, Clostridium acetobutylicum ATCC 824
MKNLVINCGSSSIKYQFIDMKDETVLAKGLVERIGIKGSVITHKVNGEKYVTETPMEDHKKAIKLVLDALLNDEYGVIKNIDEISAVGHRIVHGGEKYANSVLIDEDVMKSIEDCVSLAPLHNPPHIIGINACKELMPNVPMVAVFDTAFHQTIPDYAYMYAIPYEYYDKYKIRKYGFHGTSHKYVSRTAAEFIGKKVEDLKMVVCHMGNGASITAVENGKSVDTSMGFTPLGGLAMGTRSGDMDPAVVTFLMDKLNINASEVNNLLNKKSGIEGLSGISSDMRDIKKGNYVDKDPKAMLAYSVFNYKIKQFIGSYTAVMNGLDCLVFTGGIGENSFENRREICKNMDYLGIKIDDKKNDETMGIPMDISAEGSKVRVLVIPTNEELMIARDTKDIVGKLK

SEQ ID NO: 12072 - protein, 399 aa, Clostridium acetobutylicum ATCC 824
MKIIVQKFGGTSVSTPERRSFVVQKVSSAIKEGYSPIVVVSAMGRAGEPYATDTLLSLIDNDFKETNKRASDLLMCCGEIISTVIMSNELKRAKIAAIPVTGGQAGIITDDEYSNASVKKVNPENLLKLLCHNEVPVVAGFQGKSQNGFFTTLGRGGSDVTASLIGCAVNAEKIEIYTDVDGIMTADPRIVQDAALIETISYNEVFEFAEQGAKVIHPRAVEVAMNGNIPLIIKNTLNDCKGTLINREGDSLNKNLITGITSLSGRVQVTTKFKDSKIKSTEFLSLLGERNINIDLINVFPKENIFTIDKKDLNKLKDTLIKTKVQYYLEDDCSKIAIIGNRICGVPGVMAKILKAITKEGIEVLQTADSHTTIWCLVKSNVRNKAINALHREFNLNNK

SEQ ID NO: 12073 - protein, 398 aa, Clostridium acetobutylicum ATCC 824
MNFSKKAGQIAASITLEITAKADEMKANGINVIGFGAGQPDFNTPKNIRDAAIYAIENGYTKYTPVSGIKELKMAICDKFKRDNNLNYSLSNIIVSTGAKQCLSDTFSALLNPGDEVILSAPYWVTYPELIKLNDGISVIINTTEENHFKLSVDDLENAYTSKTKAILINSPSNPTGTVYTETELKAIAEFAKEKDLFIISDEIYEKLIYDGERHVSIASLSQDAFNRTVVINGMSKSYAMTGWRLGYAASGSSEFIKLMSHIQAHTTSNANSITQYASVEALNGRQEELHSMVTEFEKRRTYMSKRVNNITGIHCLLPKGAFYVMMNISNLFGKEINGVKINNSVDFSKELLSENKVAVVPGTGFGNDNYVRLSYATSMDNIVKGLDEIENFIGKLR

SEQ ID NO: 12074 - protein, 376 aa, Clostridium acetobutylicum ATCC 824
MKKTIYMDYSATTPVLKEVVEEMMPYFTEFYGNPASIYSLSNESKMAIDEAKITVSKIINCKPYEIFFTSGGSEGDSWAIIGSAFANRDKGKHIITTAIEHHAVLNSCKFLEGEGFEVTYLNVDSNGLVSIEELKKNIRKDTILVSIMMANNEIGTIEPVKEIGDYLKGKNIIFHTDAVQAAGHVKIDVDQINADLLSLAAHKFYGPKGIGILYIRKGTKVSNIIYGGGQQRGRRGGTENVPAIVGAAKALKIVSDDIEKENTRQENLRNLFVEKALELPYVKLNGILNEKRLSNNINLCFNGKDGEGILFNLDMNGICASAGSACQAGAMEASHVLTAIGLSKEEARSSIRFTIGRFTTEEEILYVVDKLKELTS

SEQ ID NO: 12075 - protein, 397 aa, Clostridium acetobutylicum ATCC 824
MCGIAGFVNFKKNLIDKKSIIEDMTNTLIKRGPNEKGYYISKNALLGHRRLIVVDPKGGSQPMIKIHNGKKYIIVYNGELYNTEDIRKELLEAGYEFSSYSDTEVLLTSYIHWKEDCVNHINGIFAFAIYSETDKKIFLARDPLGVKPLFYTIKNNNLIFGSEIKTLLANPLVEPILTKEGLTEIFALGPARNLGSGVLKDIHEIPPANFIEFTEHKFKLHEYWRLSCKPHTENASETAEHIKFLLTDAIKRQLYADVPVCTFLSGGLDSSIISAVAASEFKKHGKTLNTYSIDYKDNNLYFKNDNFVITPDSVWAEKMRKFIGSNHHKIINNNLDLASALYDAVKANDIPGMADIDSSLFLFCKGVAEKNVVSLSGERAIQMITNLVKQFINIGEL

SEQ ID NO: 12076 - protein, 487 aa, Clostridium acetobutylicum ATCC 824
MYKLNQNETPLFNALMEYVNRDTIPFHVPGHKKGNGIDKEFKNFIGENPFKIDVTVFKLVDSLHHPTGPIKKAQELAADAYGSKAAFYSVNGTSGAIQGMILSVVGDGDKIIVPRNVHKSVTAGIILSGAVPVYMHPEVDRRVGIAHGVSPETVGETLKNNPDAKAVLLINPTYYGVSTDIKKIADIVHSYDIPLIVDEAHGPHLSFNDRLPVSALKAGADMCAQSTHKIIGALTQMSLLHVNSDRIDMNRVQQIMNLLQTTSPSYILMASMDCARRQIALHGKELLDGTIDLCNYARREINKIPGFYCFGEEVLGKPGSYAFDPTKLTITCTDLGITGYDLDMLLANDYHIQVELSDLYNVLAVGSFGDTKENIDALINALRQISKSISSTVKNKKNSFIDIPDVPERILSPRDAFNGAKESMLIKDSVGKTSGEFLMAYPPGIPVLCPGEIITQEIIDYVSDLKAAGLYVQGTEDPDVNYIKVLK

SEQ ID NO: 12077 - protein, 395 aa, Clostridium acetobutylicum ATCC 824
MYFIGGIKMESSKISKGANSIQISGIRKFYNKVIKVQGAISLTLGQPDFPVPDKVKRAMVRAIEDNKTVYTSNAGIDELRNEISKYLKRFNINYSKDEICITAGGTEGILDIFQALLNKGDKVLVPDPSFPAYASCTKLLEGEVITYGLYGSEFSIDFNELENKIKNEKPKFMVLSYPSNPTGTVISKEDNEKLHKIIKDNDIIAVTDEMYSALCYEDDYYSVSQYEDIREKVIVVSGFSKTFSMTGLRIGYVCAESSFMSSILKVHQYTTTCAPSISQYGALEGLKNCDEDVQYMKNEFKKRRDYVYKRLKDMGFEVRLPKGAFYIFPDISRFGMTSEQFCEKLLNEAKVAIVPGSAFGEKGEGFARISYAYSKKELEECMNRIEKWVEVQNNL

SEQ ID NO: 12078 - protein, 438 aa, Clostridium acetobutylicum ATCC 824
MAKELKKTLSTFQLWAIIVGMVISGMYCGWNNALTFTSPMGFVVATLIVTVFYGTFMFSYAELATAMPKADGSSEFASRTMGRLGGFFAGFSCILEFLFATPAIAISIGAYVNFIIPSVPVTVAALVFYALFVIVNCFGVKTAAIIETVVTIVAIIGLIIFAGASATHIDPIKIFGGNIYKGGATGIFNAIPFAIWFYLAAEGGAMSAEECKNPKKDISKGFIIAIITLMVLALGTFLCTAGVLDNKTLGITNSPIPDTLNVIFGKGNFLSKFMSFIGLFGLIASLHGIIIGYSRQVFAMSRSKYLPEFLSKVNSKGSPVPAIVVPSLIGMIFVLTNNTATIIVISSFGAIALHAISMIAFFLLRKKEPKLERPYKVSIILPIIALVLNAVFLITTIYSSMSTISWVILSFVLAFVYYFVYSKLNSKKDIEEEQKEAV

SEQ ID NO: 12079 - protein, 317 aa, Clostridium acetobutylicum ATCC 824
MKIFRKKSLDKMMVSAEKTHLKKTLKTKDIAALGIGAVVGVGIFVATGTGAHKAGPGIIISFLLAGIVACLCGLCYSELATMFPVSGSTYSYAYITFGEIVAMIVGWCLTSEYLVACSAVASGWSGTFIGILKNAGIVLPKVITASPSKGGIVDLPAVLITLILTYILYYGMKESSRVNNIIVIVKIAIIVMFLVLGATHIKMTNYKPFAPFGFKGIFAGASVIFFSYIGFDAISTTAEEAENPGRDVSRGLIICLAVVSILYISVAFVLTGMVHYDKIVTEDAVPAALASVGIRWGSALVGIGAILGMISTMIAVL

SEQ ID NO: 12080 - protein, 393 aa, Clostridium acetobutylicum ATCC 824
MVSEKMYELGSKRSVIREIFEFGKKRAEEVGVENVYDFSIGNPNVPAPEAVKKAILEILEEENPVDIHSYTSAQGDLKVRDTLAESINKRFSTSFSGNNLYMTVGAAASIHICFSALANPGDEFITFAPYFPEYRCFVEAAGGKLVVVPAKIEDFQIDFEEFEKRINEKTKAVIVNTPNNPSGVVYTEETITKLAKVLENKAKEYGHAIYLISDEPYREIAYDVEVPYLTKYYDNTFVCYSYSKSLSLPGERIGYIVVPSEMEEFNKVYAAICGAGRALGYVCAPSLFQKVVAKCAGITADISIYKKNRDLLYEGLIKLGYKCVKPEGAFYLFPQALEKDAYAFTEKAKKYDLLIVPGDDFGCPGHVRISYCVTTDQILRALPAFEKLAKEYK

SEQ ID NO: 12081 - protein, 392 aa, Clostridium acetobutylicum ATCC 824
MKEVVIASAVRTAIGSYGKSLKDVPAVDLGATAIKEAVKKAGIKPEDVNEVILGNVLQAGLGQNPARQASFKAGLPVEIPAMTINKVCGSGLRTVSLAAQIIKAGDADVIIAGGMENMSRAPYLANNARWGYRMGNAKFVDEMITDGLWDAFNDYHMGITAENIAERWNISREEQDEFALASQKKAEEAIKSGQFKDEIVPVVIKGRKGETVVDTDEHPRFGSTIEGLAKLKPAFKKDGTVTAGNASGLNDCAAVLVIMSAEKAKELGVKPLAKIVSYGSAGVDPAIMGYGPFYATKAAIEKAGWTVDELDLIESNEAFAAQSLAVAKDLKFDMNKVNVNGGAIALGHPIGASGARILVTLVHAMQKRDAKKGLATLCIGGGQGTAILLEKC

SEQ ID NO: 12082 - protein, 127 aa, Clostridium acetobutylicum ATCC 824
MHLNMLKSKIHRATVVQADLNYVGSITIDRNLMDKANILEYEKVEIANINNGARFETYVIAGEAGSGIICLNGAAARCAQAGDKVIIMCYCSLTPEEASEHRPKVVFVNDDNSISNVTEYEKHGTIG

SEQ ID NO: 12083 - protein, 324 aa, Clostridium acetobutylicum ATCC 824
MKIVVLDGYTLNPGDMSWEAFKEIGDLTVYDRTDYTGKEEEKTIERARDAEAILTNKTIITSKVIEKLPKLKYIGVLATGYNVVDLEFAKKKGIVVTNIPQYSTSSVVQMSMALILEICGHVGQHNASVKKGDWQNCADFSYLKYPIIELSGKTIGLVGYGSIGKAMQKAAEALGMKVFVYTPHPDKKYENESMKFVSLDTLFKEADVISLHCPLKDDNKEMINKASIKKMKNGVIIINTARGGLINERDLYEALKENKVYAAALDVVSFEPIKEDNPLLKAENCIITPHIAWATSEARQRLMNIAVNNLKQFVDGCPINVVNK

SEQ ID NO: 12084 - protein, 379 aa, Clostridium acetobutylicum ATCC 824
MVVYFDNSATTKPLLEVADIMKEVFYEYYGNPSSLHLFGKRAEDRLIESRKVLAATLGVSPNEIIFTSGGSESNNFLIKGFAKPGNHIITSKIEHPSVLNTCQQLERFGVEVTYLNVDNEGKLNLKELKESIKKNTVLVSIMHVNNEIGVIQDVKKISSIIKERSTRAKFHVDAVQSYGKLKINPKEMGIDLLSVSAHKIYGPRGIGFAYVRKGLMPDPLICGGGQEFNFRSGTENLPAIAAFAYAANDISKKMKDNYKKVSDLKEYFVDKLNNIDGVRINSKVGEDYLPHVLNVSLKGVRGEVFVHALEEKEIYASTGSACSSKKNHKSHVLCALGLDDGEIDGAIRFSFSPENTFEEVDYTVYNIEKILKFLRRLKL

SEQ ID NO: 12085 - protein, 65 aa, Clostridium acetobutylicum ATCC 824
MLGTVKWFNSQKGYGFITTQEGNDVFVHYSGIKDNGFKTLEEGQEVEFDLTEGQKGEQAVNVVKH

SEQ ID NO: 12086 - protein, 181 aa, Clostridium acetobutylicum ATCC 824
MNKAVFLDRDGTINVEKNYLYKIEDFEFTEGAVEAIKLLNQNEYKVIVISNQAGVARGYYTEEAVDKLHEYIQKQLKKYDAHIDAFYYCPHHPIHGVGKYKLQCKCRKPEDGLYKRAIKDFNIDVEKSYAVGDKLSDLIPAVDNNIKSFLVMTGYGKEEVKNIKTDMRITKNLYSFVTEII

SEQ ID NO: 12087 - protein, 355 aa, Clostridium acetobutylicum ATCC 824
MYRLLIINPGSTSTKIGIYDDEKEIFEKTLRHSAEEIEKYNTIFDQFQFRKNVILDALKEANIEVSSLNAVVGRGGLLKPIVSGTYAVNQKMLEDLKVGVQGQHASNLGGIIANEIAKEINVPAYIVDPVVVDELDEVSRISGMADIPRKSIFHALNQKAVARRYAKEVGKKYEDLNLIVVHMGGGTSVGTHKDGRVIEVNNTLDGEGPFSPERSGGVPIGDLVRLCFSNKYTYEEVMKKINGKGGVVSYLNTIDFKAVVDKALEGDKKCALIYEAFTFQVAKEIGKCSTVLKGNVDAIILTGGIAYNEHVCNAIEDRVKFIAPVVRYGGEDELLALAEGGLRVLRGEEKAKEYK

SEQ ID NO: 12088 - protein, 554 aa, Clostridium acetobutylicum ATCC 824
MKYNGSRIILECLKEQGVDTIFGYPGGAVLNIFDALYSFSEIRCVLTSHEQGASHAADGYARATGKVGVCLATSGPGATNLVTGIATAYMDSVPMVAITGQVATSLIGKDSFQEVDITDITMPITKHNFIVRKVEDLADTIRKAFYIAQSGRPGPVLIDIPKDVTGNECEYEPRKPEKIEKSSVRDAEVEGAIELLLESKRPVIIVGGGCNISEASKELKILQEKLKCPVCSTMMGLGAFSGKDDMFTGMVGMHGTKASNKSICESDLVIAIGCRFSDRVTSNADTFAKNAKILHIDIDEAEVSKNIKADSFIIGDVEEVLKKVNEKLTAREGNEWTEYALGLLKKDKSKVLRINKCDSVNPVYVIKKLYELTDGEAIITTEVGQNQIWATQGYIYTKPRSFITSGGLGTMGYGFGAAIGASVGKDKMTFDIAGDGSFRMNINELATVVRYKLPVKIIVLNNNVLGMVRQWQNLFYKKRYSSTTLERDTDFVKIAEGYGALGLRVDTNAGVESALKKAIDYDGPVVIDFTVGEDEMATPIVPPGADIENMVVLD

SEQ ID NO: 12089 - protein, 602 aa, Clostridium acetobutylicum ATCC 824
MKKISSATVWIVVFLVVIFTILMLVQGGKATNTVSFDQFQKQYMGNNIKSFEMKDDKMTVDGKYKDGSSFETIVPLERLNQFLADHPTNGEIGESYAAPANIPVWISWMPTIIMILAMVVILVLFMQQTQGGTGKGVMGFGKSRAKMSSPDDLKQKVTFKDVAGADEEKGELEEIVDFLKQPKRYIEMGARIPKGVLLVGPPGTGKTLLAKAVSGEAGVPFFSISGSDFVEMFVGVGASRVRDLFEQAKKNSPCIIFIDEIDAVGRQRGAGLGGGHDEREQTLNQLLVEMDGFGVNEGIIILAATNRPDILDHALLRPGRFDRQILVGAPDVKGREEILKVHSKNKNLDDSIRLDVLAKRTPGFTGADLENLMNEAALLAVRNKKPIIGMEELEEATTRVIAGPEKKSRVISEEDRKITAYHEAGHAVLMELLPYSDPVHQISIVPRGMAGGYTMHLPEKDSSYMSKNKLKDEMVGLLGGRIAEKLVIGDISTGAKNDIDRATSIARKMVMEYGMSDKLGTITFGKDQDEVFLGRDLGTSRNFSEEIAAKIDNEVKELIDEAYTKAENLLKDNMSKLDAVAKALLEKEKLEADEFKEIFENA

SEQ ID NO: 12090 - protein, 319 aa, Clostridium acetobutylicum ATCC 824
MINHGKNIKIFTGNSYPSLAEEIADIIGVQVGDSRVGKFSNGETAVDINETVRGTDLFLIQTLCEPVNDSIMELLIMLDAFKRASAGRITAVIPNYAYARQDRKAKARQPITAKLMADLIHTAGADRVLTMDLHAPQIQGFFDIPVDHLEGVPILAKYFINQNSNTDDLIVVSPDIGGVKRTRKFAEKLHAPIAIIDKRRPKPNVSEVMSIIGDVKGKKAILVDDMIDTAGSIVNAAEALVKMGAKEVSACCTHGVLSGPAIERLENSPLKEVVILNTIPIEGDKRIDKIKVLSVAPIFAEAIRRIYEDMPVSKIFQEE

SEQ ID NO: 12091 - protein, 706 aa, Clostridium acetobutylicum ATCC 824
MSERKKSTGMSKGPGGGPPMGRPAEKAKDFKGTFRKLLKYLAPFKMRFLIVVIAAIFSVCFNVRSPKIMGNATTKLADGIKGKIILSKINPQEKKVNDAAKKLSTQKSNLDAQKAKLDAQIKANPMMAQVPKVAEAEAQMTKGEEQLTKAQAQIKAAQKKISNAKKDTINKYGSKIDFDAIGVIILELIGLYAVASLFSFLQSFVMAGVAQKTVYNMRKDVDEKLNRLPLKFFDSKTHGEILSRVTNDLDTVATTLQQSLTQLITAILQVIGVVIMMLTISGWLTLICVLTLPVAGFVTMFIAKKSQKFFAGQQKELGMINGHVEEMFTGHIVVKAFNKEQESIEKFNEINDRLYKSGWKAQFISGIIFPLMNFINNIGYVAVCVAGGIFATKGMISIGDVQAFFQYNRLFTMPIIQTANIANIIQSTMAAAERVFELLEEEEEIQDAEDSKIVEFPKGAVRFENVKFGYKEGSTLINDMNLDVKPGQTVAIVGPTGAGKTTIVNLLMRFYEINAGKITVDGVNTKEMKRNDLRGMFGMVLQDTWLFNGTIRDNIAYSKDGATEEEIIRAAKAAHADHFIRTLPDGYDTVINEEASNISQGQKQLLTIARVILANPQILILDEATSSVDTRTELAIQKAMNNLMQGRTSFVIAHRLSTIRDADLILVMNQGSVIEQGNHEELLEKKGFYADLYNSQFTSGNNEEIG

SEQ ID NO: 12092 - protein, 466 aa, Clostridium acetobutylicum ATCC 824
MEIFRKKTAEDFQDEASSSNLKRGLTSFDLAAIGIGAVVGTGIFVSTGQGAKLAGPSVVISFLVAAVTCGLCSLTYCELSSMFSVSGSTYSYSYIAFGEIIAWIIGWDLMLEYLVAASAISSGWSSTLIGIVKNYGVNVPDALTKSPLSGGIVDLPAIFITLVITFLLYRGVTESAKINNVIVGVKICIIALFVFLGITHVKVTNYHPFVPYGVNGIMSAAAIIFFSFIGFDAIATTAEETKDPKKDVPKGLLICFGVVVVLYMSVAIILTGIVPYTKIDINNALPGALSSIGITWGSALVGVGAVLGMISTLLVIMYGQIRIFMVMSRDGLLPKVFSSVNKKHSTPGLCTVITGVLVSIIAGFLPLKMIMELCNIGTLFAFILVSFGVIVLRYTMPNVERKFKCPGVPFTPLVTAFFCFYMMIHLPLFTWLRFGAWLLIGFVIYFVYGSKHSKMTARDRGKEEVS

SEQ ID NO: 12093 - protein, 248 aa, Clostridium acetobutylicum ATCC 824
MGEKLLQINNIHAEADGKEILKGLDLTVGKGEIHIVMGPNGAGKSTLMNVIMGHPKYKITNGNINFEGEDITDLKTDERARKGIFLSFQNPEEVAGITASDLIRSARTQAEGKPIKLMAFRKELKEKMALLEMNESYSERDLNVGFSGGEKKKNEILQMLMLNPKLAILDETDSGLDVDAVKIVSEGISKFKNENNSLLIITHNSKILESLKPDFVHVLLDGKIVKDGDISLMNEINTKGFVDFKKMV

SEQ ID NO: 12094 - protein, 269 aa, Clostridium acetobutylicum ATCC 824
MKRKGIFASAVLALTLVIGITGCSSSSSQKTASQNSLEKIKSEGKLRIGTEGTYAPFTFHDSKGNLTGFDVDIAKEVSKRIGVKPEFVETKWDGMFAGLDAGRFDVVLNEVAIKPDRKVKYDFSTPYITSRAVLIVKKDNNTIKSFSDLKGKKSAQSLTSNLGNIAKNNGAELIQVDGFNEAVDLLTSNRVDATINDSLSYLDLKKQKPDAPIKSVANYNNASESAAMFKKGSNNKELIAAVNKALKDMKSDGTYLKISKKWFGTDVSK

SEQ ID NO: 12095 - protein, 292 aa, Clostridium acetobutylicum ATCC 824
MINKNTKIGFIGTGVMGKGMIKNLLKGGYTVHVYNRTKEKALPLVEIGAVLETSIKELSQRCDVIITMVGYPSDVEEVYFNDNGILNNLKPQSYVVDMTTSKPSLAKKIYAAAKERNIFALDAPVSGGDIGAAEGTLSIMVGGDKEAFDALMPIFELMGKNIVLQGSAGSGQHTKMCNQIAIASNIMGVCEALSYAKKSGLNAETVLKSIGAGGAASWQLSAYAPRILKGDFNPGFYIKHFVKDMKIALEEADEMGLKTPALELSKKLYDKLIKEGKEDLGTQALYHLYNED

SEQ ID NO: 12096 - protein, 281 aa, Clostridium acetobutylicum ATCC 824
MIKYRGGKAREIKKFIHHLKSQKYDSYYEPFIGGGAVYFDLEPQNAIINDINTKLIDFYVDVKNNFSRIKNELEFLENVYNKNQQQYDALKMINSEERVLSMNEKLYYELREEFNYPTGKYLRGTVYYFINKTSYSGMIRYNKKGEYNVPFGRYKGFNAKGIDIKHYELLKNAQILNLDYEEVFKKASSKDIMFLDPPYDCVFNDYGNIQLGGGFDEDQHRRLAENFKNLNTRSLMIIGKTKLTEELYRNYIVDEYSKKYCVNIKNRFRNSAIHIVVSNYL

SEQ ID NO: 12097 - protein, 563 aa, Clostridium acetobutylicum ATCC 824
MSKVIYKISIDLGGIVKRNFEKETKNCGKVNEEVLFKILKSNDKSEIGIKFKFKDIKSIRQFKDSVPITEYKDYEKYINRMADGEGNVLMSEKVEYFGHTSGTTGKQKLVPCTKNSRRRASKYMALLVNRFCYDNFKENWNYARGMMIADIVMTTYTKGKIPICSATSGGMKGIKHLLPYLYTSPIEVMEIKDKETALYLHLLFGLEEEELLYISGVFISNILDLFRTLEKNNKALVRDIQKGSISEELNIDEGLRKVLNKKLKPNNKRAMELEKEFKKGFKGIAKRIWPNLLYIASVTGANFSIYNDKVYYYIDSIPIYSAAYGSTEAMIGINPYASKVLYVITPSAVFYEFIPIGEKGEESFDTLLLSELKLGGRYEVVITNYAGLYRYKIGDVVKVVGFYNKCPEIEFLYRKNQVLNMAAEKTNEEHLTYAIKNTIKKLNLDLVDYTTEPDNSITPGRYIFYFEFRNNMYGFSTEKLQNILDDELRVSNLAYNRARNNKKLGMLKVEVLAPNTFDLIKEALFNKGISKNQIKIPRVIINNKIVMDIINRNKIKFVKKSVI

SEQ ID NO: 12098 - protein, 248 aa, Clostridium acetobutylicum ATCC 824
MSKVVTKRNYDTHIYEVDFKGKATITSIMSYLEDIATYQTDNLGMSVQYLIDNKLAWVVYKWEIHMDKYPELGDTIEVATIPYSIRKFYAYRKYELFNKGEKIGYANSLWFLIDTERRRPCRVTEEIYKIYNLTEEDDEQIPFEKLSKPKEVSFENRFKVRYSDIDTNRHVNNVKYVSWVLENIPLEVMKDYEISDLKVMYQKETAYGETIDIVTEMKKSEGKCSFNHLITNSQGENLTLIKTDFIKS

SEQ ID NO: 12099 - protein, 563 aa, Clostridium acetobutylicum ATCC 824
MNENLKQDKDSEISKTEDEESSMNTAELVVKCLENENVEYIFGIPGEENLALIKALTKSPIKFITTRHEQGAAFMADVYGRLTGRPGVCLSTLGPGATNLMTGVADANLDGAPLIAITGQVGTDRMHIESHQHLDLVAMFAPVTKWNKQIVRPDTAPEIVRKAFKTAVDEKPGACHIDLPQNIADMPVQGKPLRHTVTDKSFAAYSSIEKAAIAISRAKSPLILSGNGAIRSKASKAVLDMAERLNIPVANTFMGKGIIPFNHPLSLWSMGLAQKDYINRIFEKTDLVIAIGYDIVEYSPKKWNSKGEIRIIHIGEKKAEVNNSYLPEVEVIGDISDSIQEIIRRSDRIETPKQALKIKEDMHKNYEEYSDDQSFPMKPQKVLYDLRRVMGEDDIVISDVGAHKMWIARNYHCYKPNTCIISNGFASMGIAIPGALAAKLVNPDKKVVAVTGDGGFMMNSQELETALRIGTPFVTLIFNDSNYGLIKWKQEERYGESAYINFTNPDFKMYAESMGLKGYRITKAEELIPTLEEAFSQKVPSVIDCAVDYSENLKLSHKLEELK

SEQ ID NO: 12100 - protein, 254 aa, Clostridium acetobutylicum ATCC 824
MFKINALNNLFVQFFDSINKFVYNIVPDKNYSYGLAIIILTIIIKTLLVPFSIKQIKSSVLMNALQPELKKLQTKLKSDPQKLQQETMKLYKEKNVNPFGGCLLLIIQYPILIALYYVFYSLHIKGIGFLWIHDLSQKATFSNWTTWILPIVSGATTYLSGILTMPPSSDPAQRKQTTTMNIGMSIFLLWMSWNFSAALVLYWTVSNLFQMAQSKIIITAVTAKLEAEKNSVEDSSNIISQNIDNKKNKKNKKK

SEQ ID NO: 12101 - protein, 344 aa, Sulfolobus solfataricus P2
MRILEFDEKRQAVKLHIESEDDLWLLHLILEKDDKVVAKTTRDVGLGKESRRIPMTIILKVDYTEFQEFTNRLRIHGIIEDAPERFGIKGAHHTINLDIGDEIIIIKQQWNKYVLDRLKRQANKRSRIIIALVDFDEYLIAIPFEQGIKILSEKSLRPLNEEEGIIEQNALEIATELAEYVKQYDPDAILLAGPGFFKEEVSKKVNAILKNKKIYIDSVSSATRAGLHEVLKRDIIDKIMTDYEIAIGAKKMEKAMELLAKQPELVTYGLEQVKNAIEMGAVETVLVIEDLLSSDEQERLTIERMLEDIENKRGEVILVPKESPIYFELKNLTGILAILRFRIN

SEQ ID NO: 12102 - protein, 575 aa, Sulfolobus solfataricus P2
MMELNELRETIYKYALQNAVKHNGKAETGPVMSKIIAERPELRSNAREIVKIIKEIIEQVNSLTLEQQLTEIKAKYPELLEEKKHEEKRKVLPPLPNVKGQVVTRFAPNPDGPLHLGNARSAILSYEYAKMYNGKFILRFDDTDPKVKRPILDAYDWIKEDLKWLGIKWEQELYASERLELYYKYARYLIEKGYAYVDTCDSSIFRKFRDSRGKMKEPECLHRSSSPESNLELFEKMLGGKFKEGEAVVRLKTDLSDPDPSQIDWVMLRIIDTAKNPHPRVGSKYWVWPTYNFASIIDDHELGITHVLRAKEHMSNTEKQRYISEYMGWEFPEVLQFGRLRLEGFMMSKSKIRGMLEKGTNRDDPRLPTLAGLRRRGILPDTIKDVIIDVGVKVTDATISFENIAAINRKKLDPVAKRIMFVKDAEEFSVELPESLNAKIPLIPSKQEMNRTIIVNPGDKILIESNDAEDNSILRLMELCNVKVDKHNRKLIFHSKTLDEAKKVNAKIVQWVKSNEKVPVMVEKAERDEIKMINGYAEKIAADLEIDEIVQFYRFGFVRVDRKDENMLRVVFSHD

SEQ ID NO: 12103 - protein, 769 aa, Sulfolobus solfataricus P2
MSASSGEEQKPQRKELILRVMEARQKDVGRGKVRIDIDLLSQIDVSPGDVVEIEGTRKTAALAWPLSPEDTTTGEKDIIRMDGITRKNAGVSIGDKVIVRKAIVKPASTVKLAPSNFSITVDPGFISYVKKRLKEFPLVEGDTVLIPVLGQAIPFTVVQVKPAGIVLVNDDTIISISDKPVEPSRYPRVTYEDIGGMKNIIEKVRELVELPLRHPELFKRLGIEPPKGILLYGPPGVGKTLLAKAIANETDAYFTSINGPEIMSKFYGESEQRLREIFEDAKKHAPAIIFVDEIDAIAPKRDEVIGEVERRVVAQLLTLMDGLENRGNVIVIAATNRPSAVDPALRRPGRFDREIEIPLPDKQGRLEILQIHTRNMPLSKDVDLEKLADMTHGYTGADLSALVREAAMNSLRRYLPKIDLNQDKIPPEILESMEVKMEDFINAFKEIVPSGLREIYIEVPEVKWTDIGGLEEIKEELKEVVEYPLKYSELYQNSGIEPPKGILLFGPPGTGKTMLAKAVATESGANFIAVRGPEILSKWVGESEKAVREIFRKARMYAPAVIFFDEIDSIAPIRGISYDSGVTERIVNQLLAEMDGIEKLENVVVIAATNRPDILDPALLRPGRFEKLIYVPPPDKRARTEILKVHTRNIALGEDISLEDVAEKTEGYTGADLAALVREATMRAIRESMKICIDKTNENCKPTDAECRDKTMKECMKVNGVKVSLRHFEEAMRKVKPSVTQDMLQFYQNWVEKARQQLPKTTVKPSTYA

SEQ ID NO: 12104 - protein, 393 aa, Sulfolobus solfataricus P2
MSGDFDTIRDASSPDEVQLVRLLEEKIKSLQIEIENLRKELNYYKAEMEKMLSPPLIEAVVLDVLPDGRVLVRSSSGPNLVVNIASHIDQKLIKPGISVALNQRGSTILEVLPQKEDPIVKTMEIIERPNVTYSEIGGLEEQIRELREVVELPLKNPEIFREIGVEPPKGVLLYGPPGTGKTMLAKAVATESNAVFIHVVASEFAQKFVGEGARIVRELFEMAKRKAPSIIFIDEIDAIGAKRIDIGTSGEREIQRTLMQLLAELDGFDPLDNVKIIAATNRIDILDPALLRPGRFDRIIEVPLPDFKGRTEIFNIYLKKMKIEDNINLELLSQLTEGFSGADIKNVCVEAAYMAIRDGRNKVTMNDLVEAINKINVKRNKMESMKERREKYS

SEQ ID NO: 12105 - protein, 769 aa, Sulfolobus solfataricus P2
MSTSQSRIVLMSKTYFKRFGKMNNMSQQLKLRVVEARQRDVGRKVARITDYTISRLGIENGDYVEIIGPSGSALAQALIGDGIADNEIRVDGYIRRSIGVGIGDEVTVKRAQVQDATKVVLAPTQPISFSQSFVEYVKDWLMDKPISRGETISVPTYVGSIDFVVVSTQPSQSVRITGRTSLEIRQEPVKESAAVPKVTWEDIGDLEDVKEKIREIVELPMRHPEVFQHLGIEPPKGVLLYGPPGVGKTLLARALANEIGAYFTSINGPEIMSKFYGESEQRLREIFEEAEKNSPAIIFIDEIDAIAPKREEVTGEVEKRVVAQLLTLMDGIKGRGKVIVIGATNRPDAVDPALRRPGRFDREIEIRPPDAKARKEILQVHTRNMPLAEDVDLDKISEQTHGYTGADLAALAREAAMNALRRFINERKINLEQEQIPVDVLKELKVTMQDFIDAMKFIQPTLLREVYVEVPKVKWEDIGGLEEAKQQLREAVEWPLKFPEMFEKLGIRPPKGILLFGPPGTGKTMLAKAVATESGANFIAVRGPEILSKWVGESEKAVREIFRRARQTAPCVIFFDEIDSIAPMRGFTHDSGVTERIVNQLLSEMDGIQSLNRVVVIAATNRPDILDPALLRPGRFDRLIYVPPPDEKARIEILKIYTRTLPIDSSVNLEELAKKLEGYTGADIEALARETTMKVLRQKYYDCLNKAKKECKDQECTDKTIKSCMSNLEIKITMQDFLDTMKIVTPSLTKADIMRYENMVKEIKRSVIG

SEQ ID NO: 12106 - protein, 297 aa, Sulfolobus solfataricus P2
MSDGRLLYLNENSRKFAGFNKEKSPFVIIGIPMDITSSYRPGSRFAPSSIRESAQYIEFYSIRNDVDMGEIGFNDVGDIILHPSNVEENLSRISSVISYFQESGKITISIGGEHTITAGIIKGTKREGLCLVSFDAHLDLRDEYMGYRYDHACVMRRISEYGVKIIEVGTRAVSKEEIEYAKQKGILFFTPQQIRLLGVKETARRIITSTQECKSLYISVDMDGIDPAYAPGVATPEPDGLDPTNLLDIINLIADKRVIGFDIVEVSPSYDTSGITSVLASRIILETAATVYKARSL

SEQ ID NO: 12107 - protein, 572 aa, Sulfolobus solfataricus P2
MPTGARILVDSLKREGVKVVFGIPGLSNMQIYDAFVEDLANGELRHVLMRHEQAAAHAADGYARASGVPGVCTATSGPGTTNLTTGLITAYWDSSPVIAITGNVPRSVMGKMAFQEADAMGVFENVTKYVIGIKRIDEIPQWIKNAFYIATTGRPGPVVVDIPRDIFYEKMEEIKWPEKPLVKGYRDFPTRIDRLALKKAAEILINAERPIILVGTGVVWANATPEVLELAELLHIPIVSTFPGKTAIPHDHPLYFGPMGYYGRAEASMAALESDAMLVVGARFSDRTFTSYDEMVETRKKFIMVNIDPTDGEKAIKVDVGLYGNAKIILRELIKAIITLGQKRDKSAWIKRVKEYKEYYSQFYYTEENGKLKPWKIMKTIRQSLPRDAIVTTGVGQHQMWAEVFWEVLEPRTFLTSSGMGTMGFGLPAAMGAKLARPDKIVVDLDGDGSFLMTGTNLATAVDEHIPVISVIFDNRTLGLVRQVQDLFFGRRIVGVDYGPSPDFVKLAEAFGALGFNATTYEEIEKSIKSAIKEDIPAVIRVPVDKEELALPTLPPGGRLKQVILRDPRKSS

SEQ ID NO: 12108 - protein, 406 aa, Sulfolobus solfataricus P2
MISIVFKLLLYPFCEMKIVLAYSGGLDTTVSIRWLKETFKAEIITVTVDVGQKDDFKKIEERAYIAGASKHYTIDAVRQFANNYIAYAIKLNGLYEGVYPLSTALARPLIAEKVVEVAKKEGAEAVAHGSTSKGNDQVRFDLAVKALYPDVKIIAPARIWNMTREDEIKYAKEKGIPIKVESDKYSIDENLWGRSIEGDIISDPSLEVPEDAFEWTKQIYNKKEIVSIEFSNGVPTAVNGEKMELNKLVDFLNLKFGSHGFGRVEHIENRVVGFKSREVYEVPAALGLIYAHIDLEKTIYTPMELRFKRHIDQLWSDLVYQGLWFEPLRETLHKVADEMNKWISGEAKVEVSNGSFRIVGRESEYSPYSEKIASYNKGWYPSDEMARGFIEIWGMHSLIARRVRGL

SEQ ID NO: 12109 - protein, 314 aa, Sulfolobus solfataricus P2
MKLLLIGYGNVGKAFRRLLHEKKDNYPILQGVEIAGIITRQGLMVGDKENFSPDKQLTVLEAIDYINPDVIVDMSVPNYKDGEPSVSAYIKALSRKIHVITVNKAPLALKFREIFEVAEKTGAKIGFQGTVMSGTPSINLFRIQPVAEVSRIRGILNGTTNYILTRIYEGLSFNEALKEAKEKGYAEEDPTLDLNGFDAAAKLTILSNFIMNRSLKLGDFKFKGITEITNEEIRRAKSEGKKIKLIAYADNYVVQVSPQIIGPQDPLYYIDGVENALEIQNEIQRIIIRGPGAGPINAAYGALSDLVLLLEGCL

SEQ ID NO: 12110 - protein, 747 aa, Sulfolobus solfataricus P2
MIIEYNKLGTILYSRISHKQLYNIFHYSYHEVRLLVYNKYLPIPKQFNDEFWTVEKVEHIRYLSLTGKPYKIFNEDMNSLRVLDKVRFKLDKATSISLTPKANLELEFSGIYMKSPLYLGDMSYGALSGNPNIAIATAADLTETLAGTGEGGLHPEVAKHKRIFVQWASARFGVDIRVLTAGMGVVIKIGQGAKPGIGGHLPGNKVTEPISLTRRIPIGIDAISPAPHHDIYSIEDLGQRIEALKEATGRPVFVKVAATNYIPYIVSGIARMGADGVIIDGHGAGTGATPVVIRDNVGIPIELAIASADKILRREGLRDKFTIIAAGRVSSATDAAKLFALGADIVSVGTGALIAMGCVMVHKCHVGSCPTGLTAKIDGTRVVDTEFGVKMLVNFINGFSLELANILDNLGLNNIRELRGRRDLLYGHGLSKDTLETLGIDGTEDEANPKLGELWNRRIIAYMHELMNKGNPVITSMGSTAPPDVEKPARIIDWLRSDGAQVTRPSIDPYREDVDTSFYLKGGEIYLSLPIIFDITEAPLEYKEAFSWSALALSSAVFDYETIDKYAEVFISSDGRGIARWSRNEIYENSYLLIPADENVIDEVIGMGVQGFIIDEDSGNSDLELVVSALDTKLKEVGVRNHYDILAKSSRLRHSADAFKLILLGADSVIMPYFILEKAIGEGNKGNLKEKAFSLITGMKKEIALLAGAAGVYSVQSTLTGNRELLRSINLNHSIRKALRIKPAGSL

SEQ ID NO: 12111 - protein, 446 aa, Sulfolobus solfataricus P2
MALIVKIGGSIQKDEKDYELIVKKIQDFSKKSDKIIVVTSAIKNVTNELISATSNTDNSPNIVTEIYERHIKLLSKLADGKEFENSFKDISRLSDELFRVAWSIRVLDEVTPRVRDYILSFGERMATLLLSAILRSNGIEAEGIITPPFLTDENYGEANVIEDLSKNEIANILENAKANVIVLPGFIGRTREGRYTTLGRGGSDYTATLLGKLVGVREVRLVTEVPGIMTGDPKKFENAKTISRLSLEEAIELSQLGAKRLHPRTFDPVFGSDMKVIVESLYEDGFTIINGECQNNDGLKGISLLDNAKLITVESTKIVGKIGSAARITNEAKEAGVNIISISQPASETTIQLVVDSLSANRLLSKLEEIRGTLVKDIEVNDINIVGIVGCGIKKKEISTKVLSIASSYDPLAISRGISNVSMTFIVNKDEGEKLAKELHKVIVSG

SEQ ID NO: 12112 - protein, 402 aa, Sulfolobus solfataricus P2
MVSLLDFNGNMSQVTGETTLLYKEIARNVEKTKKIKIIDFGIGQPDLPTFKRIRDAAKEALDQGFTFYTSAFGIDELREKIAQYLNTRYGTDVKKEEVIVTPGAKPALFLVFILYINPSDEVILPDPSFYSYAEVVKLLGGKPIYANLKWSREEGFSIDVDDLQSKISKRTKMIVFNNPHNPTGTLFSPNDVKKIVDISRDNKIILLSDEIYDNFVYEGKMRSTLEDSDWRDFLIYVNGFSKTFSMTGWRLGYIVAKREIIQKMGILAANVYTAPTSFVQKAAVKAFDTFDEVNQMVSLFKKRRDVMYDELTKVKGVEVSKPNGAFYMFPNVSKILKTSGFDVKSLAIKLIEEKGVVTIPGEVFPLNIGKEFLRLSFAVNEEVIKEGIQKIREFAEQMMNSR

SEQ ID NO: 12113 - protein, 372 aa, Sulfolobus solfataricus P2
MSAQVMLEDMARKYAILAVKADKEGKVEDAITYYKKAIEVLSQIIVLYPESVARTAYEQMINEYKKRISYLEKVLPASSDGSGDNTSPPEEVVITEKPKVSFKDIVGLDDVKEALREAIIYPTKRPDLFPLGWPRGILLYGPPGCGKTMIAAAVANEIDSIFMQLDAASVMSKWLGEAEKNVANVFKMAREESKKQNKPAIIFIDELDALLGVYSTEVGGEARVRNQFLKEMDGLLDKSENYKVYVIGATNKPWRLDEAFLRRFQKRIYVPLPDYEQRLSLFKYYTSKIKLDTEVSLEELAKLTEGYTASDIRDIVQAAHIKVVKEMFKNNLGEPRTITLQDFKDILKVRMPSVNPELIKAYEAWTEKFKAL

SEQ ID NO: 12114 - protein, 131 aa, Sulfolobus solfataricus P2
MSITYTTVGELKVGSYVVIDGEPCRVVEVTKAKTGKHGSAKANVVAIGVFSGAKKTLMAPVDQQVEVPIIEKHIGQIIADMGNKIQVMDLESYETFEIEKPTEDELASKIKPNAELEYWEIMGRRKIVRVK

SEQ ID NO: 12115 - protein, 549 aa, Sulfolobus solfataricus P2
MPSVAEVIIRVLEDNGIQRIYGIPGDSIDPLVDAIRKSKVKYVQVRHEEGAALAASVEAKITGKPSACMGTSGPGSIHLLNGLYDAKMDHAPVIALTGQVESDMIGHDYFQEVNLTKLFDDVAVYNQILINPENAEYIIRRAIREAISKRGVAHINLPVDILRKSSEYKGSKNTEVGKVKYSIDFSRAKELIKESEKPVLLIGGGTRGLGKEINRFAEKIGAPIIYTLNGKGILPDLDPKVMGGIGLLGTKPSIEAMDKADLLIMLGASFPYVNFLNKSAKVIQVDIDNSNIGKRLDVNLSYPIPVAEFLNIDIEEKSDKYYEELKGKKEDWLDSISKQENSLDKPMKPQRVAYIVSQKCKKDAVIVTDTGNVTMWTARHFRASGEQTFIFSAWLGSMGIGVPGSVGASFAVENKRQVISFVGDGGFTMTMMEMITAKKYDLPVKIIVYNNSKLGMIKFEQEVMGYPEWGVDLYNPDFTKIAESIGFKGFRLEEPKEAEEIIEDFLNTKGQALLDAIVDPNERPMPPKLTFKQAGEYVLSIFREKLEGI

SEQ ID NO: 12116 - protein, 493 aa, Mentha x piperita
MAALLVFFSVSLILLAVLFHKRKSSLSSRKRPPPSPLRLPVIGHFHLIGALSHRSFTSLSKRYGEVMLLHFGSAPVLVASSAAAAREIMKNQDVIFASRPRLSIFDRLMYSGKGVAFAPYGEHWRNARSMCMLQLLSAKRVQSFGGIREEETSAMIEKIRRSKPTTVVNLSEMFMALTNGVIHRAVLGRKGDGGDDFNRILIKVIKLLGSFNVGDYVPWLSWINRINGVDAEVEKVGTKLDGSMEGILRKYRRKKVGDDETNFVDTLPQFQRESKDTDPVEDDVIKALIFDMVSAGTDTTFAALEWTMAELIKNPRTLKTLQNEVREVSRNKGGITEDDVDRMPYLKAVSKEILRLHPPFAILLPRELTQDANMLGYDIPRGTVVLVNNWAISRDPSLWENPEEFRPERFLETSIDYKGLHFEMLPFGSGRRGCPGSTFAMALYGLALSKLVNEFDFRLGNGDRAEDLDMTEAPGFVVHKKSPLLVLATPRQS

SEQ ID NO: 12117 - protein, 495 aa, Mentha arvensis
MAALLVFFSLSLILLVVLFHKRKSSLSSRKRPPPSPLSLPVIGHFHLIGALSHRSFHSLSKRYGEVMLLHFGSAPVLVASSAAAAREIMKNQDPIFASRPRLSISDRLLYSGRDVAFAAYGEHWRHARSMCVLQMLSAKRVQSFRRIREEETSAMIEKIRRSQPSAVNLSEMFMALTNGVVHRAALGRKDGGGDDFNRTLNKFIELLGSFNVGDYVPWLAWINRINGVDAEVEKVFKKMDGFMEGILQEYRKKKVGDDATTNFVDTLLQFQRESKDTNPVEDDVIKALILDMFVGGTDTTFAALEWTMAELIRNPRTLKALQNEVREVSRNRGGITEDDVDKMPYLRAVSKEILRLRPPFPSLVPRELTQDANLLGYDVPRGTLVLVNNWTVSRDPSLWENPDEFRPERFLETSIDYKGLHFEMLPFGSGRRGCPGITFAMSLYELALSKLVNEFDFRLAMANGDRVEDLDMTEAPGIVVHKKSPLLVLATPRQS

SEQ ID NO: 12118 - protein, 494 aa, Mentha arvensis
MAALLVFFSLSLILLVVLFHKRSSSLLPSRKRRLPPSPSRLPVIGHLHLIGSLAHRSFHSLSKRYGEVMLLHFGSAPVLVASSAAAAREIMKNQDMIFASRPRLSISDRLLYSGKDVAFAAYGEHWRHARSMCVLQLLSAKRVQSFRRIREEETSAMIEKIRRSQPSVVNLSEMFMALTNGVVHRAALGRKDGGGDDSNLTLNKFIELLGRFNVGDYVPWLAWINRINGVDAEVEKVFRKLDGFIEGILREYRMKNDTHASTNFVDTLLQFQRESKDTNPVEDDVIKALILDMFAAGIDTTSAVLEWTMAELIRNPRTLKTLQNEVREVSRNKGGITEDDVDKMPYLKAVSMEILRLHPPFPSLLPRELTQDANMLGYDVPRGTLVLVNNWAISRDPSLWENPEEFRPERFLETSIDYKGMHFEMLPFGSGRRGCPGITFAMSVYELALSKLVNEFDLRLGNGDRAEDLDMTEAPGIVVHKKSPLLVLATPRQS

SEQ ID NO: 12119 - protein, 294 aa, Sulfolobus solfataricus P2
MIIMIIIGGSATNGIDESLSKILSIPLVKVENKIFPDGESYIRVPSSIRDEEVLLVQTTDYPQDKHLIELFLIAETIRDLGAKKLTAIVPYLAYSRQDRRFKDGEAISIKTILHILSEVGVNTLVVVEPHKPEELSYFKGELKIVHPYHQIARKIKEIIEDPFILAPDRGALDRARKIAEEINAPYSYIEKERDRTTGEVRIKEAPNINLKGKDVVIIDDIISTGGTIVQATRLAYSLGAKSVTAAAIHLLLVGGAKERLREVGVKTLIGTNTINVNDKDIITIDVSQSIALSL

SEQ ID NO: 12120 - protein, 509 aa, Sulfolobus solfataricus P2
MKSWKFKALLIGQVILVMLLFSNILAHSQTTTNSSALQQLNQSVQSILNRTSSYPAAAVPSWLDTGSNAWMLTAATFVGLQSVPGVALYYAGLSKKKYAVNSALMIFYAFAAVLVIWIIAGYSFGFGYPALVSIHGYGIFGYPIPAWGGLFEASQTTYGPSGAHANIPTATFIFFQFVFAAITPILLAGGVLERMNFKAWMVFVPFWSLLVYSPVAYWLFAGGWLNQLGAVDFSGGYVIHVDAGVGALAAALAIGPRLASERKLEAHSLPLVLVGAGLIWLGWDGFNGGDPLGATVDAAIAVLNTNIATAVSAVVWMLMDMKFFGKPTLIGATSGAITGLVAITPAAGYVNGWEAALIGIFSGSIPWMALYWLEPKLRVDDTLGVFSTHGIAGIVGGLLTGVFANPAVTQFVAPGLTGALYGNWYQLGIQALAAVIVFVYDFAITFGLLKFIGLFIPLQAPPQELAIGDYAMHGEVAYSELLATIPESAKSKEQSVVLPKKEKEENSEE

SEQ ID NO: 12121 - protein, 647 aa, Sulfolobus solfataricus P2
MGEREAKGARDLGISSDKQLRRSLGKFELLYLSLGGIIGSGWLFASLSTAAYAGGAAILSWIIAGILVMFVGLAYAEIGAAIPKSGGITRYPHYTHGGLVGYIITWAYFLSAASVPAIEAAAAIEYIGSYYPQLITSGTFDGTTVTILTPLGIGLAGLLLIFFFFLNYFGVNILGKVTHGAGWWKLLVPTITFLALLALDLHSANFTLGGGFFPSAQYVKGGSSGIYGFSAVLFAIPSTGVIFAYLGFRQAVEYGGEGKNPSKDIPFAVLGSLLIAIALYTLLQVSFIGGIDWSKLYLVNKTTGILIPVVPGNWSALSTAVTASNVSISSGPFLVLTQIAPVSGLAAAFFTALAVLLTIDAVVSPSGTGWIYTGTSTRTLYAFASNGYLPEIFLKIGKTKIPTYSLIAALIVGFIFLLPFPSWYALVGFISSATVLTYIMGGIGLAVLRKHAKELNRPFRVPASVIIAPIATLAAGLIVYWSSFAILFYVFTGIFLGLPLFFIFYSNRILGINKAYSIVVGVINLVIDLVMAFLLFDETSGLGAANNLFFGIYIVVIAAMLIGDMLFLLKTVPPDVKREINAGWWLIYFILAIYIISYFGGFGLYTIIPFPYDTIVAAIVILIGYFWAIRSGFRTQAIQDIIQATRE

SEQ ID NO: 12122 - protein, 417 aa, Sulfolobus solfataricus P2
MSEKKLLTFWQALFIGLGNIIGAGIFVMAGSTISVAGPGAIIAFIFTAIFAMSIGLNSAELSSIFTDVEGGVYSFTLKTLGEMSGFLVGWFRVISYVIGGAATALGFSGYLLLFGLPKTLYYTLAVILIVILLVLDYFGIGTVAEVDTIFVIINISSLILFSLTIPIIVGIKVHNFVPLFPHGIQGVLTTSNLAFFSYSGFNTIVTLTPSTKNGEKVIPRAIVMSLIITSIIYISVIFSMVDAMPWYYYGQTSAPLSLALSQIHAPTWLFLITSISAILATISVTLSIIVASERTLRQLSRDFQLPVKHELLVVGGIMLASLLLGNVEAIALASNFGIIFSYMLTGLEVIIVRRKGLRGSFRSPAFPVIQVFAIILSALFMISLGLNSLEIGVVTLFIGILVYETLREVKAHENRKK

SEQ ID NO: 12123 - protein, 526 aa, Sulfolobus solfataricus P2
MDGLHVSIVSVALFIILFVIFVFLGFYGSRWRRGDLSKLHEWALAGRRLGPYLMWFLLTADLYTAYTFIAVPSLVLASGPVGFFAAFYSAVTPFIALLFMPRLWTIAKNRGYVTAADFIKDRFNSRILAGLVAITGVVAELPYIALQIVGMQVALLILLLGLGVSNITLASDLSLLVAFIILAAFVFTSGLRGAALTAVYKDIIILGTIISIAIYVPLAFGGFSGAFHNAQTLSSQINLALNNVNKPIFYNYLPNTLAARTAYISLAIGSAFALYLYPHAVNASVSSDSKKSLKLSLALQPFYSIILAVIALFGILVYANSKVVNFIAKTHSGAVAVPALIGYSMPDWFVGIALLGIFIGGLVPAAIMAIGAANLLTRNIIKEFKPNMSPSTESALAKWISTAFKFLALALVFATPSTYAIQLQLLGGIIILQTLPSVFLGLYTSKLNGYALVGGWAGGMFSGIYLTLLANHFGPLKTSSFITPLGPMYIGVLSTLINLAIGLIGTAIAYGAGWRPVSNIRAEEIA

SEQ ID NO: 12124 - protein, 483 aa, Brassica oleracea
MSLLIRSSYVSQFHTRNSKPSSFSDQTPSKSPFFSSFNHNPLINLVYKRNPRMQSLSFPSSMTVKSSLIDPDGGELVELVVPDSEIELKKKEAESMPKVKLTKIDLEWVHVISEGWASPLKGFMREDEYLQSLHFNSLRLKDGSLVNMSLPIVLAIDDQTKEQIGVSKNVALVSPQGDIVGSLRSVEIYKHNKEERIARTWGTTSPALPYVEEHITPSGNWLIGGDLEVFQPVKYNDGLDHYRLSPKQLRKEFDNRKADAVFAFQLRNPVHNGHALLMNDTRKRLLEMGYKNPILLLHPLGGFTKADDVPLDVRMEQHSKVLEDGVLDPETTIVSIFPSPMHYAGPTEVQWHAKARINAGANFYIVGRDPAGMGHPTEKRDLYDPDHGKKVLSMAPGLEKLNILPFRVAAYDTVEKKMAFFDPTRAKEFLFISGTKMRTYRRTGESPPDGFMCPSGWNVLVKYYESLQESDDSSKQQQAVVSA

SEQ ID NO: 12125 - protein, 397 aa, Sulfolobus solfataricus P2
MPESVYIASAVRTPIGKFGGALRNLSPVDLGSIVIREALRRANVEPGKIDMAIMGNVLRAGHGQDIARQCAISAGIPFEIDGFSVDMVCSSGMISVITASQMIKSGDADIIVAGGTENMSQAMFAIKSDIRWGVKMLMNRNIELIDTMLYDGLTDPFQYKVMGQEADMVAKSHNISRKELDEVAYQSHLRAHKATVNGYFKSEIVEIKADGKVINTDEGIRADTSLDKLSSLPPAFTDDGLHTAGNSSQISDGAAALVLVSEKAAKELKIEPIARILGYSWVGIESWRFTEAPIFAIKKLLSKLDTDINHFDYFENNEAFAVNNVLINRYLGIPYDRLNVFGGAIALGHPIGASGARIIVTLLNVLSKMHGTRGIASICHGIGGSTAIAIELLKEMK

SEQ ID NO: 12126 - protein, 607 aa, Sulfolobus solfataricus P2
MIEPVLNLAIIFISLAVLVIILMKIFGKSTAKFAYSDKALQLQNKSQKKKVEIEDKKITWDDIGGYEDAKKEIREYIELPLKNKDVATKYGLKPPKGMLLFGPPGCGKTMMMRALANESKLNFLYVNISDIMSKWYGESEARLRELFNNARKNAPCILFFDEIDTIGVKRESHTGDSVTPRLLSLMLSEIDGLHSEDGVIVVGSTNVPQMLDKALLRAGRFDKLIYIGPPNKEARKQILQIHCRGKPLAEDVDFDKLAEITERYSGADLANLCQEAARKVASEAIEKGADRKITMADFIELIKKYKPSITLQMIEDYEKFRLDFERRVRKGEEENELEEKLTLNDIGGYNEIKTELKELLELQLYHYKLLEQLRVPPIRGILLYGPPGVGKTMMAKALAKTLNVKLIALSGAEIMYKGYEGAIAAIKEVFNRARENKPAIILLDELDAIASKRSYKSYGDSSKIVNQLLTEMDGIRSLKEVVVIGTTNRLKAIDPALLRPGRFDKIIHMPLPNREERLDILMKYIGKEECEKVDCGILADQTEGYSGADLAALAREAKMKVLKSILRGESNRTLTREDLIDALNKIHPSVKKRLSKGSSSNSDHETR

SEQ ID NO: 12127 - protein, 505 aa, Sulfolobus solfataricus P2
MLGLAGIIVFIALFIVFIFLGFYGAFWRKGNLDLLHEWGLAGRRLGTVLVWFLMGADLYTAYTFIAVPSSLYAKGAIYFFAVPYVSLTFAIAMLTMPKLWIVSRNRGYVTAADFVKDRFNSSILAALIALTGVVAELPYIALQIVGMKSVLQMMLLGIGNATLVSEISLIVSFIILAAFTYTSGLRGAALTGVFKDILIWITVISVIVIVPLQYGGFTHAFSVINSANLSARYTTLPSNLQIAYWSLFLGSALALYLYPHSINGSLSADDKNRLMYSTALLPIYGIGLAIIALFGILVYAVPNALSVVSKYGGALVVPALITSTMPDWAAGIMLLGIFVGGLVPAAIMAIAASNLLVRNVIKEVNPSITPKGETTLAKWISAVIKFLALAFVFLVPSTYAINLQLLGGILITQTLPAVFLGLYTKWFNPWALTAGWTTGIISGTYMFFTFGLPRATSLYPTLFGLMYAAVIALVLNLVVSVIGTLVANALGFKTKSNISAEDLKG

SEQ ID NO: 12128 - protein, 305 aa, Sulfolobus solfataricus P2
MRQLDALKSPRFTQISTFGRLPICEKNEEIKAAFLGIPFDDAVTYRPGARFGPMGIRQGSRLLRPYNQFLDTYPFDKLNACDMGDINVIPGYIEDTMNAIQTSLYEIISSKNLVPFIAGGDHSITLPILRTLYKKFGKINIVHFDSHYDFWDSYWGKKYTHGTWLRRAIEEGLIKEAVQGGIRASTFSKEDLRDKERLGIRSFTIRDLKYNLDTVIREINSLSGPTHVSIDIDVVDPAFAPGTGTPEVGGLTSFEIIEIVRKLRFDKLVGFDVVEVAPPYDMSEITAMLAANIIYEGMSVLSLNL

SEQ ID NO: 12129 - protein, 139 aa, Sulfolobus solfataricus P2
MKRILVGYDGSENAERALDFAIELASKFSARLFVVEVIDLTLFYNTGILPPLEATKSLEERAKKDVKRAIEKAKSKGVNAEGITVEGDPANSILQFATDNQIDVIVIGSRGLSKVQRIFLGSVSNKIVQESKVPVVVVK

SEQ ID NO: 12130 - protein, 345 aa, Sulfolobus solfataricus P2
MVVDISSLILAILLDFSVYLMVVISLNVEIGLTGVPNFGRVLAYAGGAFIAGAVPGRILQIIYGLHGDYILNNPSIIAEINDKLLEQPLMALAILILTLALAGIVGATLGYISSYPALRLREDYLGILLLVAGTSLVVVGITYPPIVGGTVGVQVPAVFNALLGQGASLYYKISILLLVFSLIMLLLFNLISNSPMGRAFRAVRENEDLVEVLGRDIGVIRGKAMALGGFLAGVAGSLYAFYIGSVFAGAFDNLTWSFNPYLMLILGGAGTSIGALLGALIYSTLYHVIDLYKQTIGYYLHFDAVWLQYMLFGLVLTIILILRPQGIVVEKAKPLVKPKAKDQKT

SEQ ID NO: 12131 - protein, 406 aa, Sulfolobus solfataricus P2
MNLIGHGKVEIVERIKTISDFKELHRIEVKRQLAHEIVSIAYGFLSPLKGFMNYEEVDGVVENMRLPNGVLWPIPLVFDYSQNEKVKEGDTIGITYLGKPLAIMKVKEIFKYDKLKIAEKVYKTKDIKHPGVKRTLSYADAFLAGDVWLVREPQFNKPYSEFWLTPRMHRTVFEKKGWKRVVAFQTRNVPHTGHEYLMKFAWFAANENQKVDEPRTGILVNVVIGEKRVGDYIDEAILLTHDALSKYGYISPKVHLLSFTLWDMRYAGPREALLHAIIRSNLGCTHHVFGRDHAGVGNYYSPYEAHEIFDSINEEDLLIKPIFLRENYYCPRCGSIENEILCDHKDEKQEFSGSLIRSIILDEVKPTKMVMRPEVYDVLMKAAEQYGFGSPFVTEEYLEKRQSILG

SEQ ID NO: 12132 - protein, 552 aa, Sulfolobus solfataricus P2
MAKTVADIIVEALVKAGIKRIYGIPGDSIDPLMDAIRRNKEIKYIQVRHEEGAAFAASVESKLTSNVTACMGTSGPGSIHLLNGLYDAKMDHASVVALTGQIESDMIGHDYFQEVNMIKLFDDVAVFNQIIINPKNAGYLIWRAVYEAKSKKGVAHLNLPVDILRMEGEEYEGEFYYPKISYDYPDLDKAIELIDKSKSPVIMIGGGARDKSKIVNDFSEKIGAPIIYALNGKGILSDYDDKVMGGIGLLGTKPSVDALNKTDLLILLGTSFPYVNFLPKDVDVIQVDNNPANIGKRIKVSLPIVSDVGEFLLKITPKIKEKDDKFYLKMKDSKEKWFKELSKAENDSSKPMKPQRVAFELSKVFTEGVVVVDTGNVTMWGARNFRASGKQKFVFSAWLGSMGIGIPGAVGASFVSDEVLALVGDGGFAMTMMELITAKKYSRPIKVVIFNNSKLGMIKFEQEVMGYPEWGVELYNPDFSRLAESIGVRSVTVEDPNELSSAIKEMKESEEPFVLNTVVDPNERPMPPKLTFTQAKNYILSVFREKLEPSEE

SEQ ID NO: 12133 - protein, 704 aa, Cochliobolus lunatus
MDCFNIPPLLFKLHSTYQKLGIPNTLKPASTADTVAVILLFLSAWGYFTRGRIWDKPDPHYKLYFERPQLLEDDSSIKKAATRNVAKRLQEENYPLAIFWGSQSGTAERFAEVLRRECLTHFGLNALVADLSEYDAGSIAEIDKTHFAIFILSTYGEGDPSDNASELWDWIKQGKTQGTMLQNLRYLALGLGNSNYKYYNRVLDVVVEALDSAGATALMPPQKADDAVGATEEDFQSWKDDVFALLRGMNYEMRTLAYQPTLNVELSNRTDEKTDTRVFPHHQHSTTNSAIFSLPIRKSRELFKAGDRNCIHMELDLGSSDVVYKTGDHIGIWPCNPDDEVERLLRVLGLEQRQNQILNVTATDDSVKPKIPSGNTVASVLRHHLEICAPVSRKTILDFSHFAPTATAKAMLLEIGQSRDRYTRLTSSTHITLGKLLALASPIQPWTSLPLSFVIESLRCLSPRYYSISSSSVISPRRITVTVLVVNKPIESDPQTIIHGLTSNYILSASNLSSNASTPTPSFQHAICMPFECREIHAHIRKSKFKLPITPSTPLILIAAGTGFAPFRAFLSERAKLHMLGKKVGRILLFFGCRHPDSDFIYHEELKKLQENLGEELEIVTAFSRYGEKRVYVQDRVAEYGDQVLEMLDIGANLYVCGKAAMSREVDRQIEAAVKRYRGLKDGEVREWVDGLKRRGKWRADVWG

SEQ ID NO: 12134 - protein, 696 aa, Cochliobolus lunatus
MAQLDTLDIIVLAVLLVGTVAYFTKGTYWAVSADPYGSSLATANGAAKAGKSRNIIEKMDETDKNCVVFYGSQTGTAEDYASRISKEGHSRFGLKTMVADLEEYDYDNLDTFPEDKLAVFVLATYGEGEPTDNAVEFYEFIGSEDISFSQGGGIDDKPLSNLKYVAFGLGNNTYEHYNSMVRNVDKYLTRLGATRLGAAGEGDDGAGTMEEDFLAWKEPMWAAVAEKMGLEEREAMYEPVFEVTEKPELSPEDDTVYLGEPNKNHLEGNQKGPFNANNPFIAPIVESAELFKDSDRNCLHMEISIAGSNLSYTTGDHIAIWPTNAGKEVDRLFKVLGKEDKRHTVISVRGLDPTAKVPFPSPTTYDAALRYHIEINAAVSRQLVSVVAQFAPNEDIKAEIVKLGGDKDYFKEQVTDRNLNLGQLLEITGKGATWDKIPFSFLFETMVKIQPRYYSISSSSLVQKDKISITAVVESIEKPGAPYALKGVTTNYLLALKQKQHGDPNPDPHGLSYSITGPRNKYDGIHVPVHVRHSNFKLPSDPSKPIIMVGPGTGVAPFRGFVQERAAQAKAGQNVGKTVLFFGCRKQSEDFMYADEWKQYQQDLGDKFEMHTAFSRDGPQKVYVQHKLEENGEEVNRLLEQKAYFYVCGDAAHMAREVNTLLGKIIAKYRNVSETKGEEIVKAMRASNQYQEDVWS

SEQ ID NO: 12135 - protein, 322 aa, Streptococcus pneumoniae TIGR4
MSFSDLKLFALSSNKELAERVAQEIGIELGKSSVRQFSDGEIQVNIEESIRGKHVFILQSTSSPVNDNLLEILIMVDALKRASAESVNVVMPYYGYARQDRKARAREPITSKLVANMLEVAGVDRLLTIDLHAAQIQGFFDIPVDHLMGAPLIADYFERRGMVGSDYVVVSPDHGGVTRARKLAEFLKTSIAIIDKRRSVDKMNTSEVMNIIGKVEGKTCILIDDMIDTAGTICHAADALAEAGAVEVYASCTHPVLSGPATDNIQKSAIKKLVVLDTIYLPEERLIDKIEQISIAHLLGDAIVRIHEKRPLSPLFDIEKKI

SEQ ID NO: 12136 - protein, 389 aa, Streptococcus pneumoniae TIGR4
MDLTKRFNKQLDKIQVSLIRQFDQAISEIPGVLRLTLGEPDFTTPDHVKEAGKRAIDQNQSYYTGMSGLLTLRQAASDFVKEKYQLDYAPENEILVTIGATEALSATLTAILEEGDKVLLPAPAYPGYEPIVNLVGAEIVEIDTTENGFVLTPEMLEKAILEQGDKLKAVILNYPANPTGITYSREQLEALAAVLRKYEIFVVCDEVYSELTYTGEAHVSLGTMLRDQAIIINGLSKSHAMTGWRLGLIFAPATFTAQLIKSHQYLVTAANTMAQHAAVEALTAGKNDAEPMKKEYIQRRDYIIEKMTALGFEIIKPDGAFYIFAKIPAGYNQDSFAFLKDFAQKKAVAFIPGAAFGRYGEGYVRLSYAASMETIKEAMKRLEEYMREA

SEQ ID NO: 12137 - protein, 232 aa, Streptococcus pneumoniae TIGR4
MGKTILLVDDEVEITDIHQRYLIQAGYQVLVAHDGLEALELFKKKPIDLIITDVMMPRMDGYDLISEVQYLSPEQPFLFITAKTSEQDKIYGLSLGADDFIAKPFSPRELVLRVHNILRRLHRGGETELISLGNLKMNHSSHEVQIGEEMLDLTVKSFELLWILASNPERVFSKTDLYEKIWKEDYVDDTNTLNVHIHALRQELAKYSSDQTPTIKTVWGLGYKIEKPRGQT

SEQ ID NO: 12138 - protein, 268 aa, Streptococcus pneumoniae TIGR4
MNKMKKVLMTMFGLVMLPLLFACSNNQSAGIEAIKSKGKLVVALNPDFAPFEYQKVVDGKNQIVGSDIELAKAIATKLGVELELSPMSFDNVLASVQSGKADLAISGVSKTDERSKVFDFSIPYYTAKNKLIVKKSDLTTYQSVNDLAQKKVGAQKGSIQETMAKDLLQNSSLVSLPKNGNLITDLKSGQVDAVIFEEPVSKGFVENNPDLAIADLNFEKEQDDSYAVAMKKDSKKLKEAVDKTIQKLKESGELDKLIEDAFKASIEK

SEQ ID NO: 12139 - protein, 222 aa, Streptococcus pneumoniae TIGR4
MEFMLDTLNLDEIKKWSEILPLAGVTSNPTIAKREGSINFFERIKDVRELIGSTPSIHVQVISQDFEGILKDAHKIRRQAGDDIFIKVPVTPAGLRAIKALKKEGYHITATAIYTVIQGLLAIEAGADYLAPYYNRMENLNIDSNSVIRQLALAIDRQNSPSKILAASFKNVAQVNNALAAGAHAVTAGADVFESAFAMPSIQKAVDDFSDDWFVIQNSRSI

SEQ ID NO: 12140 - protein, 362 aa, Streptococcus pneumoniae TIGR4
MRIFASPSRYIQGENALFENAKSILDLGNCPILLCDQLVYDIVGKRFEDYLHRYGFHIVLALFNGEASDNEINRVVALAEKENCDSIIGLGGGKTIDSAKAIADLIEKPVIIAPTIASTDAPVSALSVIYTDEGAFDHYLFYSKNPDLVLVDTKVISQAPKRLLASGIADGLATWVEARAVMQANGKTMLGQQQTLAGVAIAKKCEETLFADGLQAMAACEAKVVTPALENIVEANTLLSGLGFESGGLAAAHAIHNGFTALTGDIHHLTHGEKVAYGTLVQLLLENRPKEELDKYIEFYKKIGMPTTLKEMHLDQVGYDDLIKVGKQATMEGETIHQMPFKISPSDVAQAIIAVDAYVNSK

SEQ ID NO: 12141 - protein, 454 aa, Streptococcus pneumoniae TIGR4
MKVVKFGGSSLASASQLEKVLNIVKSDSERRFVVVSAPGKRNAEDTKVTDALIKYYRDYVAGNDISKNQSWIIDRYAAMVSELGLKPAVLEKISKSIHALATLPIEENEFLYDTFLAAGENNNAKLIAAYFNQNGIDARYMHPREAGIVVTSEPGHARIIPSSYDKIEELTNTNEVLVIPGFFGVTKENQICTFSRGGSDITGSIIAAGVKADLYENFTDVDGIFAAHPGIIHQPHSIPELTYREMRELAYAGFSVLHDEALLPAYRGKIPLVIKNTNNPDHPGTRIVLKHSNDEFPVVGIAGDSGFVSINMSKYLMNREVGFGRKVLQILEELNIGWEHMPTGIDDLSIILRSRQLTPIKEEEILRQLVQKAKVDHAEIEHDLSIIMIVGEKMKSHIGVTATATRALSENKINIQMMSQGSSEVSIMFVVNKDQEKAAIKALYNAFFGESKED

SEQ ID NO: 12142 - protein, 566 aa, Streptococcus pneumoniae TIGR4
MEKISLESPKTGSDLVLETLRDLGVDTIFGYPGGAVLPFYDAIYNFKGIRHILGRHEQGCLHEAEGYAKSTGKLGVAVVTSGPGATNAITGIADAMSDSVPLLVFTGQVARAGIGKDAFQEADIVGITMPITKYNYQVRETADIPRIITEAVHIATTGRPGPVVIDLPKDISALETDFIYSPEVNLPSYQPTLEPNDMQIKKILKQLSKAKKPVLLAGGGISYAEAATELNEFAERYQIPVVTSLLGQGTIATSHPLFLGMGGMHGSFAANIAMTEADFMISIGSRFDDRLTGNPKTFAKNAKVAHIDIDPAEIGKIISADIPVVGDAKKALQMLLAEPTVHNNTEKWIEKVTKDKNRVRSYDKKERVVQPQAVIERIGELTNGDAIVVTDVGQHQMWTAQYYPYQNERQLVTSGGLGTMGFGIPAAIGAKIANPDKEVVLFVGDGGFQMTNQELAILNIYKVPIKVVMLNNHSLGMVRQWQESFYEGRTSESVFDTLPDFQLMAQAYGIKNYKFDNPETLAQDLEVITEDVPMLIEVDISRKEQVLPMVPAGKSNHEMLGVQFHA

SEQ ID NO: 12143 - protein, 254 aa, Streptococcus pneumoniae TIGR4
MISLFGLAAAKPVQADTSIADIQKRGELVVGVKQDVPNFGYKDPKTGTYSGIETDLAKMVADELKVKIRYVPVTAQTRGPLLDNEQVDMDIATFTITDERKKLYNFTSPYYTDASGFLVNKSAKIKKIEDLNGKTIGVAQGSITQRLITELGKKKGLKFKFVELGSYPELITSLHAHRIDTFSVDRSILSGYTSKRTALLDDSFKPSDYGIVTKKSNTELNDYLDNLVTKWSKDGSLQKLYDRYKLKPSSHTAD

SEQ ID NO: 12144 - protein, 256 aa, Streptococcus pneumoniae TIGR4
MSVLEIKDLHVEIEGKEILKGVNLTLKTGEIAAIMGPNGTGKSTLSAAIMGNPNYEVTKGEVLFDGVNILELEVDERARMGLFLAMQYPSEIPGITNAEFLRAAMNAGKEDDEKISVREFITKLDEKMELLNMKEEMAERYLNEGFSGGEKKRNEILQLLMLEPTFALLDEIDSGLDIDALKVVSKGVNAMRGEGFGAMIITHYQRLLNYITPDVVHVMMEGRVVLSGGPELAARLEREGYAKLAEELGYDYKEEL

SEQ ID NO: 12145 - protein, 380 aa, Streptococcus pneumoniae TIGR4
MIYFDNSATTKPYPEALETYMQVASKILGNPSSLHRLGDQATRILDASRQQIADLIGKKSDEIFFTSGGTEGDNWLIKGVAFEKAQFGKHIIVSAIEHPAVKESALWLKSQGFEVDFAPVDKKGLVDVEALAGLIRHDTILVSIMAVNNEIGSIQPIEAISEFLADKPTISFHVDAVQALAKIPTEKYLTERVDCATFSSHKFHGVRGVGFVYIKSGKKITPLLTGGGQERDYRSTTENVAGIAATAKALRLSMEKLDIFRSKTGQMKAVIRQALLNYPDIFVFSDEENFAPHILTFGIKGVRGEVIVHAFEDYDIFISTTSACSSKAGKPAGTLIAMGVDKDKAKSAVRLSLDLENDMSQVEQFLTKLKLIYNQTRKVR

SEQ ID NO: 12146 - protein, 491 aa, Streptococcus pneumoniae TIGR4
MKELDQNQAPIYEALVKLRKKRIVPFDVPGHKRGRGNPELVELLGEKCVGIDVNSMKPLDNLGHPISIIRDAEELAADAFGASHAFLMIGGTTSSVQTMILATCKAGDKIILPRNVHKSAINALVLCGAIPIYIEMSVDPKIGIALGLENDRVAQAIKDHPDAKAILINNPTYYGICSDLKGLTEMAHEAGMMVLVDEAHGAHLHFTDKLPISAMDAGADMAAVSMHKSGGSLTQSSILLIGEQMNSEYVRQIINLTQSTSASYLLMASLDISRRNLALRGKESFEKVIELSEYARREINAIGGYYAYSKELIDGVSVCDFDVTKLSVYTQGIGLTGIEVYDLLRDEYDIQIEFGDIGNILAYISIGDRIQDIERLVGALADIKRLYSRDGKDLIAGEYIQPELVLSPQEAFYSERKSLTLDDSVGQVCGEFVMCYPPGIPILAPGERITREIVDYIQFAKERGCSLQGTEDPEVNHINVIKRKTNYKKSQ

SEQ ID NO: 12147 - protein, 299 aa, Streptococcus pneumoniae TIGR4
MTFKSGFVAILGRPNVGKSTFLNHVMGQKIAIMSDKAQTTRNKIMGIYTTDKEQIVFIDTPGIHKPKTALGDFMVESAYSTLREVDTVLFMVPADEARGKGDDMIIERLKAAKVPVILVVNKIDKVHPDQLLSQIDDFRNQMDFKEIVPISALQGNNVSRLVDILSENLDEGFQYFPSDQITDHPERFLVSEMVREKVLHLTREEIPHSVAVVVDSMKRDEETDKVHIRATIMVERDSQKGIIIGKGGAMLKKIGSMARRDIELMLGDKVFLETWVKVKKNWRDKKLDLADFGYNEREY

SEQ ID NO: 12148 - protein, 463 aa, Streptococcus pneumoniae TIGR4
MNIFRTKNVSLDKTEMHRHLKLWDLILLGIGAMVGTGVFTITGTAAATLAGPALVISIVISALCVGLSALFFAEFASRVPATGGAYSYLYAILGEFPAWLAGWLTMMEFMTAISGVASGWAAYFKGLLSQYGIAFPQALNGTFNPQAGTFVDLLPILVLVLVTSLVLLNAKAALRFNSILVILKFSALALFVLVGIWNIKFDNWSNFAPYGFGQIYGASTGIMAGASLMFFGFLGFESISMAVDEVKTPQKNIPRGIVLSLSIVTILYALVTLVLTGVVHYSHLNVDDAVAFALRSVGISWAANYVSLVAILTLITVCISMTYALSRMIYSLARDGLVPAAFKELTKTSKIPKNATILTGLASAVAAGMFPLASIAAFLNICTLAYLIMLAYGLIRLRKEKGMPKAGEFKTPLVPLLPILSIIICLSFMLQYNMNTWIAFLVALLVGSIIYFTYGYKHSTIEE

SEQ ID NO: 12149 - protein, 434 aa, Streptococcus pneumoniae TIGR4
MFLDTAKIKVKAGNGGDGMVAFRREKYVPNGGPWGGDGGRGGNVVFVVDEGLRTLMDFRYNRHFKADSGEKGMTKGMHGRGAEDLRVRVPQGTTVRDAETGKVLTDLIEHGQEFIVAHGGRGGRGNIRFATPKNPAPEISENGEPGQERELQLELKILADVGLVGFPSVGKSTLLSVITSAKPKIGAYHFTTIVPNLGMVRTQSGESFAVADLPGLIEGASQGVGLGTQFLRHIERTRVILHIIDMSASEGRDPYEDYLAINKELESYNLRLMERPQIIVANKMDMPESQENLEDFKKKLAENYDEFEELPAIFPISGLTKQGLATLLDATAELLDKTPEFLLYDESDMEEEAYYGFDEEEKAFEISRDDDATWVLSGEKLMKLFNMTNFDRDESVMKFARQLRGMGVDEALRARGAKDGDLVRIGKFEFEFVD

SEQ ID NO: 12150 - protein, 360 aa, Streptococcus pneumoniae TIGR4
MSAVAISAMTKVMQETHGNPSSIHGHGRQAGKLLREARQELAQLLRTKPQHIFFTSGGTEGNNTTIIGYCLRHQEQGKHIITTAIEHHAVLETIDYLVQHFGFEATIIQPENQEITAQQIQKALRDDTILVSTMFVNNETGNLLPIAEIGQILKQHPAAYHVDAVQAIGKIPIHSEELGIDFLTASAHKFHGPKGIGFLYASSMDFDSYLHGGDQEQKKRAGTENLPAIVGMVAALKEDLEKQEEHFQHVQNLETAFLAELEGIQYYLNRGKHHLPYVLNIGFPGQKNDLLLLRLDLAGISISTGSACTAGVVQSSHVLEAMYGANSERLKESLRISLSPQNTVEDLQTLAKTLKEIIGG

SEQ ID NO: 12151 - protein, 319 aa, Streptococcus pneumoniae TIGR4
MSDRKNMKLFALNSNQEIAQKIAQAVGVPLGKLSSRQFSDGEIQVNIEESVRGYDVYIIQSTSFPVNNHLMELLIMVDACVRASAHSINVVLPYFGYARQDRIACPREPLTAKLVANMLVKAGVDRILTLDLHAVQVQGFFDIPVDNLFTVPLFAKHYCDKGLLGSDVVVVSPKNSGVKRARSLAEYLDAPIAIIDYPQDDATRNEGYIIGDVEGKKAILIDDILNTGRTFSEASKIVEREGATEIYAVSSHGLFVEGAAELLDNTNIKEILVTDSVATKEKTPKNVCYITASELIGDAIVRIHERKPVSPLFAYNKKK

SEQ ID NO: 12152 - protein, 324 aa, Streptococcus pneumoniae TIGR4
MEVFESLKANLVGKNARIVLPEGEEPRILQATKRLVKETEVIPVLLGNPEKIKIYLEIEGIMDGYEVIDPQHYPQFEEMVSALVERRKGKMTEEDVRKVLVEDVNYFGVMLVYLGLVDGMVSGAIHSTASTVRPALQIIKTRPNVTRTSGAFLMVRGTERYLFGDCAININPDAEALAEIAINSAITAKMFGIEPKIAMLSYSTKGSGFGESVDKVVEATKIAHDLRPDLEIDGELQFDAAFVPETAALKAPGSTVAGQANVFIFPGIEAGNIGYKMAERLGGFAAVGPVLQGLNKPVNDLSRGCNADDVYKLTLITAAQAVHQ

SEQ ID NO: 12153 - protein, 104 aa, Streptococcus pneumoniae TIGR4
MSTYAIIKTGGKQVKVEVGQAVYVEKLNVEAGQEVTFNEVVLVGGENTVVGTPLVAGATVVGTVEKQGKQKKVVTYKYKPKKGSHRKQGHRQPYTKVVINAINA

SEQ ID NO: 12154 - protein, 271 aa, Streptococcus pneumoniae TIGR4
MKSKKWIFVLCNFLASFFLVACQSGSNGSQSAVDAIKQKGKLVVATSPDYAPFEFQSLVDGKNQVVGADIDMAQAIADELGVKLEISSMSFDNVLTSLQTGKADLAVAGISATDERKEVFDFSIPYYENKISFLVRKADVEKYKDLTSLESANIAAQKGTVPESMVKEQLPKVQLTSLTNMGEAVNELQAGKIDAVHMDEPVALSYAAKNAGLAVATVSLKMKDGDANAVALRKNSDDLKEVVDKVVQKLKDEGTYQSYLEKAASLTEVEE

SEQ ID NO: 12155 - protein, 245 aa, Streptococcus pneumoniae TIGR4
MGLTYQMKMKIPFDMADMNGHIKLPDVILLSLQVSGMQSIELGVSDKAILEEYNLVWIIVEYDIEVVRLPRFAEEITIETEALSYNRLFCYRRFTIYNEAEQELIHMMATFVLMDRDSRKVHVVEPEIVAPYQSDFDKKLIRGPKYESLEEPISKDYHVRFYDLDMNGHVNNSKYLDWIFEVMGADFLTHYIPKKINLKYVKEVRPGGVITSAVERTGLESKHEITSDGVINAQAIITWQEIKKA

SEQ ID NO: 12156 - protein, 395 aa, Streptococcus pneumoniae TIGR4
MKLSNRVLEMEESVTLAAGARAKALKAEGRDILSLTLGEPDFTTPKNIQDAAIASIRDGRASFYTVTSGLPELKAAVNSYFERFYGYSVASNQVTVAAGAKYSLYTFFMAVVNPGDEVIIPTPYWVSYGDQVKMAEGVPVFVSAKEDNHFKVTVEQLEAARTDKTKVLVLNSPSNPTGMIYTREELLAIGNWAVENDILILADDIYGRLVYNGHEFTPISSLSEAIRKQTVVINGVSKTYAMTGWRIGYAVGEADIIAAMSKIAGQTTSNPSAVAQYAAVEALSGEQDTVESMRQAFEERLNTIYPLLAEVPGFEVVKPQGAFYLFPNVKKAMEMKGYTDVTDFTTVILEEAEVALVTGAGFGAPENVRLSYATDLDTLKEAVERLKAFMGSEND

SEQ ID NO: 12157 - protein, 368 aa, Streptococcus pneumoniae TIGR4
MEEILCIGCGATIQTTDKAGLGFTPQSALEKGLETGEVYCQRCFRLRHYNEITDVQLTNDDFLKLLHEVGDSDALVVNVIDIFDFNGSVIPGLPRFVSGNDVLLVGNKKDILPKSVKSGKISQWLMKRAHEEGLRPVDVVLTSAQNKHAIKEVIDKIEHYRKGRDVYVVGVTNVGKSTLINAIIQEITGDQNVITTSRFPGTTLDKIEIPLDDGSYIYDTPGIIHRHQMAHYLTAKNLKYVSPKKEIKPKTYQLNPEQTLFLGGLGRFDFIAGEKQGFTAFFDNELKLHRSKLEGASAFYDKHLGTLLTPPNSKEKEDFPRLVQHVFTIKDKTDLVISGLGWIRVTGIAKVAVWAPEGVAVVTRKAII

SEQ ID NO: 12158 - protein, 330 aa, Streptococcus pneumoniae TIGR4
MKKSFIHQQEEISFVKNTFTQYLKDKLEVVEVQGPILSKVGDGMQDNLSGVENPVSVKVLQIPDATYEVVHSLAKWKRHTLARFGFGEGEGLFVHMKALRPDEDSLDATHSVYVDQWDWEKVIPNGKRNIVYLKETVEKIYKAIRLTELAVEARYDIESILPKQITFIHTEELVERYPDLTPKERENAICKEFGAVFLIGIGGELPDGKPHDGRAPDYDDWTSESENGYKGLNGDILVWNESLGGAFELSSMGIRVDEETLRRQVEITGDEDRLELEWHKSLLNGLFPLTIGGGIGQSRMAMFLLRKRHIGEVQTSVWPQEVRDTYENIL

SEQ ID NO: 12159 - protein, 396 aa, Streptococcus pneumoniae TIGR4
MTKTIAINAGSSSLKWQLYLMPEEKVLAKGLIERIGLKDSISTVKFDGRSEQQILDIENHIQAVKILLDDLIRFDIIKAYDEITGVGHRVVAGGEYFKESTVVEGDVLEKVEELSLLAPLHNPANAAGVRAFKELLPDITSVVVFDTSFHTSMPEKAYRYPLPTKYYTENKVRKYGAHGTSHQFVAGEAAKLLGRPLEDLKLITCHIGNGGSITAVKAGKSVDTSMGFTPLGGIMMGTRTGDIDPAIIPYLMQYTEDFNTPEDISRVLNRESGLLGVSANSSDMRDIEAAVAEGNHEASLAYEMYVDRIQKHIGQYLAVLNGADAIVFTAGVGENAESFRRDVISGISWFGCDVDDEKNVFGVTGDISTEAAKIRVLVIPTDEELVIARDVERLKK

SEQ ID NO: 12160 - protein, 339 aa, Streptococcus pneumoniae R6
MENLVKSTSDTYIPEEIMSFSDLKLFALSSNKELAERVAQEIGIELGKSSVRQFSDGEIQVNIEESIRGKHVFILQSTSSPVNDNLLEILIMVDALKRASAESVNVVMPYYGYARQDRKARAREPITSKLVANMLEVAGVDRLLTIDLHAAQIQGFFDIPVDHLMGAPLIADYFERRGMVGSDYVVVSPDHGGVTRARKLAEFLKTSIAIIDKRRSVDKMNTSEVMNIIGKVEGKTCILIDDMIDTAGTICHAADALAEAGAVEVYASCTHPVLSGPATDNIQKSAIKKLVVLDTIYLPEERLIDKIEQISIAHLLGDAIVRIHEKRPLSPLFDIEKKI

SEQ ID NO: 12161 - protein, 389 aa, Streptococcus pneumoniae R6
MDLTKRFNKQLDKIQVSLIRQFDQVISEIPGVLRLTLGEPDFTTPDHVKEAAKRAIDQNQSYYTGMSGLLTLRQAASDFVKEKYQLDYAPENEILVTIGATEALSATLTAILEEGDKVLLPAPAYPGYEPIVNLVGAEIVEIDTTENGFVLTPEMLEKAILEQGDKLKAVILNYPANPTGITYSREQLEALAAVLRKYEIFVVCDEVYSELTYTGEAHVSLGTMLRDQAIIINGLSKSHAMTGWRLGLIFAPATFTAQLIKSHQYLVTAANTMAQHAAVEALTAGKNDAEPMKKEYIQRRDYIIEKMTALGFEIIKPDGAFYIFAKIPAGYNQDSFAFLKDFAQKKAVAFIPGAAFGRYGEGYVRLSYAASMETIKEAMKRLEEYMREA

SEQ ID NO: 12162 - protein, 265 aa, Streptococcus pneumoniae R6
MKKVLMTMFGLVMLPLLFACSNNQSAGIEAIKSKGKLVVALNPDFAPFEYQKVVDGKNQIVGSDIELAKAIATELGVELELSPMSFDNVLASVQSGKADLAISGVSKTDERSKVFDFSTPYYTAKNKLIVKKSDLATYQSVNDLAQKKVGAQKGSIQETMAKDLLQNSSLVSLPKNGNLITDLKSGQVDAVIFEEPVAKGFVENNPDLAIADLNFEKEQDDSYAVAMKKDSKELKEAVDKTIQKLKESGELDKLIEDAFKASIEK

SEQ ID NO: 12163 - protein, 415 aa, Streptococcus pneumoniae R6
MRMPLKRPLKNRKKEKNMSKEKVILAYSGGLDTSVAITWLKKDYDVVAVCMDVGEGKDLDFIHDKALKVGAVESYVIDVKDEFATDYVLVAHQSHAYYEQKYPLVSALSRPLISKKLVEIAHQIGATTIAHGCTGKGNDQVRFEVSIAALDLNLKVIAPVREWKWSREEEIYYAKENGVPVPADLDNPYSVDQNLWGRANECGILENPWNQAPEEAFGITTSPEQAPDMPEYIEIEFSEGVPVSLNGEVLKLADLIQKLNEIAGKHGVGRIDHVENRLVGIKSREIYECPGAVTLLTAHKEIEDLTLVREVAHFKPIIENELSNLIYNALWFSSATQALIAYIKETQKVVNGTAKVKLYKGSAQVVARKSPSSLYDENLATYTSADTFDQDAAVGFIKLWGLPTKVHSEVQKSAK

SEQ ID NO: 12164 - protein, 222 aa, Streptococcus pneumoniae R6
MEFMLDTLNLDEIKKWSEILPLAGVTSNPTIAKREGSINFFERIKDVRELIGSTPSIHVQVISQDFEGILKDAHEIRRQAGDDIFIKVPVTPAGLRAIKVLKKEGYHITATAIYTVIQGLLAIEAGADYLAPYYNRMENLNIDSNSVIRQLVLAIDRQNSPSKILAASFKNVAQVNNALAAGAHAVTAGADVFESAFAMPSIQKAVDDFSDDWFVTQNSRSI

SEQ ID NO: 12165 - protein, 362 aa, Streptococcus pneumoniae R6
MRIFASPSRYIQGENALFENAKSILDLGNYPILLCDQLVYDIVGKRFEDYLHRYGFHIVLALFNGEASDNEINRVVALAEKENCDSIIGLGGGKTIDSAKAIADLIEKPVIIAPTIASTDAPVSALSVIYTDEGAFDHYLFYSKNPDLVLVDTKVISQAPKRLLASGIADGLATWVEARAVMQANGKTMLGQQQTLAGVAIAKKCEETLFADGLQAMAACEAKVVTPALENIVEANTLLSGLGFESGGLAAAHAIHNGFTALTGDIHHLTHGEKVAYGTLVQLLLENRPKEELDKYIEFYKKIGMPTTLKEMHLDQVGYDDLIKVGKQATMEGETIHQMPFKISPSDVAQAIIAVDAYVNSK

SEQ ID NO: 12166 - protein, 454 aa, Streptococcus pneumoniae R6
MKVVKFGGSSLASASQLEKVLNIVKSDSERRFVVVSAPGKRNAEDTKVTDALIKYYRDYVAGNDISKSQSWIIDRYAAMVSELGLKPAVLEKISKSIHALATLPIEENEFLYDTFLAAGENNNAKLIAAYFNQNGIDARYMHPREAGIVVTSEPGHARIIPSSYDKIEELTNTNEVLVIPGFFGVTKENQICTFSRGGSDITGSIIAAGVKADLYENFTDVDGIFAAHPGIIHQPHSIPELTYREMRELAYAGFSVLHDEALLPAYRGKIPLVIKNTNNPDHPGTRIVLKHSNDEFPVVGIAGDSGFVSINMSKYLMNREVGFGRKVLQILEELNIGWEHMPTGIDDLSIILRSRQLTPIKEEEILRQLVQKAKVDHAEIEHDLSIIMIVGEKMKSHIGVTATATRALSENKINIQMMSQGSSEVSIMFVVNKDQEKAAIKALYNAFFGESKED

SEQ ID NO: 12167 - protein, 566 aa, Streptococcus pneumoniae R6
MEKISLESPKTGSDLVLETLRDLGVDTIFGYPGGAVLPFYDAIYNFKGIRHILGRHEQGCLHEAEGYAKSTGKLGVAVVTSGPGATNAITGIADAMSDSVPLLVFTGQVARAGIGKDAFQEADIVGITMPITKYNYQVRETADIPRIITEAVHIATTGRPGPVVIDLPKDISALETDFIYSSEVNLPSYQPTLEPNDMQIKKILKQLSKAKKPVLLAGGGISYAEAATELNEFAERYQIPVVTSLLGQGTIATSHPLFLGMGGMHGSFAANIAMTEADFMISIGSRFDDRLTGNPKTFAKNAKVAHIDIDPAEIGKIISADIPVVGDAKKALQMLLAEPTVHNNTEKWIEKVTKDKNRVRSYDKKERVVQPQAVIERIGELTNGDAIVVTDVGQHQMWTAQYYPYQNERQLVTSDGLGTMGFGIPAAIGAKIANPDKEVVLFVGDGGFQMTNQELAILNIYKVPIKVVMLNNHSLGMVRQWQESFYEGRTSESVFDTLPDFQLMAQAYGIKNYKFDNPETLAQDLEVITEDVPMLIEVDISRKEQVLPMVPAGKSNHEMLGVQFHA

SEQ ID NO: 12168 - protein, 264 aa, Streptococcus pneumoniae R6
MKKKFFLSALLISLFGLAAAKPVQADTSIADIQKRGELVVGVKQDVPNFGYKDPKTGTYSGIETDLAKMVADELKVKIRYVPVTAQTRGPLLDNEQVDMDIATFTITDERKKLYNFTSPYYTDASGFLVNKSAKIKKIEDLNGKTIGVAQGSITQRLITELGKKKGLKFKFVELGSYPELITSLHAHRIDTFSVDRSILSGYTSKRTALLDDSFKPSDYGIVTKKSNTELNDYLDNLVTKWSKDGSLQKLYDRYKLKPSSHTAD

SEQ ID NO: 12169 - protein, 399 aa, Microcystis aeruginosa PCC 7806
MYSPSTLAGNRLFVYEVAGLNQNDNTDSLDYSIRQSGSVFFTVPYSRMNQEMRRITRLGGRIVSIKPFNGIAPVATVSSASTPQPIAQSSPVPEQTKKKAMTQAKEKTDIPVNIYRPNQPFIGKCIENYPLVDEGGIGIVQHVTFDLSGSDLRYLEGQSIGIIPPGTDANGKPHKLRLYSIASTRHGDKLDDKTVSLCVRQLEYQHPETKETVYGVCSTHLCNIGVGDDVAITGPVGKEMLLPGDEDATIIMMATGTGIAPFRAFLWRMFKEQHEDYKFKGLAWLIFGVPKTANILYQEELEKIAAEFPDNFRLTYAISREQQNPQGGRMYIQHRVAEHADEIWNLLQSPKTHAYMCGLKGMEDGIDGAISGAANKNGTDWSVYQKQLKKEHRWHVETY

SEQ ID NO: 12170 - protein, 614 aa, Microcystis aeruginosa PCC 7806
MVELFKGFEQLVELAKTLEEKLEKGEIKTEVQFNSRPLSNIPRAGGIPRSGGVSRPNNAGGDDFEVNRNRDTPNDSGVEDSVTPPEGPTTASLKDVGGLTEVIKELKELIAIPLKRPDLLAKLGLEPTRGVLLVGPPGTGKTLTARALAEELGVNYIALVGPEVISKYYGEAEQKLRGIFEKASKNAPCIVFIDEIDSMAPDRSKVEGEVEKRLVAQLLGLMDGFAQSQGVIVLAATNRPDHLDPALRRPGRFDREVLFRVPDRKGRLEILQILTRSMPLDESVSLDLIADNAVGFVGSDLKAVCQKAAYSALRRQVPTIDSQIPETMTVVQADFLQALKEVKPAVLRSVEVESPHVAWDNIGGLEQIKQTLQESVEGALLHPQLYTQTKAQAPKGILLWGPPGTGKTLLAKAVASQARANFISINGPELLSKWVGASEQAVRELFAKARQAAPCVVFIDEIDTLAPARGRYSGDSGVSDRVVGQILTELDGLQTAATILVIGATNRPDALDPALLRAGRLDLQLKVDLPNASSRLAILGVHNDERPLEDVDLGYWAEATEGWNGADLALLCNQAALMAIRRYRHQGMTDPADIRITTADFNHAYQLLVEQRAN

SEQ ID NO: 12171 - protein, 387 aa, Microcystis aeruginosa PCC 7806
MKLASRVNQVTPSLTLAIDSLAKEMKKNGEDVCSFSAGEPDFDTPTHIRAAAKKALDEGKTRYGPAAGEAGLRKAIAEKLLRDNQLAYNADNVIVTNGGKQSLYNLIMALIEAGDEVIIPAPYWLSYPEMVTLAGGTSVIVNTSLENQYKITPEQLEAAITPKTKLFVFNSPSNPTGIVYTPEEIAALAKIVVEKDILVVSDEIYEKILYDGAIHRSIASLGPEIFQRSIISNGFAKAFSMTGWRVGYIAGPVEIVKAMTKIQGHSTSNVCTFAQYGAIAALESPQDCIEEMVKAFSERRQYILERVRSLSGLNCPTPNGAFYVFIDISQTGLKSRDFCQKLLETQKVAAIPGIAFGADDCIRLSYATDLKTIEKGFDRIDKFIGTL

SEQ ID NO: 12172 - protein, 299 aa, Microcystis aeruginosa PCC 7806
MKKILQLVGLGCILPMFLASASLAETVVEKVARTGFLTVGTRFDAIPYSYVNDKGELVGYSMDVLERIRKRLETRLGRPVTLQMIEANQPGEKINLIRSGDIDIACSTAFTWERAKVVDFSISYSISGIRILAKKGSNLSTPQSLIGKRIALVPTSAAVDVIKLVQPQATIVTTYSTVEEALEALKTGKIDAIAGDSISLAGTILRDNPKIYEIVPEEALANFGIACMVPENNSTFLDDVNYAIVKMMQDYITNDTATVSQIDRWFGSQGMVPIPPELLKGFFAFKVIEHAQINPQEAK

SEQ ID NO: 12173 - protein, 287 aa, Microcystis aeruginosa PCC 7806
MKVGFLGTGLMGTPMVERLLNQKISVIAYNRTLEKLAPLQQLGAKTVNSPEQVIQEADCLILMLTNAAAIQEVLGLNSEQSNFNNRTIIQMGTIAPSESKQLRDQIVAKGGEYLEAPVLGSIPEAKNGTLLVMVGATEKQFHQWSNLLAYFGQKPVIIGEVGTAAALKLALNQLIASLTSAFGLSLAFLSQQGVDIEKFMTILRQSALYAPTFDKKLTRMLEENYANPNFPTKHLLKDVNLFLEESEKLDLTTFPLTGVERLLEKALAMGLAEEDYSALYEALKKEL

SEQ ID NO: 12174 - protein, 547 aa, Microcystis aeruginosa PCC 7806
MITIGEYLFQRLHNLGVNHIFGVPGDYVLDLMDVLVESPIELVCTCNELNAGYAADAYARVKGMGAVCVTYGVGGFSLVNAVVGAYAERVPLVVISGASDRSIRRDNLLLHHTTGDYNLQFSIMEKVTVASVILTNSAQAASQIDQALAACLHHKRPVYIEIPRDLVYRPCIPSENPIYLTDNLTDTAALEEAIEEAVLLLEKAEKPIILAGVEFHRFKLQDKLLKLLEVTGYPLATTILGKSSISEMQPQFIGTYVGALSREYVSQRVENADCVLCLGAIMSDMNLGGFTANLNPNNLINANSEKVKIKHHFYQPVFLGDFIDGLIDKLSHKEAATLEIKPAAELKDLEFIAVPEQKLTNARFYERMNHFIAQESFVISDTGDAIIATIDLLMPQQTDFIGQAFYLSIGYSIPACLGVALAAPNTRPIVFVGDGAFQMTAQELSTIIRHHLNPMIFLINNDGYTIERVIQDNIYNDLQPWKYHQLPAVFNGESWSCQVRTEGELEKALSIAQGNIDRLSFIEVHLDRFDCSPGLIRLGQAVRSPHA

SEQ ID NO: 12175 - protein, 342 aa, Microcystis aeruginosa PCC 7806
MQFIDRAEIEVEGGKGGDGIVAFRREKYVPAGGPAGGNGGKGGSVIFVATQNLQTLLDFQYSRYFKADDGKRGGPNNCTGANGSDRIIKVPCGTVVYDLDSEEIIGDLVTPEQTLIVAAGGKGGLGNRHFLSNNNRAPEYALPGLDGEKRHLRLELKLLAEVGIIGLPNAGKSTLISAVSSARPKIADYPFTTLIPNLGVVRKPTGDGTVFADIPGLIEGAHLGIGLGHEFLRHIERTRLLIHLVSLTAEDPIADYQIIQGELAAYGRELEKRSQILVFNKIDAVDEETIDNYQKQFAKITNAEILTISAVTGAGLTTLLAKVWQQLEQLERVEDETPSLFS

SEQ ID NO: 12176 - protein, 692 aa, Microcystis aeruginosa PCC 7806
MDGMTKSVARFKFSRVSRRTKNNPVLIGEPGVGKTAIVEGLAQRIINRDVPESLLDRTLISLDLGGLIAGAKYRGEFEERLKAVLKEVTESQGNIIMFIDEIHTVVGAGATQGAMDAGNLLKPMLARGELRCIGATTLDEYRKYIEKDAALERRFQEVLVDEPNVVDTISILRGLKERYEVHHGVKIADNALVAAALLSNRYISDRFLPDKAIDLVDEAAAKLKMEITSKPEELDEIDRKILQLEMERLSLQREYDPASRERLEKLEKELANLKEEQSGLNAQWQGEKEIIDKVRGVKEAIEQVNLEIQQAERDYDYNRAAELKFGKLTDLQRQMSALETQLADKQTTGKSLLREEVLESDIAEIISKWTGIPLNKLIESEKEKLLNLEDELHESVIGQEEAVTAVAEAIQRSRAGLSDPNRPTASFIFLGPTGVGKTELAKALARNLFDTEEALVRIDMSEYMEKHSVSRLMGAPPGYVGYDEGGQLTEAIRRRPYSVILFDEIEKAHPDVFNVMLQILDDGRLTDSQGHLVDFKNTIIIMTSNIGSQYILDVAGDESRYEEMQARVMEAMRNSFRPEFLNRIDETIIFHSLQKAQLRSIVKLQTANLSDRLMEQKLALKLADIALDYLAEIGYDPVYGARPLKRAVQRYVETPIAKAILRGEFKGGDTIFVDVADERLTFKRLASPVVTA

SEQ ID NO: 12177 - protein, 387 aa, Microcystis aeruginosa PCC 7806
MSQKPIYLDCHATTPMDPQVLAAMLPYFTEHFGNASSINHVYGWTAEAAVKQARETIAAAINSSPEEIIFTSGATEANNLAIKGVAEAYFAKGRHIVTVMTEHRAVLDPCHYLEKLGFEVTILPVGADGLIDLELLEKSLRPDTILLSIMAANNEIGVIQPLAAIGAICRQYQVLFHTDAAQAIGKIPLDVEEMNIDLMSLTAHKVHGPKGIGALYVRRRNPRVRLAAQIQGGGQEKGLRSGTIFTPQIVGFAKAVELGIKAIEEDNSHLNQLKARLWEIISQLDRIYLNGHPSQRLAGNLNISIEGVDGAALLLGLQPIVALSSGSACSSSHTAPSHVLTALGRPESLAYASLRFGLSRFNTLEEIELVGEQVVLTVNSLRKAQNF

SEQ ID NO: 12178 - protein, 107 aa, Microcystis aeruginosa PCC 7806
MTPETKDRIDQLVQNNKVLVFMKGNKLMPQCGFSNNVIQILNILGVSYETVDILQDQELRQGVKEYSNWPTIPQVYINGEFIGGSDIMIELYQNGELQQIVEVALAS

SEQ ID NO: 12179 - protein, 886 aa, Microcystis aeruginosa PCC 7806
MQPTDSNKFTEQAWDSIVKSQEIARRFKNQTLEVEHVIIALLEQNNGLATRILQKANIEIPRLQQQLEVFTNRQPKVAIVDQLYLGRGLDLLLDRAEASRESWQDKFISVEHLLVGFAEDERVGRKCLRTFNLDPQDLELAIKAIRGTQKVTEPNQEEKYEALDKYGRDLTAAAKEGKLDPVIGRDEEIRRVVQVLSRRSKNNPVLIGEPGVGKTAIAEGLAQRIINGDVPESLKNRQLISLDMGSLIAGAKYRGEFEERLRSVMKEVTQSEGRIILFIDELHTVVGAGSREGGSMDAGNLLKPMLARGELRCIGATTLDEYRNHIEKDPPLERRFQQVYIKEPSVEDTISILRGLKERYELHHGVTITDSALVAAATLSHRYISDRFLPDKAIDLVDEAAAKLEVESTTKPVDLEMIDRRLMQLQMEKFSLEKEEKKDRAFQDRLERIIEEIEELESKQKPLADQWQTEKHIAEEIKLLREEEEQLRLQVEQAERAYDLNKAAQLKYGKLEILQGELEAKEKELETIQAAGYTLLRQQVTDADIAEIVARWTGIPVNRLMESERQKLLELESHLQKKVVGQNEAVTAVAAAIRRARAGMKDPSRPIGSFLFMGPTGVGKTELARALAGLLFDSEEAMVRIDMSEYMEKHAVSRLIGAPPGYVGYEEGGQLSEAVRRRPYSVVLLDEVEKAHRDVFNILLQVLDDGRITDSQGRVVDFRNTIIVMTSNIGSDHILNVSEDADYEEMRKRVLTALRSHFRPEFLNRIDDLIIFHTLKKEELRYIVRLQLQRLERLLGEQKINLELTTAAENHIVTVGYDPTYGARPLKRAIQRELENPLATKILEQAFIEGDTVVIDCLDEVLSFSKKELEKEGQTLELAVVNLSSD

SEQ ID NO: 12180 - protein, 382 aa, Microcystis aeruginosa PCC 7806
MDFGVGFISTNIMLPILDFFFRIVHSYGFAIIALTLVVRFAVFPLSAGQIRNMRKMRITQPLMKERQAEIQQRYKNDPQKQQEEMGKLMQELGNPLAGCLPLLLQMPILLALFATLRGSPFSDINYTVDLQVLPSEQIALVQRQPYGTKPQNVYIDESLHYPITAFLPQGNKIAPGEQVKIDLQNDQGKSLGQLATEAPENNLKPTYEVVKGQELVQVNEDGSIVALAPGDASIKVIVPGIAANTGFLFIEALGRIGATGANGEIHWDILAMVIAFGISIYVNQELSGAGAPSGGAAQQQQTVNKITPIIFSMMFLFFPLPAGVLMYILTANIFQTIQTVILMREPLPENLQKLVAEQEKTEKSRDALPFEKRSSKKKEKTS

SEQ ID NO: 12181 - protein, 525 aa, Microcystis aeruginosa PCC 7806
MAKVLVSDSIDPVGVEILSQVAQVDVKTGLSAEEIIQIIPEYDALMLRSSTRVTKEIVEAGSKLQIIGRAGVGVDNIDVPAATRQGIIVVNSPEGNTIAAAEHALAMMLSLSRHIPDANQSVKANKWERNRFIGTEVYKKNLGVVGLGKIGSHVAAVARSLGMKILAYDPFISKERADQLGCTLVDLELLFAESDFITLHVPKTPETQHLIGRETIAKMKPTVRIINCSRGGIIDELALIEALESGRIAGAALDVFEQEPLGESRLRELSNVILTPHLGASTTEAQVGVAVDVAEQIRDVLLGLPARSAVNIPGLTPDVMEKLRPYLQLAETMGNLVSQLAGGRCDSLNVRLQGELATKDSQPLVVAAIKGLLSQALRERVNYVNAAIEAKERGIRVIETRDASTRDYSGSIHLEANGSMGTHSVTGALLSTGEIRITDLDEFPINVPPSNHMLFTLHQDMPGIIGKIGALLGSFNVNIASMQVGRKIIRGDAVMALSLDDPLPEGLLSEITKVPGIRDAYTVKL

SEQ ID NO: 12182 - protein, 617 aa, Microcystis aeruginosa PCC 7806
MVSSLPKPNDSLTTVPQRCSGAYALMDSLKRHGVKHIFGYPGGAILPIYDELYRFEERGELQHILVRHEQAAAHAADAYARATGKVGVCFGTSGPGATNLVTGIANAHMDSIPMVIITGQVSRAAIGSDAFQETDIYGITLPIVKHSYVARNAREVARIVAEAFHIASTGRPGPVLVDIPKDVGLELCDYIPVEPGDVKLTGYRPTVKGNRRQIEAALHLLETAEKPLLYVGGGAIAANAHAQIAEFAERFQLPVTTTLMGIGAFDEHHPLSVGMLGMHGTAYANFAVTGCDLLIAVGARFDDRVTGKLDEFASKAKVIHVDIDPAEVGKNRAPDVPIVGDVRVVLEQILHKAREFDYPTNCDRTQAWLAQIERWRQDYPLQVPLPEGRLSPQEVIVEVGRQAPHAYYTTDVGQHQMWAAQFLKNGPRRWISSAGLGTMGFGLPAAMGVKVAIPDEEVICISGDSSFQMNLQELATLTQFNIHAKTIIINNGWQGMVRQWQEAFYGERYSNSNMEAGMPNVELLAQAYGIKGITIRHREELAAKIAEMLAHDGPVLVNAIVTKDENCYPMVAPGQSNARMIGLPKIVTGGCEMHNCPSCGAVNSWNNKFCPECGAKL

SEQ ID NO: 12183 - protein, 256 aa, Microcystis aeruginosa PCC 7806
MSEVILSVKNLTASIDGNQILKGVNLEIKAGETHAIMGRNGSGKSTFSKVIAGHPDYEVTGGEIIYKGENLLDKEPDERALMGIFLAFQYPLEIPGVSNLDFLRVAYNARQKHLGSEELDSFDFEELVEKKLEVVQMNPSFLGRSLNEGFSGGEKKRNEILQMALLEPTLGILDEIDSGLDIDALRIVAQGVNQLATPDNAFLLITHYQRLLNYIEPDVIHVMYDGRIVTSGGKELALELERTGYDFLDEQVLAVK

SEQ ID NO: 12184 - protein, 246 aa, Microcystis aeruginosa PCC 7806
MLIQLENQKEKILVVDDEASIRRILETRLSMIGYEVVTAADGEEALETFRTAEPDLVVLDVMMPKLDGYGVCQELRKESDIPIIMLTALGDVADRITGLELGADDYVVKPFSPKELEARIRSVLRRVEKNGAPGIPSSGVIHIGSIKIDTNKRQVYKGDERIRLTGMEFSLLELLVSRSGEAFSRSEILQEVWGYTPERHVDTRVVDVHISRLRAKLEDDPSNPELILTARGTGYLFQRILELDEE

SEQ ID NO: 12185 - protein, 371 aa, Microcystis aeruginosa PCC 7806
MTDYLVSLTIWAGIYAIFALGLNLQWGFTGLINFGHVAFATLGAYATVLLTLQGVPMIFAAIVGALLGALLGLAIGFSTLRLRADYLAIVTIGVSELIRLLVLNEDWLTKGSFGLQRYPLPLDINPSFPVKLLIIALFTLLAIFALWQLGRNLQRQWREAGQISGKSYQPTQKRALIFWGLLGAIILLFLYINGVIALNDYNYKAGLMVVVLVLLALVYTGLELLLRSPWGRILKAIREDEEIPRALGKNVFWYKLQSLMLGGAIAGLAGAFLAWQLTTIYPTNFEPLLTFNAWIIIILGGSGSNAGTLLGAVIFWAYDSLTRFILPQLDIFNDSQLGALRIMIIGLLLMVLMIWRPQGILGKKEELTLGK

SEQ ID NO: 12186 - protein, 299 aa, Microcystis aeruginosa PCC 7806
MKRTLAVMTMTVALTVTSNHSSLAGAIFDRIQKTGVITAGARKDAIPFGFVNSQGKWVGYSLDMLELIRKETERKLGKPIKLKIVEVTPQNRFEKLKTGVIDIECGSTTFTWKRENEVDFSVSYFAGGTQLLTRKGSNLDDIGSLAGRRIGVIANTTNEAVIKTQQPAAILVKVKSRGEGLQKLETGEIDGFASDGITLEGLRKNAKNPNNLAIVPSYPYAYESYACTLPENDSKWRDTVNYTLLKFMEGIVSDQQQAVTIYERWFGEDGVVPYSRETINDYFQGIVNTYEWIPLTVFP

SEQ ID NO: 12187 - protein, 388 aa, Microcystis aeruginosa PCC 7806
MKNLLSRMDGVQTPIIPVVGQLIKANPGTISLGQGVVSYYPPQEAIESLSLFLANPKNHQYQSVAGIPPLLTVIRQKLAEDNRIEISDKQAIFVTAGSNMAFMNAILAITSPGDEIILNTPFYFNHEMAIKMADCQVILVATDKNYQLRPAAIKEAITEKTKAVVTISPNNPTGVVYPENTLREVNRICQKKGIYHIHDEAYEYFTYNHARHFSPAAIVGSEAWTISLFSLSKAYGFASWRIGYMVVPEHLSEAINKIQDTILICPPVVSQYAALGALQVGKSYPLEQLKTISQVREICLNALESIRDICDVATAEGAFYFFLKIPTDKNDFQLVKSLIEQQRVAVLPGSTFGITEGCYLRLAYGALSPETALAAVERLVKGLRYFSQ

SEQ ID NO: 12188 - protein, 318 aa, Microcystis aeruginosa PCC 7806
MNDLINSQAFNLDSAVIPIAPTGFKSGFIGIIGRPNVGKSTLMNQLVGQKIAITSPIAQTTRNRLRGIVTDERSQMIFVDTPGIHKPHHELGKVLVKNAENAINSVDLVLFVVDSSNFLGGGDRYIADLLTKNQTPTILGLNKADQQPEDPEPIDDSYRTLAAENNWPLLKFSALEGTGIPELQNLLIDSLEVGPYYYPPDLVTDQPERFIMGELIREQILLQTRQEIPHSVAVVIERVEETPALTKVFAAINVERASQKGIVIGQNGSMLKAIGSSARSAIQKLIAGEVYLKLFVKVEPKWRQSRSLLAEFGYRTEE

SEQ ID NO: 12189 - protein, 401 aa, Microcystis aeruginosa PCC 7806
MKILVLNAGSSSQKSCLYDLDILPCHPPQPIWAAGIDWTVNPDYAVLTVKAQGIKQEINLSSQDRPAAIARMLDTLVTGTTKVVANLTDISIVGHRVVHGGTEYSQATMITPQVKETIKKLIPLAPSHNPAHLEGIEVIEQVLGDVPQVAVFDTAFHRSIPPESSLYPIPYQWSELGIRRYGFHGTSHQYCSQRAAELLGKPLESLKIVICHLGNGASLSAVKGGKSIDTTMGFTPLEGLMMGTRSGSIDPGILIYLEREYQYNPDSLNSLLNKESGLKGISGISGDMRAITTAMAEGNQRAKLAFEMYIHRLKSLIGSMIASLEGLDVLVFTAGIGENSALVREKASQGWSFLGLELDLAKNAARPRDEDIASDRSKVRVMVIATAEDWAIARECWHLFQ

SEQ ID NO: 12190 - protein, 1534 aa, Microcystis aeruginosa PCC 7806
MAQQNNLKTDNIHQIDPYWGPPWLVEERDACGVGFIADVRGSGSHQLIEQALLALGCLEHRGGCSADQDSGDGSGMMTAIPRDVLAPWFAENGLNMPESERLGVGMVFLPQADKERADAKAHIEEIVNKYNIKILGWRAVPVRPEVLGRQARENQPYVEQILVTSPDLAGSQFDRLLYIARSEVGKQLADDFYFCSFSCRTLVYKGMVRGEILREFYLDLQNPAYSSQFAIYHRRFSTNTQPKWPLAQPMRLLGHNGEINTLLGNINWMSAREPALETQGWTHEELQSLTPIVNPANSDSYNLDSALELLVRTGRSPLEAAMILVPEAYNNQPDLQDYPEIIDFYEYYSGLQEPWDGPALLVFSDGGIVGACLDRNGLRPARYSITNNGYIVVSSEAGTIPLDETTIMEKGRLGPGQMIAVDLEKGEIKRNWPIKQEIARANPYGEWVQSQRTLIDKETAIDIPAPSHLLPLQTAFGYTSEDVDLIIVPMAEQGKEPTFCMGDDTPLAVLSSKPHLLYDYFKQRFAQVTNPPIDPLRESLVMSLTMYLGRRGNILKLGVDDAHLLKLDSPLLNNAELAKVKTSSYKTAELSTLYDLTTGPGGLEDAIANLCAEAAKKVASGAEILILSDRTAPIDEKTSYIPPLLAVGAVHHHLIRSHLRLKASIVIDTAQCWSTHHFACLIGYGASAICPYLALETIAQWWIEPKTQKLMENGKLEAISLEKALINYRKSVEAGLLKILSKMGISLLSSYHGAQIFEAIGLSADLVKLAFNGTTSRVGGLSIAEVAQEAIAFHSKAFPNLTAKKLENYGFVNYRPGGEYHMNSPEMAKALHKAVAAHSQGQGYDHYETYRQILQQRPVTALRDLLEFNSDRASIPLEAVESIESILQRFCTGGMSLGALGREAHETLAIAMNRIGGKSNSGEGGEDPIRYTSLSDVDEEGHSVTMPHLNGLKNGDTANSAIKQIASGRFGVTPEYLMSGKQLEIKMAQGAKPGEGGQLPGKKVSSYIAMLRRSKPGVTLISPPPHHDIYSIEDLAQLIYDLHQINPRAKVSVKLVAEIGIGTIAAGVAKANADIIQISGHDGGTGASPLSSIKHAGSPWELGVTEVHRMLMENQLRHRVILRADGGLKTGWDILMAALMGAEEFGFGSISMIAEGCIMARVCHTNNCPVGVATQQERLRARFPGIPAHVVNFFTLVAEETRQLLAKLGYHSLNEVIGRSDLLKVRSDARLTKTESLNLDCLLNLPDGRSDRSWLQHEEVHSNGAVLDDEILADSEIKQAIERQGTVSKTYRIVNTERSVGARIAGVIAQKYGNDGFEGEIKLNFQGAAGQSFGAFNLPGVNLHLEGEANDYVGKGIYGGEIVIVPPQNANYQPEDNAIIGNTCLYGATGGVLYANGRAGERFAVRNSTAKAVIEGAGDHLCEYMTGGVIVVLGSVGRNVGAGMTGGLAYILDPSLPEKLNPEIVKIQRVATAAGAEQLKSLIETHVERTNSPKGKLILANWDSYLGQFWQVVPPSEADSPEAQISAEKTLTSV

SEQ ID NO: 12191 - protein, 618 aa, Microcystis aeruginosa PCC 7806
MVQQKFDEIIERIIKKFKNLEKKYDFILCEGSDYLQENSAFEFELNTEIAKNLGHPILILGNAHQRSIEDALSPILISCDTYQDKGCKVIGIIINQAEEEKTEELRKTLTKIFPPQEYALGVIPHNAKLSSPRVAEIAQQLQAKVLYGQHRLDSLASNFLVVAMQMQNALERIKEDSLIITPWDRGDVIIGMLQAHQSANYPQLAGIVLTAGHDLNPSIARLIEGLPDPLPILSVTTDTYTTAEHIHDVRTTLTSTDYDKINLSLQLFHSNINLDRLEAQIRTLRTQGITPKMFTYNLVQQAKAQKRHIVLAEGTEPRILQAATVLIEQDIVDLTLLGQPDEIEIVIKKHGITLDLDRLQIINPVASPHFESYVQTLYEARKAKGMNLDMARDYAQDVSYFGTLMVYQGDADGMVSGAVHTTQHTIRPALQIIKTKPDCAIVSSVFFMCLEDRVLVYGDCAVNPDPSAEELAEIALSSAETAQKFGIEPRIALLSYSSGQSGQGEDVEKVRQATKIAREKRPDLKLEGPIQYDAAVDREVAAQKMPGSEVAGQATVFIFPDLNTGNNTYKAVQRETKALAIGPILQGLKKPVNDLSRGCTVPDIINTVVITAIQSQSF

SEQ ID NO: 12192 - protein, 260 aa, Microcystis aeruginosa PCC 7806
MKNLLFILGFLLLGVAPSFSADLDTIIRRGKLIVAVKNNLPPLAFLDSQGNLQGLEIDIAKRLASEILGSDSAIILKPVSNQERLQVVIDDRVDLAIARVAITPARQRLVDFSPFYYLDSSGFVTKNPQLQRLEDLANSRIAVLNGSTTIALVRSNLPNAILRGVASYQEALNLLETGEIDAFAADNSLLTGWVQQFPNYRQLPIELGAIALGVVLPKGLQYQSLRERVNQAIERLESTGWLAERLNYWGLPLRIREMGR

SEQ ID NO: 12193 - protein, 600 aa, Microcystis aeruginosa PCC 7806
MILQTFGHVNPAWSQKNPNTLTYGELLEKIEQGKVKKVEINPSLQQAAVTLVGQTDKDTPKEVNLFDQNPELIKKLDAKKIEYGILPSTDNSALINVLTNVLVIIIVLGLLVFIIRRSANASGQAMNFGKSRARFQMEAKTGIEFNDVAGVDEAKEDLEEVVTFLKQPEKFTAIGAKIPKGVLLIGPPGTGKTLLAKAIAGEAGVPFFSISGSEFVEMFVGVGASRVRDLFRKAQENAPCLVFIDEIDAVGRQRGIGYGGGNDEREQTLNQLLTEMDGFEGNTGIIVIAATNRPDVLDSALLRPGRFDRQVVVDYPDSKGRLAILEVHSRDKKVAADVALEAIARRTPGFTGADLANMLNEAAIFTARRRKEAITMEEVNDAIDRIVAGMEGRALVDSKAKRLIAYHEVGHAIVGTLCPGHDQVEKVTLIPRGQAQGLTWFTPDEEQGLTSRSQLLARIAGLLGGRVAEECVFGEDEVTTGAGNDIEKITYLARQMVTRLGMSELGLIALEEDGNSYLGGAGAGYHADHSFAMMAKIDAQVRELVKQCHDLATKLILDNRMAIDRLVEILIEQETIDGDEFRRLLTEFQQQADRSMVTMV

SEQ ID NO: 12194 - protein, 550 aa, Microcystis aeruginosa PCC 7806
MGELNTAELLVKCLENEGVEYIFGLPGEENLDVLEALKNSSIKFITTRHEQGAAFMADVYGRLTGKAGVCLSTLGPGATNLMTGVADANLDGAPLVAITGQVGTDRMHIESHQYLDLVAMFAPVTKWNKQIVRPGITPEVVRRAFKTAQSEKPGAVHIDLPENIAAMAADGSPLPLDSQEKVYASYRTLNMAAAVISKAKNPLILAGNGAIRANASEALTEFATALNIPVANTFMGKGVIPYTHPLALWAVGLQQRDLISCAFDRSDLIIAVGYDLIEYSPKKWNPDGKLPIIHIGMTPAEIDSSYAPVVEVVGDITDSLIDILKRADRQNKPTPVTAGLKTEIRADYETYANDTGFPIKPQKLIYDLRQVMGPEDIAICDVGAHKMWMARHYHSDCPNTCIISNGFAAMGIAIPGAIAAKLVHPDKRIVAVTGDGGFMMNCQELETALRVGTPFVTLIFNDGGYGLIEWKQLNYFGTSSFIKFGNPDFVKFAESMGLKGYRVESTQDLIPTLEEAFRQEVPTVIDVPVDYGENLRLSQKSGDLSCQIWE

SEQ ID NO: 12195 - protein, 440 aa, Microcystis aeruginosa PCC 7806
MSKLSRRRFIFTAGATAVGTAILHGCATPNNTATSTSPAGSPAASPVASGETPEVTTAKLGFIALTDAAPLIIAKEKGLFAKHGMPDVQVMKQASWAATRDNLELGSAGNGIDGAHILSPMPYLMTLGKITKQPVPMYILARLNTNGQGISVANEYMDLKVALDSGVLKESFAKAKSAGKEVKSAMTFPGGTHDLWMRYWLAAGGIDPNKDLSLIVVPPAQMVANMKVGTMQAFCVGEPWNAQLVKQKLGYSALITGELWKDHPEKAFALRADWVDKNPKAAKALTMAVLEAQQWCNDPANVKEMCEIISGREWLKIDPADILGRMQGNIDFGDGRKIENSPVAMKFWADNASYPYKSHDTWFVTEDIRWGYIPADTDIKALVDKVNREDIWREAATALNVPADQIPTSTSRGVETFFDGVTFDPENPTAYLKSLKIKKV

SEQ ID NO: 12196 - protein, 479 aa, Microcystis aeruginosa PCC 7806
MPSPESAPLLSQLQKKVNSLDVPFYAPGHKQGEGIGEDLSNLLGKSVFKADLPELPDLDNLFAPTGVIKEAQILAAETFAADKSWFLVNGSSCGVIAAILATCGEGDKIILARNIHKSAISGLILSGAQPIFINPEYNPTIDLNLNITPQSLANALKLHPDAKAVMVVSPTYQGVCCDLKTIAQITNHYSIPLLVDEAHGAHFAFHPDLPPAALSLGADMAIQSTHKVLGALTQASMLHLKSDRISSEKVDRALQLVQTTSPSYLLLASLDSARKQMATQGLDLLTKTLDLAATAQKELDKIPNISVLDFPHSIPGCHWFDRTRLTVIVKDFGLTGYEIDDILREKYAVTAELPTLSQLTFIISIGNHREHINRLITAFQSLQSPSSTSLPLTPAPVTGNLAISPRKAFFAPTEIVSRKNALDRLSADLICPYPPGIPVLMPGELISQEVLDYLQTILDLGGTIAGGSDDNLATFRVLK

SEQ ID NO: 12197 - protein, 263 aa, Streptococcus pneumoniae R6
MKKKGTIMSVLEIKDLHVEIEGKEILKGVNLTLKTGEIAAIMGPNGTGKSTLSAAIMGNPNYEVTKGEVLFDGVNILELEVDERARMGLFLAMQYPSEIPGITNAEFLRAAMNAGKEDDEKISVREFITKLDEKMELLNMKEEMAERYLNEGFSGGEKKRNEILQLLMLEPTFALLDEIDSGLDIDALKVVSKGVNAMRGEGFGAMIITHYQRLLNYITPDVVHVMMEGRVVLSGGPELAARLEREGYAKLAEELGYDYKEEL

SEQ ID NO: 12198 - protein, 351 aa, Microcystis aeruginosa PCC 7806
MLKWRFCALSLLLLLITACGTENQPNSSSNTANSPSADRLQTVKNRGKLICGINGEVPGFSFVNEKGEYSGLDVQICRAIAAALFDDPAKVEYRKLSPQERFTAVQTGEVDILSRNTTWTINRDTALGMEFITPVFYDGQGIMATKASNIKKLEDLSGKSICVLSGTTTEQNLADAMAKAAVQGYKPIVSDDVEALYTAYQAGRCQAVTSDRSQLVARRSVFPRPQDHQLLEVVISKEPLAPAVADGDPAWSNAVRSIVFSLIQGEEFGINSQNIATFADSKDPSIRRFLGIDEKLGEDMGLPNDFAQRVLKQVGNYGEIYDREIGQPLQLDRGLNNLWTKGGLLYSPPFR

SEQ ID NO: 12199 - protein, 392 aa, Microcystis aeruginosa PCC 7806
MSEESTFQPPHLTEAQQALEKERHLPLTGWQQEVSQGLTYGLEAADSIRDRSIPTFSRGELPHYAGINTFMKAPYLEDVRNVGNYDVAIVGVPHDSGTTYRPGTRFGPQGIRRISALYTPYNFELGVDLREQITLCDLGDIFTIPANNEKSFDQISKGVAHVFSSGALPIILGGDHSIGFPTVRGICRHLGDKKVGIIHFDRHVDTQETDLDERMHTCPWFHATNMKNAPAKNLVQLGIGGWQVPRQGVKVCRERATNILTVTDIVERGIDAAAEFALERALDGTDCVWISFDIDCIDAGFVPGTGWPEPGGLLPREALALLGKIIQKAPICGMEVVEVSPPYDISDMTSLMATRVICDAMAHLVISGQLPRKEKPYYIHPDANLAVDEPWQ

SEQ ID NO: 12200 - protein, 304 aa, Microcystis aeruginosa PCC 7806
MTTSLSERKTVSAKPFLKWAGGKTQLVPNILSLINSQISQDCQFNYIEPFVGGGAVLFSVLNNFSPVQKVIINDINPDLIMAYNVIKNNVKELIVKLKQIQQDFYELKNLEEQQKFFLDKRIEFNSRSCDDCLEKTVLLLFLNKTCFNGLYRVNSKGLFNVPFGKYVKPLICNEENLLAVNHHLQKVTILQGDFVQTLNYANNKTLFYFDPPYKPIKKTSAFTSYTKEDFNDEEQIRLKQFIDQVDRAGYKFILSNSDLKNFDSDNNFFDDLYKDYNIQRVKARRNINSQGNNRGEIWELLINN

SEQ ID NO: 12201 - protein, 382 aa, Microcystis aeruginosa PCC 7806
MKIGVIKESDQGEARVALVPDTVARLVKAGFEVIVENGAGISANFADSAYSAVGAALSENSEYIYETADIILKVVPPSDSEIDRLKGGGILIGFLDPLRQPRRIAKLADRGITALSMELIPRSSRAQSMDALSSQANLAGYKAVLLAAVQLPKMFPMMTTAAGTIAPAKVLVLGAGVAGLQACATARRLGAVVEAFDIRPQVKEEVQSVGAKFIEMPLEEDTVADNGYAKEVSLSTQERICQALAEPIKRADVVITTAQVPGKQAPLLVTKEMIATMKAGSVIVDLAAEQGGNCAYTQPGREIIENGVKIVGAVNLPATVATNASQMYAKNLQMLLQLLVSKEGSLNLDFADDIIDSACVTHAGEIRNQRIKSALSEQLSAF

SEQ ID NO: 12202 - protein, 310 aa, Microcystis aeruginosa PCC 7806
MKLTPLVPPIKCQGIKTKLVKDVKNIVSDLSFGRWIEPFSGSGVMAFNINPKKALLADTNTHIIQFYNNLKNQVITSKTVKLFLQENGQVLKEQGESYYYQVRERFNQSPNSLDFLFLNRSCFNGVMRFNRKGQFNVPYCHKSERFSQAYITKIVNQVIALENILIKTDYDFQVADFRETLSDWQKTDLIYLDPPYLGRHADYFNSWSEEDEDCLVTILKDISCRFILSTWHSNQFRSNPLIKKNWSADQFYIYTKQHFYHVGSTEKLRHPITEALITNFNIPLLPERGTDLQQLSLLPSTAENEGVRTV

SEQ ID NO: 12203 - protein, 628 aa, Microcystis aeruginosa PCC 7806
MKLSWKTILLWTLPALVVGFFLWQGTFATATSNIGNNTASTRMTYGRFLEYLDSGRVVSVDLYEGGRTAIVQALDPELENRVQRLRVDLPANSPDLIARLRDSKISFDAHPMRNDGAWWGFLGNLLFPFLLIAALFFLFRRSNNMPGGPGQAMSFGKSKARFQMEAKTGITFDDVAGIDEAKEELQEVVTFLKQPEKFTAVGAKIPKGVLLVGPPGTGKTLLAKAIAGEAGVPFFSISGSEFVEMFVGVGASRVRDLFKKAKENAPCLIFIDEIDAVGRQRGAGIGGGNDEREQTLNQLLTEMDGFEGNTGIIIIAATNRPDVLDSALMRPGRFDRQVTVDAPDFKGRLEILDVHARNKKLANDVSIEAIARRTPGFSGADLANLLNEAAILTARRRKDAITLLEIDDAVDRVIAGMEGTPLVDSKSKRLIAYHEVGHAIVGTLLKDHDPVQKVTLIPRGQAQGLTWFTPNEEQGLTTKAQLMARISGALGGRAAEEEIFGYDEVTTGAGGDLQQVSDMARQMVTRFGMSDLGPLSLESQGGEVFLGGGLMTRSEYSEKVATRIDDQVRSIVEHCHEISRQIVRDHREVIDRVVDLLIEKETIDGQEFRQIVAEYAYVPEKEQFVPQL

SEQ ID NO: 12204 - protein, 219 aa, Microcystis aeruginosa PCC 7806
MNPFPAISVNDGHQKYPSPPHFGNSDRESEDRAKKNKALFLDRDGVVIDYIPYLSKPEQVSIPAGAAAALKQWQDAGYLLIIITNQSGLARGYFTWDDLAAIHGRMIEEYRQLGVHFHDLAICPHHPDEGCPCRKPSPYLLLTAAQQYGIDLAGSLFIGDAPSDLECALEAGCQPVLLLTGRGKVTLGEIEKYPVEIPVYSQLKETVELLSKTAAEPEL

SEQ ID NO: 12205 - protein, 491 aa, Streptococcus pneumoniae R6
MKELDQNQAPIYESLVKLRKKRIVPFDVPGHKRGRGNPELVELLGEKCVGIDVNSMKPLDNLGHPISIIRDAEELAADAFGASHAFLMIGGTTSSVQTMILATCKAGDKIILPRNVHKSAINALVLCGAIPIYIEMSVDPKIGIALGLENDRVAQAIKDHPDAKAILINNPTYYGICSDLKGLTEMAHEAGMMVLVDEAHGAHLHFTGKLPISAMDAGADMAAVSMHKSGGSLTQSSLLLIGEQMNPEYVRQIINLTQSTSASYLLMASLDISRRNLALRGKESFEEVIELSEYARHEINAIGGYYAYSKELIDGVSVCDFDVTKLSVYTQGIGLTGIEVYDLLRDEYDIQIEFGDIGNILAYISIGDRIQDIERLVGALADIKRLYSRDGKDLIAGEYIQPELVLSPQEAFYSERKSLTLDESVGQVCGEFVMCYPPGIPILAPGERITREIVDYIQFAKERGCSLQGTEDPEVNHINVIKRKTNYKKSQ

SEQ ID NO: 12206 - protein, 562 aa, Microcystis aeruginosa PCC 7806
MSKNSRRVDFPDLPGPKDLRSYQWQWLGRDLLAGVTVAAYAIPQCMAYGDLAGVDPVVGLWTLVPAALVYALFGSSSQLSLGPESTTAVMTAAAIAPLVSLQGENYGSLAAFLALMVGLICLVGYIARLGFLANLLSKPILIGYMAGVAVIMIAGQLGKISGLSIRENTVFKEIFAFFWGINQWHWPTLSLALLLLLFLFVIQKYFPKAPGPLLAVLLGTLAVATLHLDQEGVAVVGKISNTLPNFGLPTLDFSQLLPLGTAAVGIALVGYSDNVLTARAFAARHNQEIDANQEFLALGLGNLAAGFCQGFPISSSASRTAVGDSVGSKSQLYSLVVAVVVVAVIFLLGPVLALFPKAALGALVIYAACKLLDIAGAKRLKSFRNSEFNLAVLTMVGVLTTGILSGVAIAIGLSVIDLLARITRPDDAVLGTVPGVMGLHALQDWPEAQTIPGLVIYRYDAPLFFANAADFKRRALSAIARETKPVEWFVLNTEALGELDSTAVEVLEELARELSRQGIVFALARVKHDLYLQLQRSRLLDKISEERIYYTLPTAIEAFKNR

SEQ ID NO: 12207 - protein, 330 aa, Microcystis aeruginosa PCC 7806
MSYSATLMRHPMFPAASDSNRLRLFSGSANVPLAQEVARYLGMDVGPMIRKRFADGELYIQIQESIRGCDVYLIQPCCNPVNDHLMELLIMIDACRRASARQITAVIPYYGYARADRKTAGRESIAAKLVANLITEAGASRVLAMDLHSSQIQGYFDIPFDHVYGSPVVVDYLLSKKLPDIVVVSPDVGGVARARAFAKKLNDAPLAIIDKRRQTHNVAEVMNLIGDVKDKTAVLVDDMIDTAGTIAQGAQLLKAKGARQVYACATHPVFSGPAIERLSSGIVEEVIVTNTIPVPQDHFFPQLKVLPVAPILGEAIWRIHEDNSVSNMFK

SEQ ID NO: 12208 - protein, 402 aa, Microcystis aeruginosa PCC 7806
MEIYQFSERQTIIMAILVLYLGKYLRKNIKFLQDYNIPDAVAGGVLASLFFGLFFAVFKWQIEFTLNVRDALLIVFFTTIGLSSKLKTLLQGGKPLLILLITAVVYLILQNLAGLGVAKVMGLDLPIGLIAGSVSLSGGHGTAIAWAPIFRDNYGIVKASEIGVASATFGLVLGGIIGGPVAQWLITRNRLRANNQDQDLTVGIKQSQRNVNIDYNTMLHSILVIGLTIGLGIQINYWVTTLGLKLPDFVTCLLAGIILTNTIPLVLKRFPWPANTPSLALISDVSLGLFLSMSLMSLQLWTLIDLAGPIAILLLVQFSLSIIYTVLLVFPLMGKNYHASVVCAGYLGLTLGATPTAIANMTAVTENFGASPQAFIIVPLVGAFFIDLFNAFIIQQFLNFLT

SEQ ID NO: 12209 - protein, 186 aa, Microcystis aeruginosa PCC 7806
MNKALFLDRDGVIIDYIPYLSQPEQVKIPQCAGSTLKQWQDAGYLLILYTNQSGVGRGYFSLEDVEAVHRRVFHEYQKFGVFFHDLLLCPHHPSENCQCRKPSPYLLLEASRKYDIDIAQSFFIGDAPSDLECAIKAGCQPVLLLTGRGKSTVKQINKYSTKIAVFNQLYETLELIKNHKTLECSR

SEQ ID NO: 12210 - protein, 87 aa, Streptococcus pneumoniae R6
MTILDISAKRLSVLEEVFGSQIQTLMSNSFNIEASVRDADVVIGAILIPGAKAPELVTDEMVKQMRPGSVSLTLLLTKVALSKQLTV

SEQ ID NO: 12211 - protein, 141 aa, Streptococcus pneumoniae R6
MLIGIPKEIKNNENCVALTPAGVHSLVSRGHRVLIETNAGLGSGFTDADYQKQGAEIVATAGEAWAAELVVKVKEPLSSEYGYLRDDLLLFTYLHMAAAPELADAMLAAKTTGIAYETVRDNQGQLPLLVPMSEVAGRMAV

SEQ ID NO: 12212 - protein, 225 aa, Microcystis aeruginosa PCC 7806
MDLSLIQDKPLADVFRRIGSGNFPPVVELFERGKTIFFPGDPAERVYFLLKGAVKLSRVYEAGEEITVALLRENSVFGVLSLLTGQRSDRFYHAVAFTPVELLSAPIEQVERSLRNNPDLSMLMLQGLSSRILQTEMMIETLAHRDMGSRLVSFLLILCRDFGVPTTDGIRVDLKLSHQAIAEAIGSTRVTVTRLLGELRDQEMVSIYKKKITVHNPVALSQQFT

SEQ ID NO: 12213 - protein, 396 aa, Microcystis aeruginosa PCC 7806
MQEVYIVAAVRTPIGRFGGGLIGLSPADLGSTVMKSALEIANLPPEALDLYIFGNVLGSGHGQLIPRQAAIKAGIPVSVDGYRVDMVCSSGMIAVSNAATSIRAGEADLVLAGGIESMSQTGFFLSHRARWGYKFLMGAPEQLTDLLLHDGLTDATTTEGMGSQVDRLCLDRGVSRQALDEIAALSHQRAATATEKGWFNGEIVPIELKSKKGSTIIAQDEGIRSDSTPEGLGKLRPAFNPSGVLTAGNSSQISDGAAAILLASQKAVDQYGLKPIAKILGGAVGAGKTDRFPEFPVLAVKKLLASLDKTIEDFDLVENNEAFALNNLLFEMDLGLAREKQNVHGGAIALGHPIGASGARILVTLINALKVQDKTLGMGAICHGTGGGTAIAIERV

SEQ ID NO: 12214 - protein, 625 aa, Microcystis aeruginosa PCC 7806
MSIKSKPPSQSRLIGNVLLAVGGLFLIVNLLFPQLFGPSVPKVPYSLFIDQVEDGNVARVSVGQNEIRYQLKNDQEGNYGRIFSTTPIFDLELPKRLEAKGVEFAAAPPPKNGWIGSVLSWVIPPLIFVGIWQFFLARSGGGGPAGALSITKSRAKVYVEGDTTKTTFKDVAGVEEAKTELAEIVEFLKYPQRYIQIGARIPKGVLLVGPPGTGKTLLAKAVAGEAGVAFFSISGSEFVELFVGAGAARVRDLFEQAKKKAPCIIFIDELDAIGKSRANGNFMGGNDEREQTLNQLLTEMDGFNAGDATVIVLAATNRPETLDPALLRPGRFDRQVLVDRPDLAGRLKILEIYAGKVKLGSDADLKQIATRTPGFAGADLANLVNEAALLAARNQRSTVAQEDFNEAIERVVAGLEKKSRVLSEKEKKIVAYHEVGHALVGAVMPGGGKVAKISIVPRGMAALGYTLQMPTEDRFLMDDTELRDQIATLLGGRAAEEIIFGSITTGAANDLQRATDLAERMVTTYGMSKTLGPLAYEKGQQNSFLGDGMMNPRRLVSDDTAKAIDNEVKEIVENGHQQALDILAQNRDLLEEIAQEILSKEVIEGEQLQALLDRVKPLDREPVTV

SEQ ID NO: 12215 - protein, 388 aa, Microcystis aeruginosa PCC 7806
MQIYLDYSATTPTHPQVIERVATILQHHWGNPSSLHTWGQDTATVIEMAREQVVGLINANPDQIIFTSGGTEADNLAIIGVAQQYNRPRHIIISSVEHSAIAEPCKQLEQQGWQITRLPVNRQGRVNPLDLKAAIQSDTVLISIIYGQSEVGTLQPIEELGSIARERGVLFHTDAVQVAARCDIDVRKLPVDLLSLSSHKIYGMQGSGALYVRAGVDILPLLRGGGQEKGLRSGTPAVPVIAAFGLAAELAQKDLISEKMRLIALRDRLFDLLADYPYLLPTGDRFYRLPHHVSFIVRPDNDSQITGKQLVRQLNLAGIGISSGSACHSGKLSPSPILKAMGYSDREALAGIRLTLGRDTSAADIDWTALVLKQVIDRCLSALIVSKS

SEQ ID NO: 12216 - protein, 193 aa, Microcystis aeruginosa PCC 7806
MSPQFNFQENELEEADVITLWDEQGRSLDCYIENAYETDDLTYMLLVPVDTPVMILAWDEESEEEESDAFLIEDSEEIERIFADAKAVLAELDLLLKSTAHTLTVSGELPPLEEDNVLSLEIDSDEPSSSSEPEELQFLASFFSEDQKYSIYSPLAPLLFLAVGDGEGKVELVSPDDDGMGPILEELLFDELD

SEQ ID NO: 12217 - protein, 682 aa, Microcystis aeruginosa PCC 7806
MGKVIGIDLGTTNSCIAVLEGGQPIIVPNSEGGRTTPSIVGFGKGQRLVGQLAKRQAVTNAENTVYSIKRFIGRRWQDTETERGRVAYHCQRGRDDTVNIKIRDREFTPQEISAMILQKLKADAEAYMGEAINEAVITVPAYFTDAQRQATKDAGMIAGLEVLRIINEPTAAALAYGLDKQNEDQHILVFDLGGGTFDVSILRLGKGVFEVKATAGNNHLGGDDFDNLLVRWLVENFQSQENIDLSSDRMAIQRLREAAEKAKIELSSMISTSINLPFIAADETSPKHLELELTRAKFEELTRELVEKTLEPVQQSLKDSELQPSDIDRVVLVGGSTRMPAVQQLISRFFSTSQIDRSVNPDEAVALGAAIQAGVLGGEVEDILLLDVTPLSLGIETLGEVFTKIIDRNTTIPTSKSQVFSTAADGQTSVEIHVLQGERTMSRDNKTLGKFLLTGIPPAPRGVPQIEVAFEIDVNGILKVAASDQGTGKEQSILISHTGGLKPNEIEKMRLEAEKYAESDRRRLQMIDIRQQCDSLFYSYEVTIREHSQLVAPDIRQLADQKRQQLEIALRDPSLSPEKLKTTLAEFRQLVLEIGTRIYTGRQEQNQPLNGAGFESIDVTEKLTRPTRTRATSSNTFTNRPTLSRTRTRTYSNLETKSTELDSDDDPYDGEEISTSDYEAVD

SEQ ID NO: 12218 - protein, 467 aa, Streptococcus pneumoniae R6
MESKMNIFRTKNVSLDKTEMHRHLKLWDLILLGIGAMVGTGVFTITGTAAATLAGPALVISIVISALCVGLSALFFAEFASRVPATGGAYSYLYAILGEFPAWLAGWLTMMEFMTAISGVASGWAAYFKGLLSQYGIALPQALNGTFNPQAGTFVDLLPILVLVLVTSLVLLNAKAALRFNSILVILKFSALALFVLVGIWNIKFDNWSNFAPYGFGQIYGASTGIMAGASLMFFGFLGFESISMAVDEVKTPQKNIPRGIVLSLSIVTILYALVTLVLTGVVHYSHLNVDDAVAFALRSVGISWAANYVSLVAILTLITVCISMTYALSRMIYSLARDGLVPAAFKELTKTSKVPKNATILTGLASAVAAGMFPLASIAAFLNICTLAYLILLAYGLIRLRKEKGMPKAGEFKTPLVPLLPILSIIICLSFMLQYNVNTWIAFLVALLVGSIIYFTYGYKHSTIEE

SEQ ID NO: 12219 - protein, 292 aa, Microcystis aeruginosa PCC 7806
MSQKIAFLGLGVMGAPMTANLVRQGFAVNAWNRSPEAPGITIAGAAGASICPSIAAAVRDAEIVFTCVGDVPDVEAVILGPGGVMESAAVGTLVVDMSTIGSQAARMIGKKLEENNLRFLDAPVSGGDIGAKNGTLTIMVGGKEADFQTCLPCFQAMGKTIRWCGEIGNGQAVKLCNQVLGAVHMVALCEALKMAKIQGLDPNLVIEVCKTGAAGSWALENLGPKILAQDLQPAFMIEHILKDLRLVKETAQTAREILPGTDLAEALFKVVAELDEGKGIKQGTQAMIRAYD

SEQ ID NO: 12220 - protein, 478 aa, Microcystis aeruginosa PCC 7806
MKRIARKSGELVGLLPKINPVWLACVPLSAIIFVVWNTAVQAQDAKPLTPEDVQNALNTIWVLIAAILVIFMNAGFAMLETGFCRQKNAVNVLAKNLIVFALSTISFWAIGFSLMFGSVSNEFFGTGGWFLSSSDPASYVMPAYLPTSVFFLFQVAFAGTAATIVSGAVAERIKFTDFLVFSLIIVGIMYPITGHWVWGGGWLADLGFKDFAGSTVVHSVGGWSALTGAAILGPRMGKYINGRTSALPGHNMSIATLGCLILWIGWFGFNPGSALAVNETVPYIAVTTNLAGAAGGIAATLTAWAKDGKPDLSMIINGILAGLVAVTAGCDGVSYWSAAIIGLIAGVVVVYSVAFFDNLKIDDPVGATSVHLVCGVFGTLAVGIFNKDAGLITGQFQLFINQIIGIVAVGAFTVIVSGIVWTILKATLGIRVTPEEEMEGLDVGEHGMEAYSGFVKESDIVTGGYYASSVDMETPSSR

SEQ ID NO: 12221 - protein, 301 aa, Microcystis aeruginosa PCC 7806
MPMLLSCATGSEQFLGSEAIATYATAKAVILPIPYEATTTYRKGCETGPAAVITASQQLEAYDEELKRETCLEVGIYTHDAIADTRQQPQLSAEEMLAVTTATVSRLIADDKFVVAVGGEHAITTGVVQAYRQALSEPFTVVQIDAHGDMRFEYEGSHHNHACVMRRVLEMGLPTLPVGIRAICREEAELIAKQQIPVVWDRDIARDADWIEKAIAKITTEKVFLTIDVDGIDPALIPGVGTPEPGGLSWHQTLGFLRRLFQTHQVIGCDVMELAPISDSVVSEFTTAKLIYKLIGYQFID

SEQ ID NO: 12222 - protein, 361 aa, Microcystis aeruginosa PCC 7806
MEIGVPKEIKDQEFRVGLSPSSVRVLNDRGHRVFVETVAGLGAGFSDEDYQKAGAKIVEKAAEVWDKPLIIKVKEPLKAEYGFLNKEALLFTYLHLAAERYLTETLIESGTTAIAYETVELADGRLPLLTPMSVIAGRLSVQFGARYLEKQQGGRGVLLGGFPGVSPGQVVILGGGVVGTEAARIAIGMGAKVTILDINVERLAYLETLFGSRVELLYSSPAQLENVVPRADLLIGAVLVLGKRAPTLVSRSLVAKMNPGSVIVDVAVDQGGCVETLRATSHSQPTYLESGVVHYGVPNMPGAVPWTATQALNNSTLPYVIKLADHGVKALDQDVSLAKGLNVANHRLIHPAVREVFPDLI

SEQ ID NO: 12223 - protein, 401 aa, Microcystis aeruginosa PCC 7806
MGRAKRVVLAYSGGVDTSVCIPYLKQEWGVEEVITLAADLGQGDELGPIQEKARRCGAIESLVVNAQEEFVKEYAFPSIQANALYENRYPLSTALARPLIAKLLVEAAEKYGADAVAHGCTGKGNDQVRFDVGIMTLNPSLKVLAPAREWGMSREETIAYGEKFGIESPVKKSSPFSIDRNLLGRSIEAGPLEDPMTEPPEEIYLMTKAIADTPNEPEYVDIGFNQGIPVSLNGENLDSVTLISQLNDLVGKHGVGRLDMIENRVVGIKSREIYEAPALLVLIDAHRDLESLTLTGDVTQYKRGIEDTYGQLIYKGLWYSPLKEAIDAFILKTQEQVTGSVRVKLFKGNAKVVGRQSVNSIYSPDLATYGAEDQFDHKAAEGFIYVWGLPSKVWAEKTRGK

SEQ ID NO: 12224 - protein, 371 aa, Streptococcus pneumoniae R6
MIYLDNAATTPMSAVAISAMTKVMQETHGNPSSIHGHGRQAGKLLREARQELAQLLRTKPQHIFFTSGGTEANNTTIIGYCLRHQEQGKHIITTAIEHHAVLETIDYLVQHFGFEATIIQPENQEITAQQIQKALRDDTILVSTMFANNETGNLLPIAEIGQILKQHPAAYHVDAVQAIGKIPIHSEELGIDFLTASAHKFHGPKGIGFLYASSMDFDSYLHGGDQEQKKRAGTENLPAIVGMVAALKENLEKQEEHFQHVQNLETAFLAELEGIQYYLNRGKHHLPYVLNIGFPGQKNDLLLLRLDLAGISISTGSACTAGVVQSSHVLEAMYGANSERLKESLRISLSPQNTVEDLQTLAKTLKEIIGG

SEQ ID NO: 12225 - protein, 375 aa, Microcystis aeruginosa PCC 7806
MRGCQKMSNAVAVLPLLIAPAQVIRGDNALEESTGKLGDLGKRPLVVGGDRNLAFLSSPLKNLTPSYHSYAPDCSENSLAYLKASVKSHEADFIIGVGGGKALDTAKLLAHQCHLPIATIPTSAATCAAWTALSNVYSDAGAFLYDLSLARCPDLLILDYGIIQTAPKRTLIAGIGDAIAKWYEASVSSGHSTETLIIAAVQQARVLRDILFQKSPAALENIGGEDWKQVVDATVLLAGVIGGLGGANCRTVAAHAIHNGLTHIPACHHALHGEKVAYGILAQLRLEEIVLGNQLAVSARGQLIQFYEQIGLPKSLEDLGLKDVSLAQLRHAAAIACQPNSDIHRLPFTVSPEQVMAAMVSTTTADTMVQKVKAN

SEQ ID NO: 12226 - protein, 474 aa, Microcystis aeruginosa PCC 7806
MNWLVEANACPGLFYGTAAQDGFLIRLRTPGGWLNSPQGKAIATWLEQWQSTIQVTNRANLQIRGLQKSPSLEEFQTLQKLGLAAHNPSIDHLRNIMSSPTAGIDCQELIDTRPLVQELDNFIQNYPSIAQLSPKFSIGIDGGGAVGIGTSSTMAWQHRYNEIQLSAIALNNPTNLTSIVCFRLALGGDKQFYDTDLLIEPENCLAVVKTLVKVYLDYVQQTPKIKGKKPRMKHLLKDWGLTKYLEQVNSQLHRNYPRIIDWQECQQTAHSTQPYFHLGIHPQKQSGLSYIGLSLRLGQLTANQLWGLAALSETFGSGQLRLTPWQTVILPDIPDEKVSELLPKLASLGLSASPGWDAGIVACSGKPGCAAAATATQIHASLLADYLQEHLTCNSPVNIHLTGCAKSCAQPGPAEITLLGTTIEENGQIMEAYQVYVGDSQKFLEAPIFEGEFTKIPPLIAQILSSQKSKKLDE

SEQ ID NO: 12227 - protein, 297 aa, Microcystis aeruginosa PCC 7806
MSKIAKKLSNSPFRYPGGKFYARKLILACLPSHHKYCEPFAGGASIFFAKESVAENILNDKDEELMNCYRHIKDHLDSLIELLKDLNATKELHNYYKNEFQPANDLERAMRWYYLNRTSYSGIMKLENCYWGYGDKYSMRPENWPSHLKTTSEKLQNVNLSCLDFEDLINQLPDDYFLFVDPPYFQADQNKFYSCFFSLEDHERLCKTLKKHQHRFKFLLTYDNCSEIREMYDWCISLQDNEWNYTINRTDDQKNGLKLEHGYQSERRKGKEVFIANYDLEKPARFTPLQLSLFDVS

SEQ ID NO: 12228 - protein, 601 aa, Microcystis aeruginosa PCC 7806
MAVIVQKYGGTSVGSVERIQSVAQRVKNTVIAGNTVVVVVSAMGKTTDGLVNLAKQIAAEPSRREMDMLLSTGEQVTIALMSMALEEIGQPAISLTGAQVGIVTESEHSRARILEIKTDRLSRHLSEGKVVVVAGFQGVSDSDQLEITTLGRGGSDTSAVALAAALKADFCEIYTDVPGILTTDPRLVPEARLLDEITCDEMLELASLGAKVLHPRAVEIAKNFGVPLVVRSSWTDEPGTWVTSPAPKPRTLQGLELTKAVDAVEFEGNQAKIALLRVPDRPGIAARLFGEIAHQQVDVDLIIQSIHEGDSNDIAFTVMGNALKKAQSVAEAIAPVLRSHPTNTEEAEVIIESGAAKIAITGAGMIGRPGIAAQIFSTLAAAAINIEMISTSEVKVSCVIDEADGEKAIKVLCDAFQVEYSAKVANREIPKNLVPVRGVALDNNQAQMAIRNVPDRPGMAARIFSVLAAKNVSVDMIIQSQRCRIVDGIPRRDIAFTLPQADANSAQKILLELSESLGLQEVVVNNDVAKVSIVGSGMEGQPGVAARFFEALAKEKINILMIATSDIKISCVVNQEDGVRSLQVVHAAFGLAGQGKIEVPA

SEQ ID NO: 12229 - protein, 513 aa, Microcystis aeruginosa PCC 7806
MVQAPEKDGTTLNKFEKFKAEKDGLAIKDELDHFAQIGWEAMDKTDLEHRLKWVGVFYRPVTPGKFMMRLRVPNGIISGEQMRVLGEIVQRYGDDGNADITTRQNLQLRGIRIEDIPDIFQRLKSVGMTSVQSGMDNVRNITGSPMAGLDADELIDTRELVQKVQDMITNCGQGNYQFTNLPRKFNIAIEGGRDNSVHAEINDIAFVPAYKEGELGFNVVVGGFFSAKRCEAAIPMNVWVRPNQEVVDLCRGILEVYRDNGLRANRQKSRLMWLIDEWGIEEFRTRVANQLGYPLATAAEKDAIDWEKRDHLGVFPQKQQGLSYIGLCVPVGRLFADDMFDLARIAEVYGSGELRLTVEQNVIIPNIAAENVATLLTEPLLVKFTPNPAPLQRSLVSCTGAQFCNFALIETKNKAVDLISQLDAELNIPRGVRIHWTGCPNSCGQPQVADIGLMGTKARKDGKTVEGVDLYMGGKVGKDAHLGSCVQKGIPCEDLKSLLTSILIEQFGATPKG

SEQ ID NO: 12230 - protein, 526 aa, Aphanothece halophytica
MAKVLVSDSVDQAGIDILSQVAQVDVKTKLSPEELVATIPEYDALMVRSGTKVTEEVIEAGNQLKIIGRAGVGVDNIDVPAATRRGIMVVNSPEGNTIAAAEHALAMMLSLSRHIPEANQSVKEKKWERKNFIGSEVYKKTLGVVGLGKIGSHVATVARAMGMKLLAYDPFISAERAEQLGCRLVDLDIIFTEADYITLHIPRTPETENLINAEALAKMKPTTRIINCSRGGVIDEEALATAVENGTIGGAALDVFAEEPLGESKLREVGSNIVLTPHLGASTEEAQTNVAVDVAEQIRDVLLGLPARSAVNIPGLNPDVLEQLRPFLQLAETLGNLVSQLAGGRVEQLNVRLQGELTDSQSQPIVIAALKGLLSQALRERVNYVNASIEAKERGIRVIETKDASVHDYSGSLRLEATGSLGEHSVTGALLSDQEMRITNVDGFPINVPPNNYMLFTLHRDMPGIIGKIGSLLGGFNVNIASMQVGRKIVRGDAVMVLSIDDPLPEGVLDEIMKVPGIRDAYTIKL

SEQ ID NO: 12231 - protein, 271 aa, Streptococcus pneumoniae R6
MKSKKWIFVLCNFLASFFLVACQSGSNGSQSAVEAIKQKGKLVVATSPDYAPFEFQSLVDGKNQVVGADIDMAQAIADELGVKLEISSMSFDNVLTSLQTGKADLAVAGISATDERKEVFDFSIPYYENKISFLVRKADVEKYKDLTSLESANIAAQKGTVPESMVKEQLPKAQLTSLTNMGEAVNELQAGKVDAVHMDEPVALSYAAKNAGLAVATVSLKMKDGDANAVALRKNSDDLKEVVDKVIQKLKNEGTYQSYLEKAASLTEVEE

SEQ ID NO: 12232 - protein, 245 aa, Streptococcus pneumoniae R6
MGLTYQMKMKIPFDMADMNGHIKLPDVILLSLQVSGMQSIELGVSDKAILEDYNLVWIIAEYDIEVVRLPRFAEEITIETEALSYNRLFCYRRFTIYNEAGQELIHMMATFVLMDRDSRKVHAVEPEIVAPYQSDFDKKLIRGPKYESLEEPISKDYHVRFYDLDMNGHVNNSKYLDWIFEVMGADFLTHYIPKKINLKYVKEVRPGGVITSAVERTGLESKHEITSDGVINAQAIITWQEIKKV

SEQ ID NO: 12233 - protein, 395 aa, Streptococcus pneumoniae R6
MKLSNRVLEMEESVTLAAGARAKALKAEGRDILSLTLGEPDFTTPKNIQDAAIASIRDGRASFYTVTSGLPELKAVVNSYFERFYGYSVASNQVTVAAGAKYSLYTFFMAVVNPGDEVIIPTPYWVSYGDQVKMAEGVPVFVSAKEDNHFKVTVEQLEAARTDKTKVLVLNSPSNPTGMIYTREELLAIGNWAVENDILILADDIYGRLVYNGHEFTPISSLSEAIRKQTVVINGVSKTYAMTGWRIGYAVGEADIIAAMSKIAGQTTSNPSAVAQYAAVEALSGEQDTVESMRQAFEERLNTIYPLLAEVPGFEVVKPQGAFYLFPNVKKAMEMKGYTDVTDFTTAILEEAEVALVTGAGFGAPENVRLSYATDLDTLKEAVERLKAFMGSEND

SEQ ID NO: 12234 - protein, 368 aa, Streptococcus pneumoniae R6
MEEILCIGCGATIQTTDKAGLGFTPQSALEKGLETGEVYCQRCFRLRHYNEITDVQLTDDDFLKLLHEVGDSDALVVNVIDIFDFNGSVIPGLPRFVSGNDVLLVGNKKDILPKSVKSGKISQWLMKRAHEEGLRPVDVVLTSAQNKYAIKEVIDKIEHYRKGRDVYVVGVTNVGKSTLINAIIQEITGDQNVITTSRFPGTTLDKIEIPLDDGSYIYDTPGIIHRHQMAHYLTAKNLKYVSPKKEIKPKTYQLNPEQTLFLGGLGRFDFIAGEKQGFTAFFDNELKLHRSKLEGASAFYDKHLGTLLTPPNSKEKEDFPRLVQHVFTIKDKTDLVISGLGWIRVTGIAKVAVWAPEGVAVVTRKAII

SEQ ID NO: 12235 - protein, 332 aa, Streptococcus pneumoniae R6
MSMKKSFIHQQEEISFVKNTFTQYLKDKLEVVEVQGPILSKVGDGMQDNLSGVENPVSVKVLQIPDATYEVVHSLAKWKRHTLARFGFGEGEGLFVHMKALRPDEDSLDATHSVYVDQWDWEKVIPNGKRNIVYLKETVEKIYKAIRLTELAVEARYDIESILPKQITFIHTEELVERYPDLTSKERENAICKEFGAVFLIGIGGELPDGKPHDGRAPDYDDWTSESENGYKGLNGDILVWNESLGGAFELSSMGIRVDEETLRRQVEITGDEDRLELEWHKSLLNGLFPLTIGGGIGQSRMAMFLLRKRHIGEVQTSVWPQEVRDTYENIL

SEQ ID NO: 12236 - protein, 356 aa, Gossypium herbaceum
MSLLTDLVNLNLSDCTDKIIAEYIWIGGSGMDLRSKARTLSGPVSDPSKLPKWNYDGSSTGQAPGEDSEVILYPQAIFKDPFRRGNNILVMCDAYTPAGEPIPTNKRCNAAKIFSHPDVAAEEPWYGIEQEYTLLQKDVKWPIGWPLGGYPGPQGPYYCGVGVDKAYGRDIVDSHYKACLYAGINISGINGEVMPGQWEFQVGPAVGISAGDELWVARYILERITEIAGVVLSFDPKPIQGDWNGAGAHTNYSTKSMRSDGGYEVIKKAIAKLGLRHKEHIAAYGEGNERRLTGRHETADINTFLWGVANRGASIRVGRDTEKAGKGYFEDRRPASNMDPYVVTSMIAETTILWKP

SEQ ID NO: 12237 - protein, 356 aa, Gossypium hirsutum
MSLLTDLVNLNLSDCTDKIIAEYIWIGGSGMDLRSKARTLSGPVSDPSKLPKWNYDGSSTGQAPGEDSEVILYPQAIFKDPFRRGNNILVMCDAYTPAGEPIPTNKRCNAAKIFSHPDVAAEEPWYGIEQEYTLLQKDVKWPIGWPLGGYPGPQGPYYCGVGVDKAYGRDIVDSHYKACLYAGINISGINGEVMPGQWEFQVGPAVGISAGDELWVARYILERITEIAGVVLSFDPKPIQGDWNGAGAHTNYSTKSMRSDGGYEVIKKAIAKLGLRHKEHIAAYGEGNERRLTGRHETADINTFLWGVANRGASIRVGRDIEKAGKGYFEDRRPASNMDPYVVTSMIAETTILWKP

SEQ ID NO: 12238 - protein, 356 aa, Gossypium hirsutum
MSLLTDLVNLNLSDCTDKIIAEYIWIGGSGMDLRSKARTLSGPVSDPSKLPKWNYDGSSTGQAPGEDSEVILYPQAIFKDPFRRGNNILVMCDAYTPAGEPIPTNKRCNAAKIFSHPDVAAEEPWYGIEQEYTLLQKDVKWPIGWPLGGYPGPQGPYYCGVGVDKAYGRDIVDSHYKACLYAGINISGINGEVMPGQWEFQVGPAVGISAGDELWVARYILERITEIAGVVLSFDPKPIQGDWNGAGAHTNYSTKSMRSDGGYEVIKKAIAKLGLRHKEHIAAYGEGNERRLTGRHETADINTFLWGVANRGASIRVGRDTEKAGKGYFEDRRPASNMDPYVVTSMIAETTIPWKP

SEQ ID NO: 12239 - protein, 356 aa, Gossypium raimondii
MSLLTDLVNLNLSDCTDKIIAEYIWIGGSGMDLRSKARTLSGPVSDPSKLPKWNYDGSSTGQAPGEDSEVILYPQAIFKDPFRRGNNILVMCDAYTPAGEPIPTNKRCNAAKIFSHPDVAAEEPWYGIEQEYTLLQKDVKWPIGWPLGGYPGPQGPYYCGVGVDKAYGRDIVDSHYKACLYAGINISGINGEVMPGQWEFQVGPAVGISAGDELWVARYILERITETAGVVLSFDPKPIQGDWNGAGAHTNYSTKSMRSDGGYEVIKKAIEKLGLRHKEHIAAYGEGNERRLTGRHETADINTFLWGVANRGASIRVGRDTEKAGKGYFEDRRPASNMDPYVVTSMIAETTILWKP

SEQ ID NO: 12240 - protein, 356 aa, Gossypium hirsutum
MSLLTDLVNLNLSDCTDKIIAEYIWIGGSGMDLRSKARTLSGPVSDPSKLPKWNYDGSSTGQAPGEDSEVILYPQAIFKDPFRRGNNILVMCDAYTPAGEPIPTNKRCNAAKIFSHPGVAAEEPWYGIEQEYTLLQKDVKWPIGWPLGGYPGPQGPYYCGVGVDKAYGRDIVDSHYKACLYAGINISGINGEVMPGQWEFQVGPAVGISAGDELWVARYILERITETAGVVLSFDPKPIQGDWNGAGAHTNYSTKSMRSDGGYEVIKKAIEKLGLRHKEHIAAYGEGNERRLTGRHETADINTFLWGVANRGASIRVGRDTEKAGKGYFEDRRPASNMDPYVVTSMIAETTILWKP

SEQ ID NO: 12241 - protein, 156 aa, Gossypium hirsutum
MDLRIMGFDSPLLNTLQHMMDLSDDTEKIPNAPSKVYMRDAKAMAATPADIKEYPKSYVFIVDMPGLKSGDIKVQVEDDNMLLISGERKREEEKEGAKYVRMERRVGKFMRKFALPENANADAISAICQDGVLTVTVEKLPPPGPKKPKTIEVKIA

SEQ ID NO: 12242 - protein, 1125 aa, Ceratodon purpureus
  misc_feature (299)..(299): Xaa can be any naturally occurring amino acid
  unsure (1)..(1125): unsure at all Xaa locations
MTSTKLSYSSGASVKSKHSVRVAQTTADAKLFAVYEESNNSGDSFDYSKSVGQAAKPAVQAQVPAQAVTAYLQRMQRGGLTQTFGCMIAVEENTFRVIAYSENAPELLDLMPQAVPSVGQQEVLGIGTDARSLFTPSSVAALERAASTHDLTMVNPISVHTRSSGKPFYAIVHRIDVGVVMDFEPVRPNDVVISTAGTLHSHKLAAKAIARLQSLPGGDIGLLCDTVVEEVRELTGYDRVMAYKFHDDEHGEVLAEIRRSDLESYLGLHYPSTDIPQASRFLFMKNRVRMIADCCAPPXKVIQDKDLRQPVTLAGSTLRAPHGCHAQYMGNMGSVASITLAVIVNDQEDDFGVQQKGRRLWGLVVCHHTSARTISYPLRCACEFLMQVFGLQLNMEVELQAQMREKHILRTQTLLCDMLLRDAPIGIVSQSPNIMDLVKCDGAALYYNDRFWLLGITPSEQQIKDVAEWLLENHKDSTGLSTDSLADAGYPSANLLGDAVCGMAAARISPSDFLFWFRSHTAKEIKWGGAKQEADEKDDGRKMTPRSSLNAFLEVVKRRSLPWEDIEMDAIHSLQLILRGSFQEIDGDSSKSMIHARLHDMKLQGMDELSTVANEMVRLIETATAPILAVDSNGFINGWNAKVAELTGLPVGDAMGRSLVNDLILDESVEVVERLLYLALQGEEEQNIEVQLRTFGPQKSKGAVILIVNACSSRDVQENVVGVCFVGQDVTGQKMVHDKFTRIHGDYKSIVQNPNPLIPPIFGSDELGSCTEWSPSMEKLTGWKREEVLGKMLVGEVFGMQQMCCRLKGQDAVTKFMIVINNAMDGQDTDKYPFSFFDRNGKFVEALLTANKRTDADGYITGVFCFLHIASPELLQALTVQRATEKVAFAKLKELAYIRQEIKNPLYGIMFTRNLMEDTDLSDEQKQFMDTSAVCERQLRKILDDMDLESIEDGYLELETAEFEMGSMMDAVVSQGMVTSREKGLQLIRETPREIKNMCLFGDQVRLQQVLADFLLNAVRFTPSSEGWVGIKVVPTKKRLGGGFHVVHLEFRVTHPGSGLPEELVHEMFDRGRGMTQEGLGLSMCRKLVKLMNGEVKYIRDTGKSYFLVNLELPLTVRDDAGSVR

SEQ ID NO: 12243 - protein, 178 aa, Oryza sativa Indica Group
MAGSGRDDPLVVGRIVGDVLDPFVRITNLSASYGARIVSNGCELKPSMVTQQPRVVVGGNDMRTFYTLVMVDPDAPSPSNPNLREYLHWLVTDIPGTTGATFGQKVMCYESPRPTMGIHRLVFVLFQQLGRQTVYAPGWRQNFNTKDFAELYNLGSPVAAVYFNCQREAGSGGRRVYP

SEQ ID NO: 12244 - protein, 199 aa, Treponema pallidum subsp. endemicum
ISCALLFISFPDISHRVIGTLLNILVNKLGFFYILTGLFFLGTTLTIAFSRYGAVYLGTTRTARYSNFTWGSMIFTSTMAADILYWSLIEWAHYFTQAPFIAEHSPPTERQEWAAAYPLFHWGIIPWSFYVLLAVAFGYMLHVKKRHTHKISEACRPLLGAYVDGIIGEAIDICSVVGLLLGVATTFSLATPLLSLMVS

SEQ ID NO: 12245 - protein, 250 aa, Methylococcus capsulatus
CRISFGEVGSFEAEVVGLNWVSSNTVQFLLQKRPDECGNRGVKFEPGQFMDLTIPGTDVSRSYSPANLPNPEGRLEFLIRVLPEGRFSDYLRNDARVGQVLSVKGPLGVFGLKERGMAPRYFVAGGTGLAPVVSMVRQMQEWTAPNETRIYFGVNTEPELFYIDELKSLERSMRNLTVKACVWHPSGDWEGEQGSPIDALREDLESSDANPDIYLCGPPGMIDAACELVRSRGIPGEQVFFEKFLPSGAA

SEQ ID NO: 12246 - protein, 158 aa, Zea mays
YFSASALLRVMYGGREMTCGSELRPSQVASEPTVHITGGRDGRPVLYTLVMLDPDAPSPSNPSKREYLHWLVTDIPEGAGANHGNEVVAYESPRPSAGIHRFVFIVFRQAVRQAIYAPGWRANFNTRDFAACYSLGPPVAATYFNCQREGGCGGRRYR

SEQ ID NO: 12247 - protein, 69 aa, Agrobacterium tumefaciens str. C58
MATGTVKWFNATKGYGFIQPDDGSQDVFVHISAVERAGLTALNDGQKLSYELMQDRRSGKMSAGELVAS

SEQ ID NO: 12248 - protein, 448 aa, Agrobacterium tumefaciens str. C58
MTMSRVLLIDDEEELRFSTAQALELSGFAVTMLASAEHALELIGYSFDGVVVSDIRMPGMDGMTLLQKVRELDPEIPVILMTGHGDVQLAVNAMRNGAYDFIEKPFTPQYLAGIIKRANDRRALVLENRRLKAVAGKHDDLETRLPGRTQVMVDLRYRIRAIGATDADTLIVGDTGAGKEVVARALHDISARANRPFVAINCAALPQTLIESELFGHEAGAFPGALRSRYGKFEHARGGTILLDEIGSMPFELQGRFLRVLQERVITRLGSNETVELDVRFIATSKVDLEQEVAAGRFRADLLYRLNVATLLVPSLSQRSADIPLLFLHLVREAAARYGREDMDVPQHLLSAVSLREWPGNVRELRNAADRFVLGLESDVSEVSLALDDDGTSTLAPRVAAYEKSLIAHAIAVHGGNLKSVYESLGISRKTLYEKMQKYGLHRHMTEV

SEQ ID NO: 12249 - protein, 599 aa, Agrobacterium tumefaciens str. C58
MEKNRNYFIAIALSVVIVLAWQFLYMNPRIEQQRRAEEARQAQQQTTQQQPAPGAAPGATVEGAPPASSTQAAATATREEAIARTQRVAIDTNAIAGSINLTGARFDDIRLKGYHETVDDSSPIITLFSPADTKDGYFTELGYVAAQEVGGVPGPTTVWTLASGDKLTETTPVTLTYTNSKGVVFSRTVSIDEHYMLSIADKVENPGQAAISFATYGRVTRNNKPVIPPVFVIHEGFLGVSGKDGSLTEKKYKDVEEEPVTVAKATGGWLGITDKYWAAAIVPPQTTPFETRYSHITGNQPSYQADFKSDSMTVEAGQSIELKSLVFAGAKEVPLVDRYETEYSVPKFDLLIDWGWFYFITKPMFKMMDFFFRYFGNFGVAILLTTIVVKALFFPLASKQYASMANMKRMQPKMEELKAKHGDDRMAMQQAMMQLYKEEKINPVAGCWPMLLQIPVFFALYKVIYVTIEMRHAPFFGWIHDLSAPDPTSLFNLFGLLPYDVPHFLMIGVWPLVMGITMFLQMRMNPTPPDPTQAMIFTWMPLIFTFMLASFPAGLVIYWAWNNTLSISQQALIMKRHGAKIELFDNIKGLFKRKPVQSK

SEQ ID NO: 12250 - protein, 388 aa, Agrobacterium tumefaciens str. C58
MSILNSLSARSLAAPESGIVEVVNYARGRDNLLPLWVGEGDLPSPDFINQAAIDGLNNGETFYTWQRGIPELRQALSHYYERHFAASLPPEHFYATGSGMQAIVLAVQALTSPGDEMVYLSPTWPNIVAAIGVAGAKAVPVGIDFRDGRWDLDINRLESAITGKTKALFINTPSNPTGWTATRDNLRDVLALARKHDLWIVADEIYALYHYAGSRAPSFLDVMEPDDKIVFANSFSKNWSMTGWRVGWLVAPPAIGQVIENLIQYSTSGVAQFMQRGAVAALDHGDGFIRENYERALTSRDILCDALIATNRVETLKPDGALYAFLKIDGVTDSRATALDIVDKTGVGLAPGTAFGPGGELFLRACFLRNPRQIEDAADRLASYILGR

SEQ ID NO: 12251 - protein, 310 aa, Agrobacterium tumefaciens str. C58
MPGQFVTLELPVGSEPIYRTYTLSSSPSRPYALSVTVKAQATSIGTRWMFDNLKPGMKVRALGPLGDFSYVKHPGDKYLFISAGSGVTPMMSMVRDMSDRAPQSDITFINCSRTPGDIVFRHELEYLARFMPNLSLGFIVEKCGRTDLWSGLRGMVDKAKIALLAHDFMDRTVFCCGPEPFMAAVRSMLDASGFDMSRYHQESFAPAAPVSVGETVLTGADGEALSMVGFTLSGKELPCQPGQTVLMTARAAGVRIGAACESGICGTCRVLKLSGEVEMNHNGGILDEEIEEGYILACCSRPLTDIKVEA

SEQ ID NO: 12252 - protein, 313 aa, Agrobacterium tumefaciens str. C58
MTDHENPAVTGEDNALPTRSGFVALIGPTNAGKSTLVNRLVGAKVSIVSHKVQTTRAVMRGIAIHKNAQIVFMDTPGIFKPRRRLDRAMVTSAWGGAKDADLILLLIDSERGLKGDAEAILEGLKDVPQKKILCLNKIDQVKREDLLKLAAAANEKVAFDRTFMISATNGSGCEDLMDYLVETLPEGPWYYPEDQISDLPMRQLAAEITREKLFLRLHQELPYASHVETEKWEERKDGSVRIEQVIYVERDSQKKIALGKNGDAIKAISTASRKELSEILEQPVHLFLFVKVRENWGDDPERFREMGLEFPRG

SEQ ID NO: 12253 - protein, 771 aa, Agrobacterium tumefaciens str. C58
MTSHDKNNTPANTAKADIEEQALFFHRYPRPGKLEIQATKPLGNQRDLALAYSPGVAAPCLAIHENPEMAAEYTARANLVAVISNGTAVLGLGNIGPLASKPVMEGKAVLFKKFAGIDVFDIEIDAPGINDMVSTIAALEPTFGGINLEDIKAPECFEVERQLREKMNIPVFHDDQHGTAIIVAAAVTNALELAGKSLSSVKIVASGAGAAALACLNLLVAMGANKENIWVHDIEGLVYEGRNTLMDEWKEVYAQKTDKRVLADSIDGADVFLGLSAAGVLKPELLERMAENPLILALANPNPEIMPEAARAARPDAMICTGRSDFPNQVNNVLCFPYIFRGALDCGATTINEEMKMAAVQAIAELAREEVSEVAARAYSGETPIFGPNYLIPSPFDPRLILRIAPAVARAAAASGVATRPITDFEAYFDQLNRFVWRSGFIMKPVFNAAKAAEKKRIIFAEGEDERVLRAAQVLLEEGTGVPILIGRPQIIETRLKRFGLRIRPHADFAVVNPEDDPRYREYVDDYFALVGRAGINPEAARTIVRTNSTVIGALSVKRGEADALICGLEGRYDRHLRDVNQIIGKQESVRSFAGLSLLITQQGALFLTDTFVNNDPTSEEVAEMAILAAKEIRRFGITPKIALASHSNFGSRDSESARKMRRALKIIQQAAPELEVDGEMQGGSALSEALRKRAMPNSVLTGEANLLVFPNLDAANITLGVTRTLTEGLHVGPILLGTALPAHILSPSVTSRGVVNMAAFAVVQASHPSV

SEQ ID NO: 12254 - protein, 389 aa, Agrobacterium tumefaciens str. C58
MTGLTRTYMDWNATAPLLPAVRDILVSALDLAGNPSSVHREGRAARAAVEAARRDVAALAGAQASHVTFTSGATEAANLVLTTDFKMGRAPVRYGRLYVSAIEHPAFREGGRFEKDDVTEVSVTSAGVIDLTALEALLSSHDKSAGLPMVACMLVNNETGILQPVAEAARLVHAAGGLMVVDAVQAAGRIPLDINDLDADFLVLSSHKLGGPKGAGALISRGEVMMPKPLIHGGGQEKGHRSGTENTLSVIGFGAAAAVAAEYLAGEAARLGALRAKLEDGMRVNAPDVIIHGADVARVGNTTFFTLPGLKAETGQIAFDIEGIALSAGSACSSGKVGESHVLTAMGHDPKLGALRISLGHATDEADIDRTLVAFTKIAGRRKLSGQAA

SEQ ID NO: 12255 - protein, 111 aa, Agrobacterium tumefaciens str. C58
MSGIHDIIDSEVKSNDIVLFLKGTPQFPQCGFSGQVVQILDYLGVEYKGVNVLADADIRQGIKDYSNWPTIPQLYIKGEFVGGCDIVKEMFQSGELQSHFQEQGISVRGAA

SEQ ID NO: 12256 - protein, 597 aa, Agrobacterium tumefaciens str. C58
MTDKDNTENSNRMTGAEIVLQALKDNGVEHIFGYPGGAVLPIYDEIFQQEDIQHILVRHEQGAGHAAEGYARSTGKVGVMLVTSGPGATNAVTPLQDALMDSIPLVCLSGQVPTSLIGSDAFQECDTVGITRPCTKHNWLVKDVNELAGIIHEAFRIAQTGRPGPVVVDIPKDIQFATGTYTPPSAAIQQKSYKPKVQGDLNAIHAAIELMSKAKKPVFYTGGGVINSGPEATRLLRELVELTNFPITSTLMGLGAYPASGKNWLGMLGMHGSYEANMTMHDCDVMVCIGARFDDRITGRINAFSPNSKKIHIDIDPSSINKTVRVDVPVIGDVGHVLEDMVRLWRALPKKPEKAQTADWWSQIERWRARNSFAYKNSKDVIMPQYALQRLYEASKGRDTYITTEVGQHQMWAAQFFGFEEPNHWMTSGGLGTMGYGLPAAIGVQVAHPEALVIDIAGDASIQMCIQEMSCAIQYGLPVKIFILNNQYMGMVRQWQQLLHGNRLSNSYTEAMPDFVKLAEAYGAVGMYCDDPKELDDKIAEMIAVNKPVIFDCRVANLANCFPMIPSGKAHNEMLLPDEATDEAVANAIDAKGRQLV

SEQ ID NO: 12257 - protein, 504 aa, Agrobacterium tumefaciens str. C58
MDSSSSGVSYKKADASYFEKRGLSRYAGVWSLWALGVGAVISGHFSGWNFGFSTGGWGGMLVAGIIIAIMYLGLTFSIAEMSPALPHTGAAYSFARTAMGPWGGFVTGLCENVEYVLTPAVVVTFITAYVNSILGLDPAYSPFVWIVFYAIFLALNVFGLELSFKVTLVITLISLAVLVFFWISAIPNIDFSRFALNIGVGPDGKAVELPEGGGSFFPFGFSGVLATLPFAVWLFLAIEQLPLAAEESVDPKRDMPKGIILGMVTLMVSAFMIVLLNPSLPGVGAFHLSSSLEPLLDGFKAIYGDGGVVLLGLVALTGLIASFHTILYAQGRQIYSLSRAGYFPTVLSITHSKYRTPYVANITGAIVGLAVMLVIWFSLGAEQGGSIIGSVLLNMAVFGAMFSYIMQAISFILLRKNLPNIERPFRSPFGIPGALLTIIIAIVTLLYQIQDPNFTKGVLWVAVWFAVAIAYFAFVGRHRLILSPEEEFALEHKQAAVAAAAAKA

SEQ ID NO: 12258 - protein, 310 aa, Agrobacterium tumefaciens str. C58
MKVFAGNSNRHLAEAICKYLNVPLGNATVKRFADQEIFVEISENVRGEDVFIVQSTSFPANDHLMELLIMIDAMRRSSAKRITAVLPYFGYARQDRKAGPRTPISAKLVANLITEAGADRVLTLDLHAGQIQGFFDIPTDNLFAAPILARDVKDHYDTNNVMVVSPDVGGVVRARALSKRLDCLLAIVDKRRDRPGESEVMNVIGDVSGKDCILIDDIIDSGGTLCNAAEALLKKGATSVTAYITHGVLSGGAVARVASSKLRELVITDSIQPTTGVQSAHNIRVVSTAGLLGEAINRTAQEQSVSGLFD

SEQ ID NO: 12259 - protein, 344 aa, Agrobacterium tumefaciens str. C58
MTKFKLEYIWLDGYKPVANLRGKTQIKEFDEFPTLEQLPLWGFDGSSTQQAEGHSSDCVLKPVAIYPDPARTNGALVMCEVMMPDGVTPHASNSRATILEDEDAWFGFEQEYFFYQDGRPLGFPEQGYPAPQGPYYTGVGFKNVGSVAREIVEEHLDLCLEAGINHEGINAEVAKGQWEFQVFGKGSKRAADQIWIARYLLLRLCEQYGIDVEFHCKPLGDTDWNGSGMHCNFSTKFMREVGGKDYFEALMAAFAKNWQEHIDVYGPDNHLRLTGKHETAPWNKFSYGVADRGASIRVPHSFVNNGYRGYLEDRRPNSQGCPYQIASVVLKTIAEVPLAKSAAA

SEQ ID NO: 12260 - protein, 407 aa, Agrobacterium tumefaciens str. C58
MALPKDVKKVVLAYSGGLDTSIILKWLQTELGAEVVTFTADLGQGEELEPARKKAEMLGIKEIFVEDVREEFVRDFVFPMFRANAVYEGVYLLGTSIARPLISKHLIEIAKKTGADAIAHGATGKGNDQVRFELSAYALNPDIKIIAPWRDWTFKSRTDLLNFAEQHQIPVAKDKKGEAPFSVDANLLHSSSEGKVLEDPAVEAPEYVHMRTISPEAAPDKATVIKVGFRKGDACSINGVEMSPATLLATLNNYGRENGIGRLDLVENRFVGMKSRGVYETPGGTILLAAHRAIESITLDRGAAHLKDDLMPRYAELIYYGFWFSPEREMLQALIDKSQEHVEGEVTLKLYKGNVMVTGRESEKSLYSDALVTFEDDHGAYDQKDAAGFIKLNALRLRTLAKRNLNK

SEQ ID NO: 12261 - protein, 355 aa, Agrobacterium tumefaciens str. C58
MKFLDEAKVYIKSGDGGAGAVSFRREKFIEFGGPDGGDGGRGGDVWVEVVNGLNTLIDFRFQQHFKASIGQHGMGKTRTGAKGSDVVLKVPVGTQIFEEDNETLIMDLTKEGQRFRLAAGGNGGFGNAYFKSSTNQAPTHANPGLAGEEKTIWLRLKLIADAGLVGLPNAGKSTFLATVTRARPKIANYPFTTLHPNLGVATIDGREFVLADIPGLIEGAHEGVGIGDRFLGHVERTRVLLHLVSAQEEKVGKAYKTVKAELDAYGGGLTDKPEIVALSQIDVLDEKELKKKAKELEKACGRPPLLLSAAAHIGMTEALRALRDIIVSASNGGDTALPDRSMPHESEVEEEDDRL

SEQ ID NO: 12262 - protein, 69 aa, Agrobacterium tumefaciens str. C58
MNTGTVKWFNATKGFGFIQPDNGGTDVFVHISAVERAGMRSLNDGQKISYEIVQDRRSGKSSADNLQAA

SEQ ID NO: 12263 - protein, 412 aa, Agrobacterium tumefaciens str. C58
MAVAVWRRSRWWSFSQARGWPREVNLAVHDPVVIVGAARTAMGGFQGEFKSVAAPDLGAAAIRAAVERAAIPVSDIDDVLMGCVLTAGQGQAPARQAAIAAGVPNSVGATTINKMCGSGMKAIMLGHDQIAAGSSSIVLAGGMESMSNAPYLLDRARNGYRLGHGKVIDHMFLDGLEDAYDKGRLMGTFAEDCAEAYQFTRAMQDDYALTSLERARRAIAEGAFQAEIAPVGDVAVDEQPGKAKPEKIPQLKPAFRDGGTVTAANSSSISDGAAALVLMRRSEAERRGRSPLATIIGQASHADAPAGYPTAPIGAIKKLFEKNGWAAKDVDLFEINEAFAVVAMAAMRDLDLPHEKVNVHGGACALGHPIGASGARIVVTLLAALQRHGLKRGVAAVCIGGGEATALGIERH

SEQ ID NO: 12264 - protein, 648 aa, Agrobacterium tumefaciens str. C58
MNPNFRNFALWAVIALLLIALFSMFQTSPTQTGSREIPYSQFIRDVDSGRVRDVTVTGNRVLGTYTENGTAFQTYSPVIDDSLMERLQSKNVTIVARPESDGSSGFLSYLGTLLPMFLILGVWLFFMRQMQGGSRGAMGFGKSKAKLLTEAHGRVTFDDVAGVDEAKQDLEEIVEFLRDPQKFQRLGGKIPRGVLLVGPPGTGKTLLARSVAGEANVPFFTISGSDFVEMFVGVGASRVRDMFEQAKKNAPCIIFIDEIDAVGRHRGAGLGGGNDEREQTLNQLLVEMDGFEANEGIILIAATNRPDVLDPALLRPGRFDRQVVVPNPDIVGRERILKVHVRNVPLAPNVDLKILARGTPGFSGADLMNLVNEAALMAARRNKRVVTMQEFEDAKDKIMMGAERRSSAMTEAEKKLTAYHEAGHAITALKVAVADPLHKATIIPRGRALGMVMQLPEGDRYSMSYKWMVSRLVIMMGGRVAEELTFGKENITSGASSDIEQATKLARAMVTQWGFSDALGQVAYGENQQEVFLGHSVSQSKNVSEATAQTIDTEVRRLIDEAYTEARRILTDNHDGFVAIAEGLLEYETLTGEEIKALLRGEKPARDLGDDSPGSRGSAVPKAGAKKDGPSEAKGDGEAEGGMEPQPH

SEQ ID NO: 12265 - protein, 430 aa, Agrobacterium tumefaciens str. C58
MKKIFSGTVSRRTILKTTATAALVTAVRTAFPSGAFAATAEPEVKGAKLGFIALTDAAPLIIAAEKGLFAKHGMPEVEVLKQASWGATRDNLVLGGASNGIDGAHILTPMPYLMHTGKVTQNNVPVPMTILARLNLDSQGISVAKEYAETGVQLDASKLKAAFEKKKADGKEIKAAMTFPGGTHDLWIRYWLAAGGIDPDKDVSTIVVPPPQMVANMKVGNMDVFCVGEPWNEQLVNQGIGFTACTTGELWKGHPEKALGMRADWVEKNPNATKALLMAVMEAQQWCDEMANKEEMSTILGKRQWFNVPPKDVLGRLKGNINYGNGRVLENTGLQMKFWQDHASYPFHSHDSWFITENIRWGKFAPDTDVKALVAKVNREDIWRAAAKDLGVADLPASTSRGKETFFDGKVFDPENPSAYLESLSIKAAS

SEQ ID NO: 12266 - protein, 306 aa, Agrobacterium tumefaciens str. C58
MDIRLVGAPLQIGAGQLGCEMGPSAYRVAGLAHALEELGHRVVDTGNVMPAPLREFCHPNPAVHHLAETVAWTEALTEAAYRESADAVPIFLGGDHAISAGTVAGMARRVAETGRPFFVLWLDAHTDYHTLETTRSGNLHGTPVAYFSGRDGFSGYFPPLSHAVAEENIGMIGIRSVDPAERAALEKSGITVHDMRSIDEHGVAVILREFLARVQAANGLLHVSLDVDFLEPSIAPAVGTTVPGGATFREAHLVMEMLHDSGLVCSLDLVELNPFLDERGRTATLMVDLATSLMGKRVMDRPTRAG

SEQ ID NO: 12267 - protein, 294 aa, Agrobacterium tumefaciens str. C58
MKTVAFLGLGHMGLPMAANLVKAGYAVRGFDLSEACRTAAREAGIPVAADATEATHAADVVITMLPKGEHVVSVYGDLVRKVSAGTLLIDCSTVDMESALKAHELAASAGCPSVDAPVSGGTSGAAAGTLTFMCGGEPDAFSAARPVLEAMGKKIVHCGKGGNGQAAKICNNMILGISMIAVSEAFVLGEKLGLSHQALFDVASTSSGQCWSLTTYCPVPGPVPTSPANKDYQPGFAAALMLKDLKLSQAAANGTGVSTPLGAAASALYESFVGEGGGGRDFSAIVEMLRGGEA

SEQ ID NO: 12268 - protein, 425 aa, Agrobacterium tumefaciens str. C58
MARIVMKFGGTSVANLERIHNVARHVKREVDAGHEVAVVVSAMSGKTNELVDWVQNAAKVAGTNAASFYDAREYDAVVASGEQVTSGLLAITLQSMGINARSWQGWQIPIRTDNAHGAARILEIDGSDIVHRMGEGQVAVVAGFQGIGPDNRIATLGRGGSDTSAVAIAAAVKADRCDIYTDVDGVYTTDPRIEPKARRMKKIAFEEMLEMASLGAKVLQVRSVELAMVHKVRTFVRSSFEDPDAPGMGDLINPPGTLICDEDEIVEQEVVTGIAYAKDEAQISLRRVADRPGVSAAIFGPLAEAHINVDMIVQNISEDGSRTDMTFTVPSGDVAKALRVLDENKGQIGFDVAQNETGLAKVSVIGIGMRSHAGVAASAFKALAEKNINIKAITTSEIKISILIDGAYAELAVRTLHSAYGLDKA

SEQ ID NO: 12269 - protein, 401 aa, Agrobacterium tumefaciens str. C58
MPSTADRLKNVSISASAAMTQRARELAAKGIKVVSLSSGEPDFPTPAHAIEAAHAAALNGETKYPPMDGTVAMKAAISRKFKRDNNLTYDASQIVVSAGGKQVIFNAMLATCNPGDEVVIPAPSWVSYADIVKFAGGVPVPVPCFEQAGFKLRAEDLEAAITPRTKWLFLNFPSNPTGAACSRKEMAAIAEVMLRHPHVWILTDDIYEHLVYDGFEFGTIADVEPRLYDRVLTMNGVSKAYAMTGWRLGYCASGSKELITAISNVNGQNGGGITTVTQAAAIAALDGPQDLLKERAAIYRERRDFVLGQLAEIDGLRCHKPEGAFYIYPNISGLIGKTTKGGRKIESDVDFVMALVDEHHVATVQGAAYGMSPYFRLSYATSMEMLGEGCARIAQFCRDIR

SEQ ID NO: 12270 - protein, 233 aa, Agrobacterium tumefaciens str. C58
MKIDRSVIRSLALFAKMADDELDGLLTHATSRLVPPGEAIFEQGQSAAHFFLLIHGRLKVTQVTHDGQQIIVRMVHPGDLFGFARALQRSDYPGTATTAAESVILSWQTDLWPQFVEQNPHLAVSAMQTIGQRLEEAHTRIREMSTQEVERRVAHAVLRLSQQAGRKELDGIRIDFPISRQDIAEMTGTTLHTVSRILSSWESKGLVQGGRQKLLVCNLPGLAQLAEGETSQV

SEQ ID NO: 12271 - protein, 401 aa, Agrobacterium tumefaciens str. C58
MTEAYICDYIRTPIGRFGGALSPVRADDLGALPLKALMERNASVDWEAVEDVIFGCANQAGEDNRNVARMSLLLAGLPVSVTGTTINRLCGSGMDAVIAAARAIKSGEAELMIAGGVESMSRAPFVLPKAESAFSRNAEIYDTTIGWRFVNPLMKAQYGVDSMPETGDNVAVDYQVSREDQDAFAVRSQQKAADAQTNGRLAREIVPVTIPQRKGDPLVVAKDEHPRATSLEALAKLKPVNKRDGATVTAGNASGVNDGAAALIIASAEAARKYGLTPIARILGGAAAGVPPRVMGIGPAPASAKLLARLGLNQEQLDVIELNEAFASQGLATLRQLGIADDDERVNANGGAIALGHPLGMSGARIAGTAALELSLSGKRLALATMCIGVGQGIAVALERV

SEQ ID NO: 12272 - protein, 267 aa, Agrobacterium tumefaciens str. C58
MSISRFLKNMTVAVGVAAATLAATTSANAVSLSEITARGKVKIGVLTGAPPMGMVDEKGNPSGYDVDVANLIGSYLSLPVELVPLTPPARIPALQTGKVDFLVATLAPTGERAKTVMFTQPYSAFNMDIISGKDQKFENLDSLKGKRVSVNRGSSQETALRKANVEGLEIVVYEDDSTSAQALLAGQVDAVALPSTVGEAIIKQRPEAGLQVGFTFFQQGNSMATKIEDFELRQWLNTSIYLMKMSGDLDRISVKWTGRPLPQLPSF

SEQ ID NO: 12273 - protein, 349 aa, Agrobacterium tumefaciens str. C58
MPKRCNGSAASSRIQFEVRMGSRNILVTGPAINEQAVKLITDNGYQVSYVPPYTSEADLVRIVTELDPVGVVVRMGRFSEAAIKAAPSLRVLSKHGVGVDNIDVDAASRREIPVVVAAGANALSVAEHAITLLFAVVKRIVPLDSGIRAGRWEKAGYSGKELAGMIIGLVGFGAIARQTAVFARGFGLKVQAYDPFTDETAFVEAGVHRVADVDDLISSSDILSLHCPLTPDTRNLLDDRRLGMMKPGSFIINTARGGLIDEDALLRAVESGHIAGAGLDTFQIEPPAANHPFWQNQKIVVTPHIGGVTQEANVRVGVDAVEGIFAIVEGRHLGRERIVNHRALAKTPA

SEQ ID NO: 12274 - protein, 522 aa, Ehrlichia ruminantium
MLITARLRYAIMFMVKLAHGLCTQQNKLQPVRMSYIASNQSLSEGYLEQVIVQLKKKGLINATKGPGGGYSLSIAPHLITLSLILESIGENIKITRCENNSPGCLSNNNRCVTHKLWDDIGNYIKDYLNNISLEDIVNNNFRSNIALHKNEEPYIYADYNSTSTILPEVKYQLNNLSYIKLYNPSSIHKLGQKTKSIIEETRNIAIKQLNAQYYDVVFTSSGTEANNLVINSTSDYKHLISSTEHLSIIKCATNAELIPVDSNGIICLNALSSLLHKFKDDKILVSVMTANNETGAIQPIKKIVELSHKFGALVHTDAIQACGKIHIDIEDLGVDLLTISSHKLGSIAGAGVLFFNSKKINIKPMIIGGHQEKGLRAGTENVLAIYLLSISLSNLYKSITKMLLVEKLRNKLENEILSLVPNAQIFSRNVERLPNTSCISMPNVNSEIQVISFDIKNIAVGNGSACSTGVVEPSHVLSAMGVNQEIANNSIRISLSPDTTDEHIRTIVNCWYEIYTHNQVHK

SEQ ID NO: 12275 - protein, 451 aa, Sulfolobus tokodaii str. 7
MKENKELAKGTVSFREVVAQGIGGAAPAMASLVTLTGAAAYAYASLPLAVIIATLGVLLDATRLSITSRYVQSAGGIYAFISAGLGRTIGYFIGWAYVLYTLTALVFIYLSVGVFLPGALQALGVSTPSWLWIPLVIIVALFGGVLSYLGVRPSLRFTLTMSILEIVFILATSFLIFTKVPPDPTTFTFKYASPFNVGVGMAFIFLAFAGYETTSVLGEEAKDPKNTISKGVFTAALLVGITYLVASEAFVVGWGVNNMSSFFTELVPGIILGVKYGGIALGIILTILLINSGLTDSVTFFNTVSRVVFAMARDGVLDKRLYDIHETNKTPHKAILFSFIFSLAYTLIFSLIIGPENVFLSVGITTTFGFLIALFTANISLLFILMKNNSLSIWNILLTIAINSILLFVVFANIVTTSVNVYVLIGVVSFIVWMIAGAIYRVVTNKKVTEI

SEQ ID NO: 12276 - protein, 689 aa, Sulfolobus tokodaii str. 7
MDGITRKNAGVSIGDKVIVRKASPKIATSVKLAPSNFSITVDPGFISYVKKKLKDYPLVEGDTVLIPVLGQAIPFTVVQVRPQGIVIVSDETSITISEKPAEQARYPRVTYEDIGGMKHIIQKIRELVELPLKHPELFKRLGIEPPKGILLYGPPGVGKTLLAKAVANETEAYFTSINGPEIMSKFYGESEQRLREIFEDAKKHAPAIIFIDEIDAIAPKRDEVIGEVERRVVAQLLTLMDGLESRGNVIVIAATNRPNAVDPALRRPGRFDREIEIPLPDKQGRLEILQIHTRNMPLSKDVDLEKLAEMTHGYTGADLSALVREAAMNALRRYLQVIDLNQDKIPPEILEKMEVNMDDFLKAFKEIVPSGLREIYVEVPEVHWSDIGGLEDVKEELREVVEYPLKYREAYENVGIEPPKGILLFGPPGTGKTMLAKAVATESGANFIAVRGPEILSKWVGESEKAIREIFRKARQAAPTVIFFDEIDAIAPMRGLTTDSGVTERIVNQLLAEMDGIEKLENVVIIAATNRPDILDPALLRPGRFDRLIYVPPPDKRARAEILKVHTRNVPLAEDITLDELAEKTEGYTGADLAALVREATLRAIREEMTECMKKADENCKRNDNECRDKIVKDCMKGKGVLVEKRHFDIALKKVRPSVTMDMIQFYQNWLEKARQQLPRANLKPSTFT

SEQ ID NO: 12277 - protein, 350 aa, Sulfolobus tokodaii str. 7
MELKEHIIDLPKKVYIGYDIIDNIKEYILSLNLSGPFLIVTGPLVRKIITDKIIENFKDESVEVVEVKIASIDEVNKVEEMAKGSRINTIIGVGGGNIIDVAKYVAYRIGKEFVSLPTAPSHDGITSPFASIKGLGKPTSVKAKGPIAIIADINVLASAPRRLINAGIGDTIGKITAVRDWQLAAKLRGEYYGDYTASLALMSAKHALSCAKILDKDVRAGVRVLTEALISSGVAMGMAGSTRPASGSEHLFAHAIEILYPDKALHGELVALGTILMAYIHGINWKKIKKAMKKVGLPTKAKQLGIPDEIIIKALTIAHTIRPERYTILGDRGLTWEAAEKIAKETGIID

SEQ ID NO: 12278 - protein, 295 aa, Sulfolobus tokodaii str. 7
MSDSRLLYLNENSRLFAGFNKPTSPFVIIGLPLDITSSFRPGSRFAPSTIREYAQFIEFYSIRTGIDMGEVGFNDVGDVVMHPSDVEENIRRISDVTSYFAEKGKIIIGIGGEHSVTVGTVRGIKPDCVLSIDAHLDLRDEYMGYKYDHACVMRRISEQGVKIMEIATRAVSKEELDYANKNGIAYLTPHQIRLLGVRETAKKIVNNFRDCEKIYVTYDMDGIDPAYAPGVATPEPEGLDPTTVLDIISLIIDKRVVGFDVVEVSPPHDPSGITSVLGARIILETSAQIYKARSL

SEQ ID NO: 12279 - protein, 747 aa, Sulfolobus tokodaii str. 7
MSQEVSLRVSEARQRDVGKKIARLSDYTMRKLGIETGDYIEIIGPNGSALAQAMPSYDISDDEIKIDGYIRKSIGVGIGDDVKVKKANVTPATKITLAPTQPIRFDRSFVEYVKDQLMNKPLAKGETIPVPIYTGTLDFIVINTQPSNYVYVTESTNLEIREEPAKESELGGYPKVTWEDIGDLEEAKQKIREIVEWPLRHPELFQRLGIEPPKGILLYGPPGNGKTLLARALANEVGASFYTINGPEIMSKFYGESEQRLREIFEEAQKNAPAIIFIDEIDSIAPKREEVTGEVEKRVVAQLLTLMDGIKGRGKVIVIGATNRPDAVDPALRRPGRFDREIEIRPPDTKGRKEILQVHTRNMPLAEDVDLDKLAEITYGYTGADLAALAKEAAMNALRRFIAEKKINLEQERIPAEILKELKVTMQDFLEAMKSIQPTLLREVYVEVPKVHWNDIGGLEEVKQQLREAVEWPLRFSELFNKSGITPPKGILLFGPPGTGKTMLAKAVATESGANFIAVRGPEILSKWVGESEKAIREIFRKARQAAPTIIFFDEIDAIAPMRGLTTDSGVTERIVNQLLAEMDGIVPLNKVVVIAATNRPDILDPALLRPGRFDRLIYVPPPDKRARAEILKVHTRNVPLAEDITLDELAEKTEGYTGADIEALVREATINAMRKIFNDCDKKAKDQCQNNVDCYNSKMRDCMNNAKVIVTKEDFNKALEVVKPSLTAADIQRYERLAKELKRSVL

SEQ ID NO: 12280 - protein, 397 aa, Sulfolobus tokodaii str. 7
MINMDAYIVSAVRTPIGKFGGVFKDLPPYELGAIAIKEALKRANVDPAKVDITIMGNILRAGHGQDLARQAAIRAGIPMEIDGYCVDMVCSSGMVSVINAVQMIKSGDADIVVAGGMESMSQAMLAIRSEARWGVKMLLGKKLDFIDTMLIDGLTDPFNMKLMGQEADMVAKSHNISRRELDEVAYESHKRAIIATEKGYFAKEIVSVKVDGKEVTQDEGIRRDTSIEKLSQLKPAFSPDGVHTAGNSSQISDGSSALVIVSEKIVKEYKLEPIAKILGYSWVGIESWRFTEAPIFAVKKLLQKLNMEISHFDYFENNEAFAVNNVLYNKYLGVPYDRLNVFGGAIALGHPIGASGARIITTLINVLSTMGGKRGIASICHGTGGSTAIAIELLRPL

SEQ ID NO: 12281 - protein, 605 aa, Sulfolobus tokodaii str. 7
MGVTQFIPLIEVLGAVGITIVLLVLLFRKQTQKFILSDKALQIQQKSQKKKEEVKEKITWDMIGGYDDVKKEIKEYIEIPLKYKEIAKKYGLRPPKGILLFGPPGCGKSLMMRALANEAKINFIYVNVSDIMSKWYGESEARLRELFANARKNAPCILFFDEIDTIGVKRESHTGDSVTPRLLSLMLSEIDGLQSEDGVIIVGSTNVPHLLDKALLRAGRFDKLIYIGVPDKKSRKEIFLIHCKNMPLGEDVDFDKLAEMTERFTGADIANVCQEVARMAAVEALEKGVERKITLQDFINVIKRYKPSVTLQMLDEYEKFRLDYERKFRGPELPESEDAEKITLNDIGGYEEIKKELYDLLEMQFKYYNLMEQMKIPSIRGILLYGPPGVGKTMMAKALARTLGVRLIMLSGAEILYKGYEGAVSAVKEVFNRARENKPSILLLDELDAIAPKRENQKSEASKIVNQLLTEMDGIRSLKEVVVIGTTNRLEDIDPALKRPGRFDRIIYMPLPNKDERKDIFEKYLGKDICEQVNCDKLADITEGYSGADIAAVTREAKLKVLKEIIRGNKERKLTYEDLLEAIAKVKPSVKKEQLNSTSSDLKKE

SEQ ID NO: 12282 - protein, 291 aa, Sulfolobus tokodaii str. 7
MRVGLAGLGVMGYRIGANLVKAGKLDVVYNRTVSRAEQFSKEYGVKYVTDPKELIKSVDLLITMLADDSAVSSFLLPLSPYAKDKIIVDMSTISPSTSISIANEIMKNGGMMYDAPVIGTSIFAEQKKLTVLLGGPESHVNTVTEILKETASTIIYMGKNGMGLYAKLVNNLMVGVYVAALAEAYNFGISAGLKPEDVHKVLALYGSAKSPTSELKVPKMMNSDYSTQFATKHMRKDLEIITKETQNLHVVNPLSSLALQLYRFAEALGYSESDYAAVLEVYKKANLVKVK

SEQ ID NO: 12283 - protein, 524 aa, Sulfolobus tokodaii str. 7
MNNYNLNVDYVTVTVFLILFAIFTFLGFYGAKWRKGDLNKLDEWGLGGRRLGWLLVWFLLGADLFTAYTFIAVPSAFFATGSLYFFAVPYVAWGFGVAMLTMPKLWTVARNKGYVTAADYVKDRFNSKGLAIAVAITGAIAELPYIALQIIGMQAVIAILFIGLGITSTKLSSDLALLVAFIILAAFTFVSGLRGAALSGVYKDILVWITVLTTIGVVLAHYGNFQGALAIAHQVSPKVDFLDLPPKLFLAYWSLALGSTFALYLYPHAINGSLSAESRERLKIGTALLPLYGIGLALITLFGLLIFLVPNALKVVLTTKNGALTVPSLIAATTPDWFTGLAFTAIFIGGLVPAAIMAIGVANLLTRNVIGEFTKLSPTNEARLAKILSTVFKFIALAFVFIVPATYAIQLQLLGGIIVTQTLPAVFLSLFTDKLEKNSTLGGWAAGVISGVGLVVYVNLILEHYGSLKTSLFTTPLGPIYIALIALGINLLVTLIGSLVAYAKGWRPYRKISEKDFEVKEVAK

SEQ ID NO: 12284 - protein, 518 aa, Sulfolobus tokodaii str. 7
MEIQKTFPQNNLIKLLIILISFSIILLSLHSFGQTSSNTTAEIQSLNQSILALENHTADYPSAAVPSWLDTGSNAWMLTAATFVGLQSVPGVALYYAGLSKKKYAVNSALMVFYAFAAVLVVWMIAGYNAGFGHPALLSINGYGILGYPLPAWLGHYEASQTVFGPTGTPVDIPTSTYIFFQFVFAAITPVLLAGGVLERMNFKAWMIFVPFWSLLVYSPVAYWLFAGGWLNQLGAVDFSGGYVIHVDAGVGALAAALAIGPRLASERKLEAHSLPLVLAGAGLIWLGWDGFNGGDPGGATIDAAIAVLNTNIATAVSAITWMLMDMAFFKKPTLVGATSGAITGLVAITPAAGYVNGWEAMLIGIASGSIPWLSLYKFEPRLKVDDTLGVFSTHGIAGIVGGLLTGVFADPNVTQYVDPTLKGALYGNLYQLGIQAAAAAVVFVYDFAITFGLLKLIGLFIPLQAPPDTLAIGDYAMHGEVAYSELLATLPESQIKKEEIREEAQEEKEDPDEKKSK

SEQ ID NO: 12285 - protein, 510 aa, Sulfolobus tokodaii str. 7
MNVDISTLTIFIVLFAIFAFLGFYGARWRRGDLSRLDEWGLGGRRLGILLVWFLMGADLYTAYTFIAVPELAFKSGALAYFAVFYVGLTFPIALLTMPRLWTVSRNRGYVTAADFIKDRFGSRALAIAVALVGAVAEIPYIALQIFGMQAVLIVMLIGLGLPPTRLTLDLSLLIAFIVLAAFTITSGLRGAALTGVFKDILVWITVLATIIAVPLSIGGFSTAFHAVKPIPYSYLPPSALSAFWTLAVGSALALYLYPHAINGSLSAEDKKKLKYGTALLPIYGVGLALLALFGILVFAIKPAYTLSAKYGGITAVPALLAYSMPSWFNGIAFLGIFIGGLVPAAIMAIGSANLLVRNVVKEFYNLTPKGEATLAKWISTAFKFLALAFIFVVPLSYAIGLQLLGGIIILQTLPPVFLGLFTNKLEGRSLLAGLIGGVASGVVLTAYVNHFGAIATTSYPTPLGGIYIALIALAINLVISLVGTAIAMAMGWKPKEVIKTEELVKTIEEK

SEQ ID NO: 12286 - protein, 526 aa, Sulfolobus tokodaii str. 7
MSQQEVPRLKKGQVSTLGALVEEIAAMAPACDVVAFITSAIAYAFALTPLAFLLATLAMYLEVNTLYHLAKRHASAGGYYGYIANAFGPVPATISGLLYVLYQVTSTAAIPTYIGGAIIPAFLDYYYHIVLPSWLWLPLILVFVIVPITLAIIGIRPQITTLKFASLFEVTFLAVIGAIVIAKAPDNTLAVFNPFAWPQYAKDFAPYGGPGGALGLAMVFSITSFIGYGGSAPLGEEVEHPKQILRALSLGVFIVGAVLTEMAYAIVAGWGVNNLSALTNNPNPDVQTIPGIIVMGLYLGIIGSMGLFLVAMNSAFSDAVAMQSNAGRVYFSMARDNVIPKWFSKIHPKYHTPYRALTFIGIASSISAILTAFAMFAVNGLNPIQALTTTTANANVLQALSDTFEFLTTMALFGMVLTHFLLNASLITLFFRLKEKHKDILHAVLHVLQHYVAPAVATGILGYALYTSISSLVFPEAPAAIVSIVFLAFATGYAIYLKIYKPHVLTQAGKRVNLWAEEGESSARNE

SEQ ID NO: 12287 - protein, 425 aa, Sulfolobus tokodaii str. 7
MEEKKLSLSQALALGLGNIIGAGIFVMAGVSITAAGPAALLAFLITAVYAMSVGLNNAELASVFPKVEGGVYSFALLSLGETIGFLVGWFRVIGYAISGGATALGFSGYLITTFSLPSFLYFLLAILLIIVLIIIDYLGLKLAAEIESILVVLNILGLVIFSITALVISGIRLQNFSPFLPHGITGVLTASNIAFFAYSGFNTIATLTPSVKEGERTVPKAIVLSLLISAFLYMLVTFSMVDAIGYKNFKTNSAPLQLVLSTIHAPFYVYFFVNLTAILATITVTLSTIIATERTMVQMELDNLLPKVKGGKLSILLIIGLVMIASLGLGNVEVIALVSNFGIVFSYMLSGIEVAVVRHRGLRGVFKSPGFPFVQIISVILSGVFIYSLGFQSLLIGFVTLLIGLVIHSIHKEIMKKEGIFSRKK

SEQ ID NO: 12288 - protein, 291 aa, Sulfolobus tokodaii str. 7
MIIIGGTATNGIDENLSKIISVPLLKVEHKVFPDGESYIRIPQHITNQEILVVQSLYPPQDKHFVELLLILETLADMKNNKITAIVPYLAYSRQDRRFKEGEALSIKTILNAIARAGADVLIVIEPHKEEELSYFGKEVKIADPMPELAKEVSKKVEKPFVLAPDRGALERAKRLAEQLNAEYSYIEKERDRDTGEVRIKNLPELRLSGKDVIIVDDIISTGGTMIQATRAAYEHGARKVISVAVHSLFLDNAYEKLINSGVKEIVTTNTIPQDPSKVTVVDVSPAIARKI

SEQ ID NO: 12289 - protein, 248 aa, Sulfolobus tokodaii str. 7
MIYMTTLKIENLHVTVEGKEILKGVSLTINSGEIHVLMGPNGSGKTSLSLAIMGHPKYKITEGKILLDNEDITNLETHEKVKKGLFLAFQNPIEISGVKLSTLLVAEYNRIYGSSQSPLQVISYVKELSKTVGVSDSLLNRGVFEGFSGGEKKRTEILQMLLMKPKIAILDEPDSGVDVDGLRAIAEAIVKLRNENNTGYLIITHYRRILDHVKADKVHVLYRGKIVASGGMELAKLIDEKGYEGILK

SEQ ID NO: 12290 - protein, 369 aa, Sulfolobus tokodaii str. 7
MSAQSMLEEMARKYAINAVKADKEGKAEDAINNYKKAIEILSQLIALYPDSPSIKVYEQMINEYKKRIEVLKEAVPASGSESKQIDIEDLIVKEKPKVSFKDIVGLDDVKEALKEAIIYPTKRPDLFPLGWPRGILLYGPPGCGKTMIAAAVASEIDSYFIQVDAASIMSKWLGEAEKNVAKIFTKAREISKREEKPVIIFIDELDALLGIYNSENGGEVRVRNQFLKEMDGLQDKSENYKVYVIGATNKPWRLDEPFLRRFQKRIYVRLPDFQQRLALLQYYTSKIKMENVDLNKVAEMTEGYTASDIKDIVQAAHIRVVKEMFINNLNEPRPVSMEDFIEVLKIRKPSVNQEMIKAYEAWHEKFKAL

SEQ ID NO: 12291 - protein, 399 aa, Sulfolobus tokodaii str. 7
MPVDDFSLSANSISGESTLVYQDVARQVQKTKGIRIINFGIGQPDLPTFARIREAAKKSLDEGFTGYTSAYGIDELRQKIAEHLSSKYESVRKEEVIVTPGAKTALYLAFLLYINPGDEVIIFDPSFYSYAEVVKMLGGVPVYVKMKFNESTGFSLNLSELESKINKKTKMIVLNNPHNPTGMVFDPIEIEKLMEITKEKKVLLLSDEIYDYFIYEGKMKSVLEDPDWRDYVIYVNGFSKTFSMTGWRLGYVVAKEKVIKKMAEIAANIYTCPTSFAQKGALAAFESFDEVKEMISLFKKRRDIMYEELKKIKGIQVHKSQGAFYMFPFIGEILKKANLSVKDFSLKLIEEKGVTTIPGEVFPLEVGKDFVRLSFAVKEDDIREGIKRMKEFIDMLMTP

SEQ ID NO: 12292 - protein, 447 aa, Sulfolobus tokodaii str. 7
MKVIKIGGSIQKDEKDYELILDKLKKEIDYNDKNIIVTSAIKNITNQLLDIIKNTDKAMDIVTDIYDRHVRLLSKLTNGIEFERSFGEISKLADELFKIAWSVRVLDEVTPRVKDYILSFGERFAVILLSAFLRSNNIQSSYILDPPLITDENFGEANVLLQQSKENLTKKIDGINGNVIVIPGFIGKSTQNKFTTIGRGGSDYTATIVGKILGAKEVKLITEVPGIMTADPKKIPQAKTIPRLALEEAIELSQLGAKKLHPRTFDPIFNTNLKVVIEGLYEEGSTVIEGNCTKDDILKGIATRNNLELITIESTNIVGKIGSAATIMSEARNANVNLIAISQPVSETVIQLVIESQDKDRLIERLNNLNNLIEDIQSRKVSAISIVGCGLRNKEISAKVINKASSLDPIFISRGLKGVSLTFIVDEKDENSLAKELHEVILEWQTK

SEQ ID NO: 12293 - protein, 131 aa, Sulfolobus tokodaii str. 7
MSIQYTTVGDLKVGNYVVIDGEPCRVVEISKAKTGKHGSAKANIVAIGLFTGQKRTLMAPVDQQVEVPIIEKHIGQILADKGDTITIMDMENYETFDIEKPTDADIVDKIRPGAEVEYWEIMGRKKIVRVK

SEQ ID NO: 12294 - protein, 566 aa, Sulfolobus tokodaii str. 7
MEEIEELIYKYALQNAYKHGGKAQDKAVVSKIFVERPDLRSRAKEISEIAKKIVEKVNSMSIQDQERELKEKYPDLLEEKKKEEPEKKTLPPIKVEGKFVTRFAPNPDGPIHLGNARAAIISYKYAEMYKGEFILRFDDTDPKVKKPIKEAYDWIRKDLKWLGIKWDKEVKASERLEFYYSMAKELISKGFAYVDTCSEEEFKKMRDASKPCPNRLKSAEDNLYLFEKMLNGEFKEGEAVVRIKTDLSLPDPSQRDWVLLRIIDVKKNPHPITGDKYWIWPTYNFASALDDHDLGITHIFRGKEHEVNAEKQKWIYNYMGWKYPYVEEFGRLRLEGFMMSKSKIRTVLEKGVSIDDPRLPTLAGLRRRGILPETIIETIITVGLKVSDATISFDNLAALNRKKLDPIAKRLMFVQQPKEFIIELSEPIRAKIPYNPSKPSEYREILVNPGDKILLDAKDAEEGAVVRLMELCNVTISGNKLIFHSKTLEDAKKLNAKIIQWVKKDEASNVEVIIPDPNEEKPPISGYGEKEIGNLKINEIVQFIRFGFVRVDNKIDNKVTVIFSHE

SEQ ID NO: 12295 - protein, 572 aa, Sulfolobus tokodaii str. 7
MPTGARITIDALKREGVKVIFGIPGLSNMQLYDAFIEDLQNGELRHVLMRHEQAAAHAADGYARASGIPGVCTATSGPGATNLVTGLITAYWDSSPVIAITGQVPRNSIGKMAFQEADAMGIFEHITKYVVEVKKLEEIPIWIKNAFYIATTGRPGPVVVDIPRDIFYEKVEEVKWPEKPMVKGYKEFPTIIDRQKLKKAAEILVNAERPIILVGTGVVWSNATQEVLELAEYLHIPIVSTFPGKSAIPHDHPLYFGAMGYYGRAEASMAALESDAMLVIGARFSDRTFTSYDEMIETRKKFIMINIDPSDGERAIKVDVNLVGNAKILLRELMKAIYEVGKKNDHSAWIKRVKEYKEYYSQFYYYDEPNKLKPWKILKTIRNTIPRDAIVTTGVGQHQMWAEVFWEVLEPRTFLSSTGMGTMGFGLPAAMGAKLAKPDKVVVDLDGDGSFLMTGNNLATAVDEHIPIISVVFDNRTLGLVRQVQDLFFGNRIVGVDYGPSPDFVKLAEAFGALGFNATSYEEIEKSLKTAMKENIPAVIRIPVDKEELALPTLPPGGRLKQVIVRDPRKSS

SEQ ID NO: 12296 - protein, 390 aa, Sulfolobus tokodaii str. 7
MKIVLAYSGGLDTTVAIRWLKETFNADVITVTVDVGQKDNFEDIEKRAYIAGATKHYTIDAKKEFADNFISYAIKMNALYEDVYPLSTALARPLIAQKVVEIAKKEKVDYIAHGSTSKGNDQVRFDLAVKALYPEAKIIAPARIWNMTREKEIEFAKARGIPIKTESSKYSIDENLWGRSIEGDDISDPSKEVPEDAFEWTKKKNNGKITLSIEFEKGIPVAINNEKMDLVKIIQVLNEVVGSYGFGRVEHLENRVVGFKSREVYEVPAALVLINSHKDLEKTVYSPLEFRFKKYIDSQWADLVYQGLWFEPLRETIQLAGDNLNKWVTGEVKIEIEGNGMRTLGRASKYSPFSEKVASYNKGWYPTDEMARGFIEIYGMHSLLTRQVRE

SEQ ID NO: 12297 - protein, 341 aa, Sulfolobus tokodaii str. 7
MKILEFDDKKGIMKLHIENEDDLWILHIILKKGDRVVAKTTRDVSMGRESRRIPMIIKLQVEYTEFQSFTSRLRIHGIILDAPERFGIKGSHHTINLDIGDEIVIEKDHWNKFEIEKIKRQEEKHLKMLIVLVDFDEYLIALPMKQGIRILAEKSLRTPNKEEENIIEDNAKEVANEVLSYAESLGIEVVLLAGPGPFKEIVSNFLKNIKLYVDSVSSATRSGLNEILKRDIIDQISRDYEISEETKIMEKIMENLAKNTGLVAYGKEEVKKSAEYGAVDKLLVIEDLLSSDEEERMEIEKIMEEVENKNGRVLIVPKDSPIYYEVRNLTGLIALLRFRIN

SEQ ID NO: 12298 - protein, 635 aa, Sulfolobus tokodaii str. 7
MSAPLYLGDMSYGALSGNPNIIIARAADLTGTLAGTGEGGLHPEVAKSKRIFVQWASARFGVDFDVLMHGAGIVIKIGQGAKPGIGGHLPGSKVTEPISLTRRIPVGIDAISPAPHHDIYSIEDLGQRIEALKEATGKPVFVKVAATNYIPYIVSGIARMGADGVIIDGHGAGTGATPIVIRDNVGIPIELAVASADKVLREQGMRDNFYIIAAGRVADATDAAKLIALGADVVSVGTGALIAMGCVMVHKCHIGSCPTALTNKIDGSRMVDIDFGLKVLVNYIHGFSLELANILDNLGLSSIDELKGRRDLLVGKGLSRETLSVLGIEGEEEELPPKLGELWSRRRKVYLHELINKGDPVITSMGSTAPPDVEKPARIVDWLRSDGAQVTRPSIDPYREDIDTSFYLAGGRIYLSLPVIFDIIDAPEDERNALQWASLALSSAVFTDVTPRYYEDISISHDGKGIIKWSKNYESGSYILLPSNEEALEEVVELKGIPGFIIDEDLGNEDLEVVISEIDTKLKRMGIRKKFDLIAKSSRIRDSGDVFKFVALGADSVIISYKVFEVALGEGSRSDLKSKAFNLISGFKKEIALLAGAAGVYSVQSTLTGNRELLRAINLNSYLLQKLRVKVAGSL

SEQ ID NO: 12299 - protein, 648 aa, Sulfolobus tokodaii str. 7
MSERETKGARDLGISSDRQLRRSLGKFELLYLSLGGIIGSGWLFASLATATYAGASAILSWIIAGILVMFIGLVYAEIGAAIPKSGGITRYPHYTHGGLVGYLITWAYFLSAASVPAIEAAAAIEYIGSYYPQLITTGTFDGTTVTILTPLGIGLAGLLLILFFFLNYFGVNILGKVTHGAGWWKLLIPTITFLALLALDLHSANFSLGGGFLPSAEYVKGGSSGIYGFSAVLYAIPSTGVIFSYLGFRQAVEYGGEGKNPKKDIPFAVIGSLLIAIVLYTLLQVAFVGGIDWNKLYLNESGKLVPVTPGNWSALSTAVTASGVPISAGPFLVLSRLASVSGLAAAFFTALAVLLTIDAVVSPSGTGWIYTGTSTRTLYAFASNGYLPEIFLKIGKTKIPTYSLIAALIIGFIFLLPFPSWYALVGFISSATVLTYIMGGIGLTVLRKHAAELNRPFKLPAAPIIGAIATLAAGLIVYWSSFAVLFYVFTGVFLGLPLFFIFYADKMLGINKVVSIIVGVINLAINLGMGLLLFNETSGLSAANNLFFTIYIVVIAAMLIGDMIFLLKTVPSDVKKEINAGWWLIYFILAIYIVSYFGGFGLYTVIPFPYDTIVAAIVVLIGYFWAVRSGFRTQAIEDIIQATKEEAV

SEQ ID NO: 12300 - protein, 412 aa, Sulfolobus tokodaii str. 7
MTQFIGHGRVEVVERTLRDFSEFKELNKIDVRRQLAHEIIGIAFGFFSPLKGFMTFNEVDSVVNDMRLPNGILWPIPLVFDVNETNGIKEGDVIGITYMGKPLAIMHVKEIFTYDKAYMAEKVYKTRDIKHPGVKRTLNYANKFIGGDIWLIKEPKFSHPYTDFWLTPRQHREVFERKGWKNIVAFQTRNVPHTGHEYLMKYAWFAANGSEKVEEPKTGILVNVVIGEKRIGDYIDEAILLTHDALSKYGYISRRIHMLSFTLWDMRYAGPREAVLHAIIRSNIGCTHHVFGRDHAGVGNYYSPYEAHKIFDMIDEKDLIIKPIFLRENYYCPKCGSIENEMLCDHKDERQEFSGSLLRSVILDEVKPTKMVMRPEVFDILMKAAKEYGFGSPFVTEEYLEKRRKIFDLGDY

SEQ ID NO: 12301 - protein, 700 aa, Sulfolobus tokodaii str. 7
MISQQFFFVRVYEGRVKQDVALVSSNIMQSYGLLPGDVILLLGNRQIPFYVQESSDNKIDGIVIGENKLKLLGIRSGERVPVRKVSVSSIKEITLAPSEQKNYDLRKLNLELRGRLVTRGITLESKEGTFAVISYSPQVEVGYISSETRINIAPESIRIAQKNIPYVTLDDVGGLSKQIRELLEIVELALTKVEVARMLGLRPPKGVLLYGPPGTGKTLIAKAIANTIMANFFYISGPEIGSKYYGESEKRLRDIFEQAEKNAPSIIFVDEIDAIAPNRDTTSSETDRRIVAQLLTLMDGLTSGSGVVVIGATNRPNALDPALRRPGRFDREIEIPVPDKQGRLEILKIHTRRVPLSQEVDLEKIAERTHGFVGADLEALVREAVLSAYHRCNGNLECMQVTMSDFDEALKNVEPSALREFRIEIPNTTWEDIVGLEDIKLELKEVVEWPLKDPGLYEEMKAEIPSGILLYGPPGTGKTMLARAVAHESGANFIAINGPELMSMWVGETERAIREVFKKARQSSPTIIFFDEIDAIAVARGADPNKVTDRIVSQLLTEMDGISKRREKVVIIAATNRPDIIDPALLRPGRLEKLIYVPPPDYQTRIALFSRLINNRPHEEIDIERLAKLTENYTPAEIKGIVNKAVLLAIRRAKLKNEKPELTMSDFEEALKTVKPIVTQTMLDYYVSFYQRVRRASGYA

SEQ ID NO: 12302 - protein, 546 aa, Staphylococcus aureus subsp. aureus Mu50
MKQRIGAYLIDAFHRAGVDKIFGVPGDFNLAFLDDIISNPNVDWVGNTNELNASYAADGYARLNGLAALVTTFGVGELSAVNGIAGSYAERIPVIAITGAPTRAVEQAGKYVHHSLGEGTFDDYRKMFAHITVAQGYITPENATTEIPRLINTAIAERRPVHLHLPIDVAISEIEIPTPFEVTATKDTDASTYIELLATKLHQAKQPIIITGHEINSFHLHQELEDFVNQTQIPVAQLSLGKGAFNEENPYYMGIYDGKIAEDKIRDYVDNSDLILNIGAKLTDSATAGFSYQFNIDDVVMLNHHNIKIDDVTNDEISLPSLLKQLSNISYTNSATFPAYHRPTSPDYTVGTEPLTQQTYFKMMQNFLKPNDVIIADQGTSFFGAYDLALYKNNTFIGQPLWGSIGYTLPATLGSQLADKDRRNLLLIGDGSLQLTVQAISTMIRQHIKPVLFVINNDGYTVERLIHGMYEPYNEIHMWDYKALPAVFGGKNVEIHDVESSKDLQDTFNAINGHPDVMHFVEVKMSVEDAPKKLIDIAKAFSQQNK

SEQ ID NO: 12303 - protein, 394 aa, Staphylococcus aureus subsp. aureus Mu50
MQEAYIVAYGRSAAAKAKQGALFHERPDDVAAKVLQGVLKRIDGKFNKNMIEDVIVGTAFPEGLQGQNIARTIALRAGLSDTVPGQTVNRYCSSGLQTIAIAANQIMAGQGDILVAGGVELMSAVPMGGNEPTNNPTLQYDDIGASYPMGLTAENVASQFDVSREDQDAYAVRSHQRAYDAQRDGRFKDEIIPIRVNSVEYTNAGPKVHTNIFDQDEFIRPDTTMEALAKLRTVFKADGTVTAGTSAPLSDGAGFVVLMSGDKVKELGVTPIARFVGYKAVGVDPKIMGIGPAYAIPEVLSLSNLSVEDIDLIELNEAFASQTIASIKEVGLDISRTNVNGGAIALGHPLGATGAMLTARLLNEMGRRPDSRYGMVTMCIGVGMGAAAIFEYVR

SEQ ID NO: 12304 - protein, 381 aa, Staphylococcus aureus subsp. aureus Mu50
MLTEQEKDIIKQTVPLLKEKGTEITSIFYPKMFKAHPELLNMFNQTNQKRGMQSSALAQAVMAAAVNIDNLSVIKPVIMPVAYKHCALQVYAEHYPIVGENLLKAIQDVTGLEEHDPVIQAWAKAYGVIADVFIQIEKEIYDQMMWIGFKPFKITNIKQESEDIKSFTVETEEYDFSEFTPGQYITVDVSSDKLPYRAKRHYSIVSGEKNHLTFGVKRDVTTEHEGEVSTILHDEIKEGDMINLAAPVGGFVLENTTEPQLFLGSGIGVTPLVAMYEAASAKGLDTQMVQVAENEQHLPFKDNFNSIASHYDNAKLYTHLKDKQGYIGTEELQAFLANKPEIYICGGTKFLQSMIEALKSLNYDMDRVHYETFIPRLSVAV

SEQ ID NO: 12305 - protein, 393 aa, Staphylococcus aureus subsp. aureus Mu50
MTRVVLAAAYRTPIGVFGGAFKDVPAYDLGATLIEHIIKETGLNPSEIDEVIIGNVLQAGQGQNPARIAAMKGGLPETVPAFTVNKVCGSGLKSIQLAYQSIVTGENDIVLAGGMENMSQSPMLVNNSRFGFKMGHQSMVDSMVYDGLTDVFNQYHMGITAENLVEQYGISREEQDTFAVNSQHKAVRAQQNGEFDSEIVPVSIPQRKGEPILVTKDEGVRENVSVEKLSRLRPAFKKDGTVTAGNASGINDGAAMMLVMSEDKAKELNIEPLAVLDGFGSHGVDPSIMGIAPVGAVEKALKRSKKELSDIDVFELNEAFAAQLLAVDRELKLPPEKVNVKGGAIALGHPIGASGARVLVTLLHQLNDEVETGLTSLCIGGGQAIAAVVSKYK

SEQ ID NO: 12306 - protein, 1499 aa, Staphylococcus aureus subsp. aureus Mu50
MHNEKLIKGLYDYREEHDACGIGFYANMDNKRSHDIIDKSLEMLRRLDHRGGVGADGITGDGAGIMTEIPFAFFKQHVTDFDIPGEGEYAVGLFFSKERILGSEHEAVFKKYFEGEGLSILGYRNVPVNKDAIAKHVADTMPVIQQVFIDIRGIEDVEKRLFLARKQLEFYSTQCDLELYFTSLSRKTIVYKGWLRSDQIKKLYTDLSDDLYQSKLGLVHSRFSTNTFPSWKRAHPNRMLMHNGEINTIKGNVNWMRARQHKLIETLFGEDQHKVFQIVDEDGSDSAIVDNALEFLSLAMEPEKAAMLLIPEPWLYNEANDANVRAFYEFYSYLMEPWDGPTMISFCNGDKLGALTDRNGLRPGRYTITKDNFIVFSSEVGVVDVPESNVAFKGQLNPGKLLLVDFKQNKVIENNDLKGAIAGELPYKAWIDNHKVDFDFENIQYQDSQWKDETLFKLQRQFAYTKEEIHKYIQELVEGKKDPIGAMGYDAPIAVLNERPESLFNYFKQLFAQVTNPPIDAYREKIVTSELSYLGGEGNLLAPDETVLDRIQLKRPVLNESHLAAIDQEHFKLTYLSTVYEGDLEDALEALGREAVNAVKQGAQILVLDDSGLVDSNGFAMPMLLAISHVHQLLIKADLRMSTSLVAKSGETREVHHVACLLAYGANAIVPYLAQRTVEQLTLTEGLQGTVVDNVKTYTDVLSEGVIKVMAKMGISTVQSYQGAQIFEAIGLSHDVIDRYFTGTQSKLSGISIDQIDAENKARQQSDDNYLASGSTFQWRQQGQHHAFNPESIFLLQHACKENDYAQFKAYSEAVNKNRTDHIRHLLEFKACTPIDIDQVEPVSDIVKRFNTGAMSYGSISAEAHETLAQAMNQLGGKSNSGEGGEDAKRYEVQVDGSNKVSAIKQVASGRFGVTSDYLQHAKEIQIKVAQGAKPGEGGQLPGTKVYPWIAKTRGSTPGIGLISPPPHHDIYSIEDLAQLIHDLKNANKDADIAVKLVSKTGVGTIASGVAKAFADKIVISGYDGGTGASPKTSIQHAGVPWEIGLAETHQTLKLNDLRSRVKLETDGKLLTGKDVAYACALGAEEFGFATAPLVVLGCIMMRVCHKDTCPVGVATQNKDLRALYRGKAHHVVNFMHFIAQELREILASLGLKRVEDLVGRTDLLQRSSTLKANSKVASIDVEKLLCPFDGPNTKEIQQNHNLEHGFDLTNLYEVTKPYIAEGRRYTGSFTVNNEQRDVGVITGSEISKQYGEAGLPENTINVYTNGHAGQSLAAYAPKGLMIHHTGDANDYVGKGLSGGTVIVKAPFEERQNEIIAGNVSFYGATGGKAFINGSAGERFCIRNSGVDVVVEGIGDHGLEYMTGGHVINLGDVGKNFGQGMSGGIAYVIPSDVEAFVENNQLDTLSFTKIKHQEEKAFIKQMLEEHVSHTNSTRAIHVLKHFDRIEDVVVKVIPKDYQLMMQKIHLHKSLHDNEDEAMLAAFYDDSKTIDAKHKPAVVY

SEQ ID NO: 12307 - protein, 445 aa, Staphylococcus aureus subsp. aureus Mu50
MKQPILNKLESLNQEEAISLHVPGHKNMTIGHLSQLSMTMDKTEIPGLDDLHHPEEVILESMKQVEKHSDYDAYFLVNGTTSGILSVIQSFSQKKGDILMARNVHKSVLHALDISQQEGHFIETHQSPLTNHYNKVNLSRLNNDGHKLAVLTYPNYYGETFNVEEVIKSLHQLNIPVLIDEAHGAHFGLQGFPDSTLNYQADYVVQSFHKTLPALTMGSVLYIHKNAPYRETIIEYLSYFQTSSPSYLIMASLESAAEFYKTYDSTVFFDKRAQLIECLEKKGFEMLQVDDPLKLLIKYEGFTGHDIQNWFMNAHIYLELADDYQALAILPLWHHDDTYLFDLLLRKIEDMILPKKSVSKVKQTQLLTTEGNYKPKRFEYVTWCDLKKAKGKVLARHIVPYPPGIPIIFKGETITENMIELVNEYLETGMIVEGIKNNKILVEDE

SEQ ID NO: 12308 - protein, 321 aa, Staphylococcus aureus subsp. aureus Mu50
MLNNEYKNSSLKIFSLKGNEALAQEVADQVGIELGKCSVKRFSDGEIQINIEESIRGCDVFIIQPTSYPVNLHLMELLIMIDACKRASAATINIVVPYYGYARQDRKARSREPITAKLVANLIETAGATRMIALDLHAPQIQGFFDIPIDHLMGVPILAKHFKDDPNINPEECVVVSPDHGGVTRARKLADILKTPIAIIDKRRPRPNVAEVMNIVGEIEGRTAIIIDDIIDTAGTITLAAQALKDKGAKEVYACCTHPVLSGPAKERIENSAIKELIVTNSIHLDEDRKPSNTKELSVAGLIAQAIIRVYERESVSVLFD

SEQ ID NO: 12309 - protein, 697 aa, Staphylococcus aureus subsp. aureus Mu50
MQKAFRNVLVIVIIGVIIFGLFSYLNGNGNMPKQLTYNQFTEKLEKGDLKTLEIQPQQNVYMVSGKTKNDEDYSSTILYNNEKELQKITDAAKKQNGVKLTIKEEEKQSVFVSILSTLIPVVVIALLFIFFLSQAQGGGSGGRMMNFGKSKAKMYDNNKRRVRFSDVAGADEEKQELIEIVDFLKDNKKFKEMGSRIPKGVLLVGPPGTGKTLLARAVAGEAGAPFFSISGSDFVEMFVGVGASRVRDLFDNAKKNAPCIIFIDEIDAVGRQRGAGVGGGHDEREQTLNQLLVEMDGFGENEGIIMIAATNRPDILDPALLRPGRFDRQIQVGRPDVKGREAILHVHAKNKPLDETVDLKAISQRTPGFSGADLENLLNEASLIAVREGKKKIDMRDIEEATDRVIAGPAKKSRVISKKERNIVAHHEAGHTIIGMVLDEAEVVHKVTIVPRGQAGGYAMMLPKQDRFLMTEQELLDKICGLLGGRVSEDINFNEVSTGASNDFERATQIARSMVTQYGMSKKLGPLQFGHSNGQVFLGKDMQGEPNYSSQIAYEIDKEVQRIVKEQYERCKQILLEHKEQLILIAETLLTEETLVAEQIQSLFYEGKLPEIDYDAAKVVKDEDSEFNDGKFGKSYEEIRKEQLEDGQRDESEDRKEEKDIAEDKKEADKSDEKDEPAHRQAPNIEKPYDPNHPDNK

SEQ ID NO: 12310 - protein, 494 aa, Staphylococcus aureus subsp. aureus Mu50
MEKKNKQIDRGDLKQNLSEKFVWAIAYGSCIGWGAFILPGDWIKQSGPIAASIGIVIGALLMILIAVSYGALVERFPVSGGAFAFSFLSFGRYVSFFSSWFLTFGYVCVVALNATAFSLLVKFLLPDVLNNGKLYTIAGWDVYITEIIIATVLLLVFMLVTIRGASVSGSLQYYFCVAMVIVVLLMFFGSFFGNNFALENLQPLAEPSKGWLVSIVVIVSVAPWAYVGFDNIPQTAEEFNFAPNKTFKLIVYSLLAASLTYVVMILYTGWLSTSHQSLNGQLWLTGAVTQTAFGYIGLGVLAIAIMMGIFTGLNGFLMSSSRLLFSMGRSGIMPTMFSKLHSKYKTPYVAIIFLVGVSLIAPWLGRTALTWIVDMSSTGVSIAYFITCLSAAKLFSYNKQSNTYAPVYKTFAIIGSFVSFIFLALLLVPGSPAALTAPSYIALLGWLIIGLIFFVIRYPKLKNMDNDELSRLILNRSENEVDDMIEEPEKEKTK

SEQ ID NO: 12311 - protein, 328 aa, Staphylococcus aureus subsp. aureus Mu50
MADLLNVLKDKLSGKNVKIVLPEGEDERVLTAATQLQATDYVTPIVLGDETKVQSLAQKLDLDISNIELINPATSELKAELVQSFVERRKGKATEEQAQELLNNVNYFGTMLVYAGKADGLVSGAAHSTGDTVRPALQIIKTKPGVSRTSGIFFMIKGDEQYIFGDCAINPELDSQGLAEIAVESAKSALSFGMDPKVAMLSFSTKGSAKSDDVTKVQEAVKLAQQKAEEEKLEAIIDGEFQFDAAIVPGVAEKKAPGAKLQGDANVFVFPSLEAGNIGYKIAQRLGGYDAVGPVLQGLNSPVNDLSRGCSIEDVYNLSIITAAQALQ

SEQ ID NO: 12312 - protein, 575 aa, Staphylococcus aureus subsp. aureus Mu50
MKRENPLFFLFKKLSWPVGLIVAAITISSLGSLSGLLVPLFTGRIVDKFSVSHINWNLIALFGGIFVINALLSGLGLYLLSKIGEKIIYAIRSVLWEHIIQLKMPFFDKNESGQLMSRLTDDTKVINEFISQKLPNLLPSIVTLVGSLIMLFILDWKMTLLTFITIPIFVLIMIPLGRIMQKISTSTQSEIANFSGLLGRVLTEMRLVKISNTERLELDNAHKNLNEIYKLGLKQAKIAAVVQPISGIVMLLTIAIILGFGALEIATGAITAGTLIAMIFYVIQLSMPLINLSTLVTDYKKAVGASSRIYEIMQEPIEPTEALEDSENVLIDDGVLSFEHVDFKYDVKKILDDVSFQIPQGQVSAFVGPSGSGKSTIFNLIERMYEIESGDIKYGLESVYDIPLSKWRRKIGYVMQSNSMMSGTIRDNILYGINRHVSDEELINYAKLANCHDFIMQFDEGYDTLVGERGLKLSGGQRQRIDIARSFVKNPDILLLDEATANLDSESELKIQEALETLMEGRTTIVIAHRLSTIKKAGQIIFLDKGQVTGKGTHSELMASHAKYKNFVVSQKLTD

SEQ ID NO: 12313 - protein, 66 aa, Staphylococcus aureus subsp. aureus Mu50
MNNGTVKWFNAEKGFGFIEREDGSDVFVHFSAIAEDGYKSLEEGQKVEFDIVEGDRGEQAANVVKM

SEQ ID NO: 12314 - protein, 253 aa, Staphylococcus aureus subsp. aureus Mu50
MASTLEIKDLHVSIEDKEILKGVNLTINTDEIHAIMGPNGTGKSTLSSAIMGHPSYEVTKGEVLLDGVNILELEVDERAKAGLFLAMQYPSEITGVTNADFMRSAINAKREEGQEINLMQFIKKLDKNMDFLDIDKDMAQRYLNEGFSGGEKKRNEILQLMMLEPKFAILDEIDSGLDIDALKVVSKGINQMRGENFGALMITHYQRLLNYITPDKVHVMYAGKVVKSGGPELAKRLEEEGYEWVKEEFGSAE

SEQ ID NO: 12315 - protein, 319 aa, Staphylococcus aureus subsp. aureus Mu50
MVKIVVSRKIPDKFYQQLSKLGDVVMWQKSLVPMPKDQFVTALRDADACFITLSEQIDAEILAQSPNLKVIANMAVGYDNIDVESATANNVVVTNTPNVLTETTAELGFTLMLAIARRIVEAEKYVEADAWQSWGPYLLSGKDVFNSTIGIYGMGDIGKAFARRLQGFNTNILYHNRSRHKDAEADFNATYVSFETLLAESDFIICTAPLTKETHHKFNAEAFEQMKNDAIFINIGRGQIVDETALIDALDNKEILACGLDVLANEPIDHTHPLMGRDNVLITPHIGSASVTTRDNMIQLCINNIEAVMTNQVPHTPVN

SEQ ID NO: 12316 - protein, 401 aa, Staphylococcus aureus subsp. aureus Mu50
MKEKIVLAYSGGLDTSVAVQWLIDKGYDVVACCLDVGEGKDLDIVYKKALDMGAVECHIIDATKEFSDEYVSYAIKGNLMYENAYPLVSALSRPLIAKKLVEIAEKTNSVGIAHGCTGKGNDQVRFEVAIKALNPSLKAFAPVREWAWSREEEIDYAIKHNIPVSINHDSPYSIDQNLWGRANECGILEDPYAAPPEDAFDLTNALEETPDTADEIILTFDKGIPVQIDGKTYELDDLILTLNALAGKHGIGRIDHVENRLVGIKSREIYEAPAAEVILKAHKALETITLTKDVAHFKPIIEKQFAEQLYNGLWFSPLTDSLKLFIDSTQQYVSGDVRIKLFKGNAIVNGRKSPYTLYDEKLATYTKEDAFNQDAAVGFIDIYGLPTQVNAMLHGGYSNEQ

SEQ ID NO: 12317 - protein, 869 aa, Staphylococcus aureus subsp. aureus Mu50
MDINKMTYAVQSALQQAVELSQQHKLQNIEIEAILSAALNESESLYKSILERANIEVDQLNKAYEDKLNTYASVEGDNIQYGQYISQQANQLITKAESYMKEYEDEYISMEHILRSAMDIDQTTKHYINNKVEVIKEIIKKVRGGNHVTSQNPEVNYEALAKYGRDLVEEVRQGKMDPVIGRDEEIRNTIRILSRKTKNNPVLIGEPGVGKTAIVEGLAQRIVKKDVPESLLDKTVFELDLSALVAGAKYRGEFEERLKAVLKEVKESDGRIILFIDEIHMLVGAGKTDGAMDAGNMLKPMLARGELHCIGATTLNEYREYIEKDSALERRFQKVAVSEPDVEDTISILRGLKERYEVYHGVRIQDRALVAAAELSDRYITDRFLPDKAIDLVDQACATIRTEMGSNPTELDQVNRRVMQLEIEESALKNESDNASKQRLQELQEELANEKEKQAALQSRVESEKEKIANLQEKRAQLDESRQALEDAQTNNNLEKAAELQYGTIPQLEKELRELEDNFQDEQGEDTDRMIREVVTDEEIGDIVSQWTGIPVSKLVETEREKLLHLSDILHKRVVGQDKAVDLVSDAVVRARAGIKDPNRPIGSFLFLGPTGVGKTELAKSLAASLFDSEKHMIRIDMSEYMEKHAVSRLIGAPPGYIGHDEGGQLTEAVRRNPYSVILLDEVEKAHTDVFNVLLQILDEGRLTDSKGRSVDFKNTIIIMTSNIGSQVLLENVKETGEITESTEKAVMTNLNAYFKPEILNRMDDIVLFKPLSIDDMSMIVDKILTQLNIRLLEQRISIEVSDDAKAWLGQEAYEPQYGARPLKRFVQRQIETPLARMMIKEGFPEGTTIKVNLNSDNNLTFNVEKIHE

SEQ ID NO: 12318 - protein, 384 aa, Staphylococcus aureus subsp. aureus Mu50
MKLSLNSNSKYLRAPSIRQFSNRMNNLDDCVNLTIGQPDFPMPDVVKKAYIDAINNDKTSYSHNKGLLETREAISQYFKNRYHFSYDPEEIIVTNGASEAIDTTLRSIIEPGDEIIIPGPIYAGYIPLIEVLGGKPIYIDTTATQFKITPDALESHISPKTKAVLLNYPTNPTGVVLKRNEVLNIVNVLKKYPIFIISDEIYAENTFSGKHVSFAEFEDIRDQLILIGGLSKSHSATGIRIGFLLGPQYLIDKLTFMHAYNCICANVPAQIACITALNEGLEAPKYMNEAYVERRNYLVSELTKLGFEITAQPEGAFYIFPSIKHITDDDFEFCVDLLESTHLAIVPGSSFTEFGKGFVRISYAYEMDVLKEGMKRLAKYLNTK

SEQ ID NO: 12319 - protein, 460 aa, Staphylococcus aureus subsp. aureus Mu50
MKVSKFGGSSVSNATQIKKVLNIVNSDPERKIVIVSAPGKRHDNDIKTTDLLIRLYEKVINHLDYHDKKREIIQRYDDIVKELQMDESILRTIDVTLEHYINQLKNEPKRLLDALLSCGEDFNAQLIALYNNSQGIPTKYISPKEAGIFVTDVPQEAQILDSAYSEIKKLRDYDEKLIIPGFFGVSHEGYIVTFPRGGSDITGAIISSGVRATIYENFTDVSGIYKANPNIIKDPELIEEITYREMRELSYAGFSVFHDEALQPLYKDRIPVVIKNTNRPQDKGTFIVHDREINAKNVISGISCDKDFTVINIKKYLMNRQVGFTRKILGVLEDNNISFDHMPSGIDTISIVMRSKQIQNKETKVLNEIRQKCDVDELSIEHDLAILMIVGEGMNKVIGTANKITHALAESKINLKMINQGASEISMMFGIHVDDAEKAVLSTYEFCYHGVALKNLCDKN

SEQ ID NO: 12320 - protein, 401 aa, Staphylococcus aureus subsp. aureus Mu50
MVTRSVLKFGGSSVSDFTKIKRIAEMLKERVNQDEQLIVVVSAMGNTTDQLMTNVSTLTKAPKQQELALLLTTGEQQTVSYLSMVLNDIGVNAKAMTGYQAGIKTIGHHLKSKIAQINPQTFEQAFQENDILVVAGFQGINEHQELTTLGRGGSDTTAVALAVSNQIPCEIYTDVDGVYATDPRLLPKAKRLDIVSYEEMMEMSALGAGVLETRSVELAKNYNIPLYLGKTLSNVKGTWIMSNEEILEKKAVTGVALDKHMMHVTISYPLPDNQLLTQLFTELEEGAVNVDMISQIVNLDGLQLSFTIKDSDFHQISMILETLKNQYEALAYKINEHYVKISLIGSGMRDMSGVASKAFLTLIENNIPFYQTTTSEISISYVIDDFNGQQAVEKLYDAFNI

SEQ ID NO: 12321 - protein, 66 aa, Staphylococcus aureus subsp. aureus Mu50
MKQGTVKWFNAEKGFGFIEVEGENDVFVHFSAINQDGYKSLEEGQAVEFEVVEGDRGPQAANVVKL

SEQ ID NO: 12322 - protein, 440 aa, Staphylococcus aureus subsp. aureus Mu50
MSNGKELQKNIGFFSAFAIVMGTVIGSGVFFKISNVTEVTGTAGMALFVWFLGGIITICAGLTAAELAAAIPETGGLTKYIEYTYGDFWGFLSGWAQSFIYFPANVAALSIVFATQLINLFHLSIGSLIPIAIASALSIVLINFLGSKAGGILQSVTLVIKLIPIIVIVIFGIFQSGDITFSLIPTTGNSGNGFFTAIGSGLLATMFAYDGWIHVGNVAGELKNPKRDLPLAISVGIGCIMAVYLLINATFLLTLPIELLAGNLNAASDTSKILFGENGGKIITIGILISVYGTINGYTMTGMRVPYAMAERKLLPFSHLFAKLTKSGAPWFGAIIQLIIAIIMMSMGAFDTITNMLIFVIWLFYCMSFVAVIILRKREPNMERPYKVPLYPIIPLIAILAGSFVLINTLFTQFILAIIGILITALGIPVYYYKKKQKAA

SEQ ID NO: 12323 - protein, 372 aa, Staphylococcus aureus subsp. aureus Mu50
MLVAVVKELKQGEGRVACTPENVRKLTDAGHKVIVEKNAGIGSGFSNDMYEKEGAKIVTHEQAWEADLVIKVKEPHESEYQYFKKNQIIWGFLHLASSKEIVEKMQEVGVTAISGETIIKNGKAELLAPMSAIAGQRSAIMGAYYSEAQHGGQGTLVTGVHENVDIPGSTYVIFGGGVAATNAANVALGLNAKVIIIELNDDRIKYLEDMYAEKDVTVVKSTPENLAEQIKKADVFISTILIPGAKPPKLVTREMVKSMKKGSVLIDIAIDQGGTIETIRPTTISDPVYEEEGVIHYGVPNQPGAVPRTSTMALAQGNIDYILEICDKGLEQAIKDNEALSTGVNIYQGQVTNQGLASSHDLDYKEILNVIE

SEQ ID NO: 12324 - protein, 299 aa, Staphylococcus aureus subsp. aureus Mu50
MTEHKSGFVSIIGRPNVGKSTFVNRVIGHKIAIMSDKAQTTRNKIQGVMTRDDAQIIFIDTPGIHKPKHKLGDYMMKVAKNTLSEIDAIMFMVNANEEIGRGDEYIIEMLKNVKTPVFLVLNKIDLVHPDELMPKIEEYQSYMDFTEIVPISALEGLNVDHFIDVLKTYLPEGPKYYPDDQISDHPEQFVVGEIIREKILHLTSEEIPHAIGVNVDRMVKESEDRVHIEATIYVERDSQKGIVIGKGGKKLKEVGKRARRDIEMLLGSKVYLELWVKVQRDWRNKVNFIRQIGYVEDQD

SEQ ID NO: 12325 - protein, 610 aa, Staphylococcus aureus subsp. aureus Mu50
MSKIIGIDLGTTNSCVTVLEGDEPKVIQNPEGSRTTPSVVAFKNGETQVGEVAKRQAITNPNTVQSIKRHMGTDYKVDIEGKSYTPQEISAMILQNLKNTAESYLGEKVDKAVITVPAYFNDAERQATKDAGKIAGLEVERIINEPTAAALAYGLDKTDKDEKVLVFDLGGGTFDVSILELGDGVFEVLSTAGDNKLGGDDFDQVIIDYLVAEFKKENGVDLSQDKMALQRLKDAAEKAKKDLSGVSQTQISLPFISAGENGPLHLEVNLTRSKFEELSDSLIRRTMEPTRQAMKDAGLTNSDIDEVILVGGSTRIPAVQEAVKKEIGKEPNKGVNPDEVVAMGAAIQGGVITGDVKDVVLLDVTPLSLGIEILGGRMNTLIERNTTIPTSKSQIYSTAVDNQPSVDVHVLQGERPMAADNKTLGRFQLTDIPPAERGKPQIEVTFDIDKNGIVNVTAKDLGTNKEQRITIQSSSSLSDEEIDRMVKDAEVNAEADKKRREEVDLRNEADSLVFQVEKTLTDLGENIGEEDKKSAEEKKDALKTALEGQDIEDIKSKKEELEKVIQELSAKVYEQAAQQQQQAQGANAGQNNDSTVEDAEFKEVKDDDKK

SEQ ID NO: 12326 - protein, 366 aa, Staphylococcus aureus subsp. aureus Mu50
MSDILKCIGCGAPLQSEDKNKPGFVPEHNMFRDDVICRRCFRLKNYNEVQDVGLESEDFLKLLSGLADKKGIVVNVVDVFDFEGSFINAVKRIVGNKKIILAANKLDLLPKQINKRRVKEWLKRTARKYGLEADDVVLISAEKGWGIDDLLSSIANIRENEDVYIVGTTNVGKSTLINKLIEASVGEKDVVTTSRFPGTTLDMIDIPLDESSFMYDTPGIIQDHQMTHLVSEKELKIIMPKKEIKQRVYQLNEAQTLFFGGLARIDYVSGGKRPLVCFFSNDLNIHRTKTEKANDLWRNQLGDLLTPPGNPQNFDLNELKAVRLETGKEKRDVMISGLGFITIGPGAKVIVRVPKNVDVVLRNSIL

SEQ ID NO: 12327 - protein, 380 aa, Staphylococcus aureus subsp. aureus Mu50
MEIYADYAATTPVKPEVVDAMMMIYNSHYGNPSSIHAKGRDARKYLDESRRQIAQLLGADTHEIIFTSGATESNNTAIKGIVKANEQLGNHIITSKIEHHSVLHVFEQLEREGFDVTYLDVDDTGAIDLDQLEETITDKTILVSIMFVNNEVGTVQQIYDIQDIIAETNAYFHVDAVQAIGHLDVKFDEFEIDAMSITAHKFGGPKGVGALLVKDHVTLDYPQLGGEQELKRRAGTENLAQIVGMAKALQLAEKNRDDNNIHLMNLKEQFLVKLQERAIPFELNGSMTDATGHIVNLYFPFVEVEMMLTLLDMAQIYVSSGSACTAGSTQPSHVLDAMFEDEERSNHSIRFSFNELTTENEINAIVAEIHKIYFKFKEES

SEQ ID NO: 12328 - protein, 430 aa, Staphylococcus aureus subsp. aureus Mu50
MFVDQVKISLKAGDGGNGITAYRREKYVPFGGPAGGDGGKGASVVFEVDEGLRTLLDFRYQRHFKASKGENGQSSNMHGKNAEDLVLKVPPGTIIKNVETDEVLADLVEDGQRAVVAKGGRGGRGNSRFATPRNPAPDFSEKGEPGEELDVSLELKLLADVGLVGFPSVGKSTLLSIVSKAKPKIGAYHFTTIKPNLGVVSTPDQRSFVMADLPGLIEGASDGVGLGHQFLRHVERTKVIVHMIDMSGSEGREPIEDYKVINQELAAYEQRLEDRPQIVVANKMDLPESQDNLNLFKEEIGEDVPVIPVSTITRDNIDQLLYAIADKLEEYKDVDFTVEEEESVGINRVLYKHTPSQDKFTISRDDDGAYVVSGNAIERMFKMTDFNSDPAVRRFARQMRSMGIDDALRERGCKNGDIVRILGGEFEFVE

SEQ ID NO: 12329 - protein, 102 aa, Staphylococcus aureus subsp. aureus Mu50
MFAIIETGGKQIKVEEGQEIFVEKLDVNEGDTFTFDKVLFVGGDSVKVGAPTVEGATVTATVNKQGRGKKITVFTYKRRKNSKRKKGHRQPYTKLTIDKINA

SEQ ID NO: 12330 - protein, 453 aa, Staphylococcus aureus subsp. aureus Mu50
MAEKLQRELSNRHIQLIAIGGAIGTGLFLGAGQTIALTGPSILLTYIIIGFMLFMFMRGLGEIIIQNTEFKSFADVTNTYIGPFAGFVTGWTYWFCWIITGMAEVTAVAKYVSFWFPEIPNWISALFCVLLLMSFNLLSARLFGELEFWFSIIKIATIIGLIVVGFVMILFAFKTQFGHASFTNLYEHGIFAKGASGFFMSFQMALFSFVGIEMIGVTAGETKDPVKTIPKAINSVPIRILIFYVGALAVIMSIIPWQQVDPDNSPFVKLFALIGIPFAAGLINFVVLTAAASSCNSGIFSNSRMLFGLSSQQQAPPNFSKTNKYGVPHVAIFASSALLLVAALLNYIFPDATKVFTYVTTISTVLFLVVWGLIIIAYINYSRKNPDLHKNATYKLLGGKYMGYLIFVFFIFVFGLLFINVDTRRAIYFIPIWFILLAFMYLRYKRIAAKSNK

SEQ ID NO: 12331 - protein, 372 aa, Staphylococcus aureus subsp. aureus Mu50
MKIGIPREIKNNENRVGLSPSGVHALVESGHTVLVETNAGSGSFFEDVDYKEAGAEIVAEQAKVWDVDMVIKVKEPLESEYTYFKEGLVLFTYLHLANEEKLTQALIDRKVISIAYETVQLPDRSSPLLSPMSEVAGRMSAQVGAEFLQKLNGGMGILLGGVPGVPKGKVTIIGGGQAGTNAAKIALGLGADVTILDVNPKRLQQLDDLFGGRVHTIMSNPLNIELYVKQSDLVIGAVLIPGAKAPRLVTEDMIKQMKNGSVIIDIAIDQGGIFETTDKITTHDDPTYIKHGVVHYAVANMPGAVPRTSTLALNNATLPYALMLANKGYREAFKSNQPLSLGLNTYKGHVTNKGVAEAFEMEYKSVEEALQL

SEQ ID NO: 12332 - protein, 400 aa, Staphylococcus aureus subsp. aureus Mu50
MSKLILAINAGSSSLKFQLIRMPEEELVTKGLIERIGLKDSIFTIEVNGEKVKTVQDIKDHVEAVDIMLDAFKAHNIINDINDIVGTGHRVVHGGEKFPESVAITDEVEKEIEELSELAPLHNPANLMGIRAFRKLLPNIPHVAIFDTAFHQTMPEKAYLYSLPYHYYKDYGIRKYGFHGTSHKFVSQRAAEMLDKPIEDLRIISCHIGNGASIAAIDGGKSIDTSMGFTPLAGVTMGTRSGNIDPALIPFIMEKTGKTAEQVLEILNKESGLLGLSGTSSDLRDLSEEAESGKARSQMALDVFASKIHKYIGSYAARMHGVDVIVFTAGIGENSVEIRAKVLEGLEFMGVYWDPKKNENLLRGKEGFINYPHSPVKVVVIPTDEESMIARDVMTFGGLK

SEQ ID NO: 12333 - protein, 379 aa, Staphylococcus aureus subsp. aureus Mu50
MIYLDNAATTKAFEEVLDTYLKVNQSMYYNPNSPHKAGLQANQLLQQAKAQINAMINSKTNYDVVFTSGATESNNLALKGIAYRKFDTAKEIITSVLEHPSVLEVVRYLEAHEGFKVKYVDVKKDGSINLEHFKELVSDKVGLVTCMYVNNVTGQIQPIPQMAKVIKNYPKAHFHVDAVQAFGKISMDLNNIDSISLSGHKFNGLKGQGVLLVNHIQNVEPTVHGGGQEYGVRSGTVNLPNDIAMVKAMKIANENFEALNAFVTELNNDVRQFLNKYHGVYINSSTSGSPFVLNISFPGVKGEVLVNAFSKYDIMISTTSACSSKRNKLNEVLAAMGLSDKSIEGSIRLSFGATTTKEDIARFKEIFIIIYEEIKELLK

SEQ ID NO: 12334 - protein, 534 aa, Staphylococcus aureus subsp. aureus Mu50
MKQFNVLVADPISKDGIKALLDHEQFNVDIQTGLSEEALIKIIPSYHALIVRSQTTVTENIINAADSLKVIARAGVGVDNININAATLKGILVINAPDGNTISATEHSLAMLLSMARNIPQAHQSLTNKEWNRNAFKGTELYHKTLGVIGAGRIGLGVAKRAQSFGMKILAFDPYLTDEKAKSLSITKATVDEIAQHSDFVTLHTPLTPKTKGLINADFFAKAKPSLQIINVARGGIIDEKALIKALDEGQISRAAIDVFEHEPATDSPLVAHDKIIVTPHLGASTVEAQEKVAISVSNEIIEILIDGTVTHAVNAPKMDLSNIDDTVKSFINLSQTVGELAIQLMYNAPSSIKITYGGDLASIDSSLLTRTIITHILKDDLGPEVNIINALMLLNQQQVTLNIENNKAETGFSNYLEVELSNDSDSVKVGASVFTGFGPRIVRINNFSVDLKPNQYQIVSYHNDTPGMVGKTGALLGKYNINIASMTLGRTEAGGDALMILSVDQPVSNNIIDELKQVGEYNQIFTTELTVQS

SEQ ID NO: 12335 - protein, 578 aa, Staphylococcus aureus subsp. aureus Mu50
MIKRYLQFVKPYKYRIFATIIVGIIKFGIPMLIPLLIKYAIDGVINNHALTTDEKVHHLTIAIGIALFIFVIVRPPIEFIRQYLAQWTSNKILYDIRKKLYNHLQALSARFYANNQVGQVISRVINDVEQTKDFILTGLMNIWLDCITIIIALSIMFFLDVKLTLAALFIFPFYILTVYVFFGRLRKLTRERSQALAEVQGFLHERVQGISVVKSFAIEDNEAKNFDKKNTNFLTRALKHTRWNAYSFAAINTVTDIGPIIVIGVGAYLAISGSITVGTLAAFVGYLELLFGPLRRLVASFTTLTQSFASMDRVFQLIDEDYDIKNGVGAQPIEIKQGRIDIDHVSFQYNDNEAPILKDINLSIEKGETVAFVGMSGGGKSTLINLIPRFYDVTSGQILIDGHNIKDFLTGSLRNQIGLVQQDNILFSDTVKENILLGRPTATDEEVVEAAKMANAHDFIMNLPQGYDTEVGERGVKLSGGQKQRLSIARIFLNNPPILILDEATSALDLESESIIQEALDVLSKDRTTLIVAHRLSTITHADKIVVIENGHIVETGTHRELIAKQGAYEHLYSIQNL

SEQ ID NO: 12336 - protein, 512 aa, Staphylococcus aureus subsp. aureus Mu50
MLTMGTALSQQVDANWQTYIMIAVYFLILIVIGFYGYKQATGNLSEYMLGGRSIGPYITALSAGASDMSGWMIMGLPGSVYSTGLSAMWITIGLTLGAYINYFVVAPRLRVYTELAGDAITLPDFFKNRLNDKNNVLKIISGLIIVVFFTLYTHSGFVSGGKLFESAFGLDYHFGLILVAFIVIFYTFFGGYLAVSITDFFQGVIMLIAMVMVPIVAMMNLNGWGTFHDVAAMKPTNLNLFKGLSFIGIISLFSWGLGYFGQPHIIVRFMSIKSHKMLPKARRLGISWMAVGLLGAVAVGLTGIAFVPAYHIKLEDPETLFIVMSQVLFHPLVGGFLLAAILAAIMSTISSQLLVTSSSLTEDFYKLIRGEEKAKTHQKEFVMIGRLSVLVVAIVAIAIAWNPNDTILNLVGNAWAGFGASFSPLVLFALYWKGLTRAGAVSGMVSGALVVIVWIAWIKPLAHINEIFGLYEIIPGFIVSVIVTYVVSKLTKKPGAFVETDLNKVRDIVREK

SEQ ID NO: 12337 - protein, 506 aa, Staphylococcus aureus subsp. aureus Mu50
MQNFKELGISDNTVQSLESMGFKEPTPIQKDSIPYALQGIDILGQAQTGTGKTGAFGIPLIEKVVGKQGVQSLILAPTRELAMQVAEQLREFSRGQGVQVVTVFGGMPIERQIKALKKGPQIVVGTPGRVIDHLNRRTLKTDGIHTLILDEADEMMNMGFIDDMRFIMDKIPAVQRQTMLFSATMPKAIQALVQQFMKSPKIIKTMNNEMSDPQIEEFYTIVKELEKFDTFTNFLDVHQPELAIVFGRTKRRVDELTSALISKGYKAEGLHGDITQAKRLEVLKKFKNDQINILVATDVAARGLDISGVSHVYNFDIPQDTESYTHRIGRTGRAGKEGIAVTFVNPIEMDYIRQIEDANGRKMSALRPPHRKEVLQAREDDIKEKVENWMSKESESRLKRISTELLNEYNDVDLVAALLQELVEANDEVEVQLTFEKPLSRKGRNGKPSGSRNRNSKRGNPKFDSKSKRSKGYSSKKKSTKKFDRKEKSSGGSRPMKGRTFADHQK

SEQ ID NO: 12338 - protein, 290 aa, Staphylococcus aureus subsp. aureus Mu50
MKKKALLPLFLGIMVFLAGCDYSKPEKRSGFFYNTFVDPMKNVLDWLGNNLLNDNYGLAIIILVLVIRIILLPFMLSNYKNSHMMRQKMKVAKPEVEKIQEKVKRARTQEEKMAANQELMQVYKKYDMNPIKSMLGCLPMLIQLPIIMGLYFVLKDQLVDGLFKYPHFLWFDLGRPDIWITIIAGVLYFIQAYVSSKTMPDEQRQMGYMMMVISPIMIIWISLSSASALGLYWSVSAAFLVVQTHFANIYYEKVAKKEVQPFIEAYEREHNGGSNKKGKNTQVVSKKKKK

SEQ ID NO: 12339 - protein, 302 aa, Staphylococcus aureus subsp. aureus Mu50
MTKTKAIDIIGAPSTFGQRKLGVDLGPTAIRYAGLISRLKQLDLDVYDKGDIKVPAVNIEKFHSEQKGLRNYDEIIDVNQKLNKEVSASIENNRFPLVLGGDHSIAVGSVSAISKHYNNLGVIWYDAHGDLNIPEESPSGNIHGMPLRILTGEGPKELLELNSNVIKPENIVLIGMRDLDKGERQFIKDHNIKTFTMSDIDKLGIKEVIENTIEYLKSRNVDGVHLSLDVDALDPLETPGTGTRVLGGLSYRESHFALELLHQSHLISSMDLVEVNPLIDSNNHTAEQAVSLVGTFFGETLL

SEQ ID NO: 12340 - protein, 520 aa, Staphylococcus aureus subsp. aureus Mu50
MKNKTVSLVFWVSLVICTIFVAFGAIFPKQLEKLTQNITTFIALHFSWYYLLLVLVILFVCVYILFSRYANITLGEEGEDPEFSLPSWFAMLFSAGMGIGLVFWTTAEPISHAFKLTPIHKAGTQSAINDAMQFSFFHWGIHAWAVYGIVALVFAYFSFHKGYPGLVSATLTPLLGEKAMRGPLGGAIDVLAVIATVTGVAATLGFGALQINEGLHFLFNVPSNFTMQVILIVIATILFTWSAWSGIDKGIKTLSNINMLLAFVVLIGLFIVGPTLYILNTFTNGLGNYIANFFSMSLRIPSGGQKFQWLQNWTIFYWAWWISWAPFVGIFIARVSKGRTIKEFILGVLFVPALVCFIFFAVFGASAIYLQDNHIADIAKAATETATFATLQHYPLGFVLSLITLLVIMIFFVTSADSATYVLGMLSSRGDINPKSFVKVSWGIIMALFAIIMIYTGGTQAIQNLLIIAALPFSVVIIAMIWSLLKSLSEEKPRNSNKVLIKHRDPDILEYRSSKHIDEN

SEQ ID NO: 12341 - protein, 317 aa, Staphylococcus aureus subsp. aureus Mu50
MEKVYVAGAIPEVGLKLLQEHFEVEMYEGKGLVDKDTLIKGVKNATALISLLSTNVDKDVIDAGKDLKIIANYGAGFNNIDIEYAREKSIDVTNTPKASTNATADLTIGLVLAVARRIVEGDQLSRTTGFDGWAPLFFRGREVSGKTIGIIGLGEIGSAVARRARAFDMDVLYTGPNRKEEKEREIGAKYVDLDTLLKNADFITINAAYNPKMHHLIDTEQFKMMKSTVYLINASRGPIVHEQALVQALKDNEIEGAALDVYEFEPDITDDLKSLNNVVLTPHIGNATFEARDMMSKIVANAAISAVQGEKPQFVVN

SEQ ID NO: 12342 - protein, 374 aa, Staphylococcus aureus subsp. aureus Mu50
MKIAIIGAGIGGLTAAALLQEQGHTIKVFEKNESVKEIGAGIGIGDNVLKKLGNHDLAKGIKNAGQILSTMTVLDDKDRLLTTVKLKSNTLNVTLPRQTLIDIIKSYVKDDVIFTNHEVTHIDNETDKVTIHFAEQESEAFDLCIGADGIHSKVRQSVNADSKVLYQGYTCFRGLIDDIDLKHPDCAKEYWGRKGRVGIVPLLNNQAYWFITINSKENNHKYSSFGKPHLQAYFNHYPNEVREILDKQSETGILLHNIYDLKPLKSFVYGRTILLGDAAHATTPNMGQGAGQAMEDAIVLVNCFNAYDFEKALQRYDKIRVKHTAKVIKRSRKIGKIAQYRSRLFVAVRNRIMKMMPNALAAGQTKFLYKSKEK

SEQ ID NO: 12343 - protein, 459 aa, Staphylococcus aureus subsp. aureus Mu50
MENNELQRGLSARQIQMIALGGTIGVGLFMGATSTIKWTGPSVILAYLIAGIFLFLIMRAMGEMIYLNPTTGSFATFASDYIHPAAGYMTAWSNIFQWIVVGMSEVIAVGEYMKFWFPELPTWIPGVIAILLLMAANLFSVKAFGEFEFWFALIKVVTIILMIIAGFGLIFFGFGNGGHAVGISNLWTNGGFMPNGIVGFFFALSIVIGSYQGVELIGITAGETKDPQKNIVKAVNGVIWRILIFYLGAIFVIVSVYPWNQLGDIGSPFVATFAKIGITFAAGLINFVVLTAAMSGCNSGIFSASRMIYTLAHKGEMPKIFTKIMRNGVPLYTVVAVSLGILIGALLNVILPLYIDGAKSIFVYVYSASILPGMIPWFMILFSHLRFRKLHPEELEGHPFKMPGGAVTNYLTILFLILVLVGMVFNVETRISVLIGVIFLTIVTIYYFIRYNKNNVKAK

SEQ ID NO: 12344 - protein, 402 aa, Staphylococcus aureus subsp. aureus Mu50
MIELNAITTLCLACILYLLGTAIVNHVNFLKRICIPAPVIGGLIFAILVAALDSFGMVKIKLDASFIQDFFMLAFFTTIGLGASLKLFKLGGKVLLLYFMFCAIISVIQNIVGVSLAKVLNIKPLLGLTAGSMSMEGGHGNAAAYGKTIQDLGIDSALTAALAAATLGLVFGGLIGGPVVKYLIKRYNLKPQHSDDTFKDYSQVAYNEHLHSKFNATEVFFIQFTIVVFCMAVGSYFSHLFTAQTGINVPIYVGSLFVAVIVRNISESFNFNIVDLKITNQIGDVALGIFLSLALMSIQLIEIYKLAIPLIIIVLVQVVVMILFAVLILFRGLGKDYDAAVMVGGFIGHGLGATPNAMANLDVITKKYGNSPKAYLVVPIVGAFLIDLIGVIVIMGFIQWFS

SEQ ID NO: 12345 - protein, 545 aa, Staphylococcus aureus subsp. aureus Mu50
MNKDKQLHNDKINLSQLVLLGLGSLIGSGWLFGAWEASSIAGPVAIISWVLGFLVIGTIAYNYIEIGTMFPQSGGMSNYAQYTHGSLLGFIAAWANWVSLVTIIPIEAVSAVQYMSSWPWHWAKPMRYLMENGSISTYGLLAVYLIIVIFSLLNYWSVKLLTSFTSLISVFKLGVPMLTIIMLMLSGFDTSNYGHSASTFMPYGSAPIFAATTASGIIFSFNSFQTIINMGSEIKNPEKNIARGIAISLSISAVLYIILQSTFITSMPQSMLQHSGWNGINFNSPFADLAILLGINWLAILLYIEAFVSPFGTGVSFVAVTGRVLRAMEKNGHIPKFLGKMNEKYHIPRVAIIFNAIISMIMVTLFRDWGTLAAVISTATLVAYLTGPTTVIALRKMGPTMTRPFRAKILKVMAPLSFVLASLAIYWAMWPTTAEVILIIILGLPIYFFYEYRMNWRNTKKQIGGSLWIIVYLIVLSILSFIGSKEFKGLNMIHYPFDFIVIIVVALIFYYIGTTSSFESVYFRRATRINTKMRESLNNESKSSH

SEQ ID NO: 12346 - protein, 525 aa, Staphylococcus aureus subsp. aureus Mu50
MTFLTVMQFIVNIIVVGFLLTVIVIGLIWLIKDKRQSQHSVLRNYPLLARIRYISEKMGPELRQYLFSGDNEGKPFSRNDYKNIVLAGKYNSRMTSFGTTKDYQDGFYIQNTMFPMQRNEISVDNTTLLSTFIYKIANERLFSREEYRVPTKIDPYYLSDDHAIKLGEHLKHPFILKRIVGQSGMSYGALGKNAITALSKGLAKAGTWMNTGEGGLSEYHLKGNGDIIFQIGPGLFGVRDKEGNFSEGLFKEVAQLSNVRAFELKLAQGAKTRGGHMEAEKVNEEIAKIRNVEPYKTINSPNRYEFIHNAEDLIRFVDQLQQLGQKPVGFKIVVSKVSEIETLVRTMVELDKYPSFITIDGGEGGTGATFQELQDGVGLPLFTALPIVSGMLEKYGIRDKVKLAASGKLVTPDKIAIALGLGADFVNIARGMMISVGCIMSQQCHMNTCPVGVATTDAKKEKALIVGEKQYRVTNYVTSLHEGLFNIAAAVGVSSPTEITADHIVYRKVDGELQTIHDYKLKLIS

SEQ ID NO: 12347 - protein, 123 aa, Staphylococcus aureus subsp. aureus Mu50
MMNAKIHRARVTESNLNYVGSITIDSDILEAVDILPNEKVAIVNNNNGARFETYVIAGERGSGKICLNGAASRLVEVGDVVIIMTYAQLNEEEIKNHAPKVAVMNEDNVIIEMIHEKENTIVL

SEQ ID NO: 12348 - protein, 482 aa, Staphylococcus aureus subsp. aureus Mu50
MGSFFNKIARKEDPAIYQNKDGHLKRTLRVRDFLALGVGTIVSTSIFTLPGIVAAEHAGPAVALSFLLAAIVAGLVAFTYAEMAAAMPFAGSAYSWVNVLFGEFFGWVAGWALLAEYFIAVAFVASGFSANLRGLVKPIGIELPAALSNPFGTNGGFIDIIAAIVILLTALLLSRGMSEAARMENILVILKVLAIILFVIVGLTAINVSNYVPFIPEHKVTATGDFGGWQGIYAGVSMIFLAYIGFDSIAANSAEALDPQKTMPRGILGSLSVAIVLFIAVALVLVGMFHYSQYANNAEPVGWALRQSGHGVVAAIVQAISVIGMFTALIGMMLAGSRLLYSFGRDGLLPSWLSHLNDKHLPNRALVILTIIGVLIGSMFPFAFLAQLISAGTLVAFMFVSLAMYRLRKREGKDLPIPAFKLPLYPVLPAITFVLVLLVFWGLGFEAKLYTLIWFIVGIILYLSYGLRHSKKNDVAEYHPPK

SEQ ID NO: 12349 - protein, 540 aa, Staphylococcus aureus subsp. aureus Mu50
MKKEKVMDWTTFIGTVAVLLFAVIPMMAFPKASEDIITGINSAISDSIGSIYLFMGLAIFCFVMYIAFGKYGNVTLGKASDKPEFNTFTWAAMLFCAGIGSDILYWGVIEWAFYYQVPPNGAKSMSDEALQYATQYGMFHWGPIAWAIYVLPALPIGYLVFVKKQPVYKISQACRPILKGQTDKFVGKVVDILFIFGLLGGAATSLALGVPLISAGIERLTGLDGKNMILRSAILLTITVIFAISSYTGLKKGIQKLSDINVWLSFVLLAFIFIIGPTVFIMETTVTGFGNMLRDFFHMATWLEPFGGIKGRKETNFPQDWTIFYWSWWLVYAPFIGLFIARISKGRRLKEVVLGTIIYGTLGCVLFFGIFGNYAVYLQISGQFNVTQYLNTHGTEATIIEVVHHLPFPSLMIVLFLVSAFLFLATTFDSGSYILAAASQKKVVGEPLRANRLFWAFALCLLPFSLMLVGGERALEVLKTASILASVPLIVIFIFMMISFLIILGRDRIKLETRAEKLKEVERRSLRIVQVSEEEQDDNL

SEQ ID NO: 12350 - protein, 66 aa, Staphylococcus aureus subsp. aureus Mu50
MNNGTVKWFNAEKGFGFIEQENGGDVFVHFSGIASDGYKTLEEGQKVTFEITEGQRGDQAVNVQTV

SEQ ID NO: 12351 - protein, 548 aa, Staphylococcus aureus subsp. aureus N315
MNSSSPENPNGKKYSPVFIYSAIVVAIVVLLGAFLPEQFNYVTNNIKMWITEKLGWYYLILTTIIVFFCIFLIFSPIGKLKLGKPNDKPEFNTISWFAMLFSAGMGIGLVFYGAAEPMAHFATPPTADPKTTEAYTEALRSTFFHWGFHAWAVYGVVALALAYSQFRKGEPGLLSRTLRPLLGDKVEGPIGIFIDVLSVFATIVGVAVSLGMGALQINGGLHYLFNVPNNTFVQAIIIIVVTILFIASAWSGLSKGIQYLSNLNIGLGTILMVAALIVGPTVLILNMLTSSTGSLLNTFLFNSFDTAALNPQKREWMSSWTLYYWGWWLSWSPFVGVFIARVSKGRSIREFISGVLLVPAIVSFVWFSVFGVLGIETGKKHKEIFDMTPETQLFGVFNHVPFGIVLSLIALLLIASFFITSADSATFVLGMQTTFGSLNPSSMVKVVWGISQALIAFVLLLAGGGNGAEALNAIQSAAIISAFPFSFVVILMMVSFYKDANQERKFLGLTLTPNKHRLQEYIKSQQEDYESDILEKRQSRRNIEKKDN

SEQ ID NO: 12352 - protein, 372 aa, Staphylococcus aureus subsp. aureus N315
MKIGIPREIKNNENRVGLSPSGVHALVESGHTVLVETNAGSGSFFEDVDYKEAGAEIVAEQAKVWDVDMVIKVKEPLESEYPYFKEGLVLFTYLHLANEEKLTQALIDRKVISIAYETVQLPDRSSPLLSPMSEVAGRMSAQVGAEFLQKLNGGMGILLGGVPGVPKGKVTIIGGGQAGTNAAKIALGLGADVTILDVNPKRLQQLDDLFGGRVHTIMSNPLNIELYVKQSDLVIGAVLIPGAKAPRLVTEDMIKQMKNGSVIIDIAIDQGGIFETTDKITTHDDPTYIKHGVVHYAVANMPGAVPRTSTLALNNATLPYALMLANKGYREAFKSNQPLSLGLNTYKGHVTNKGVAEAFEMEYKSVEEALQL

SEQ ID NO: 12353 - protein, 400 aa, Staphylococcus aureus subsp. aureus N315
MSKLILAINAGSSSLKFQLIRMPEEELVTKGLIERIGLKDSIFTIEVNGEKVKTVQDIKDHVEAVDIMLDAFKAHNIINDINDIDGTGHRVVHGGEKFPESVAITDEVEKEIEELSELAPLHNPANLMGIRAFRKLLPNIPHVAIFDTAFHQTMPEKAYLYSLPYHYYKDYGIRKYGFHGTSHKFVSQRAAEMLDKPIEDLRIISCHIGNGASIAAIDGGKSIDTSMGFTPLAGVTMGTRSGNIDPALIPFIMEKTGKTAEQVLEILNKESGLLGLSGTSSDLRDLSEEAESGKARSQMALDVFASKIHKYIGSYAARMHGVDVIVFTAGIGENSVEIRAKVLEGLEFMGVYWDPKKNENLLRGKEGFINYPHSPVKVVVIPTDEESMIARDVMTFGGLK

SEQ ID NO: 12354 - protein, 520 aa, Staphylococcus aureus subsp. aureus N315
MKNKSVSLVFWVSLVICTIFVAFGAIFPKQLEKLTQNITTFIALHFSWYYLLLVLVILFVCVYILFSRYANITLGEEGEDPEFSLPSWFAMLFSAGMGIGLVFWTTAEPISHAFKLTPIHKAGTQSAINDAMQFSFFHWGIHAWAVYGIVALVFAYFSFHKGYPGLVSATLTPLLGEKAMRGPLGGAIDVLAVIATVTGVAATLGFGALQINEGLHFLFNVPSNFTMQVILIVIATILFTWSAWSGIDKGIKTLSNINMLLAFVVLIGLFIVGPTLYILNTFTNGLGNYIANFFSMSLRIPSGGQKFQWLQNWTIFYWAWWISWAPFVGIFIARVSKGRTIKEFILGVLFVPALVCFIFFAVFGASAIYLQDNHIADIAKAATETATFATLQHYPLGFVLSLITLLVIMIFFVTSADSATYVLGMLSSRGDINPKSFVKVSWGIIMALFAIIMIYTGGTQAIQNLLIIAALPFSVVIIAMIWSLLKSLSEEKPRNSNKVLIKHRDPDILEYRSSKHIDEN

SEQ ID NO: 12355 - protein, 589 aa, Streptomyces spiroverticillatus
MAALIAVNVGMPKDVPWHGRATRTGIWKHPVAGPVMARRLNLDGDGQGDLAGHGGEQRAVLVYQLSSYRHWQEYLKRDDFTYGQFGENLTVDGLADDEVCIGDRYEIGGAVFEVTQPRVTCYRVGLRLGEPQMAALLVSHRRPGFYMRVLTEGRVRAGDEIVKIASGPEEMTVAEIDALLYLPGHARPQLERALRIPALSPGWKTSLRALLDDADRGSGAVGGNRGLTTSSPPPAWPGFRRLEVARIEPESASIFSLTLAAVDGEPLPAALPGQFLTVRLRPDPRASPVIRNYSLSGRPGAETYRISVKQEPHGVASTYLRQHVKVGDVLDVAAPRGTFLLADADTPVLLLSAGVGATPVLAMLHALAAERSQRAVWWLHAARDGESHPFAGEARALLSRLPAGRSFVSYSRPSGVDRPGVDYTFSGRFSPERIRGLEPPPDADAYICGPSAFMGDMTGALEACGLPSSRIHTEVFGATSAVTPGVVTGSARAPHQPAAPPGGRPGPSVAFARSGLIVPWHPDYGTLLGLAEACDVPVRWSCRTGICHTCETALLSGHVEYDPQPLEPPSGGSALICCSTPPADVVLDM

SEQ ID NO: 12356 - protein, 78 aa, Chlamydomonas reinhardtii
LCHVDDCNVDLSSLKEYHQRFRICDFHLKAEVVLREGIPQRFCQQCGRFHLLSEFDGTKRSCRARWVCGGSTHRSSTS

SEQ ID NO: 12357 - protein, 631 aa, Chlamydomonas reinhardtii
MAPTGRIERAKSKLKSTYAKFRSKAFVVRSMEEQKDKTASGFEMHKVLGPFSLVMLGIGCIIGAGVFVLTGVAARKYAGPGVVVSYALSAVTAMLTAFCYAEYAAELPVAGGAFNYVSMTFGEYAAWVTACDLVLEYTLSAAAVAKGFTAYTAALIGIDVSYLRLQASVFTLDLPALASVIGMSFILMRSTADSSLFNNLVTGLNVALIIFVLAAGFPHVEAENYHPFAPFGARGIFTGASVVFFSFIGFDTVATAAEEVKNPGRDLPIGIVGSLAICTCLYVLMCLAITGMQSYTVIDLNAPFAVAFDHVGLGWAQRIVAAGALTGIVTSLLGQARIYVTLGRQSLAPAWLAKVHPTRGTPVNATYVTMFTAGFLALFIEIELLAELVSIGTLVVFCSVCAGVLFRRYYVHGSGEPLRPVLGRLGGVVAAAVCFSVSFTEAAPAWVPAIFLVVWFAITLSFYRLPVKYVPQVFRCPLSPWLPSAGMLATLHLIGSLGWPAYVRWIVWFVLGTTVYLTYGMHRSQIAGCKYCLYVLDKPMGEAELARTRSDGGSGTPLEQHLMRHGIPPSSSPNGSPVADDDSVHSGTALNRPSTDVAHTFGGPPHHRAGSHTAAGVGAGVHGSWAACSVP

SEQ ID NO: 12358 - protein, 269 aa, Chlamydomonas reinhardtii
MQPPATQVAGMRVLIPTTGVVGAADIAAVRDLRLIAQPAAGYNNIDVEAAKRRGVPVTIAPGYNSHSVAEVALMMILMLSRKVDEARAVFARRERIGEPVGGELHGKTLGVVGMGKIGSCLAEAARGLGMQVLGVTSRSSRAELEALLAASHVVALHCPLSPATRGLIGRAELALMRPGALLLNCARGSVVDREALWEALQSGRLGGVGLDTHWVEPAPRDDPLYSHPRVLALPHLGSISAEVYDRFANILCENITRAREGRELLHRLC

SEQ ID NO: 12359 - protein, 149 aa, Chlamydomonas reinhardtii
MDEDYDTANMHNYAAGSNVARWGRLEELDPGDEAFLKSLERKQQLRKPLRCQVGGCTADLTDVKKYFQRYRICERHLKAPSLKMDGRAVRFCDQCSKFHDIGAFDGARRTCTEKLEKTRQARVALNGGGGGGSMSLDLERRAAGPQRRQ

SEQ ID NO: 12360 - protein, 485 aa, Chlamydomonas reinhardtii
SHLGYRHTRHSYFYTTLKLGTPERTFSVIIDTGSTITYIPCKDCSHCGKHTAEWFDPDKSTTAKKLACGDPLCNCGTPSCTCNNDRCYYSRTYAERSSSEGWMIEDTFGFPDSDSPVRLVFGCENGETGEIYRQMADGIMGMGNNHNAFQSQLVQRKVIEDVFSLCFGYPKDGILLLGDVTLPEGANTVYTPLLTHLHLHYYNVKMDGITVNGQTLAFDASVFDRGYGTVLDSGTTFTYLPTDAFKAMAKAVGDYVEKKGLQSTPGADPQYNDICWKGAPDQFKDLDKYFPPAEFVFGGGAKLTLPPLRYLFLSKPAEYCLGIFDNGNSGALVGGVSVRDVVVTYDRRNSKVGFTTMACADVARKLAERSTAAPNATVIKVSPPPPNPAPPAPKPPSPAPTPKPAAPKPGRARRGPCSTRSPSQRTQAAASGVAVTAAAAGVRVPPRPQPPAVLAPAPVHRLAAAVPAAQARRAAVAPRPTTLRW

SEQ ID NO: 12361 - protein, 593 aa, Chlamydomonas reinhardtii
MASRLGGLFSSLKEDGKNLLTAKAWGFSPREFIEMAKQYPSIVQQRTFKLKTAAEMERDAALRGTLKRTLGPFGLTMVGVGFMLGAGIFMAPGTIAVDMTGPAVCISYLIAALSAFLSCFCYAEFACDMPLAGAAYNYIAASLGEFFAWVVTSNLIFEYILADAAVIRGFAPYFATLIGKDPDFFVYTTVTGGKTYVMDWWAFAITLAMTAFVSIGAKESTTANTIITVIHLVVMAFIIIAGFTQADSANFHPFFPNDQPQQWKQVFNGAAIAFFSFIGFDAVATAAEEVKKPSKHMPWGILGSMSIVTVIYFLMCVVLCLMVPRDMINPDATFAAAFVYVGLPWASHIVALGALLGILTGILIGIYAPARILTGCCREGMLPPVLAWIGPKQTPWVATWVIGICIAVIALLTDFAELANMVSIGTFVVFWFVAVALLYNDQWKWLLAMALCCLAVPVSMCFFCRPAYVPSGFKVPLYPFVPCGSIFVNTFLLGQLDEQSYKRFGWWTLAVVIVYLVYGIFAAQAQDNRRIADESVETGTSGDLSGKAAALELELPKVAASRADSASSASAEAAAKQVVPLKAEAADAEATRA

SEQ ID NO: 12362 - protein, 190 aa, Chlamydomonas reinhardtii
MDLGVGTSSGGLQEDDVALAKLLQEQERALYILGRGGREETAHEDLTDEELARRLQEEEDQATYQAMAGYGSYGLDEVLHEGEGTGTGSEPEQSAMELTYEDMLALGDLAGKVSKGLPPEVLARLQVEAVGNLRSSAGAIILDRCCICQVEFEDSDPATTLPCRHCYHSECVRQWLQQSKACPVCGKEVE

SEQ ID NO: 12363 - protein, 484 aa, Chlamydomonas reinhardtii
MGDPRVSFSVANILGKGPNDPKLEDAYRVDKQIGKGAFGVVRAGAKRSTGDPVAVKSISKAKLVCKEDVKDVQAEVAIMNLVAGHPYVVTLRSTHEDKEFVHIAMELCAGGELFDSIVEAGNFTEKKAALYFRKMVEVVNHCHELGVMHRDLKPENFLLTSKGPEGELKLTDFGLGVFFKPGERFRDLVGSPYYVAPEVLRKNYSHEADMWSLGVILYILLSGLPPFWGDTEDQIFKMVLKGHIDFKTDPWPKISEAAKDCVKRLLDQDVTKRATAAQILKHEWLVKEGVALDIALDSVVLKRLKQFAQMNKLKKACLMVIGQHLTPDEIAGLKELFKSIDADGSGTITVEEMRKALAQWGHKINEVELQQLMAIADVDGDGLIDYNEFVAATMHLSKLEKEELLQQAFKQIDKDGSGTISVSELEQELKKFGIYDDAKELLATADTNGDGLIDYLEFCSMLRNNNEALKQSTRAIKRQYSKFF

SEQ ID NO: 12364 - protein, 336 aa, Chlamydomonas reinhardtii
MQTTMTRPCLAQPVLRSRVLRSPMRVVAASAPTAVTTVVTSNGNGNGHFQAATTPVPPTPAPVAVSAPVRAVSVLTPPQVYENAINVGAYKAGLTPLATFVQGIQAGAYIAFGAFLAISVGGNIPGVAAANPGLAKLLFALVFPVGLSMVTNCGAELFTGNTMMLTCALIEKKATWGQLLKNWSVSYFGNFVGSIAMVAAVVATGCLTTNTLPVQMATLKANLGFTEVLSRSILCNWLVCCAVWSASAATSLPGRILALWPCITAFVAIGLEHSVANMFVIPLGMMLGAEVTWSQFFFNNLIPVTLGNTIAGVLMMAIAYSISFGSLGKSAKPATA

SEQ ID NO: 12365 - protein, 73 aa, Chlamydomonas reinhardtii
QVEGCGHDLTTEKSYYQRYRVCEPHLKLLSLMVDGKPCRFCQQCGRFHELNEFDGNKRSCRARLIQHNARRRK

SEQ ID NO: 12366 - protein, 171 aa, Chlamydomonas reinhardtii
MVKYMTCVWVSTNVQGVHYDKAVGTGFMRLFAYISGANEDMKKIPMTAPVRVELTPGQGPFCEDHFKVSFFVPFDMQESGPPAPVDSTLFVDPAAATDYYVLSYPGRTNEKEIIEKATSLVQALDEQKLPYDFSSFFAAGYDSPFRIFNRHNEVWVAAGAQPAAVAAEAAK

SEQ ID NO: 12367 - protein, 179 aa, Chlamydomonas reinhardtii
MALANMLSRKAGFATSRTSAPFVASRVSPVAAKARVSSAAPSFSRQQQSIVCQAAATAEVAEKKVHPSPLTIAAPATYAIVEIGGTQMFVEPGKWYTCNRLKVDVGSKIKFGRVLALKHEGKLTVGKPYLENVAVEAEVIEELRGPKVIVYKMRPKKHYRKKQGHRQDLSKFMVTSISA

SEQ ID NO: 12368 - protein, 418 aa, Chlamydomonas reinhardtii
MALARAFASVAAVARQGESKLSFASRAFASSTTVNGVPVEVHNEGGSKRVVVTKTLPGERWLQFLINAGCRVEVSQHPDIILSNATIKQLIGTKCDGVIGQLTEDWGAELFEALKQAGGKAYSNYAVGYNNVKVDEATKRGIPVGNTPGVLTETTAELAAALTLAAARRVPEADVFMRAGKYKGWLPNLFVGQLLQNKTVGIIGAGRIGAAYARMMVEGHKMNLVYFDPYPNKQLEEYIRLYGELLRHRGEPPVACKRVETVEEVLKEADVVSLHCNLDASTRHLINSQRLALMKPTAVLVNAARGPCIDEAALVAHLKANPEFRCGLDVFEDEPAMKPGLADCANAVIVPHIASASLWTRSGMATLAAANVAGILSGYPVWNKQDILGFVDKPLAAAPLAAPSIVNAKELKLKTVAE

SEQ ID NO: 12369 - protein, 613 aa, Chlamydomonas reinhardtii
MAKVGTLEVTLTSASFVKDVEFVGVLGVGVGKQDPYAVLVLADQTHRSKTITDGGKEPTWNEVFTFRNVTPDQTLKLEFYDENVVFRDVALGSGKVSLGNVLGGPQPVSLDIPLISRKGKARGTVKMAFRFTEGKTATAQTTNPYAPVSKTVKPGNWILPTYADTDCWKDYEPGSILGKGTFGTTYSATNKKTGEKVAVKVISKKKLVSAEEIGDVQREVQIMHHLAGHPNVVCLKGVYEDKSNVCLAMEVCSGGELFDAIVKKGHYTEKDAASLIRTIVGVVAHCHNMGVIHRDLKPENFLLSDRSAAAALKATDFGLSSFFQEGQVFTDIVGSAYYVAPEVLKRAYSKEADIWSCGVILYILLCGYPPFHGENEKKIFEAVVTKPVDFTSDPWPAISEAAKDCVRRMLVRDPKRRATATQILQHEWMRENGCAADQPIQLEVLSRMKQFSAMNRLKKEALKLIAKSLPLDEINGMRELFLEIDKDKSGTISVEEFSEALKKKGMQGLTDADVSRMIAEADVNGDGTIDYEEFLAATINRSKLEREELLKQAFSKFDENGDGVITRQELFNALSDPALGVDPKEIDEIIDQVDQDGNGTIEYGEFVAMMRGL

SEQ ID NO: 12370 - protein, 95 aa, Chlamydomonas reinhardtii
DASAFECNICLELAKEPVVTLCGHLFCWPCLYRWMQSPTCNNRACPVCKAGVEVDKVVPIYGRGSELASTVQEAVKPVPPRPAGHRPAPVPVRLA

SEQ ID NO: 12371 - protein, 405 aa, Chlamydomonas reinhardtii
MQRVLVLNAGSSSLKFKLFTAAGTSLGEAGLGGQFDRIGDVANCTLKASQPGAAPGMKPRKWELKVPAQDHVGAMKGILDFIKENVSATFASEVVAVGHRIVHGLDLSQPVLLTPSSTATIKQAAVLAPLHNPPGLQGIEAATEVFSGVPQVAVFDTAFHQTMPPHAYMYGLPYELYEKHKIRRYGFHGTSHKYLVEQAAAMLGKPVSDTNVITCHLGNGSSVAAVRGGQCVDTSMGLTPLEGLLMGTRCGDMDPAVVLHIQNQCGLNVKETDTLLNKKSGLLGLTGSNDLRAVIEGAGKGELRSQLGLDMFTYRVRKYIGAYTAALDGKVDAVVFSAGIGENSPFIRKLIAEPLHAMGMQLDHAANDTAVGRAGVISTPGSRVQLLVIPTDEELSIAEQTLQVC

SEQ ID NO: 12372 - protein, 769 aa, Chlamydomonas reinhardtii
MAFASSSMAALSRPLAAVSSGLGSALSRASQLLTSGSLSSSPTASHSSTRRFISDGTVGSKGRPDSLFLSDISGRPNATANDYYNKAMVKRQVFADHKVDVLGVVINGLPREHHAILSSQLRDKLERAGLPFAGALPEDPVLSSVRPPPPALDKPSPGLTCVSSCAPSHRYPPTLPPLGLGLLLCPCPVPARLQLIASGKQSEVLDRIYAAYMAYKAGGELDLCLVEGPGPLMGGTELDAQVVVGSQRLEELLETLVERPMGRPLVVTSADRLDIVLGLLAAQLSVRGPSVAGVLLTQAGASRITRSYAKSAVDNIFAGLSNNTGASGGGPDGAAAANGSAQGSLYRGALLPVLSTDKHLAEALAVIGRMDASILPTSIRKVTQCKVAGAAVMLFDKYIDANAVVTGLQKSRPTRVTPKMFQHTMKAMCRASPQHIVLPESVDKRVLAAAADVTARGLARVTLLGDPTTVQQEPPPSPSTPAAMAAPASASSDRFDKYVDMLVEARKKKGMTREAAADTLHGDINFFGTMMVAAGDADGMVSGAIHTTASTIRPALQMLKNPASSLVSSIFFMCLPDRVLVYGDCAVNVSPSAADLAAIATTSADTAAAFGIEPRVAMLSYSTLGSGAGPDVQKVTEAVALVKQQRQDIKVEGPIQYDAAIDPAVAAVKVKGGSEVAGRATVFVFPDLNTGNNTYKAVQQSTGAIAMGPVMQVCVRVSAGVGGLLKPVNDLSRGCTVPDIVNTICVTSIQAMQFKQRTQAAVAAAAAPK

SEQ ID NO: 12373 - protein, 772 aa, Chlamydomonas reinhardtii
MSAFEELGVMPELAKAVEDLGWMLPSPVQAEAIPLILGGGDVMAAAETGSGKTGAFAIPMLQIVHETLRQRARSGSAASTSGRGAAGAAAAAASPAAVPCVLSSEDRELHVAVSPDGLSAQSRSEKAWGGVRGSVGVFASCGGKVYYEVTVTDEGLCRVGWSCPTAALELGTDRLGWGFGGTGKKSHNRQFDSYGEPFALNDVVGCLLDCGEAGGSVAFTKNGRPLGEAFKLPDNLRNQVLHPAITLKNAEVALNFGATPLAFPPPPGYIPLAQAPAAWVAAGGGAAAASAGGGGNGRGEKDLGRKPVCLILEPAKDLAEQTANCFNDYGKHLKAPEVKTGLFVGGMDAAPQIRMLREGVDVVVGTPGRVIDFVESGKIPLDQIRFFVLDEADRLIADNPDVITKLYGRLPKQGTGIHRLQVLLFSATLHSPEVKDMAGRICINPILVDLKGRDAVPETVDHVLVRVDPREDRSWLQSNPEVFTDSCHALDRVGPNAAASPECLSEGVKRLKQRLLQRIIDTMKMEQCLIFCRTNHDCDQLERFLNTLGGAGGGAGGRGFRGKRESGKENPYSCCVLAGARSMDERRAALSAFKDGDVRFLIATDVAARGIDIRELPYVINMTLPDKSEDYIHRIGRVGRADTMGLAISLVAEVPEKVWFCTVKGMKPWLAPDSSNTRTTDKGGHTIWYNERELLGAIEGRLGRPIPPMSDDLTLPPELAERLSAAGDKYGQQRGGGVSKEHLAAIASNVAQLAGLEWQVQTSYLSLKRKWG

SEQ ID NO: 12374 - protein, 305 aa, Chlamydomonas reinhardtii
VRVAVVGVGLMGNKIARRLASQGAHVSAWNRSADKTASLPEAGISVAGSVAAAATASDVLLLTLSDAATIRETILCDAVRPLLKGKTVLQMGTIGPKESAALAADILAAGGSYVEAPVLGSQPEAEKGTLLVMVGAEADPREPGSPHHDTVWPLLRALGQESNIHFIGPVGTGAAVKLALNQLIASLTVGFSTSLGLVQRSGADVDKFMSILRASALYAPTYDKKLQKMLDRDYGAANFPTKHLLKDVRLFEMEAAAAGLDTRLLAALKGVVQDTVDRGLANTDYSAVFDAVAHPGEQQATKPQQ

SEQ ID NO: 12375 - protein, 310 aa, Chlamydomonas reinhardtii
MATKIALLGTGLMGAKVCKRLMSLGSWSVRCWNRTAEKSERLAEFGAEPCATPAEAVQGTQVIVLFLADAAAIRSVLMEDPSVRPQLKDKVVLQMGTIGPKESAALALDILAAGGSYVEAPVLGSQPEAEKGTLLVMVGAEADPREPGSPHHSTVWPLLRALGQESNIHFIGPVGTGAAVKLALNQLIASLTVGFSTSLGLVQRSGADVDKFMSILRASALYAPTYDKKLQKMLDRDYGAANFPTKHLLKDVRLFETEAAAAGLDTRLLAALKGVVQDTVDRGLANTDYSAVFDAVAHPGEQQQATKPQQ

SEQ ID NO: 12376 - protein, 292 aa, Chlamydomonas reinhardtii
MLAQRQDAGQAAGTSGGPKRRWTIDDFDIGKPLGKGKFGNVYLAREKQSKYIVALKVLFKSQLQQSNVEHQLRREIEIQAHLRHPNILRLYGYFYDKEKVYLILEYAARGELYKELVRCNHFDERTSATYILSLARALHYCHTKHVIHRDVKPENLLVGLNGELKISDFGWSVHAPSNRRKTLCGTLDYLPPEMVEGKEHTTSVDNWSLGVLTYEFLFGGPPFEAPGHQETYRRIVRVDIKFPDKPAVSDSAKAFISKLLVKDAHRRLPLLEVQNDPWIKANADPDMLARGN

SEQ ID NO: 12377 - protein, 273 aa, Chlamydomonas reinhardtii
MRRRAWALSDYEVLQRVYKGSSSAVYRAVCRRSGLPVALKVYFMARVPANTLHMLRREIELHIGLAHKNIIMLYGAFTDGKHLVLVQEWAARGDLYGIHRLMNCRLTETQTTELVLAPFLDALASLHRRGIVHRDIKPENILYTQGWTLKIADFGVSICLNDERAVTRTGTVDYMENKNNPNLAYTASVDIWSVGVLAYEMLVGFPPFVSEANEQSENAKAMAAFMAAEANTRALSFPSSLSEPARDFIRAALSENPNDRPTAEQLLKHPWLV

SEQ ID NO: 12378 - protein, 589 aa, Chlamydomonas reinhardtii
MDTSIPFPRPINARGPAPGQTPSQLSSLPPSLQARLGLGATHDSPVLLPLLQQVEASPTTGIHQLCPPLFQPAQPARVPLPIPARTEAASAAPEPTRAIKREYEPRAGNGKQSVANSDGWQWRKYGEKLVKGSPNPRSYYKCSHPGCLAKKIVERSDSDGTVLSTEYKGDHCHPAPSAMLPIPEALKSDFPVPHAAGAAAAHEDDTDTSEPEPAAALKAAPQDTRAAQAAATAIRKVRDSAESPSKRLDMLAAYAEEAERQLKSSSNSPEQGPSAKRQRTEAGAMRTRANPDDDDDGSGAPSTSGMQRVVDITNMDDGYRWRKYGQKQVKGSPFPRAYYKCTHMGCSVRKHVERSAEDETRFVVTYEGTHSHRLPTGSRRRSARDMAEDDEDYEGEDAEEDSSQPTSPQYGNVNGSGGPGQHAASKAAAQGAQLVHPSGAQPASADFGQQLQQLSTSLLASTVLQQAALSGVLPLLQYNSLSSEALASLGVNSEALQGVEQLNLASVGNLADLTNLLRQHAQMDLALAAQAQAIDAANANWDPLACLITPRPNVSPAGQGHAMGQAPSAGTGRQTKAAVFQKQVATTEA

SEQ ID NO: 12379 - protein, 587 aa, Chlamydomonas reinhardtii
MAWSLADRAVRRSAAAARRPAAGRRCCARVEAVYATHRATVLVTEKLGDAGLDRLRLTCNVETAYGLTQEELCAKVSLVDALIVRSGTKRVTRAVFEASHGRLKVVGRAGVGVDNVDLAAATEAGCLVVNAPTANTVAAAEHGIALLCAMARNIPQADASMKAGSWDRSAYVGTSLAGKTIAVYGFGKVGSEVSRRARGLGLTVVAYDPYASAEKAAAQGVQLVTFDEALQVADFHTLHMPLTPGTKGLFNDSAFARMKRGARIINVARGGVIDEAALLRALESKQVAQAALDVFLEEPPSFENHPLVHRPDVICTPHLGASTTEAQEGVALEVVEAVVDALAGNLSVNAVNAPMVPAEILRELQPYIVLAEGLGRAAVGLGGKGGFGDIAITYSSPRGDDLDTRLLRAMVIKGVLEETTTSKVNLVNADLLARNRGLRITEVSIRAGGDGTSEVLTSMSVALGTADSKFSAAVDSGNTYGRWAEAPWSKAGVGGQHDAEVASSLPFPSGMCVGLAGPGEGGRPRDGRGGEGQTTPFMTVSRTAKDGEAIMAIGIDSEPSPATLEEITRVKGVIEVTIFKEVAPPQR

SEQ ID NO: 12380 - protein, 1256 aa, Chlamydomonas reinhardtii
MNEEAILASGPSGRSSKANPVLAQLYQRAIELVPRSRGHASEEYMYRSEDEGRDLLKALKNQHLRDTCGLLYYEWALLEQQAGNTSKAVAILQKGIKEQAEPRSMLVGLLAQLQPSLSGADGAGAEAAAPVPERRVHFQDVDMASAENPAAGLARRAAPSTPGASLKLGEAGSCATSTSYTHLSGTSSTSKSSTTMLPGDLSLGISSHHHVHNLTGLVASKSQASCLSNSSEDDTINCRSSAAEDNRTQGSLGAAGAGLGTLAGGGGNSTATVTMPAGIASSFNLAAGAAAVAALGSGVAAGTTSGGGSGGGGGNNTANMSMGLRRFGLKSKAVRITSGDKPSGSANAADAGAVPASGAAQPALDVPLAPSGGAFDDGDDAATRKRRAAAEAAQSPARMVASVVLQDEGMKRRHSPDLAAAAAAGGISGLDRQAPRGAMEPAQQPTQLPARLATGDLGSLRPGSVAAPRQPLVPATPGGSVTAAMPVAAGLSAVPAPVPVAVDRVLATPGPGPTPLGSRPATSRPQDVENMAPGPTPAPAPGLGAMMPMDENCVPGGPGPLGTAAKPAKQPLVPAVSSTPLQPQQDGREPLRPMGYAAARPSPAPQPLAPVPAAGQLAPHPQPQIVPQPQQAPAPAARPQQQPGPLVAFNWQERLEQPQARPIESEMYVYVHGIRYQKLDLAGKGGSSKVYKVLGLNRAIYALKRVRFQNKDQEAVKGFIDEIGLLRTLRGKPNIIQLIDAQVFREDGLVYMVLEYGDIDLARLLHSHEEARRRAAGGGEAAEAAAAGSGNQCQEIDGNFIRLYWQQMLQAVKCIHDARIVHADLKPANFMLVQGQLKLIDFGIAKAIQGDTTSINRESQVGTLNYMSPEAIQGGSQNPLGGPPLKVGRPSDVWSLGCILYQMIYGRTPFADLSFIPKMNAICNPAYQVPTPECGEPDAVDSIRRCLDRNPKTRISLPELLDHAFLHPNRRKPQPPPAAPAPAPPLPSGGGGMAGLTEEQIKAILQLGVAGGSSAADLDSMARRVMQQLGGGGGLLMSTSASSTPAGAASASALRRGAAHGCTAATTACAAAAAAAAIWWCAAPAAAAAPGLGDIAAMAAAAAAKRSAKPPLVDPLEARNAAAAAAAAAAAAGPTRAPAGAAGGGGLPLMGAELHAAILQQRAQLRPVQEPQQQQEPVATTGQHAAAAQQVAGSAAAGPAAARQGQAPAPSSEDNGLEAVLRRGLERFHFGDAGGDHTHGDTDFIEAAMTAARRDT

SEQ ID NO: 12381 - protein, 78 aa, Chlamydomonas reinhardtii
CHVEGCTVDLASAGPYYQRYRTCELHLKAPYIIKDGMQQRFCQQCGRFHELSEFDNNKRSCRARWGHHNQRRRKRTEE

SEQ ID NO: 12382 - protein, 542 aa, Chlamydomonas reinhardtii
MSEACLLAAKSALVGVANGDSLASAICAAMEAAAPVARHLQETTVDLTTLQETVDTIGLNLQGTMDGLNTLLLLYGGALVFLMHGGFAMLEAGAIRSKNAMNILLQTVLDASCSALMWYFVGFAFAFGIGDKPNKFIGNAMFALVDIDTHNTGSGTGKWIDWFFQWAFAATAVTIPAGAVAERFNFNAYLGYSMFIGGWVYPIIAHWVWCIEGWLGYGVIKPFINAGMIDFAGSGVIHMTGGLAGLIGAIMVGPRLGRFDADGKPVDMPGHSAILVVLGTVLLWFGWYGFNPASVLLINSSTYAIVCGRAAVCTTLAGAAGGVSCLIFGFARHRGWDLVGLCNGILCGFVAVTACPHVIYPWAAIICGLVAGLWFEFLCWLLLKLKIDDPLSAGPMHFGCGMWGVFFTGLFARQQYIQEYYVHGPSAAGELSKPYPWGAFYKGYNADGELVMSDGKLLASQIVGILVIIGWVIGMMVPFFGIFKFFGALRIPPEEEEMGLDRSKHGGSAYNGTGANTLGGLSPGNDVMRNNSPLGKVLPVTA

SEQ ID NO: 12383 - protein, 1192 aa, Chlamydomonas reinhardtii
MKLRIVSWNINGLKRVITIFGSLERFLRVLNADIVCLQETQLRDGLEPELAVAPGWDSYFGFTRCRSGYSGTATFVRRDGPLPPLSAEDGFTGLWEAQRRRREEAKCRQRRRDQKREQMQDEQERDPRAEGALGAAEQGTAAAGTHATATEGQQLRPTKRQCTSVPGHEPLPSAPAQPAPLQVLQPRPTHIAHAPEGGADDAADADLHARWRTAGLGPGQLRALDGEGRVVITDHGALVLVNVYGPYVGVKRTEERMRYKIAFYRALQHRLDGFLAAGRRLVVLGDFNIAPERRDDSDGDIADVQGKQLRGRSPFVPAAAPGVPGASPLAASRGTVLLPLPSPQPQQLHPAAKRQRFQPEPASASAAPGAGPCSRAGGAEAAGKVCGRGVCGLAEMLFGEAAVPPAGTCGLVVDVEAAGRAALGPARSAAWEAASAAELPAFVDVYRNFHTSTGRESCATCCGARIDLILVADGASYAGLPQLAAVAAGEAVVLKGGGASCGAGGGIDGFTLPAVQLRRYTCPAWVVGTGIMPGFVDTYSDHAPIYVDAGRRSASSSAVVGVVPARVEGPHATEAAAAVAAAAAGDGAGAPCAGIVAKLSAGSGPAAWRPHDAASQQHAWKAPDAKLWGCTKAHQASSAPAPPALEPVRALARTPPAARSPATAGISRTAARSAAGWQPPRRLQCMPADGMLPECAAQPAGATTAAAPLAASRLVAALAAAASEPEARIGAAAAAAAGLGGTARWGAAGQLLHAQRRDSRLGYRNTYKLAPSFSGSPGPATGPSLVLCIVDRAVLCGPCDIKIHSANPGNMIATAAAVPDTASESGTNNGSGAVTGATPHAAATEGAASAAGAAPELPSFWWPVGADAGLNGFGFGFPDDASKIQIHMSGVTPEASTLSGGGGAATGPGDALRRSSTVPDGADYSAAASPMALADASYLGAHGDDKDAVLDAMAFHEIKMEFEGGAEDSLGGGGGWGGLALPGGGFDFADLLTEEVAVGAAAGDETADPQRSEGSTAGVVPDLEAADPEAEAVARSAEVPRPASEFFQDLFPRSGADTTTASAAVKAEPVDAFGGFDTADMGMGASGYEAFAAELEAEDEDMAPQDDSDDEWRADSDDDAEARRRKKRVARYLEKKKNRRFGKTIRYAARKAYAEIRPRIKGRFARKDEIAAWKAANGGDDAIVPECLDIVL

SEQ ID NO: 12384 - protein, 481 aa, Chlamydomonas reinhardtii
MSSTPSATAIDHGATYSDLLIIQGAIVFFLQVGFVSLEVGYGRSKNVKNILLKNTVNILLCAICWWAVGYAFSYGSSTDGFIGTSGFFHDGGLGAAKLWFYSWTFCLSTVTIVSGCLAERTSLVAYPVFTVLMASWVHPVVVHWAWSRDSWLLGISSECRFLDFAGGTVVHICGGMMGLVGAALVGPRIGRFEEGRAKELPGHDVSSVAIGTLFLWFGWFGFNCGSAYVYMGNMAAAAAEAAASAVASGDTSADVYASAAAAVSAAVTSGANATLHPGSTPADRVALNMTLCASVSGLTALLLSSLRSGTVDLCVCCNSLLAGLVMSTPACGFITSWAAVIYGLVAAALYMGGTRMLVRFHVDDPLESSAIHFGCGGVGTLLLALLARPTYVQELTGYDCGGLVYGGRKGAILLGLQLLGIAAITAWTAFFSVLVFYLLRRLGRLRVDQVTELAGLDNMEHGGPAYPEFNLVPYNTGSAER

SEQ ID NO: 12385 - protein, 375 aa, Chlamydomonas reinhardtii
MRLNTQVSGRATGAPRQGRRLTVRVQAYGMKAEYIWADGNEGKAEKGMIFNEMRSKTKCFEAPLGLDASEYPDWSFDGSSTGQAEGNNSDCILRPVRVVTDPIRGAPHVLVMCEVFAPDGKPHSTNTRAKLREIIDDKVTAEDCWYGFEQEYTMLAKTSGHIYGWPAGGFPAPQGPFYCGVGAESAFGRPLAEAHMEACMKAGLVISGINAEVMPGQWEYQIGPVGPLALGDEVMLSRWLLHRLGEDFGIVSTFNPKPVRTGDWNGTGAHTNFSTKGMRVPGGMKVIEEAVEKLSKTHIEHITQYGIGNEARLTGKHETCDINTFKHGVADRGSSIRIPLPVMLKGYGYLEDRRPAANVDPYTVARLLIKTVLKG

SEQ ID NO: 12386 - protein, 380 aa, Chlamydomonas reinhardtii
MAFALRGVTAKASGRTAGARSSGRTLTVRVQAYGMKAEYIWADGNEGKPEKGMIFNEMRSKTKCFEAPLGLDASEYPDWSFDGSSTGQAEGNNSDCILRPVRVVTDPIRGAPHVLVMCEVFAPDGKPHSTNTRAKLREIIDDKVTAEDCWYGFEQEYTMLAKTSGHIYGWPAGGFPAPQGPFYCGVGAESAFGRPLAEAHMEACMKAGLVISGINAEVMPGQWEYQIGPVGPLALGDEVMLSRWLLHRLGEDFGIVSTFNPKPVRTGDWNGTGAHTNFSTKGMRVPGGMKVIEEAVEKLSKTHIEHITQYGIGNEARLTGKHETCDINTFKHGVADRGSSIRIPLPVMLKGYGYLEDRRPAANVDPYTVARLLIKTVLKG

SEQ ID NO: 12387 - protein, 1708 aa, Chlamydomonas reinhardtii
TDAALWEPYALIGKQVRVLWPGENRYFAGTIVQYFPDSCEHEVHYEDGDEELLVLAAEKVQLLPECVRTLPPPAPAQLSTLAKRLDDLAASLESRALQQRTGRGRATLKEEDRQKFEMYRRRAGEVRLAKERRELMLRLECQHQKQRQPLDRASSGVDPASPTPQRKQTAQKRLGVTGPGVIPLGAKAAAGASRPSRAAAASAAAAIAATSQGRRCGTAVDTAALSAAAADDEATSSPEVPFRVCSPGSAKRRKQLLQQQHGFQQPLGKPKGKRGGKACKVSADSSDIMALDSTGGLDLDSVAAELLQGGHPWAGAWAGGRKGASADVGRLYVPRPWPAVPVSVQAAPVAAAPSIGAAKVSAPLQPEIAGVADAGAKQPDGTAAGGEAAAAPGLQEGTAAALGENSGGEGKAVDEDRRRASAVADELRTAYQHFREHCAGFKQYHELQVALWLAPEQLVGRELRVLWPDEEAWFCGRVTKYMPEQGTHTVEYDDGDVEHLHLAAEEVRLQLVPGEAERELVPKSSSALRHMAELMEANVARARRRVAELRAGVAPGAAVAAAPEGAGDGQQQREAQPEAEDPDELEAKEGAIAEAMPAAGTADQMAEQGDATAAAEPSSRPDDWATVQVLRPGEVVWAQVRRSAPWPAIVITREEAEREGLVGGSRLGHNHQVFVRFFGDYTVFALPAISAGARIPDRGAVVPFLSGLQLGWHARRGAAGGAASSAHAQRFLRALFELRAYMTEGELPRGMIPPNFDEDEDEEEDGSEEIATVAGGRGSAAARGRGGAGTTALDPLAGAVQLPFAVGPKLRILALGEVVWLSRHFHDEKYIYPLGFKAERMMGSGASGGREVMHVMEVISEDGVRPLFRITPEGKQPVTADTASKTMRALFEEDVRARGRAFARTGADLFGLSNARVAALVRALPGAERCERFANWPADMEKPPPPTLTPYEEAQRRALYARALRLPEGVVGVPQTKAGMCFECEVCGEDEESSDDVKLECDMCRCVVHTRCYGVTQPPPPGALWLCDVCQMHATGLPEELSPPCELCPVLGGARKRTESGGYVHLLCALWTPGVTFGNVDTLEPVEGVAKAVQSRASLRCSLCSQMHGACIQCAGDRCYTAFHPMCAREAGMALCELRQGKRAAGAPGRSKGAADAPADTSAAGLAAPGGPQGRSREASEGGAGVDADGPHGKENQPQPGDGGKAGSGTAGATRTAAPSAAQGITCPLAAATAAVAGSAAAGPLQRRNRNRNRGGRHGSAYAMAGVTLGKGVTMACFCLRHEELVLHRHEFKPSYPGGRFAERRADLTREQLRARRDALLAAEKAVAAEAAAQAVQQTEQEQQQLTRQSVETGRSMSFADWRSRGHRAPEAVAIAREKRSFVRQLPYLVTGRLQHSEEQVRALAPIAIGAKPTSCPRPTGSARARPDGHVEPEASSLQPIAGLPRQDAEATASMLPVSTQTPVSGAVVGGCKAAAEAEDSGPSAEAVEHLPLELLAAATASGARSVAERYWAMRATVSVRLAAGKSAIHGWGAFAKVPHKRGDMLIEYAGELIRPVVSDVREKRMYNDLVGCGTYIFSLNGQQHIDATKAGNMAHLLNHSCDPNCYSRAITLTDPLTGATTDHVIITAKRDLQPWEELTYDYRFNSAVELPCNCGAASCRLLVNWPEESRDGDDEEEGNSGDEGEEPGLGLGVEQQAGEAPRVRGQV

SEQ ID NO: 12388 - protein, 577 aa, Chlamydomonas reinhardtii; identical to SEQ ID NO: 401

SEQ ID NO: 12389 - protein, 372 aa, Chlamydomonas reinhardtii
MAPASEHAALKAACNKRIELSDRNACDVELLTVGAFSPLEGFMNKAEYDSVVANMRMTNGLLFGLPIVLDTDSEDIVPGDKLLLTYQGQDLAVMTVDSKFTPNKPLECLKCYGTSSLEHPAVQMVAMERGKYYIGGPIKGLALPTRVFPCASPADVRSTLPANQDVLAFQCRNPIHKAHYELFIRALDAPNVRNPGAVCLVHPTCGPTQDDDIPGVVRFRTYEVLKEETKNPRLRWAYLPYSMHMAGPREAIQHMIIRKNYGCTHFIIGRDMAGCKSSISGQDFYGAYDAQDLANKHAAELNMQTVASLNIAYTEEKGYVTADIAKAENLHVLNLSGTKFRQMLRAGDDIPEWFAFKSVVAVLREQIQSEAN

SEQ ID NO: 12390 - protein, 750 aa, Chlamydomonas reinhardtii
MAGVPAPASQLTKVLAGLRHTFVVADATLPDCPLVYASEGFYAMTGYGPDEVLGHNCRFLQGEGTDPKEVQKIRDAIKKGEACSVRLLNYRKDGTPFWNLLTVTPIKTPDGRVSKFVGVQVDVTSKTEGKALADNSGVPLLVKYDHRLRDNVARTIVDDVTIAVEKAEGVEPGQASAVAAAAPLGAKGPRGTAPKSFPRVALDLATTVERIQQNFCISDPTLPDCPIVFASDAFLELTGYSREEVLGRNCRFLQGAGTDRGTVDQIRAAIKEGSELTVRILNYTKAGKAFWNMFTLAPMRDQDGHARFFVGVQVDVTAQSTSPDKAPVWNKTPEEEVAKAKMGAEAASLISSALQGMAAPTTANPWAAISGVIMRRKPHKADDKAYQALLQLQERDGKMKLMHFRRVKQLGAGDVGLVDLVQLQGSELKFAMKTLDKFEMQERNKVARVLTESAILAAVDHPFLATLYCTIQTDTHLHFVMEYCDGGELYGLLNSQPKKRLKEEHVRFYASEVLTALQYLHLLGYVYRDLKPENILLHHTGHVLLTDFDLSYSKGSTTPRIEKIGGAGAAGGSAPKSPKKSSSKSGGSSSGSALQLENYLLLAEPSARANSFVGTEEYLAPEVINAAGHGPAAVDWWSLGILIFELLYGTTPFRGARRDETFENIIKSPLKFPSKPAVSEECRDLIEKLLVKDVGARLGSRTGANEIKSHPWFKGINWALLRHQQPPYVPRRASKAAGGSSTGGAAFDNY

SEQ ID NO: 12391 - protein, 123 aa, Chlamydomonas reinhardtii
MDALANKEVVFDLDAAAFSSDDFRIFQFKVKRCPRARPHDWTQCPFAHPGEKAKRRDPRKYRYSGTACPEFRRNGCCRRGDACPFAHGVFECWLHPSRYRTQMCTDGSNCKRRVCFFAHTESE

SEQ ID NO: 12392 - protein, 499 aa, Chlamydomonas reinhardtii
MADEMDPMTACITALTDAAMTTAQATALCGQFAFAADNSDLSDRLDQTNQGLNTLYLVSCGALVFVMHAGFAMLCAGAIRSKNTMNILLQTVMDAAVSAVAFYILGYGFAYGIGNNPNGFIGDSLFGLSRWVSHSSSSDAGANWQAWFFQWAFAATATTIPAGAVAERLNFNAYLIYSFFISAFVYPVVVHWVWAAEGWLGYARFGGYSHLFRSGMIDFAGSGVVHMTGGLAGLAGCIMVGPRMGRFDSNGQPVEMPGHSATLVVLGTVLLWFGWYGFNPGSQLIINYTASAAVVGRAAVTTTLSGAAGCLSCLLTAFLRHKAWDLVSGCNGALVGFVSITASANVVEPWAALIAGLVGGWVFDAVCLLFLKLRIDDPLSAAPMHAFCGAWGVFFAGLLAKKEYICESYGRDCEGYVADGLFYVGDGRLLASQVIGIISIFAWVFGLMLLLFGGLKAVGLLRISAEEEQAGLDVSKHGGSAYNYDHGLGKPEKAQALGL

SEQ ID NO: 12393 - protein, 504 aa, Chlamydomonas reinhardtii
MGNLCSCVGEGQTNAAAASAQNGQAAPAKQAAPKKEPGPMDIIEQALAEAQRELDKNKGHDFNDKYKVSKLVGHGAFAKVMICSHKDTHEKFAVKTVQKNQEDPGKQREGILKEIAIMRMLCDHPNTIKLYEVFEDKESYHLILELCSGGELFDQIIAKGHFSEKDASEKMHCLLDFIAYAHSKNIIHRDLKPENILLSDKTQHAILKVIDFGTSDFCLDGQRLSQKFGTPYYVAPEVLKKDYDKSADIWSAGVIMFILLCGYPPFGGKTDAKILQRVQAGQYSFDGKEWEVVTEAAKDMIAHMLVMDIAKRATAKQLLQHRWFQVAATAPAAALGAHMVKRLRAFAGMSRMKRLALVVLARTLTDNDVKRLRELFVAMDTNNDGRIDSNDLHKALEKVGAAIDESEMQDLFHASDIDGSGQIDYEEFIAAMLDSNRVARRKEAVRKSFEELDKDGDGFITAEDLVKVMPRGSSIELAREMVNEVDKNNDGRVDYAEFEKMMQS

SEQ ID NO: 12394 - protein, 258 aa, Chlamydomonas reinhardtii
MANSKYEYVKQYELDDSLLPGCWIVVRIDGKGFTKFSELHGFEKPNDKRALDLMDECAKEVLNEFPDVRLAYGESDEYSFVLGRSTDMYGRRASKIVSLLVSCFTANYVAKWAAFLPDTPLRSTPMFDGRAVCYPLDSNLRDYLSWRQADTHINNQYNTCFWALVKSGKTPTEAQATLRGTQTAQKNELLFNEFGINYAHLPEQFKKGSVVIRRKTMVEVKQRADGTPVLRERNLPTVLHTDIIREEFWQEYPHLMAP

SEQ ID NO: 12395 - protein, 107 aa, Chlamydomonas reinhardtii
MGKAEAINEIQKAVASNKVIVYSKTYCPYCVKAKNALNQFIAGKYTVVELENRADCDAMQDALLDITGGRSVPRVFINGKFLGGGDDTAAAASNGTLEKLLQEAGAL

SEQ ID NO: 12396 - protein, 345 aa, Chlamydomonas reinhardtii
MICSNMPSALHLRCPSRARHAASRPLVRSYLRRGSGSGNGATGFVVDVPAAEPHVQTLTPAPAPAPPAAPAPAPAPAPPAPLLPPASIYTAAVAAGTLKCKIPLGKAFVLAVLAGAYLGFAGLLSFTLLNTVPGLLSTNPGLAKLLAAAVFPLGLALITICGGELFTGNTALMPAAVYEGKATWGEVLPRWAVVYLGNLLGCLAMVVAVVATGLVGSNHVLPGLAVAKTSVPLGQVLVRSVLCNWLVCLAVWMALAANNLPGKLMGMWMPVTAFVTVGLEHSIANMWVIPIGMALGAPVSAGAFLTANLIPVTLGNVFAGAVLTAGSYSLAFGRLGAAFNGEAAK

SEQ ID NO: 12397 - protein, 419 aa, Chlamydomonas reinhardtii
PPNALQDKYHLGRVIGAGSFGVVREVVEKATGKTAAVKTIPKVPKRGLPTPRYLLKLRTEVEIMQQLGYSLDAVNLRDVFEDDDSIHLVMELCEGGALLERIEAHKYSEKYIARLTRSILRFISQCHAKGIIYRDVKPDNFLFLRHDDESPLKATDFGLSIRHWPDEPKLTSRSGTPAYMAPELVLQSYDEKCDIWSVGMLTYQLLTGRFPFWEDTLSDVWKAILTQDVNWDAQELKQLSPSAVDLLKRLLQRDPAQRPSAFAALEHPWLSEEGRARDLPLQGSVVQRLQRFSTFGHLKQLVLKIIVEVAVQSSSKVMPEDLFNELDTDGSGAISFEELSSGLRRQGYVLADNEIENLMRRVDSDHNGTVDLSEFIATLMDWDQVQSEQNWQTYLDHAFRKMDHDGDGFISLDELLQQL

SEQ ID NO: 12398 - protein, 424 aa, Chlamydomonas reinhardtii
MQCLDKSRMMQASSRCASGSRSVPARVSSRASAVSVRCTIQEARPASTPAAASTPALNGVASPVAGAVPPIALPRGAVPNRPILEVPDWENQYRRHTASARHGSAGTPGSLSRLRLFSGTSNPTLATEVAHYLGLELGKIKCKRFADGEIYVQVQESIRGCDVFLIQPTCPPVNDHLMELLITIDACRRASARSITAVIPYYGYARADRKVQGRESIAAKLTANLITEAGADRVLAIDLHSGQCVGYFDIPVDHVYGETVILDYLASKRIATGDLVVVSPDVGGVARARAFAKKLNDAPLAIVDKRRSAHNVSEVMNLIGDVKGKVAVLVDDMIDTAGTITNAAKVLQKEGAREVYACATHAVFSPPAVERLSSGVFQEVIVTNTIPVPPENVFPQLTILSVANLLGETIWRVYNAASVQALRD

SEQ ID NO: 12399 - protein, 387 aa, Chlamydomonas reinhardtii
MAGLALQLKLHGRRSVAPCGAALGSAAAGQAHQPSRRTCVKVAAGRQEAPPDPAPKRIAVKPDAASVVPEAHKVFDEIVINVKSGAGGNGEVCDPGVDSLLHLHAGGNTGGKRAAGGAKGDAGRPTFAARDGSNANPNTGSGGPKRNAEIKKAKTPALEIPVPPGTVVKRKGTGALMGELMQPGQRLVNKGVEVVEVDDSGWREDVKGQPGQQLGLTLLLRVVADVGLVGFPNAGKSSLLKSLTRASPTIAPYPFTTLMPNLGVLSAGGGASKAVLADLPGAHKGRGLGRNFLRHLRRTSALLHVVDASAPDPVTDYYAVREELRMYNPDYCARPHVAAIRGAAQAQAAEHAEHAYEGPTPVGPLSIVPCCAATGEGLKELGACGLE

SEQ ID NO: 12400 - protein, 258 aa, Chlamydomonas reinhardtii
MSLLRGYKSNKRSLKPLNTAASWQAVQPLLAEQRQRAAVEGVSPPVADGARPPPQPGRRRWRPRLGPIVDTCLPPIPAVPLPTECRRVGVITGQYSLEPERTFAVVELAGSQYKVTTDDVLFVNQLKGVAVNDVVALERVLLLGSRAETVVGRPYVPGGVVLAAVEEHFRDGKVHVFKKRRRKRYRKYQAPRPHLTTLRILQVRGIDPAPGDESARLPELPVALLDARYESVLRLTGRGEQQQQQQQQQDEEQRQAAA

SEQ ID NO: 12401 - protein, 146 aa, Chlamydomonas reinhardtii
MAAVAAAAAAAAAAASAPGAMPPSVAPSAAAPPFPAAPAAGSAGTSAPSGGTAGSGRKVSTSDIQLVQNLIERCMQMYMPLKEVVSTLQTQAKIEPGFTQLVWQKLEEQNAEFFKAYHVRLKIKDQIVMFNYLLEQQVHRMSDKGK

SEQ ID NO: 12402 - protein, 2059 aa, Chlamydomonas reinhardtii
MDITSPRDMAVASASGRQASEAPGTGPPPFSHSRLRSYASKVEGLLDPKMVLSSSVALAGSGLADPFPSASSSSASQQLLTPKSARFAGTGGGSNGIAAARPGGHNQPSAAALGSNGQHSHQQGSQPQQPQQQPASAEELAAALNQIQTLKAEIAGVETVLGYLKGNEAATTTMGRKAHKLPSQQQLRQRADALAGALDEALPPGSITAKYGTGAGAAVTGGLEPAFWSGGEARRDFDMLDMVQREVARQCEAARQVAASCSERGRIIDKLADRHAELYGAVAAAARSATEAQRGLSERLAGVTTRASEQATEIARLRSELAARGAEAEDLRQQLAETRTQHEHYVWDCEQELETLQGQSDILAAEVEHLHVRLAEAVADKDAALSRGLARLEADLEAVTDERDDLSQRIRFLERQLHKLRTEMNTAVVTAVAEVQTDPVNWAAEEPEDVPDDVSDTPSLAEIRARYAAHGYGALSPEERLRLGLPAHMDGEGGGKSGKGKKRKRALGHFQWTVNAIATMYYDKMKADARSDLEGNPRQRLADFAVDWHMTRFGLRNLAELNLLDLIASVRQHYKTAVRVRWFGQFTGLVEVGDQVDTTPHVSFYLHLLACLAAPNSLVSLFPDTAASGGAASEEAGGGTPPVAVKAAVLPEAIKAIYRYLNEPESATAFLARACDPLTDPDSQTVPLDPLVALLMAEYQKRWERNAAHLRALFRAGDYDGDGLIGYDEFVAIVRQLLPDSGDRAFTKMYGEAMRKLPAGQNLLDVETFLGVARAFGCDRWRIDAGPTASAYGGGPYGIVTSPSGAAAGGGGLNGPSRSGSVLGSAPSMGALRARATSAASNLRRTESVVGLSEPDRALLRVLDGAVEGLEPPLEEQLTSLLDKLRTSAAATAQRAEALTAATAALPGFELGGGPNAKELATAAAEDNAMVSVAWGGISKLEAQYSHFKTTYEDRTDPAAAWLAFRMLLASLAAAAAGARVKPNPSNARSRPGSAKSQAGGDRHWAGAKALARLTVPAVPFRAGSSAAASRPGTNGSLAASGPSGLPGSPNELITSLEKVIWHSRRILKSGNFQEHHVAHTKLEHANLTQASDLTSWARAATAWLGAAMRLQAGDAAAATQQGGGIFGGVAARVSHARDSHRRRRRHLSSSENVFSTREDDGAEQLTLLVPVMRRLLLAQLLKAWLRDMRQQLPAEPQAAQALAVLIRKLFEVHVGSVVQRAALEYFHISKAGGTSWTVAAKSNKCPRPAARGCRVKEFDDSCRWLNRTALLDVGVPQGRHHKAPWGRYGHVDRSTEYATCAQRYEYVRRRGFVYTTNEYTLHRDLAPERSLDERAEVLSAEQVVERLQSPEGQDAWHSAHLCPQFVNILTVREPRQRLLSNINFMLPFLQSQLFPIRKRNDTQSAAQVADFQAIFCNAPSETWETVVPPVADNYNVRTLLGELGFHLPLWSVGPEHVAAAESQLLRFDMVMDLNAGSGAADLVQKQGLGWHVTLAEVHALDSSQRQDRVPCGLGNLTKLLERQGPDQQWYSFARVEPPCHLDLSKLIQAGTKSFFNNPLLSDIVLVCPDGRALHCHSVILAAASRRLAAALKQGNWTPGQQMPVKGVDSDALETLVYAFYTAECPLELARVPALYDAAIKLEVPSLAPALEQYTASALQPHNCCAVLELCLGAGVGPLAELVLEWIRSRVADVVPGPEFRACRLETAALICKDLAGRSQLVGLQVAVAWLTASSARGSLVGVFAEATGLAVDAIQAVANSGGALGPIGGLGAAGDLSSALMDGPLRLGGGGPGRDLDLPSLSMGGKGMCHVQGCNRSLAGLRDYYQRYKICEHHLKVSQVLKDGVPHRFCQQCGRFHPLTEFDGDRRSCRTMLQRHCHRRAKQKQELAEVLAQRYEEKQVAASMTAVMAAMARGTPAGVPALPPMLQLQYLAGLPAAAAAAAGRDDGGAKDEDMDGRGGGGRSLPAGLHSPPSRAALTEAVQQRARKQQATVLSQSGLLGLAGSGEGLPEGQLAAAMAAAAAGLTLGLDNLPAVGQLPGSGGVAERKFGDQELLTGGG

SEQ ID NO: 12403 - protein, 254 aa, Chlamydomonas reinhardtii
MNIKPVTGMWSTGFCDCCAEPGGCGTCFYTCCCPCCQYGQNVARMPADMVCCGGSCYGACCCYFMMHLIGCPCLLHMNTRSWVRVKYGIPGDCCQDCMATWCCALCAICQEHRELTCRLVQQGGAELKDNKVSPAPQQQQPQVVMMAAPPASYPAASPYPPPYGQQPPPGYGAPQPQYAPPPPQYAPPPAQAYPPPGYGAPPPAYAAPPPAYGAPAYGAPAYAAAPQPVQYVAVPAQGHHHRRRSGSSSSSDEE

SEQ ID NO: 12404 - protein, 418 aa, Chlamydomonas reinhardtii
MATEVRLGPRTPCIVSAVRTPLGAFQGALSSYTAPELGSIAIRGALERAGVRPEDVDEVLLGNVISANLGQAPATQASLGAGLPPSTPCTLVNKVCSSGLKAVMLAATAIMAGTADVVVAGGFESMSNAPHYMPAARRGLRLGDGAVVDGLVKDGLWDPYSNIHMGSCAELCADRYAISRQMQDEHALQSHQRAVAAAAAGHTLAEIVPRRRQEGRRRLWRFIWEDEGLAKMDPARLPGLKPYFRRDGGGSVTAGNSSPMTDGAAALVVASYDAVQRLGLPLLAVVRGFADAQQSPEWFTTAPAAVVPRALRRAGVEAAEVDYWEVNEAFSVVDVANRQLLGLPADRVNAHGGSVALGHPIGASGARILVTLLNVLRARGGRLGCAAICNGGGGASGVVVELVDRGRAAVAPRRQSQL

SEQ ID NO: 12405 - protein, 434 aa, Chlamydomonas reinhardtii
MSAAAAPAGAVKVDTTLNPLVASVKPSKTMALTDLATSMKESGIDVIGLAAGEPDFDTPAAIVEAGVAALRQGYTRYTPNTGTSALRKAICKKLKGRAGGVGVRGSVWVAYEKGKACGKSGRAATDICTRGGAGGLLAPSHETYEALSTRAGARALRLPTRVPVSHALTHSPELDRAPPHTPTRPRSRLLILCTPSNPTGAVYPKEHLEALAAVIAKHPRLLVLSDEIYEYITYAPATHVSFGALPGMFERTLTVNGFSKAYAMTGWRLGYLAAPKHYAKAAAIIQSQSTSGASSISQQAALAALALGPGGGEPVQAMVRAFRERRDYVSARLKAIPGVNLAEPAGAFYVLPEMSAFFGPGAAAQGFGAVPDSDTFCRYLIEVANVAVVPGDAFGADSCIRISYAASLETLGKALDRIAAALDPAVYTLRTDRQ

SEQ ID NO: 12406 - protein, 381 aa, Chlamydomonas reinhardtii
MKLLAEGFAKGAEGFVKLLPEEAEDMWHTFNLVREGDHITATTFRKVQVDKGTGADTERLKLKLTLEVAAIEFDAEGGVIRIKGRNLTESEHIKLGAYHSLELELGRAFTLKKAAWDALDIERVRQATDVSLSADLAAVLITEGLAHVCLVGGSTTLVRARVEANLPRKRGAAAAGYDKAWTRFLDHVFTAVVRHVDFGVVKCLVIAGPGFAKDQFKEHLEQEAVRREVRPLIENKEKIVLASASSAYKHSLKEVLSCPTIASRIKDTKAAREVTALQDFYDLLATDATRAFYGPGHVFAAAELGAIQVLLISDSLFRINHVEKRRKFAELVEGVREAGGEALVFSAMHVSGEQLNQLSGIAAILRFPLPELEDMEIPAEV

SEQ ID NO: 12407 - protein, 1232 aa, Chlamydomonas reinhardtii
MASDLANIFNDEEAGSDRANSITSSDLDPFLLQGDDQTWAVEDWNWDPFNMFAAPKETPNVACCQALKRRKVTEQSATSAPQQAAQQHHQHAACQPCHGASGSRAGPPAAPTAACCSMAPGVQQHAPAPAPAQQLTGPLQTALNSMMPGQQQQRVADACGVSNMCHAPGMVAPPPPMPVAAPLAATGHQAGGMGMGHMNPAMGHMGWPAMPDMSNPAAAAAAAAAAASFFPTMGAGGRGPLATMGWGAQPMALQMPSMGLPGFPGGHTQCAPALQMPAVAFPTPSSGIFHQQASMAVPPSALPSPALGCSGDTTSLQGSADNCAKPPCCSGNRATGPTCSGGRQQADSSNKAAPPPPKQPAQNTVGARGGAAAPAPGDLSDFNISDSEDDDEVARRPSAAGTQRGGVGNAAALNAAAYANLGDIVSLQDVGDDTGAMVCQVPGCGKDLTNLKEYHQRYRICDVHIKLQQVLKDGRLQRFCQQCGRFHDLTAFDGNRKSCRDQLSKHNARRRRRAQAEQAKGRAAAQEAAVAAAGAMAAAAAVGGAAGGAPAVPGFEGGDVGKLLACLMQNPTQLHALRLLLGVPTHPALPAAAPAAGLGMAAGGDTAAQPDQARTYGLARDILAGRNEFSPAFESEHRMIRLSMKLFNKTPADLPHDLRNQVTSWLASAPLAMEASIRPGCVFLTVQMLVDEAGAQQAAAPGALHGLVEHLLTRTGCPFWHMGMYTVQMGTDMLLVRDGKMAGDANVNASGAAAPAATGEGAEAAARVRGDGRFPVVRRLGPLAAVAGQPTVLKLHGLNLDAPGCSVILRWGNKHLKAHMQALSTHRAIVRLPPLPDLCGPVWVEVARGAYLSPAKQLLVARNEELVQEINKLDVKTGPLRHDTVELLLQDLALVLQHIAAQPGVAAQLQHAVIALKARRLLAMACDMGWAAVASAVLPLACARCSCASEMVAAIHSASTPSQTGAADKRGLTLLHRAVRSGSVSLLAGMLAWGDSHGYRWRVDAEGPAGITPLHLSAMLDDARIGLLLLDHCGWPAAFTHLRSDGGVTPFHLAFQMGHYQVDALMSALGGLHQVADPNNAAAINNAAAAAAAAMSPSRRSRCGNAAAMGCKPDPDEDVKPDLAALQRGGRNGGGGSGGCTELDPCENCHCTLPPLLLSIMASCTDCGRRRMCMETECNNAAQRCGDCGCGGARPTARVDSGEVCSSRQHGTIFSITALCQGCHANRTLAVA

SEQ ID NO: 12408 - protein, 204 aa, Chlamydomonas reinhardtii
MGWSHLNPYEYHWDRGLYYHEIIPNLICGTQPRNAGEVDTLADNEGITHILNLQEDKDMHYWGVKIEDIRRACAKHSINHMRRPAKDFDKGSLRKAIPGAVHTLAGAMAGGGRVYVHCTAGLGRAPGVCIAYLYWFTDMQLDEAYSHLTTIRPCGPKRDAIRGATYDVAHAPPLPFESLPEQAYATLSEDDRFALQYRVLKGLC

SEQ ID NO: 12409 - protein, 308 aa, Chlamydomonas reinhardtii
MAKEEKNFMVDFLAGGLSAAVSKTAAAPIERVKLLIQNQDEMIKQGRLASPYKGIGECFVRTVREEGFGSLWRGNTANVIRYFPTQALNFAFKDKFKRMFGFNKDKEYWKWFAGNMASGGAAGAVSLSFVYSLDYARTRLANDAKSAKKGGGDRQFNGLVDVYRKTIASDGIAGLYRGFNISCVGIVVYRGLYFGMYDSLKPVVLVGPLANNFLAAFLLGWGITIGAGLASYPIDTIRRRMMMTSGSAVKYNSSFHCFQEIVKNEGMKSLFKGAGANILRAVAGAGVLAGYDQLQVILLGKKYGSGEA

SEQ ID NO: 12410 - protein, 610 aa, Chlamydomonas reinhardtii
MGCNPLQLAQVTALLGGDTATAATICAGTDVAQLGPNGAVTKWTVAELRGAQNALDQVEYGLNVSFVLASAYQVFVMQLGFALFAAGVVRPKNTVSIFIKNFFDTCIAGIAFYLVGYAFAFGAKDGYTNGFIGNWDFALSQTDGSPGSEPPNPWHLFIWNWSFCSASTTILSGSIAERATFASYTIYAAFMPAWVYPVVAHWLWAPDGWLSARNANDRILGIGAIDYAGSGVVHLVGGMAALIGSIAVGPRVGRFDAPGSTGEVSAQLYRATAAPQLYLMGTLLLWFGWYGFNPGSKLAISDYLQATIVSRTAVTTTLAACSGALSNLLLNYGRHRVWDLLSTCIGALAGLVAVTSGCSVIEPWAAIICGAISALFYEAGEQLLEKLKVDDPVSAFPLHAMCGVWGLLFTGLLANEGYITQVYNVPPGGHRMGLFYGGHAQLLLCQVIAIAVIAGWSAFNMCILFFGMKAAGLLRVGADKEATGMDMAACGQYNAAGAVNVHSSKVPTKSDAVLAAMSLNMERRMNGGPGMDYSVRNSSANPSAHNSSLHNTATATTVTTAAATPAAAGGIMLTSAVGGASSAGGSAVPSAAASAGVGDAAGSGDTVPPQ

SEQ ID NO: 12411 - protein, 917 aa, Chlamydomonas reinhardtii
MLASQKLAHRAGLEERRACIGPHVSRSQQRVVGRVGKLAPHVSGAPANAIRQTSVVRKLLRVAAAASTVSGAAAEKPTGVRGAHWQVHKFGGTCMASADRIRATAELMASTVGPDSSTCVVVSAMGNHPTSPIKVTDLILNMIKKASRQDAAFLVDLAALQEKHVDTAKLLLGQSPELTQFVSSLMDDITNLKAMLQAMSIAGMSTDAFSDFVVGHGELWSGRLFALCCKQLGADVEFMDTRDVLVVTPTSDGASVDLDEAVSNGRMDAWFKAKGNKKLIVATGFIARSREGTATTLKRNGSDFSATIMGALLRCRHITIWTDVDGVYSADPRKVPEAVCLPSMTYHEAWELSYFGANVLHPRTTLPAMKYHIPITIRNFFNQSAPGTRISDVASDAEVYGGKNTIKGFATIDNVTLINVEGTGMVGVPGIASRIFSSVRDAGINVIMISQASSEQSICFAVKGTDGDAAQRVLNERFADSISAGRVSAVQVIPHCCVLAAVGQGMVARKGVAATMMSALAKANVNIKAIAQGSSEYNITVLIDQVDSERALRAVHSRFYLSDVPIGVGIVGPGLIGGTLIAQLREQRQQLKKEFGIDLRLLGVASSGKMLLRETGVDLDNWKQDLEDKSVACDLDKFGNFLSSHYIPNRVIVDCTASDAPASKYMTWMQQGIHVVTPNKKLGSGPLDQYQAVRRMQREGYIHFFYEGTVGAGLPVIGTLKHLLETGDKIIKIEGILSGTLSYIFNTYHSSYCCCSFFRASALLLTSAASSSSPPPQVAILARECGLMLELDSIPVQSLVPEPLRAVASSADYMARLPEFDADMDAKLREAEASGDCLRYVGVVDAQNGKGSVELRRYPKSHPFAQLQGSDNIISFTTARYFKQPLIVRGPGAGADVTAAGVFSDLLRLAAYLGAPS

SEQ ID NO: 12412 - protein, 393 aa, Chlamydomonas reinhardtii
MTNMDAPSTSNGTSTSAQDAAAQKQPVRRAPLGIDTINKRVIKSEYAVRGEIVQLAQKIAKEVESGQHNHPFDKVVWCNIGNPQILGQKPITYFRQVLALCECPQLLTKQIPGGLGAYSATLTLYGGTLAPYLLDEGAGWGLDVEHLRLQLAKARREGLCVRAMVVINPGNPTGQCLSYQNMRDVLTFCRDEQLVLIADEVYQANIYVGNKEFFSFKKVACAMGLEDQVPLVSLHSISKGFIGECGRRGGYMEVTGFPEPVKDQILKLASINLCPNLSGQICCALMMNPPQPGEASYELYRKEKSDILGSLKRRAELLVGALNRLEGVSCNAAEGALYAFPRPDWLYCKELLEATGIVVVPGSGFGQADGTFHFRTTFLPSEEDIGRVVWCQP

SEQ ID NO: 12413 - protein, 107 aa, Chlamydomonas reinhardtii
YSTDEFRMFNFKVLRCSKRHAHDWRACPFAHPTENARRRDPREFKYCALACPDYKQGFCIRGDVCPYSHGVFECWLHPSRYRTQLCKDGSNCHRPVCFFAHSLPELR

SEQ ID NO: 12414 - protein, 97 aa, Chlamydomonas reinhardtii
MEADGEPQPKVKSEGAVINLVVKDQQGTEVHFKVKTKTRLEKVFNAYCNKKGMDTASVRFLFDGERVNANSTPEQLEMADGDVIDCVIEQVGGGVSA

SEQ ID NO: 12415 - protein, 170 aa, Chlamydomonas reinhardtii
MSERPDRPLFIGNFEYEAEERDIVRLMEKYGPVEKIDMKQGYAFVCMRYKEDGDVAIRKLDRTEWGYKKRMLKVEWAQKSEADRKRDTKPSRTLFVVNFDVRRTTERDIERYFGRFGRLTRVQIKKSYSFVQFQNVEDAIKAMERANGAQMEGRTLAVEYVQNEDPNVRL

SEQ ID NO: 12416 - protein, 979 aa, Chlamydomonas reinhardtii
DLLSDDPFMADALTCADVAAAAAGGPVAAHCRDDEEEEEDGGCTAAAAAAHSASGFAHAPSSSGGAGSTPASSVTVAVVARQRPAAPRVAGKWRGGISVTAAVLAAAAAAAATAAAADEEAAGSEEEPETPEENEPEAEARVEDEGQEAGEDAEMEDCAAAVPAAAAAGATTTACAMAEAAAGTGAAGDGHDPQQVEILVPLCRVPSSSAGGGGLCAACRGGVPPFDAEEAEPHEIGVAAVEREAVGGGKDGSSGGCQWQQGGMAACPRTACLVCAAALPARCRRALSSMGSDDYDDAEMEQCDVAIEKEEEEALAAAAASAGGRRGGAGASSAPAAGVGVRLVPVWGHAKAAVVAGRELERGTAAACACFGKWCGYVSALRDGQLTSIGHAALQHRHEAAEAAGGAVTEPTEADAGVGFEAEAFSRQGSFSTSMQEAQQALQLQELLEDDHTPPPPAAGPYERQFPSLAGAVQQLPQHDQALPLAVAMAPPAPPLAAVAPAAEAAGAEAGVEAGDAEDMFAGMAGLSEQEQRRMLLQQLEELRQQEQARLQHMHWLQQQQQQQQALHMHHQVHMQQVHMQLMACTPHAQQLHPQPQEPVQQPTQPAAHATDMDMNIDGTRHGGSASLTPPAPWAHVQMIPQQAPMPAPPQQQSQPFGILPMQQGQPPYPVQLYQQHLAEQYEAPFSYTAEAGICRPEVPPLPPQQQQPPQAQLQQQQQVPFTRRMSEADSTSPFASSAIAGVPATPSTPSDAAPPAPPAPATMAAAAAAAAAAAAPPAKPPAPGVPAARAAVQPPPQGSLLHRGPSLNGGIRKPPPPPVITVIKRGPDGSILHKCSAPPPAVRRSVNGKRDDVPAAAGARAAAPVVAVDTKATEAAANTSAAAATAYAAQVLAAAAAAAAGSGASGVRELTREERVARFREKRKRRNFDKVIRYATRKYYAEVRPRIRGRFARREEIEAWKMAHGGPDVEVPAVLDDD

SEQ ID NO: 12417 - protein, 179 aa, Chlamydomonas reinhardtii
MAGDKAATKEKKAAEPKGKRKETEGKAEPPAKKAAKAPPKEKPAKKAPAKKEKKAKDPNAPKKPLTSFMYFSNAIRESVKSENPGIAFGEVGKVIGEKWKGLSADDKKEYDEKAAKDKERYQKEMESYGGSSGASKKPAAKKEKAAPKKKAKEEEEEDEPEADDDGDDDDEDDDGDDDE

SEQ ID NO: 12418 - protein, 247 aa, Chlamydomonas reinhardtii
MGEQLRQQGTVKWFNATKGFGFITPGGGGEDLFVHQTNINSEGFRSLREGEVVEFEVEAGPDGRSKAVNVTGPGGAAPEGAPRNFRGGGRGRGRARGARGGYAAAYGYPQMAPVYPGYYFFPADPTGRGRGRGGRGGAMPAMQGVMPGVAYPGMPMGGVGMEPTGEPSGLQVVVHNLPWSCQWQQLKDHFKEWRVERADVVYDAWGRSRGFGTVRFTTKEDAATACDKLNNSQIDGRTISVRLDRFA

SEQ ID NO: 12419 - protein, 269 aa, Chlamydomonas reinhardtii
CNVYISEGRDKALIGKLEAAAQATPGVALVNVFQDEPYHRTGFTLVSGQPDRLTEAVVRLSRAALQLLDLRRHDASHPRLGVVDHIALHPLGGLAPAAATHSRGVATTVAGGQEEEVPALPVYFYGHAHPSRRGLADIRRKLGYFRRSPEGGWRGGLEQQQLPAGNDLSAFPPDLGPATASARWGVVTIGATPWVGNYNVPLSGVDMATARKLAKAISERGGGLPGVQAMALQHADGLVEVACNLLDAAAAPPGTLQARLEGIAGAWGL

SEQ ID NO: 12420 - protein, 395 aa, Chlamydomonas reinhardtii
MRRFATLNEQAQSTASTSSSTRSVCARICSNRRRASIQPLGTVALGRRSGVACRSGVAVQAAAVVQEEYDVVIPKFPAPAAGAFLPDKRSFREEHRIRGYEVSPDQRATIVTVANLLQEVAGNHAVGMWGRTDEGFASLPSMKDLLFVMTRLQVRMYEYPKWGDVVAVETYFTEEGRLAFRREWKLMDVATGKLLGAGTSTWVTINTATRRLSKLPEDVRKRFLRFAPPSSVHILPPEETKKKLQDMELPGQVQSAQQVARRADMDMNGHINNVTYLAWTLESLPERVMSGGYKMQEIELDFKAECTAGNAIEAHCNPLDDHSASFVGPAPANGNGNGHAAEPAADSAPLYFLSMLQKCDENGCTELVRARTTWSRTLEGAKPAPPPLSELSAAQ

SEQ ID NO: 12421 - protein, 495 aa, Chlamydomonas reinhardtii
MSSSMCLARCSASLSAGNFPSRMFMGRLHAQRRTRTLQLRCAASLLPDQPTLAASSAISPVPSDLPEVLGDALHRLGAMYVLADASASTAAAAVMPTAVDSAAGAAPQRAGGWVAPVADALEQVLYALQEGLDKLHVPYSYGYSIILLTLIVKLLTYPLTKQQVESAMAVQALKPRIDLIKDRFGEDKDKIQKETSVLYEQAGVNPLAGCLPTLATIPIFIGLFSSLTNVANDGLLDTQGFYFVPSLAGPTTMAMRQSGLGTSWLWPLGPDGAPPIGWEDAAAYLTLPLLLVAVQYASSSVTSPPIDPKDENANTQRALLVFLPLMVGWFSLNVPAGLSLYYLANTVLSSAIQIYLKKLGGANVVMNELGPVTKPGSGRRNGVAAGEWSVWKPATVLTTAEAAKARAEAEEAVERAREAAEEAAAAAAFDNASVSLSVDDSTAAIAGTATMAVTAGATAAAMDPSKVNRRCKRRRLTSLVQDGSTASAAVAGASA

SEQ ID NO: 12422 - protein, 441 aa, Chlamydomonas reinhardtii
MLGMKLSPRHVSSRAKPAPAMRGRKVCVSVNAAAPKMGQVKKVVLAYSGGLDTSIILKWLQDTYGCEVVTFTADLGQGEELEPARAKAEKMGVKQIFIDDLREEFVRDYVFPMFRANALYEGTYLLGTSIARPLIAKRQIEIAKEVGADAVSHGATGKGNDQVRFEVGYYSLKPDIKVIAPWREWDLLSRTKLIEYAEQNNIPVPASKRGEPPFSMDANLLHISYEGNALEDPWTTPDDSMFTRSVSPEKAPDQPTTIEIAFEKGNPVAIDGVPMSPATILTKLNELGGQNGIGRVDLVESRFVGMKSRGVYETPGGTILQVAHRGMESICLDREELHMKDDLMPRYAQLVYNGFWFSPEREALQALVDKTQEYCTGVVKVKLYKGNVQVQGRKSPYSLYDKVIASFEDDKGLYNQADAGGFIKLQALRLRTLGVNRYKKI

SEQ ID NO: 12423 - protein, 200 aa, Chlamydomonas reinhardtii
MGSRIYIGNLPADIAERDVRDEFERFGRVRTIWVARKPPGFAFMEMEDDRDAADAVRKLDGFQGWRVEFSRRADRGPPARGGGGGGGFGGGGGPGGPGGREMRCYECGEIGHIARDCRNMRGGPASLRGGPPPPVRGRSRSRSPPRRSRSPSYDRRRSPSPRRDRDAPRDSGRDAPRDAGRDAPRDAGRDRERSRSRDRD

SEQ ID NO: 12424 - protein, 589 aa, Chlamydomonas reinhardtii
MQSRQCLNRKASGARPCANSRSLTARVLATAAPVAPSATPASAPLPLPDGVGEHSGLKHLPEAARTRALDKKANKFEKVKVEKCGSRAWNDVFELSSLLKEGKTKWEDLNLDDVDIRLKWAGLFHRGKRTPGKFMMRLKVPNGELTAAQLRFLASSIAPYGADGCADITTRANIQLRGVTMEDSETVIKGLWDVGLTSFQSGMDSVRNLTGNPIAGVDPHELVDTRPLLRDMEAMLFNNGKGREEFANLPRKLNICISSTRDDFPHTHINDVGYEAVAKPNGEVVYNVVVGGYFSIKRNIMSIPLGCSITQDQLMPFTEALLRVFRDHGPRGDRQQTRLMWLVEAVGVDKFRQLLSEYMGGATFGEPVHVHHDQPWERRNLLGVHRQRQAGLNWVGACVPAGRLHAADFEEIAAVAEKYGDGTVRITCEENVIFTNVPDAKLEAMKAEPLFQRFPIFPGVLLSGMVSCTGNQFCGFGLAETKAKAVKVVEALDAQLELSRPVRIHFTGCPNSCGQAQVGDIGLMGAPAKHEGKAVEGYKIFLGGKIGENPALATEFAQGVPAIESVLVPRLKEILISEFGAKERATATA

SEQ ID NO: 12425 - protein, 624 aa, Chlamydomonas reinhardtii
MVDGGSRAASGQLDDWAAGVAADLDQGEGDRAGARRRPARDASPAPDARKVTTFTNKKRPASDRDSSPEEDDEEQAQKGSLKADGTRPKLPRPDKKEACPRCNSMDTKFCYYNNYNIKQPRFYCKTCQRYWTAGGTLRNIAPGSGRRKSKSKAAREKNSPSLAEQLTAVAAGQGMFGLGGGGGYNGISPALALAAATDPTGLLAANSAAAYGLGGHGTISGLKLGGVGGLPAQFNSELALREHLAGQHSLETRLLLNGHLSAEDLPNGMSAAALAQASAQLHALHGQGSGIAQSLAAGNGHTGSPSPSPPPAGNGGQQHPLSSSPQHGGGSQASQQPSPPQQGSDDAEGGGEERYVAQGRRVRVKAELDGNAVSSSLAMGGGGGSGAYANGASIASSIANAQLAASLSMPPSMGALAAVMGPGGGPSGLHPLLAQDNGGSLLDAGLTRQQLLVLQQHQAMQQAQQQESLQQLSSLQQLQGLAALHGQHSAAGLAGLDPLQRSALLHSAAGLGGVGVGGWLQGGGGGNSLAAAAALESLQAQHLLQAQQVHPSAAAALIGGGGSSAAAQMLQAQAAAAAAGGGGGWQGVASAANWPSAWSSYSGPSSGSYAGYALQAAAAYSGAR

SEQ ID NO: 12426 - protein, 169 aa, Chlamydomonas reinhardtii
MHKLARPDRPIFCGNFEYEAQERDVVRLFETFGPVDKIEMKEGFAFVYMRHVCDGEAAVAALHGWEWGVQRRRLKVEWGKVRAVWAVGSGHRCSGSPPSHKLFVINFDPSRTGEQELWRYFSPFGRVTRVQMVRNFAFVVFADLRDAVAAQQRTNGAILEGRTLNVEFS

SEQ ID NO: 12427 - protein, 769 aa, Chlamydomonas reinhardtii
MSQGHRDAGAAACRTIIVTNHCPPIMRKRDIWRVDQFHLLRKVGSGYASTVYLGTCRTSGNQVAVKLYHKQKLSELNHFQVAREITIHSSLDHKNIIQLWAAFEDQYGIYLVFEYASKGDVFTEVERRGGQLDEAETVRAVVYPFLSALDYLHSRCIIHRDIKPENLLFTATGVLKVADFGLSINFSQERPVTRVGTLDYMAPEVVVCPDKHRPQDHKELKHLHYTPLVDAWAVGVLAYELIVGRPPFDKGQKKATIAEILNSEPFIPPWLSEGATHFIRWSLTKEVGKRPSVQQLAEHPWIVSHMKQSVLAPARRQLVKTDSFVEPRQLGFRGSNAPGAGEPSGPSKEPPRPLQVSSVAQGGRFLGHSSSMSAMDGMRYRDIHLDSVTGGMASAATEALKSVKRVSDGDGTTGGRPSAAGGRVSRAGTARNSGTGQAPLSRMNSMSAQAVVAAAAAAMASGSFGGAAHGSEDSPKGGRALTREELYASLTAPLGGRGSPVLARSFTAGRASPAPQQMAPLPTNAGRKSGGGGLGSGRSSLSGQATGAPPSRGAAELAHDLSRLRVDSAASGGGGAAGPSTSASGAVPYSPGKGSSGIRPSPPQAPSPTARGLRTGSPLIPSRLSQSFTSPVSPLAAGSNASAGTPHLSRLGKTSNSGIVPAVATANTPGSARPPAGMDAHSSAASSAAAAGAQSSPHQPAAAAAGSSLTVSTTPASPGGSSGYGQTRASPRELPGERDPELEDSEVEDEPETERSPSKSKSLFKKIFS

SEQ ID NO: 12428 - protein, 268 aa, Chlamydomonas reinhardtii
MTAFALGAATSLSGGEVREDGKVAYGFSLLRGKRGSMEDFHCAQYKKDPRTGQIVGLFGIFDGHGGPNAADYVRTNLFVNMMQSQKFVSDPAACITEAYETTDTQYLRQDINNGRDDGCTAVTAVLVGQRLLVANVGDSRAVLSRGGKAVALSVDHKPNVKEERSRIESAGGVVVWAGTWRVGGVLAVSRAFGDRPLKRYVCATPALADERLTSEDEFLLLASDGLWDEAVTLVREEKDPETAAKRLTEEAYTRGSNDNISCVIIRFT

SEQ ID NO: 12429 - protein, 532 aa, Chlamydomonas reinhardtii
MSSFTLTSDVVNYLIYRYLQEAGFTHSAFTFASESLVSRTNIDPNNVPPGSLVTFIQKGLQYLEIEANLDAPVRPLGTASALELLSNDAAQAQAAAQAQTAALPAAAAAAAAAAAAAAQPTGAPAAPAAAALAAPPPAAAEKGVGKEKDKEKGTEREKAADKAAAAGSGIEVPASSVITLRGHDSEVYICQWNPTANLLASGSGDATARIWNLSTAAGANCQKAVVLKHENIAVTPNHFMMQGKDVTTLDWNGDGSLLATGSYDGFARIWTKEGKLKSTLEQHTGPIFALKWNKRGDMLLSGSVDKTAIVWDAKTGSAKQVFAMHTAPTLDVDWRNNTSFASCSTDKLIHVCKLGEHGAVKTFTGHTDEVNAIRWDPSGRWLASCSDDRTAKVWSLSSDKPAHDFREHEREIYTIRWSPTGTGTANPNLPLLLASASFDKTVRLWDVEVGRCLHKLAKHSEPVYSVAFSPNGKLVATGSFDRWMYIWSAVDGSLIKSFKGSAGIYEVCWDHEGDRVAACFANKTVCVVDIRK

SEQ ID NO: 12430 - protein, 451 aa, Chlamydomonas reinhardtii
MDSDSDDERAAGYVPVLAASMPRAAAAAAVASPAAKQPSNVLQDGVSLYTNELFTDNNGDVLGEGPGLASPSGAAPGSARKGLAAKRQERLQGNAYTPNSLLKNASLRNPGAPASPGMRDSPSSFRPSTLSQTGTATTVETTLVSPNRNSNNQGIAGGVGMVHGLRASYDPNEGQEEPVPSTRYVAPAAVPVARAVPQLDLSDMPAFLQQPGPKNGPVQCVIVRDRGSAKMYPRYSLFLEEGRRFLLSARKRKKQTTSNYIISMDYEDLSRESGSFFGKVRANFVGTEFTVYDRGVKAGKKDAQGDGQREELGAVTYQYNVLGTRGPRKMMAAIPGVDGSGRRMFNPSGDADTILERLKHRKGLEELVVMGNKPPRWNDELNAYCLNFNGRVTEASVKNFQLVSDDNHNHVILQFGKVGKDTFTMDYQWPISAFQAFAICMSSFDNKLACE

SEQ ID NO: 12431 - protein, 1249 aa, Chlamydomonas reinhardtii
MLCSTADRWDALMIVIGTIAALGNGALLPLVAIFFGNFTDTFGSPGSGNFMSSVTDVTLKFLYLAAGAAVGSYLECCLWMYTGNRQANRLRTRFLRAVLHQDVAFFDVHSTTGGLVQGLNEDSIDVQNAISEKLGAFLHHSATFVVGLVIGFTKGWEMALVMVGCMPFTAAIGGVLAKGTEKATAASSKAYAEASAIAQQNISQIRTVAAYNREQAAMQQYGKALELPRKMGLRQSWVSGLSFGGINMVVYGTYAVGLIFGAYRIAAGAYTGGQVLMVMVSTLMGGFALGQAAPNLEYFAKGRSAGGRMFRVIDRQPTIGAELLEEEQPPASVRGEVQLIDVDFAYPSRPDVLLFDRFNLHVPAGKTVALVGSSGSGKSTVVQLIERFYDPLAGTVTLDGMDLRSLPLRWLRNQVGLVSQEPTLFATTIYENIAIGTKNASAEEVEAAARAANAHTFISNLPQGYETQVGERGVQLSGGQKQRIAIARAILKSPKVMLLDEATSALDTRSEALVQAALDRLVVGRTTVVVAHRLSTIKNADSIAVVQGGRIVEQGTHEELLRDPDGAYSVLVKLQMEAKQLQQAAEEAGEVGAAHAVEEGAEEESSDAPERLGAVAAGAAPPPAAAGRAAALVDTLADGGVGVEADDRKEESETPYEVPFKRLLKYAEGEYLVIAIGCIASAVSGAQHPAFGFTFASMIAIFYISDMLISRASFYCWMFLVIAVAAFLSAVVQQVAFGRVAQAVSGRVRVQLFGSILRQEVAWFDEVKHSSGKLTANLATDAAHVRGAVGDVAGVAFQNISTLVLGYLIAFAYDWRMALLITGVFPLIIVSMVIHLKFHTGFTSDADKLYAGANQMVTEAFSSIRVIHAYNLQGFIAGSYEKMISHANGLLVRQSNVSGLSFAYSNFVMFGMYCLIIYFMGQEINHGWTDFEGSLKAYLVIMLAAMGMAQATRTFPDLGNAKAAVQRIFPIMDRKPVIDSSAEGGKEPDASSISGEIEFRDVRFAYPSRPSVIIFNNFNLTMTAGCVTALVGESGSGKSTVVGLIERFYDPLAGSVLLDGMDVRDYNLRYLRAQIGLVSQEPLLFNGTVADNIRIGKPDATQAELQAAAEAANALAFIEALPEKYNTNVGEGGIQLSGGQKQRVAIARAVVKNPKLLLLDEATSALDARSEAVVQAALDRIMLGRTSIVIAHRLSTIRHANTIAVVYRGQVLEKGTHDELMALDGSYARLVAAQSREPANGAGAKKHKK

SEQ ID NO: 12432 - protein, 384 aa, Chlamydomonas reinhardtii
MRFPTLPHPLSTTAQIANLGLSPETMDALANRGIFSLFPVQAQVLEPIASGRDVVCRAKTGSGKTLAFALPVVENLLEVSGLRRPRTRPRKGRSPRCVVLAPTRELANQVSREFESVCPALKVDSFYGGVSISAQMRSLERGVDVVVGTPGRVIDLMQRGSLKLDAVRYAILDEADSMLDMGFEQDMETILGAMPTAAANERQTLLFSATLPKWVKSVAKRYQQNPLTIDLVGEENTGRLADTIRLLVQQVEGAQKMSALQGVLSMYGNTAGGGKAIIFVNTKAKADEVNLAVNEFAPCDALHGDISQAQREKALSLFREGKYAALVATDVAARGLDIPNVDLVVHYDVPQDNEAFLHRSGRTGRAGKTGTAVVLFTDRESRAL

SEQ ID NO: 12433 - protein, 764 aa, Chlamydomonas reinhardtii
MKRNTSNVDTGGVPAPLNSTPSTRLIQNGYGDSKYETERMEFPFPEDPRYHPRDSVKGAWEKVKEDHHHRVATYNWVDWLAFFIPCVRWLRTYRRSYLLNDIVAGISVGFMVVPQGLSYANLAGLPSVYGLYGAFLPCIVYSLVGSSRQLAVGPVAVTSLLLGTKLKDILPEAAGISNPNIPGSPELDAVQEKYNRLAIQLAFLVACLYTGVGIFRLGFVTNFLSHAVIGGFTSGAAITIGLSQVKYILGISIPRQDRLQDQAKTYVDNMHNMKWQEFIMGTTFLFLLVLFKEVGKRSKRFKWLRPIGPLTVCIIGLCAVYVGNVQNKGIKIIGAIKAGLPAPTVSWWFPMPEISQLFPTAIVVMLVDLLESTSIARALARKNKYELHANQEIVGLGLANFAGAIFNCYTTTGSFSRSAVNNESGAKTGLACFITAWVVGFVLIFLTPVFAHLPYCTLGAIIVSSIVGLLEYEQAIYLWKVNKLDWLVWMASFLGVLFISVEIGLGIAIGLAILIVIYESAFPNTALVGRIPGTTIWRNIKQYPNAQLAPGLLVFRIDAPIYFANIQWIKERLEGFASAHRVWSQEHGVPLEYVILDFSPVTHIDATGLHTLETIVETLAGHGTQVVLANPSQEIIALMRRGGLFDMIGRDYVFITVNEAVTFCSRQMAERGYAVKEDNTSSYPHFGSRRTPGALPAPSSQLDSSPPTSVTESTSGTPAAGTYSSIGGAVPAVAGHTAAGNGGSHSPSAQPGVQLTTTGSQRQQ

SEQ ID NO: 12434 - protein, 461 aa, Chlamydomonas reinhardtii
MESSAQARLAVLSRQFAPVAEGMQSLSLQTCSAGDSAAYERRNTADDDVVIVASLRTPLTKAKRGGLRDTDAADLLSTLFKAVLERTGVEPQAIGDIVIGSVLGPSSQRANECRIASFFAGIPDVVPVRTVNRQCSSGLQAIADVAAAIKAGFYTVGLAGGVETMSSNPMAWEGGINPRVGDFPGAASCMLPMGVTSENVAAKYGVDRKTQDEFAVRSHKKAAAARAAGKFKDEIVPVATKLVDPKTGAETKITISEDDGIRGSTTMETLGALKAVFKKNGTTTAGNSSQVTDGAAVALMMTRAEATRRGLPILGVFRAFAAVGVDPAIMGVGPAVAIPAAVARAGLSLDDIDVFEINEAFASQAFYSITKLGLDEAKVNPNGGAIALGHPLGATGARCTATLLHEMRRRGRAARFGVVSMCIGSGMGAAAVFEAGGETDALATARAVAGPQQLLSKDAVV

SEQ ID NO: 12435 - protein, 1244 aa, Chlamydomonas reinhardtii
MVIGAIGALGNGTLLPLFAILFGEFTDAFGDPDSGHFMKTVSNLALKFLYLGLGAIVASYLEAGVWMYTGNRQANRLRTRFLRAVLHQDVAFFDVHSTTGGLVQGLNEDSIDVQNAISEKLGAFLHHSSTFITGYVIGFVKGWEMSLVMIGCMPFMALIGGLLAKGTEMANAAASKAYADASAIAQQNISQIRTVAAYNREQAAMQQYDKALELPRKMGIRQSWLSGLSFGSVQLVFYGTYAVGLFFGAYRIVAGAYTGGQVLMVLVSTLMGGFSLGQAAPNLQYFAKGRSAGGRMFRVIDRQPTIGAELLEEEQPPASVRGEVQLIDVDFAYPSRPDVLLFDRFNLHVPAGNTVALVGSSGSGKSTVVQLIERFYDPLAGTVTLDGMDLRSLPLRWLRNQVGLVSQEPTLFATTIYENIAIGTKNASAEEVEAAARAANAHTFISNLPQGYETQVGERGVQLSGGQKQRIAIARAILKSPKVMLLDEATSALDTRSEALVQAALDRLVVGRTTVVVAHRLSTIKNADSIAVVQGGRIVEQGTHEELLRDPDGAYSVLVKLQMEAKQLQEHRQGSAPPDAVAVAIPNAVHSNGLHDAAAPNSKLSIDKPSFPRSGPSAGSAITPGGKKKGGKEGKEEEKAKEKPYKVPFKRLLKYAEGEYTAAFIGCIASAASGAQHPAFAFTVASMISIFYTDDMDELKSKASFYCWMFFVIAVSAFIALSVQQVAFGRVAQAVSGRVRVQLFGSILRQEVAWFDDADHSSGKLTANLATDATYVRGAVGDVFAVAFSNLSTLVLGYLVAFAYDWRMALLITGVFPFLMLSMVIHLKFHTGFTSDADKLYAGANQMVTEAFSSIRVIHAYNLQGFIAGSYEKMISHANGLLVRQSNVSGLSFAYSNFIMFGMYSLIIYFMGQEINHGWTNFNDSLKAFMSILLAAMGMAQASMAFPDLGNAKAAVQRIFPIIDRKPPIDSASPDGKQPDTSSISGEIEFRDVRFAYPSRPSVIIFNNFNLTMTAGCVTALVGESGSGKSTVVGLIERFYDPLAGSVLLDGMDVRDYNLRYLRAQIGLVSQEPLLFNGTVADNIRIGKPDATQEELQAAAEAANARTFIEALPEKYNTRVGEGGIQLSGGQKQRVAIARAVVKNPKVMLLDEATSALDARSEAVVQAALDRIMLGRTSIVIAHRLSTIRHANTIAVVYRGQVLEKGTHDELMALDGSYARLVAAQSREPANGAGKDRKFAGKAK

SEQ ID NO: 12436 - protein, 888 aa, Chlamydomonas reinhardtii
MAFLADGVHYQDINQGSLGNCWLLSSLACLATRSGAIERLFLTPEYNEDGRYQLRLWDKGSRQFKEVVIDDYIPVWRQNGGGGTAGQPCFARPSGNEAWVLLLEKAMAKHVGNYHYLNGGMASWALETLTGHYTCVFLLERRYGPNRDAGPDQANWKWIRGELAQASKHADRIAPVGESRPSPLNRAALYMLDEKDPAKFYAHEELFMAISYHLAIGNLVAAATVGTDDDEEVNGVVRAHAYTVLKAQPVESNGRGQVLLVQLRNPHGEGGIEWSGDWSDKSTLWAKHREVAEAVGYSPPVSVTSAAARSDGLFWMEWKDFMQHFKEVTFCCANGFDYVEDEAAGWVEVFNDPGFPHDYRSLGDYKFIYNNNPMTGQQLDEIIKWMRLKDIAAPEQFRKGTRGLKLFTGGGTHPDDIDGSSSGLMVAVACLANKPGAIEEMFLAGKVYRPDGSYQVRLYDPKSGGATISPIDDWIPCFNGNSITKTKILGNEVWVLLLEKAVARMVSSYSKVAMWGVQVCWALAALTGQYSTMLLWAEDKQKWRRLELQYIEKEPGKYRAEYAADDVSLYVSDDVFKAITTQLALGCLMAAETDKGEAVDTEATGLARARSYSVMDARFVAINGTGGVVSVSYAATVPPAGGRNLRLIKLRDPARTNEWKGDWSDASPQWDTYAGVAEALEFRREGAAGGGGAGTSGRRDGSFWMTFEDFLRHFRNVTMCGNSLKGNQKPWVAKPEDIDRAGRRLWELRKQQELRAEQEALEDSLHAELRKKAVERANAPSVGHVFAQAAIMASANAPKRELPPPPPPPPAVAAGAAAAAAAAGAPAAKPAAPAAAAQPQNGDGGDGAGAAAAAGAAAAGGAAAAGAAASKPPVVVVEYKGCKACAIM

SEQ ID NO: 12437 - protein, 346 aa, Chlamydomonas reinhardtii
MQTVRAPAASGVATRVAGRRMCRPVAATKASTAVTTDMSKRTVPTKLEEGEMPLNTYSNKAPFKAKVRSVEKITGPKATGETCHIIIETEGKIPFWEGQSYGVIPPGTKINSKGKEVPHGTRLYSIASSRYGDDFDGQTASLCVRRAVYVDPETGKEDPAKKGLCSNFLCDATPGTEISMTGPTGKVLLLPADANAPLICVATGTGIAPFRSFWRRCFIENVPSYKFTGLFWLFMGVANSDAKLYDEELQAIAKAYPGQFRLDYALSREQNNRKGGKMYIQDKVEEYADEIFDLLDNGAHMYFCGLKGMMPGIQDMLERVAKEKGLNYEEWVEGLKHKNQWHVEVY

SEQ ID NO: 12438 - protein, 289 aa, Chlamydomonas reinhardtii
MAAEPDPMRETGRYERVQSLGKGAFGFVQLGRNLQNGELAAIKFLKRGDVNKYVESEILNHSVLRHPHVIQFKEVFLTSEYIAIAMEYATGGSLFHYVQKQTRLKEAVARWFFQQLIIGVDYCHKRGVANRDIKLENTLLQKVNGLPLPLLKICDFGYSKADFKSAAKSKRAGRGCVGAWGHWGTGAVWEQPGAAGRVADIWSCGVMLYVMFYGRYPFETPAGSAMPKATEILAMLDNMRYELSPHVEISDQGKDLLRKMLLPDPKQRITLEAVMTHPWFTTNLPPEVR

SEQ ID NO: 12439 - protein, 539 aa, Chlamydomonas reinhardtii
MSGDFGSEPLGSCSVETVTALLGYGLEQDSITALCQPEGGAGCTSTDNCMFQYLMGATADAQSTASDVGVGLDVSFLLFSGYLVFVMQLGFAVLCAGSIRSKNCMNILLKNMLDACVGAIGFYVFGYAFAYGRKYGQNSNGFIGNWNFALSYTTQTSMSGTEFTTFGWHQFFFQWSFCAATTTIVSGAVAERCTFMAYMIYAFFLSSFVYPVIVHWVWDGQGWLSAFNTFQDGYALILKTGAIDFAGSGVVHMTGGIAALMGAWIMGPRVGRFANDGTVNEMRGHSSTLVVMGTFLLWFGWFGFNPGSNLVVASQAAATVVSRVAVTTALAGGAGGISMLFYKFLTVKAWDVVATCNGILAGLVAVTASCSVIEPWAAIITGAIGAIIFSIADYVTLYKLKVDDPVSAFALHGAVGAWGVLFPGFLAAPHYVVEVYGAYGFGMDAREGKRFGLFYGGHGQVLLVQLIEVLAIFGWTGFMMGSFFFILNKAGLLRVPLQEEMAGLDAANYSKSVGSKDPSVHCTVGVDKLEGGALGEGKA

SEQ ID NO: 12440 - protein, 322 aa, Chlamydomonas reinhardtii
MADSQPTEPATGSNPNTHFFRPNDGIYVSEGAEHRTICVSPHLPPSMSRNGTDWHVEQFELHKELYRGKTSLLYMATDRISGVQVALKLYRKRKLSVLNRYQVEREVRLHINLHHENIIHLFAAFEDEKHVYMVQEFAVCGDLFEDLKKGGGQLKEKYAVRDVIVPFLSALSYLHGMGIIHRDIKPENILLGANKTIKVADFGLSINIHHERPVTRAGTLDYMAPERLMISSVGQRAQVDSWAVGILAYELLVGYPPFEQESRAATYEHIMYKEAKFPSWMSEEARRFIGLALCKNASQRPTIADLLTHAWVQPYLVRHPPG

SEQ ID NO: 12441 - protein, 416 aa, Chlamydomonas reinhardtii
MGACCSQPSEKYEVQGQSSKPKPATGSGAKAAAKQPATPDFGLQTTHEVIKLLGRGGEGETWLCRDKETNAEVAIKLIKRPIPKPAIQVIKREIKIQADLGQGHLNIVSADEVILSKTYLGLIMEYVPGGNMVSYVTKKRETKSERAGLCIDEDEARYFFIQLVSAVEYCHRNNVAHRDLKLDNTLLDNHVPSWLKLCDFGFAKHWQANSNMDTMRIGTPEYMGPELISSRTGYDGKKVDVWAAGVLLYVMLVGMFPFETQDDNFNNTAGLYDIWLQQIKTSWREVPNNTSAASRLTPELKDLLDKMFDVKQESRASIETIKNHPWFKKPLPEPYESSLKELQEEQRSIDEQVSKGAFQSAERDKALEALLDRAVTPSLPSEEVTRLSLSKIKRAYSILKGKGNAGAGMAAVVEED

SEQ ID NO: 12442 - protein, 303 aa, Chlamydomonas reinhardtii
GKTTLGFIGIGIMGLAMTRNLLKAGYQVVVWNRNPDKCAALAAEGAKVASTPQEVAAAATYTFAMLSDPEAALDVANRPDGVAAGMAPGKGYVDVSTVDAATSQAVAAAVRARGGAFLEAPVSGSKGPAEQGKLIFLTAGDQALFNAVSGPLDAMGKAKFFLGAEGAGANMKLVVNMVMGSMMTAFAEGLALADKVGLRQQDVIDVVGLGAIAAPMFALKGPAMAARAYAPAFPLKHQQKDMRLALALGDEVGQPLPLAAASNAQYIAARRQGLGDADFSAVMEAVLGQAAAEATEAHNKAAK

SEQ ID NO: 12443 - protein, 72 aa, Chlamydomonas reinhardtii
QVQGCTRRMQNEKQYYRRYGVCENHLRALELLVDGRMQRFCQQCGKFQDITEFDDVKRSCRTQLARHSLRRR

SEQ ID NO: 12444 - protein, 875 aa, Chlamydomonas reinhardtii
MWWFAGRLIIVSNHLPLRVKRATTSWEFEWDEDALVGQAKATGGIPSDLEVMYVGSLPVDVALEEQDAVAAQLKRLYNCCPVFMEKELKEKFYKGCCKQQMWPLFHYVLPMSPESSGRFDQEMWQAYVKANKAEAGDTVSCGWRGTWAVGSPHAHTLSLPRVLFQYMCAQQPLNCPSSLPLTTPSHSPPSPRPPLNTLTLLLPTGFHTFDYARHFLSCCSRMLGLEHETSRGSITIDYYGRTVGIKIMPTGVNPKRYLDGFSWDEFNGRGGWWVVATQGWVNHAAGSPWDSQKGVELKLLALERLLDTHPEWRGQLVLVQITNPPRSTGRDIAELHRCVLGLVDSINRKYGKGSYQPVQYLERHVPLHERMAFYSIADCAVVTATRDGMNLVPYEYVVCRQGPDGWDGGAAAGGAPGGGGSKRESMLVVSEFVGCSPSLSGAIRVNPWSVDRGERAGRVVYPSPTGGGRARGHVATRMVSFHPFVSTVAHRASVSPHRANGVTNNHLAMNCYRLGLGLDTFPMVALDANFKRLEELAVAAQLRKLGSHFRAFFLDYDGTLTGASPLSASAAASAASSSSGLTAGGHHGPGGLAPAEPLLAVLRALVADPRNRVFLFSSSPKADLTQWFASIPSLGLVAENGFFLRAIGSAAWETAVPHADFSWKRMAAPILQQYVESTDGSSVEAKESALVWHYRDADPDFGAWQAKELLDHLEGALSNKPVEIVGGQGYVEIKPQGVSKGRALERLLAAASAPASAPAAPAAAAAAASPPPAPSPSSSPAHGGLVGPRPAGAGSAAGGLGGPDFMLCVGDDRSDEDMYTSIENMKSLPTMTAEVFACTVGQKPSRAPFYLNDPVEVLQLLARLVNVPLTQQPVN

SEQ ID NO: 12445 - protein, 410 aa, Chlamydomonas reinhardtii
MSSCVVCAAAAVVWCQNDKALLCKDCDVRIHTSNAVAARHTRFVPCQGCNKAGAALYCKCDAAHMCEACHSSNPLAATHETEPVAPLPSVEQGAAPEPQVLNMPCESVAQSAASPAAWFVDDEKMGTTSFFDAPAVLSPSGSEAVVPVMSAPIEDEFAFAAAPATFKEIKDKLEFEALDLDNNWLDMGFDFTDILSDGPSDVGLVPTFDAVDEAADAVADAIVPTFEEEQPQLQQQEPLVLAPAPEESAASRKRAAAEEAAEEPAAKVPALTHQALLQAQAAAFQAVPQASALFFQPQMLAALPHLPLLQQPMMPAAVAPAPVPKSGSAAASAALAAGANLTREQRVARYREKRKNRSFAKTIRYASRKAYAEIRPRIKGRFAKKEEIEAWKAAHGGDDAIVPEVLDAEC

SEQ ID NO: 12446 - protein, 691 aa, Chlamydomonas reinhardtii
VTWRRVSGTLYFPTGKTPRLLQGVLESGPFLGALAAVAAARGGELLLDLIVSDDSAGSGAYTFQFFKHGCWQAVVVDNYLPCLADEERLAFACSAVVGELWPSLLEKAYAKVHGSYYALAGGSVHEALVDLTGGVGFKVKTDTPEGQAAAADGGLWTDLLAWLGSKSIIGAVAKRAAPARQRFRPDVIPESEEGATTSEALAQEFAEGFEGSGEEGEQQGPYGLMYGQPYNVLEARAVNDNIRLGSGEWDYPAMAGKLDSFADSWEDEATFWMSFDDFVAFFNRLHVCRMFPPTWHQLTLHCGWQGPSAGGPYHLPPPEPTFGGGGAASSAAERSGGEASSTNGGAAAQLFRMTVKKAAEVVVCLGQQDPTVAHRCHVPKRHRKRAIGLQILKVPLDSLGRRWEVRAGEVVASLSPCTSRELCATFRASPDFAYVVVPHAGRAGEEGAFVLRTLSSSPLEVEQLPAPLCLVVVASLTRLDLKYAIIKASRDPALDLDLALGGAPSNEEAVLAVTLEPETPYLLVPSLAAPGVEAPYELRLMSAVPLELVPLPEMQTVQLAGEWTTETAGGCNVNPLWRRNPKFHIVLSNFGRVCITLARAPGKRARHPVDDMLGLYILRAAGQDGEIKGDPRRAVVAESTFVPQPDTTAEYELNGGCHYVIMPCTYGPGRTGRFSLAVSSGTGFQLRSLQN

SEQ ID NO: 12447 - protein, 521 aa, Chlamydomonas reinhardtii
MRKEATRLVSALLRAGNNGVSTSWAVGGTRLKSAMPQPDEKKDEDLHAKEGKVLHPHLLNENVVKTQYAVRGELYLRAEQLRKEGKEIIFTNVGNPHALGAKPLTFTRQVLALCAAPFLLDHPKVEDMFPADAIARAKKILASFKGGVGAYTDSRGNPLVREEVARFIEKRDGVPSNPDHIFLTDGASVAVRLCLNAMIRHDRDSVLVPIPQYPLYSASIRLYGGTLVGYFLDERRGWGLSVEELQRALQEAREEGKLVRGLVFINPGNPTGQCLSKENLQELIKFAYQEKIVLMADEVYQENVYQDERPFVSAKKVMWEMGEPYRSHVELLSFHTVSKGTAGECGLRGGYVEMTNIHPGAIEEVYKCASINLSPNTMGQIALSVLVNPPKPGDPSYDQYTKEKASELVSLRRRAHMVTDGFNALDGVTCNFTEGAMYSFPQIKLPAKALEAAKAAGKAGDVFYCLKLLEATGISTVPGSGFGQEEGTFHLRTTILPREEVMTHFVEKFDKFHKDFMKQYS

SEQ ID NO: 12448 - protein, 545 aa, Chlamydomonas reinhardtii
MPVIAPACPILRGRAVATSSAPVARKRSALRGAVIAKAATVDAPRKFQQPGQGVKQVNVVYKFGGSSVRDAERMREVADIICSFPQYLPCVVLSAMGKTTNMLLECGELALKTPTDQIGDLAPLKNIRKLHLDTCDELGVEAAVRTEVDRMVNELQQLLIGISIMQDLTPRAKDSLVSFGERLSTRIFASYMRVNGVAARQHDAWELGMTTTDDFTNADVIYEASLPAIKKALAPAPGTAQPEVPIVTGFLGRGQNTGAVTTLGRGGSDLTATVLGAALELPEVQVWKDVDGVLTSDPRIVPSTKPVNELTFEEATELAYFGAQVLHPQAMQPAIRSGKMNVRVKNSYNRTAPGTIISATRPMDCTVVTSIVLKSNVTLVDIISTRMMGQYGFLSTVFDAFRRHKISVDVVATSEVSVSLTLDPKKVAGAVEDELTQLSQELEKIAAVSFRKNLAILSLICNVEKTSEILMRAFSVFQRENINVLMMSQGASKTNISLVVDGARGVEAVQALHREFFDGPSVCSTNSGVTVGLGNGNGNGNGSHN

SEQ ID NO: 12449 - protein, 293 aa, Chlamydomonas reinhardtii
MDKFEPVADLGSGNFGVAKLMRDRASGQLVAIKFIERGERVDRNVEREICNHRMLNHPNIVAFMEVFLTPSHLGIVMEYAAGGELFERIVRAGRFSEDEARYFFQQLISGVDYCHASGVCHRDLKLENTLLDGNPAPRLKICDFGYSKSAFDSQPKSTVGTPAYIAPEVLQRKEYNGQPADVWSCGVTLYVMLVGAYPFEDPADPRNFRKTIQRIMNVKYSFPPQLAISAECADLIGRIFVANPAQRIAIADIRRHPWFLKNLPAELADPNNFSRSPEPHQSLDEIRALIRAA

SEQ ID NO: 12450 - protein, 67 aa, Chlamydomonas reinhardtii
VARGQVAGCAESLLDCKPYFKRHLVCQTHAILPVVVLDGVEMRFCQQCAKFERLTAFDSGNRQVGLL

SEQ ID NO: 12451 - protein, 317 aa, Chlamydomonas reinhardtii
GYNQSAEFFLSNYRLGKTLGIGSFGKVKVAEHVLTGHKVAIKILNRRKIQQMEMEEKVRREIKILRLFMHPHIIRLYEVIETPSDIYVVMEYVKVRRGWGVWEGGGRVCAYGGGYCHRNMVVHRDLKPENLLLDAKMNVKIADFGLSNIMRDGHFLKTSCGSPNYAAPEVISGKLYAGPEVDVWSCGVILYALLCGSLPFDDENIPNLFKKIKGGIYNLPSHLSPGARDLIPRMLLVDPLKRITIPEIRQHPWFNMHLPRYLAVMQAEPVVGVPRIDEEILEEVVRLGFDRDGLLDSLRSRAANKATVTYYLMTDNR

SEQ ID NO: 12452 - protein, 925 aa, Chlamydomonas reinhardtii
MSFDTKKATEKVNNVLGEAINLAKEDKHAALTPTHLAVVLFEEPHGLAKVAATKVAGEEVWRSAIRVLRKRLTKLPKVDPAPESVSPGRELSKVLTAAAKLQKDRGDAFLGTDTLLTAVINAAEVSEALGEAGISKAQLETALSEVRQAAGGGPINSETADANFDALAKYGTDLTANAARADPVIGRDDEIRRVVRVLCRRTKNNPVLIGEPGVGKTAIVEGLAQRIVKNDVPETLQGVRLISLDMGSLVAGAKYRGEFEERLKAVLNEVAQQQGKVVLFIDELHLVLGAGKSGDGAMDAANLLKPMLARGELRCIGATTLGEYREHIEKDAAFERRFQQVLVKEPSVPDTIAILRGIKDRYETHHGVHITDRALVVAAELSDRYITTRFLPDKAIDLVDEACANMRVQLDSKPEQLDALERQRQRLQVEAAALAKEKDALSKARAKEVGKELAALEEALRPLQMKYAQEKARLEELRRLGQKRDEILVNIQIAEQHGNLARIADLRYGALPDVEDRIKQVRAAAPSDAMLSEEVGTEEIAVVVSRWTGIPVNRLKQTERDKLLSLRSELQQRVVGQDAAVAAVADAVLRSRAGLAARGRGSSFLFLGPTGVGKTELAKALAQLLFDDEKMMIRIDMGEYMEKHSVSRLIGAPPGYVGHEQGGQLTEAVRRRPYSVVLFDEVEKAHAEVFNVLLSILDDGRVTDSKGRTVNFANTVIILTSNLGAEALLHAAHDVLAHPGKAAAGQDPYKAARESVLAAVRRFFRPEFLNRLDDIVVFEPLRPEQLVDIARLMGNELAARLTPRNITLTFTEPALQFAVSHAYDPAYGARPLRRWMEQKVVTQLSRMVVGGDLPDNSNVEVGLAEGGRDFDYRVWPKPAAEAGGGNGSGAATEALLKKARMYSVEHPDEGEDSMDEGDDVGAMRD

SEQ ID NO: 12453 - protein, 292 aa, Chlamydomonas reinhardtii
MADAKLNVGFLGLGIMGEAMARNLMKSGLFASVTVWNRTLAKCQTLVSEGAKMAETPAAVVSSCDITFAMLADPDAALAAVFSDNGVLKGISAGKGYVDMSTVDEATSTKIGEAVTAAGGRFVEGPVSGSKKPAIDGQLIIMGAGDKELYEQCQVGLCGFVGKCTAVCVAGRKWDAECGDVGGGGGGPGGGNLGRGGEASGLEQSALLEILGLGAMANPMFAMKGPAIMGRAYPPAFPLKHQQKDLRLALALGDALNQPLPVAAAANESFKTAKALGRGDEDFAAVYEATQK

SEQ ID NO: 12454 - protein, 641 aa, Chlamydomonas reinhardtii
MMHLDAKAKHSLLALDAASLGLALPGTSPPAAPLPVPGVKPPGAAGVAALPPGSLPFGAATQFGQVPFFAGLPFPLPGGVPPPLPGLPPLSSAAAHAAAAMTIAQAAAAAEAAPGKGRIGAIAASAAAATDPNIAVPTPPIAASPPTEPSDGSSPATSHGSKDGAAGDAVKTEPGANTAAPGGALSSLGAIAAAAQAATAGMAVPPSLWLGQPGSAGSAFQALAMPMPPFPPNLARTSVGGDGSVQPGTSAPAHSDAPSAPAPSGRPPLAPGMPGNLPSSLADHPAAGICSTSYRSSGSHLGMPGGALGASPPSLGTSPAAIKLPGRRRTSSTNLLSSSLGAKASSSVPSLSVKPDKSGACKYRGVRQRPWGKYAAEIRDPHKGCRLWLGTYDTAEEAALAYDKAAREIRGPRAVVNFPNVNHANLPAPQPHGDDESGAWDPLGTTSLGTSPVSSGFIPGSSPLMGGSAPVRHGMHPHHHLHGGAFSHHPGVAPSSGLGLRSTFGGYPVRREPTEPIAEGESDVDMDDGEEGEDGDGDDMDEGVGPRSGRARMKVNVVTGVGGRTRPSRPAAAAAVAAAAAAAAGGGVDLEDSDGAPPPPQPSMAGGASRGGGGKRNQVSMDVEDELAELADALLLLHESA

SEQ ID NO: 12455 - protein, 76 aa, Chlamydomonas reinhardtii
LQGCGLPLADAKLYLRRYSVCEAHFKAEYVLLSGGRYRFCQQCNKFQPLDNFNGSRRSCKARSEDRNLRRRKQRTD

SEQ ID NO: 12456 - protein, 312 aa, Chlamydomonas reinhardtii
MERFQVIQSLGSGSFGTVRLVKDVAAEKLLAMKVLNRRDASKYVEAEIVNHSLLRHPHIVHFREVFLTDEHLCIVMEYANGGSLFSMVRQQRRLKESMARWFFQQLILAVDYCHKRGVANRDIKLENLLLHLEEGLPHPLLKMCDFGYSKADFRSAAKSQVGTLSYMAPEVMKSCGAYYDAKIADVWSCGVVLYVMLYGIYPFDNQGEDAGLSEAQKVRKMLERMENEAYALNPQVPVTEECIDMLRGLLKPAPESRFTIDKIMEHPWFNKKLPPQAREMNVYYLNLPVPPEYQRPEQIKSLLEEARAVGGR

SEQ ID NO: 12457 - protein, 177 aa, Chlamydomonas reinhardtii
MAMPPAAPSSWSTGFCDCCAPPGGFGICLYAWCCGCCMYGTTVEMMPPVVCCGGSCVGACCAYLGMTFIGCPCILQMMSRGWLRAKYGIPGDGCTDCCLTCWCSPCAMCQEYRECKIRGLGPGGVELNKQQPAVAPQQQMVAVPAPYPYPPGQQYPPQQGYPPQQAYPPQQAYLPQQ

SEQ ID NO: 12458 - protein, 336 aa, Chlamydomonas reinhardtii
MLSAYLERLGRGVFCGLCVCCSCTYKDSKFPHDHRSIGTFKGRTGPELDKEITWRRIGDICAAAAPQPKKGGASGSKPKPTARLFADDIEPSDICQGQLGDCWLMSALACLACQQGAIQQVFDTREYTQYGRYKMRLYDGARKKWRTVTIDDWIPCGADGQPMFAKPKGDEAWGGNYASLDGNLMIKALEMLTGDFVCMFRLGDTRDAKSRGKPRTEQRWTRLELSRGPPPKDAAPGDDLRLVYARDEPFDSELMFRSISWELRHGSTIGASNAGGKDTENIHGIVQGHAYALMKADEADGKKFLQLRNPWGTFEWSGPWSDKSPLWDQHPKASGR

SEQ ID NO: 12459 - protein, 487 aa, Chlamydomonas reinhardtii
MPLAELWRLTKLVPLACTVLLLSVRALAVDSGGLNDSADNSSRSLLQESGQASGTSQPYTYSSSDFVLLNGFLIFFMQIGFVSAESGQGRAKNVRNILLKNSVNIMLCAICWWAVGYAFAYGNSGGGFIGTSRFFSDGESFGSKPWFFTWTFCLSCVTIASGCLAERTHLFVYPVYTAVVSIAVHPVIAHWVWAPDSWLNSMTGSPCRFLDFAGGAVVHTVGGLTGLIGAMLCGPRLGRFEDGVGKDIPGHDVSSVSLGSLMLWFGWYGFNCGSTYIYMAQGGSEASAAVSRVALNMTLCASVAGMTSLVVSSIQTGTFDLAVCCNGLMAGLSASTSNVGFLTPWAACITGALAGLLYVGISRLLVRMGVDDPLDSSAIHCGSGILGVLVSGFLARPSYVMQMVGCNCGGVVYATNGGMQLGMQLLGLSCSMVWTAMWALLTFGILKKLQLLRVDQQTELAGIDNMEHGGPAYPEFLQRVQSTRPGY

SEQ ID NO: 12460 - protein, 411 aa, Chlamydomonas reinhardtii
MQIGFVSAESGQGRAKNVRNILLKNSVNIMLCAICWWAVGYAFAYGNSGGGFIGTSRFFSDGESFGSKPWFFTWTFCLSCVTIASGCLAERTHLFVYPVYTAVVSIAVHPVIAHWVWAPDSWLNSMTGSPCRFLDFAGGAVVHTVGGLTGLIGAMLCGPRLGRFEDGVGKDIPGHDVSSVSLGSLMLWFGWYGFNCGSTYIYMAQGGSEASAAVSRVALNMTLCASVAGMTSLVVSSIQTGTFDLAVCCNGLMAGLSASTSNVGFLTPWAACITGALAGLLYVGISRLLVRMGVDDPLDSSAIHCGSGILGVLVSGFLARPSYVMQMVGCNCGGVVYATNGGMQLGMQLLGLSCSMVWTAMWALLTFGILKKLQLLRVDQQTELAGIDNMEHGGPAYPEFLQRVQSTRPGY

SEQ ID NO: 12461 - protein, 416 aa, Chlamydomonas reinhardtii
MLAARAHTLRTGRTCVNRRSTSNIITRVATLERSSATMSVDIPHQPLSVSVGLIGPGLIGKALLRQIEQQAGKLLTPLHADKFNVVAVANSRQMLLRPEGINLATWEADLAEKGEPLDLDRYAACLASASGPLPASLPGPSCSVLVDCTASDAVSGRYADFMRQGLHIVTPNKKFGAGPLKQYHELRDLSERHRRRFMYEATVGAGLPIISTLHGLLETGDKIIKIEGILSGTLSYIFNTYKPGMKFSEVVADAKAKGYTEPDPRDDLSGLDVARKVVILARECGMEVELESMAVESLVPAQLQGEGVSAAQYMEALPQHDGAMASKAAEADAAGGVVRYVGCVDAENGNASVTLRTYPAGHPFAQLSGSDNIVVFTTERYKDRPLIVRGPGAGADVTAAGVFVDLLQVIRSHPRA

SEQ ID NO: 12462 - protein, 429 aa, Chlamydomonas reinhardtii
MNRSLQQLLPRAFSGALGKTLFAAATTQTSRGFATGVPFQTDATGHILPHGGELKNLFVKDAAKQQELIASCKHQQECSDRNACDVELLTVGGFSPLTGFMNVDVYDHVVKNMRLPGSGLIFGLPVVLDTNNEAVKEGDRVLLKYNGQDLGVLEVESKWVPNKAREVKECYRTSSLEHPGVQMVAQERGKFYIGGKLWGFELPKRVFPCATPAEVRALLPAKQDVVVFQCRNPVHRAHYELFTRALHAPNVRPGAVCLVHPTCGPTQDDDIPGIVRYHTYEVLKAELNNPNIKWAYLPYSMHMAGPREAIQHMLIRKNYGCTHFIVGRDMAGSKSCLSGEDFYGIYDAQNFAAEHAAELGMQTVPSADVVYTEEQGYVTADVAKKEGLHVKKLSGTKFRQMLRGGDDIPEWFAFKSVVSVLREHTQKSK

SEQ ID NO: 12463 - protein, 165 aa, Chlamydomonas reinhardtii
MSDHEVETFESADAGASLTYPQQAGTVRKNGYLVISGHPCKVVDVSTSKTGKHGHAKCNFVAIDIFTGKKYEEMTPSSHNVDVPNISRKEYTVIDITDEGIVSMMDESGNTRDDMFLPTGTDESDKLAEIMKEHWANDKEMAVTVVKAMGQEMINSVKVVNDKAA

SEQ ID NO: 12464 - protein, 495 aa, Chlamydomonas reinhardtii
MGCSSSIAAKNQLPESDKSTLERIRTPSGTAEDGPIDPEALWVFEETKELVKEHYAFGRILGKGQFGTCRTVTHKTTGKKYACKTIAKRRLFNMSDVNDVRREVQIMYHLQGHPSIVSIIEVYEDKTNVHIVEELCSGGELFDSIIERGHYSEKDAARAFRHIATVVAHCHNMGVMHRDIKPENFLLSSRDPDALVKGTDFGLGVFFSEGQTFKDVVGSAFYVAPEVLRKKYDKRADIWSLGVLLYLLLAGVPPFYAETEREIFRAVLSAPLDFTSAPWPSVSEAAKDVIRRMLERDPSKRISIADVLAHEWVREDGAARAAPLQHEVLVRLQNFAALNKLQQEALKIIANSLPENEVSGLRSLFMDIDADGSGSITVDELREALMKKGTNIPAEELERIMAQADISGDGTLDYEEFLAATMNLAKLEHEEHLYMAFRFFDANDDGFIDHDELVTALEKVGACICSSAEINELLQQADTSGDGQIDFEEFCHLMR

SEQ ID NO: 12465 - protein, 382 aa, Chlamydomonas reinhardtii
MAAGSVGVFATDEKIGSLLDQSITRHFLSTVTDQQGKICAEYVWIGGSMHDVRSKSRTLSTIPTKPEDLPHWNYDGSSTGQAPGHDSEVYLIPRSIFKDPFRGGDNILVMCDCYEPPKVNPDGTLAAPKPIPTNTRFACAEVMEKAKKEEPWFGIEQEYTLLNAITKWPLGWPKGGYPAPQGPYYCSAGAGVAIGRDVAEVHYRLCLAAGVNISGVNAEVLPSQWEYQVGPCEGITMGDHMWMSRYIMYRVCEMFNVEVSFDPKPIPGDWNGSGGHTNYSTKATRTAPDGWKVIQEHCAKLEARHAVHIAAYGEGNERRLTGKHETSSMSDFSWGVANRGCSIRVGRMVPVEKSGYYEDRRPASNLDAYVVTRLIVETTILL

SEQ ID NO: 12466 - protein, 462 aa, Chlamydomonas reinhardtii
MGEHQIGAPTELDKLDAGFRDSRKTWLCVGKAIFWPIILLVQAVWIYFFGCLFAYGKRLGRGVLCGLCVCCSCTYKDKKFPPTHAAIGAWENKSPEQIDSEIKWRRIGDIVAAGGKSGAKLFAGKIEPADICQGGLGDCWLMSALACLANQEGAVQQVFLTKEYTNYGRYRIRLWDAPNEKWVTLTIDDWIPCNANTGQPVFAKPNGDEAWVLLLEKAMAKFKGSYANLDGGSTMWALEALTGDYVFEFRLEPKLNKWQRREMFHRSNNTGGFDVLLRLTDDALDGDEMFSTMLFYNRKRSFIAASTGSGSDKDNVNGIVQGHAYAVCNVKLVDRFQLVQLRNPWGTFEWDGAWSDKSPLWEQHPKVKRALDFTPGDDGTFWMEWKDFYSYYKCLDFCIRTTGFDDIAIDLHEERLLCGPTIGCVMGCARYWLCCLGIRALFFSRKARHFEKPPAEGGCMGC

SEQ ID NO: 12467 - protein, 1020 aa, Chlamydomonas reinhardtii
MANSCAASGGHDVEDDVQHQPRVPAGYQQASRGAHGGAGAAGRRGDGQQGTVFGGTGGERPSGTAVSGTAGSGGDQDDAVSGARHAAAGGHGRGKDRDGDQSGVQHQVMEALRKLNPDLQGQAIVVVVNPTGSPPPAAAPPAAIVRHGSGVRVMCQVDKCNQAMACQQEQYQRLRICEHHYHALEVQHEGMRQRFCQSCGRLHPVEEFESNMHACRARCGVDSRQRKRLRPDEHADTAECRPAPGMHGRVAMPQQMPRHGAHQVAHHVAHQVAHQVAHQVVQGVMLPASQPPQVPTWDWAMQSDQQRMHAGVPAVEHGQCQDLAAGTPSSTGSAGNAPQKHSGQMALPPLPQPHLPQQGQRGGMLPPQQFHQQQQQPNLASYPSVPPPRRPQMQPTDQPLHRVSSVPAQFQGGESNQHCMQPPAPQQPQNAPVRHLSLSGLPTGAPGSMPLHPNQRVRPSNPTPQLQMQQAPDLPRQYSAPPQQGQVVVQLQPATGAQGEDKLVAFGAPAAGGMAKLILSTVPLDAPAGNAGAGGAQGLMHAPSSRPAGPQQPGQLQAPLRRPSPGVVRPGGTDSHVSTSRGALPQQGGAPALRQSLASGPGRPMAPHHGMQSVNPGGRPGAPQRTTMPPPSSAPAQRQSAPRLAEGRAPSLNLRPSAEATGARVNAVPSQQLMQQLPPPPQQAPTQASAQAGAPMWPAPQQGLPQAAQQHAFIQQQQVQQAQQVQVPQAQRPLEQQQQQQQLPEQQAQPPQEGSLNQDAFCGQAALASEYPQLQSMPMHMDSTEYAYGEQACNGGAPQTADPSPPQPPQPPPPPPPGWQQLPPDQNALYGQGELQYHQPQMQPLFHDGAMQAAGSAAAGNSAVGGAAGEEPTTPRHAGIRAPQVAVMGGGGMAAALAATISGNAAVSSFDNRLGLPRDLRVSINGNYSFGDLHELVTPGSHGLLDSGLVSPNTELFNILNTGNGAEDTLGMGPMLDLLGPGESMYDDTANTSQALLPGPSGAGTAGPSVPPTLPLPPQQ

SEQ ID NO: 12468 - protein, 1318 aa, Chlamydomonas reinhardtii
MEAVEHFSAAFSAQHQGWASSKYAWDPSSLVAVPGPDAARSSPSVEGDHGTDADRDQSLGPTPINWKPAGARNTGAESKSHAARLPKTLVCQVEGCGHDLTGEKGYYQRYRICEPHVKLLTVEVEGRACRFCQQCGRFHELSEFDGTKRSCRARLLLHNARRRKRDPVDASTKEPRSQRKAKATHPRSDDSNDNELDSRGSFGASHGTWPASGAPTSVPVTEADPAATPAVSSGAVPQLMTRAGLNDQSLPLPGFQQPVSQALQSAGYAPAFANTLAVKHEQPELLVSTSGGAAVLGVMMQRESLPLDLAHAFSDEADLPLVDTLKLDDFMLDGLMAMDYIDELPGPRQLMPGYSPMLTGDESMMGVGIMPPTAAMGSAALHAPYMPVSGDVSMSRAVPRTVLNEQSQMQQIADAQRRLLQSAGVLPGPTHQGTFLAEPQQVNDGLNSGMSVCSLGGGGFTSPCSSGMGKPLGSGFSVPPHPSAGSHHMMLSSGVTLNVPSAVPSPINVGPSMAQAQAQMQAQAPFGAVGGGMSSFDMARRLVAGGGAGAQYRSDDFLVRVSIKVANCTPEELPPDLYQRLQSLLATADASLIQGFLRPGCVHLVLDISGGEGLQQALLAARVRSALGPVAQKYATLVQVGEEVAMWAEDAPAAAQPASAARVPELEATGAVPVLLHVSPAAYLCHSTADGSSSASVVVYGSGLVKAGVQLFARMQGGYLPVRVQPLVAEGQLMVQGAEAVAALQDLAQLAQGGRSATDALLVSVEGAPASGLLLLEAQAGPLLSAWRPCLLSVDSAMATELTAAGVQARAAGNDRLQSLESFVTDLGRLVDACSFAKAGTGDAEEEAVSMERLCACEHMLAWASEAGLPAVSSFLVHTLLQYGQELGTVLEAPYADGLSVLHRAVRSRSEAMIRAVLGWAAREGVELSWRGEDAVGQLSPLHLVALVPVAWRVLATEPAVQRAWARERAADGATPALVQQILFSCLQAATNARRASAPVAEVVVAAGAQAAAAQVCAAPRTLETIETAVAPSAAGAVSPATAPTPTRPASILRAVLPLMAVLAALTYASLMHTLQASYLPVVVVTCVLMYALWRLLTTVAARPQHAVLMSMLASPLPPVFSSARLEAAYQMRASMAATQLSRDAAALLVLLAMCAAAARLPDASAFATAVNTCLTLLPLAAMKLSRQGYIRVRDIALTGAYVAMLNAICSTSQSLLADSPRCRCAMLFLAVTTAAGAVAPLNTSGMLFTLAYTVSMAMRAWTQTQGLFGGASSVTAAQACSAAQLAVVAAATAVSFARELAARQQWLAVAGEAASGK

SEQ ID NO: 12469 - protein, 226 aa, Chlamydomonas reinhardtii
MTPTGARSGSVPARDEGALRQQLLAAYHAYHNRSSGAGAYCAHAPEPYAAMASRGDWSTELWDVCSQPGGMNMCCLSLWCPCIQYGMLLEQLPPGSVTCAGSLAGGCALFGALWLLGDMLGAALLTKIFVLPCSALVHTQTRGYIRRKYGIQSHPLHDFFITWCCGPCALCQEAREVVIRQAAEREDVSSRTPVQRMSRPGSVHGEAVFAVEHSDGCNGWVSSLRQ

SEQ ID NO: 12470 - protein, 81 aa, Chlamydomonas reinhardtii
QVEQCGIDLKSAPKTHQRFRLCNTHIKAPVVVVDGVHSRFCQQCSRFHPVDEFNGTNRTCRMMLAKNRARQRSTTSGPGSG

SEQ ID NO: 12471 - protein, 1094 aa, Chlamydomonas reinhardtii
MLSMLGRKGQAMCLRSSRQVPSTRASIARLLAQTPRPNVRANALAGTAPGTSTSGPAEPIKDPIPYANLVVGVPRENAPGERRVALSPAAVAGLLKQGFKTIVVEKGAGEYSQFTDAEYASAGATLVDSTEAMGADIVLRVRPPALEEVNKIKEGAVLVSYLYPARNKELVEALAKRRATAIGMDCIPRTISRAQMFDSLSSMANIAGYRAVTEATQHFERFLNGQITAAGRIPPAKVLVIGGGVAGLAAVGAAKSLGAIVRVFDTRTAVKEQAKSMGAEFLTVDIQEEGESGTGYSKEMSPAFIEAEMKLFAAQAKEVDIIITTALIPGKGAPLLITKDMVDSMKPGSVIVDLSAEAGGNCGYTKPGEVVKTPNRVTVVGYTDMPSRMAGQSSTLYANNISKLLLSAGPFTGGPKGHFRIDHADPVIRGSLVLEDGELRWPPPPGVIPQANTKVNETKDHKKDTGPVDLYEPTKRSALVTTGAVAAALALGATSPSAAFSSMLTKFGLASICGYQTVWGVVPALHSPLMSVTNAVSGLTAVGGMVLAGGGLLPGNTSQALAGLAVAASAINIGGGFTITQRMLDMFKRPTDPVEYNQLYALPAATLVGGYVAASLFMGGTGGDPEGVTSASYLASSAMCIAAIACLANQSSARTGNALGMAGVGTGIATTLGVMNAPAAVYAQVLTMLGAGIATGHYVGKTMKITELPQMVAAFHSLVGLAAVVTSIANVMAADPGHLDMTHKVIAYLGDFIGAVTMTGSAIAFGKLHGVLKSDPLSLPGKNAINLGLFAANLACGAAFLASDGSTDAGVLALVAAGVLAGVQGAHMTASIGGADMPVVITLLNSYSGYALCAEGFLLNNDLLTAVGALIGSSGAILSYIMCTAMNRSLPNVILGGYGMTAKAPADAAAVAGTHQEIDVGGVAEALTTASKVIIVPGYGMAVANAQYPVAELAKHLTDKGISVKFGIHPVAGRMPGQLNVLLAEAGVPYDVVFEMDEINEEIEEADVCLVIGANDTVNSAAVEDPNSVIAGMPVIEVWRSKQVFFMKRTMGAGYAGAENPVFYKPNTFMFLGDAKKQTDALLARVNETLGIKA

SEQ ID NO: 12472 - protein, 88 aa, Chlamydomonas reinhardtii
MLRGSPTLSCPGLYTSQVDGCGRDLSAEKAYLQRYSVCEGHFKAEVAVVHGQEMRFCQQCNKFQDLREFEGSRRSCAARSKDRNMRRR

SEQ ID NO: 12473 - protein, 497 aa, Chlamydomonas reinhardtii
MGCSSSKDEVELAQQVLGAKKAADTKAVRRLSALGLEDGEVWITRQTTDIRKVFKFGQQINKGQFGVIHVVTDAAGNKYACKQISKRKLTGPNSIRDIRREIEIMHHLRGHPSVITFHGVYEDVSDVYMVMELCTGGDLFEKIEKMSTVTERAAAALFRELVECVAYCHTLGVMHRDLKPENFLVTDRTGDARIKLSDFGLSTFFREGQADFADVLGSAYYMAPEVLERSYGKSCDVWSLGVILHVLLSGAPPFAGATDAEIIKAVRSRDVDLSAKPWPAISRHARHLVSRMLEKDPEQRIQLDQVLTHPWLRLDGTAPVRAVPTGVRDRVRQFRTLNLLKREARRVMAASLPPEEVAGLKNLFEELDANADGLVSLEDLVAGLARRGEALAGEEAAALLRSMDLNGDGFIDYREFVAATYTLSKLQQSDVLLKTFRHFDLDGDGYISKEELAAALAQLPAAASSAASARESVTGLLAEADLDKDGRLNYREFCTML

SEQ ID NO: 12474 - protein, 256 aa, Chlamydomonas reinhardtii
GKKLHSFSIGLDKNAPDAAAARKVADFLGTDHHEIHFTIEQGIEILDKLIWHLETYDVTSVRASTPMYFLSKAITDLGVKVVLSGEGADEIFGGYLYFRNAPSTEEFQKETIERVQKLFTADLLRADKSTMAHGLEARVPFLDKAFLDTAMLIKAEEKQPKTYDGVEKYILRKAFDTPDQPYLPQEVLWRQKEQFSDGVGYSWIDTLIEFCSSKVSDEQLEAAAERFPYNTPTTKEAYFYRDIFHKHYPQLSAAQT

SEQ ID NO: 12475 - protein, 224 aa, Chlamydomonas reinhardtii
MARVYVGNLPSGIREEDLETEFVRFGRLRNIWVARKPPGFAFIEMDDLRDAEDAVRALDGMKGWRVEISRNRGPPPGRGGGGGGGGAFRGPPPDRFDDFRRSPPRRRSPSPMRRRSPSPYGRRASPPRRRSPSPPRRRSPSPLRRRSPSPLRRRSPSPIRRRSPSPIRRRSPSPPRRSSPRRDSPVGERRPRSPSPIRERSASPPRRSPPPLRSRSRSRSPVRD

SEQ ID NO: 12476 - protein, 439 aa, Chlamydomonas reinhardtii
MHSQFALLTRSHRLAPTTTPCATRSIAFERNLHYVRSSADNVEPQPVASTSEPDASGLRLRRRLVRPRKPSSQPQEAGKKPTTSKVDLGLAAASGPATKQRKASKPKQQAAREEDDEEALFFADKEKFSKTILDETNPFYQPALTDEDLAEDPPGHRSGYVAVIGKPNAGKSTLINALVGQKLSIVTYKPQTTRHRVMGILSERDYQMILFDTPGVIEKKRTKLEERMMAAVVHSIKESEAIIAVVDSADKPKEALAMFQPGEGWNGPPMAVLLNKADLLSEEQVVFVGSAEHKDGLGALRAWAVSRLPEGPTLYSKPRMTRTRLKSRAVPAERVFLHCEQEVPYCSQVLIKEFTERRTASGQKDFISAEIVVEKESQKGILIGAGGSMLRRIGGAARKEIETFLGRGVYLELSVQVDKDWRDDKEALSKYGYFNPMII

SEQ ID NO: 12477 - protein, 235 aa, Chlamydomonas reinhardtii
FPAGLRLLVVDDDPLCLKVVEQMLRKCSYEVTVCSNATTALNILRDKNTEYDLVLSDVYMPDMDGFRLLELVGLEMDLPVIMMSSNGDTSNVLRGVTHGACDYLIKPVRLEELRNLWQHVVRRRRQRKADAAGQRERRVGPLGGGACVRRVNRAQPSKLNQGHVQRERGRGRVGKAPLLNGSNKKARVVWSVEMHQQFVNAVNQLGIDKAVPKKILEIMGVDGLTRENVASHLQK

SEQ ID NO: 12478 - protein, 733 aa, Chlamydomonas reinhardtii
MRAAVGRDALAAGAAVASPCSTSGRAALLRPLVVAAAPGFRGQASGAAAAAAVPSPSPSPLLAGASSSSPSCSPSCYSQQRQASLLSRRWSSISSTSHRPVATAASGRGDGATVADGAAGSSPASSSSPPRPSAADLSAASAQLLSDDQLRAAGLRLPSHCCGCGMRLQRRDAEAPGYFIIPARLFEPKRDPDADEDGFGRAGRGRGGAGAGAEAGGELGELMKAARQEMDADAEADAYDDVGLVRADEEPDVLCQRCFSLKHSGKVKVQAAETALPDFDLGKKVGRKIHLQKDRRAVVLCVVDMWDFDGSLPRAALRSLLPPGVTSEAAAPEDLKFSLMVAANKFDLLPPQATPARVQQWVRLRLKQAGLPPPDKVFLVSAAKGTGVKDMVQDVRQALGYRGDLWVVGAQNAGKSSLIAAMKRLAGTAGKGEPTIAPVPGTTLGLLQVPGLPLGPKHRAFDTPGVPHGHQLTSRLGLEDVKQVLPSKPLKGRTYRLAPGNTLLIGGGLARLDVVSSPGATLYLTVFVSHHVNLHLGKTEGAEERLPRLVEGGLLTPPDDPARAEQLPPLVPLDVEVEGTDWRRSTVDVAIAGLGWVGVGCAGRAGFRLWTLPGVAVTTHAALIPDMAEMFERPGVSSLLPKAQTRAHAAVKEKKAERAERRGGAGGDGGDGGGGGGEGRVVSRGERGWEAAGAVPAVGRSGGGGGGGRGGRGGGRGGRGRGGRSSGGRGGNS

SEQ ID NO: 12479 - protein, 183 aa, Chlamydomonas reinhardtii
MALISLFSEPIFDAELTPLGLGFASEDAFQHGHERQRKRHTERHTHERDNIATPRDQSWDLSGPTAPMDIVETPSGYELHADAPGLGPRDVKVELHNGVLQISGSRKLHHESKDLRGRLLRRERTAYSFSRAFSLPENANPDGITAAMDKGVLVVTVPKRPHATAGPPAPKRIAVAAAPAAKL

SEQ ID NO: 12480 - protein, 155 aa, Chlamydomonas reinhardtii
MLARVAIGSLSKARQAAAFSPSAVLQRCLATDADSHDDFKPKHAAPATSASVDDQIKASIAKDKGTPDSPQCGFSRMACVVLNAYGVQFGATNVLSDAEVREGIKKFTSWPTIPQVFVNGEFIGGCDILMGMHDKNELEPLLEPIRKEQAAAAKK

SEQ ID NO: 12481 - protein, 157 aa, Chlamydomonas reinhardtii
MALSNYVFGNSAADPFFTEMDRAVNRMINNALGVAPTSAGKAGHTHAPMDIIESPTAFELHADAPGMGPDDVKVELQEGVLMVTGERKLSHTTKEAGGKVWRSERTAYSFSRAFSLPENANPDGITAAMDKGVLVVTVPKREPPAKPEPKRIAVTGA

SEQ ID NO: 12482 - protein, 335 aa, Chlamydomonas reinhardtii
MASPAPSGSPPLVIYSCTDEQMLEVTELVGDSATAAIVCSQYDCSFTAVSCVLKYLAAQQADLSEQMDGTAKAEVALSLDVAFLLFSAYLVFGPMQLGFALLCAGAIRSKNSMNVLMKNILDACTGAIGFYLFGYAFAFGHHANQTSNAFIGDHNFALSYTTQVSSLDSNVSYDGFATQGWHVFFFQWSFCAVGGAGGASAIVVSRVAVTTTLSAGAAGLTGLFWRYMRTSTWDTVLSRDGYALLLQTGAIDFAGGGVVHLTGGMAALMGAWIIGPRIGRFDASGKVNEMKGHSATLVVMGTFLLWLGFYGFNPGSNLTIATTGCATAAWPAWWA

SEQ ID NO: 12483 - protein, 372 aa, Chlamydomonas reinhardtii
MNAAAPDPLKGHGRYAKVQPLSSGSFGFVHLCKNLQTGELVAIKFLERGERVNKYVETEVLNHRMLRHPHVIEFKEVFLTPEYICICMEYASGGNLFGYVQRAVRLKEPAARWFFQQLCIGLDYCHRRGVVNRDIKLENTLLTMVPGLPLPLLKICDFGYSKAHFMSAPKSKVGTLAYMAPEVIRATDQYAGQAADIWSCGVMLYVMLFGAYPFESPQSRHQQGKARMDSMMQRILRMEWSIPADVEVSPECRDLLCKLLVGDPRHRLTMAQIQQHPWFLTNLPPDALAMNDNFLAHTDYTGVQSEEDIKKVLASAAIPAPMSKYAFATGGDDENYEDLDAAIDDEMGHAGAGCKPAAAGRPAGNGGAAPGR

SEQ ID NO: 12484 - protein, 121 aa, Chlamydomonas reinhardtii
MAVAPAQGNWSTGLCDWCGAPGGFGTCLYVMCCTPCSYGSLVARLGPEVTCGGSCFGGCCCYTLLSMLGLNCIIHMGVRGHLRNKYGIPGDGCNDCMCTCCCSACAICQETREVMIRNGGT

SEQ ID NO: 12485 - protein, 436 aa, Chlamydomonas reinhardtii
MAVYIGFKEKAIEFAKQAVTEDEANNYEKALQLYLASLEYFKTYLKYEKNEKCREAVMAKFKEYLARAEYLKGVNGTENGGNNDSGTAAAQKVRKPGQAKDEEDNKEKEKLKAGLTGAILTEKPNVKWDDVAGLEGAKEALKEAVILPVKFPQFFTGKRKPWSGILLYGPPGTGKSYLAKAVATEADSTFFSVSSQDLVSKWLGESEKLVSQLFVLARENAPSIIFIDEVDSLCSTRGDNESEAARRIKTQLMIEINGVGSNNSRVLVLGATNLPYNLDQAIRRRFDKRIYIPLPEEPARSQMFKIHLGDTPNNLTDDDYRELGRRTEGFSGSDINVVVKDVLMQPIRLLREATHFKKVRGPDGGEAWEPCSPGDPGAQELSLNYFAEKNLADKVLPPCITMRDFEKVLLRARPTVGKGDLDVFERFTSEFGEEAS

SEQ ID NO: 12486 - protein, 656 aa, Chlamydomonas reinhardtii
MAQWKAAVLLLALACASYGFGVWAEEEKLGTVIGIDLGTTYSCVGVYKNGRVEIIANDQGNRITPSYVAFTDEERLIGDAAKNQATVNPKRTVYDVKRLIGRKYEDKEVQRDKKLVSYDIVDRQGKPYVAVDVKGEQKVFSPEEISAMILQKMKDTAEAYLGKTVKHAVVTVPAYFNDAQRQATKDAGTISGLNVVRIINEPTAAAIAYGLDKKGGEKNILVFDLGGGTFDVSILTIDNGVFEVISTNGDTHLGGEDFDQRVMEYFIKLIKKKYKKDISGDARALQKLRREAERAKRALSSQHQVRVEIEALYEGIDLSEPLTRARFEELNMDLFKKTMGPVKKAMDDANLKKTEIDEIVLVGGSTRIPKVQDLLREWFDGKEPNKGVNPDEAVAYGAAVQGGILGGEGGDEVKDILLLDVAPLSLGIETVGGVMTKLIPRNTVIPTKKSQTFTTYQDQQTTVSIQVYEGERAMTKDNHKLGQFDLNGIPPAPRGTPQIEVTFEVDANGILNVAAEDKGTGKKEKITITAEKGRLSQDDIERMVKEAEEFAEQDKAVKAKIDARNQLETYCYNMKSTVEDKMKDKIEEEDKEKITAAVKEALEWLDENPDAEPDEYKDKLKEVEDVCNPIIAEVYKKSGGPSDGGDSEDLGDHDEL

SEQ ID NO: 12487 - protein, 763 aa, Chlamydomonas reinhardtii
MLASTYTPCGVRQVAGRTVAVPSSLVAPVAVARSLGLAPYVPVCEPSAALPACQQPSGRRHVQTAATLRADNPSSVAQLVHQNGKGMKVIIAGAGIGGLVLAVALLKQGFQVQVFERDLTAIRGEGKYRGPIQVQSNALAALEAIDPEVAAEVLREGCITGDRINGLCDGLTGEWYVKFDTFHPAVSKGLPVTRVISRLTLQQILAKAVERYGGPGTIQNGCNVTEFTERRNDTTGNNEVTVQLEDGRTFAADVLVGADGIWSKIRKQLIGETKANYSGYTCYTGISDFTPADIDIVGYRVFLGNGQYFVSSDVGNGKMQWYGFHKEPSGGTDPEGSRKARLLQIFGHWNDNVVDLIKATPEEDVLRRDIFDRPPIFTWSKGRVALLGDSAHAMQPNLGQGGCMAIEDAYELAIDLSRAVSDKAGNAAAVDVEGVLRSYQDSRILRVSAIHGMAGMAAFMASTYKCYLGEGWSKWVEGLRIPHPGRVVGRLVMLLTMPSVLEWVLGGNTDHVAPHRTSYCSLGDKPKAFPESRFPEFMNNDASIIRSSHADWLLVAERDAATAAAANVNAATGSSAAAAAAADVNSSCQCKGIYMADSAALVGRCGATSRPALAVDDVHVAESHAQVWRGLAGLPPSSSSASTAAASASAASSAASGTASTLGSSEGYWLRDLGSGRGTWVNGKRLPDGATVQLWPGDAVEFGRHPSHEVFKVKMQHVTLRSDELSGQAYTTLMVGKIRNNDYVMPESRPDGGSQQPGRLVTA

SEQ ID NO: 12488 - protein, 131 aa, Chlamydomonas reinhardtii
VVELTQHGQELLVARGGAGGRGNKSFPALAGRPAPDTSEPGQPGELRWVILETRLLADVGFVGLPNAGKSTLLGAITAARAKVGAYAFTTVRPQLGTITFEDGSRLVTADIPGLVQGAHANKGRGNAFLRH

SEQ ID NO: 12489 - protein, 327 aa, Chlamydomonas reinhardtii
MAAASTTNPDPLASEGTFHKIKDLGSGSFGHVALYSRLGHDEPVAVKCLPVRVVDYNMVKREVRSHCSLNHPHVILFKRLGLTPDKRYLFMVMEYADCGDLFKYVQQHGRLPEADARWFFQQIILGLDYCHRRGVVNRDLKLENLLLRSAAEVPPPPGQLEQPRNLHIKVADFGLCKASVNSLPKSRVLRASADRPYDAKLSDIWSVGVILYVLLFKAYPFGVISDRDNKAQRDAILRRIANAEWQLPAHPVIGEACRDLLSRILVSDPAKRITMEGIMSHSWFREDLPEGALEFNEGLHNRVRLAMTHQPSTLRSTGGTRFTLTLP

SEQ ID NO: 12490 - protein, 408 aa, Chlamydomonas reinhardtii
MASAPSAPPNNPLSGQSGYQFVKALGTGAFGSVLLYRRQLTEGGPIEEVAVKVISREECSDFNLVSREVHSHRILVHPHVIRFKRLGLTPDKRFLYMVMEYADRGDLLDYLRRRGRFREHEARWFFQQLVFGLDYCHQRGVVNRDLKPENLLLKRTPDARQELTQGDLEHPFNLHLKIADFGLSKEGMHSQPKSRVGTVTYMAPEVLRAGPSRRYDGNKADIWSAGIVLYVMLFARAPFDDPLATTDKARRDATMQQILRGEWNVPASVPVAPECLDLLRGILSPDPNTRFTLAQIMSHPWFSVGLPPAALTMNTVLVRQQTAQPPPYEQSVEDVNTVLEEATQRPGHGQGGGLGGSEITDSGFMTMIADEMEEENRRHNAPYMVDPYPGQGQPGAGRPGQPAAPQQR

SEQ ID NO: 12491 - protein, 662 aa, Chlamydomonas reinhardtii
MVGLGLIATLVAASALASIPQAKAASPTTDKLGTVIGIDLGTTYSCVGVYKNGRVEIIANDQGNRITPSYVAFTDEERLIGDAAKNQATVNPKRTIYDVKRLIGRKFSDADVQRDRKLVSYDIVDRQGKPYVAVDVKGEQKVFSPEEISAMILQKMKDTAEAYLGKTVKHAVVTVPAYFNDAQRQATKDAGTISGLNVVRIINEPTAAAIAYGLDKKGGEKNILVFDLGGGTFDVSILTIDNGVFEVISTNGDTHLGGEDFDQRVMEYFIKLIKKKYKKDISGDARALQKLRREAERAKRALSSQHQVRVEIEALYEGIDLSEPLTRARFEELNMDLFKKTMGPVKKAMDDANLKKTEIDEIVLVGGSTRIPKVQDLLREWFGGKEPNKGVNPDEAVAYGAAVQGAILSGEEEESTEGLIVIDRTPLSLGIETTGGVMTNLIPRNSVIPTKKSQTFSTAADNQPTVSIQVYEGERALTKDNHKLGQFDLNGIPPAPRGTPQIEVTFEVDANGILTVSAQDKGTGKKEKITITAEKGRLSQDDIERMVKEAEEFAEQDKAVKAKIDARNQLETYCYNMKNTVEDKMKDKIEEEDKEKITAAVKEALEWLDENPDADTSEYKDRLKEVEDVCNPIIAEVYKKSGGPSGGGDSHEDEDLADHDEL

SEQ ID NO: 12492 - protein, 158 aa, Chlamydomonas reinhardtii
MVAHQTQQVQQPPPLAAAAGAAANARAAAAAAADDVSTDDEKPARGRGGKGGGRAGGGGVLTVEGPQGQVLKLKPGAAAKRSRGAVHYRGVRQRPWGKYAAEIRDPLKVSGGRMWLGTFDSAEEAARAYDEAARMLRGSAALVRGCLRVHSRCGVLAV

SEQ ID NO: 12493 - protein, 432 aa, Chlamydomonas reinhardtii
ERTEEVAFGLNTVFMLFSAALVFIMHGGFAMLEAGAIRSKNAMNILLQTVLDGAASAVMWYLVGFGFAYGIGDNPNGFIGDALFGLSRYSSHNTGTGVGQWTNWFFQWAFCATAATIPAGAVAERFNFNAYLGYSLFLGGFVYPVVAHWVWCPTGWLGYGKATAPFLGAGMVDFAGSGVVHMTGGLAGLTGAWLVGPRLGRFDMDGRPVPMPGHSAILVVLGTVLLWFGWYGFNPGSALVADVRSSALIAGRAAVTTTLSGAAGGLTCLLLGFFRHVAWDLISLCNGMLVGFVAVTAGCHVIEPWRGGVEAGWEGEVGLHDLKHRAPAEAAGSGGVLTATADIMLAAQEYIQQAYVRDSYPYGLFYGGGGLLLASQVIGILSIAGWVLGTMGPFFLLFRAAGSLRISAEDEHKGLDASKHGGSAYHHHHGGG

SEQ ID NO: 12494 - protein, 578 aa, Chlamydomonas reinhardtii
MCGILAVLNTTDDSQAMRSRVLALSRRQRHRGPDWSGMHQFGNNFLAHERLAIMDPASGDQPLFNEDRTIVVTVNGEIYNYKELRQQITDACPGKKFATNSDCEVISHLYELHGEKVASMLDGFFAFVVLDTRNNTFYAARDPIGITCMYIGWGRDGSVWLSSEMKCLKDDCTRFQQFPPGHFYNSKTGEFTRYYNPKYFLDFEAKPQRFPSAPYDPVALRQAFEQSVEKRMMSDVPFGVLLSGGLDSSLVASIAARKIKREGSVWGKLHSFCVGLPGSPDLKAGAQVAEFLGTDHHEFHFTVQEGIDAISEVIYHIETFDVTTIRASTPMFLMSRKIKALGVKMVLSGEGSDEVFGGYLYFHKAPNKEEFQSETVRKIQDLYKYDCLRANKSTMAWGVEARVPFLDRHFLDVAMEIDPAEKMIDKSKGRIEKYILRKAFDTPEDPYLPNEVLWRQKEQFSDGVGYNWIDGLKAHADSQVSDDMMKTAAHRYPDNTPRTKEAYWYRSIFETHFPQRAAVETVPGGPSVACSTATAALWDATWAGKEDPSGRAVAGVHDSAYDAAAAANGEPAAKKAKK

SEQ ID NO: 12495 - protein, 73 aa, Chlamydomonas reinhardtii
MQRHARSQIQGCGRSLQNSKLYYQRFKLCEDHLKRPAISIDGVLSRLCQQCGRFHELAAFEGKKRTCKAQVGG

SEQ ID NO: 12496 - protein, 376 aa, Chlamydomonas reinhardtii
MYNGDHQEEARVLGVSCGSSHSIALLDCGVVASWGRGEDGQLGHGQADQCTSPTCIAALTDAGVDAVVCGAEYTVAVASSRGQIYSWGWGDFGRLGHGECGDVFVPRPIAFFSGRPVARVACGDTHTLVVTQGDGALYTFGRNQNGQLGLGHTNDCLSPQLVTALQGERVSSVACGSEHSLAATEAGTVFSWGWGRYGNLGDGDSQDRYTPTRVVGLDGVTVTSVVCGWRHSAVVTDEGRVFTFGWSKYGQLGHGDHVDHTRPCLVAGLQHCRVSTVAGGWRHTMAADSEGNLYAWGWNKFGQLGLGDSEDRAAPTPVAGFGLAGGGVEAGAATPRRVALLACGWRHTVAVTEAGEVYSWGRGVNGQLGHGAEQDL

SEQ ID NO: 12497 - protein, 357 aa, Chlamydomonas reinhardtii
MAAANQKPGPAGRPEPLIGHPRYEKIKDLNSGTFGFVQLARDKLTGETWAVKFIERGDKITKYVEREIINHRCLVHPHIVQFREVFLTPTHLCIVMEFAPGGDMFEYVVRKNGLREDEARWFFQQLIVGLDYCHRMGVVNRDIKLENTLLDSSPRPLVKICDFGYSKHEKFQSAPGSRVGTPAYLAPEVILTTKGKTYDGKIADIWSCGVMLYVMLVGAYPFERPEDKHDNQKLQKMIQRILHVDYHIPPHVRASEDCKDLLAKILVADPHKRITVDGIYNHKWYLKGLPPGVREMNDRVQPPPEGLQSVEEIKRLIEEARHVGVGAPGYVNPVETDEYIDDAMDNMYDEGSLDYND

SEQ ID NO: 12498 - protein, 1758 aa, Chlamydomonas reinhardtii
VAGHRREARLPAVDPLRRVPVAGLRWLPGTMTILKSKWMKAMSETEQLQQAGSPDFSAAAAKCFHVVKDCPAADLSQGKAYYRRFRICEKHLKTLSLCIEGKPSRFCQQCGRFHVVEEFEGTKRSCRRALLTRFYKRRNLPVPANALPAPQDPSPAAAKPPGAAAAEPRDTGAKSKSKVRSSSSALSGGGPDAADGDTSQQQQQRRKRGRPRAPPMDVRDLAPADEAAAGEVMDAGVRGVRAGVGVASNLDPTMDLRAAAAAVTGGIAGIAGAAGVAGGSPDAAASGAGLASGTAAADMGVGLWSSGSSGRGGIAGGDSSTSVAEQAILLELLQHQRQQQQQQDASILRQAGFGGGLGSGAFARGSVGTGPAGVQPERNGAANPLQRQQQLMTAAGADPALSQHLFSQQLQQSSSAFPTMDEGGGATRRLLLSASSSHAASASAGGSDGSGGLRAALLPGGDSSLSRLQRHIMLLHQHPSDAAKSAAAAGAASGAAANSGSYSRPLLGRSSLQLNMDQDFRHVPGGGAGPRALGLPHHHKQQLQQLQQQGGSGSRRPDILSTSADGGGGRLIVTIPPGALAAAGAAAGDLNFQLGSRYLLQSGRGAAADALSAVPAGSSTAGGTALGYRQGAMGGTNALLQHINPLQQMQQVLAAGGSGSSGNWQLQQAAAAAVGLAGGGGGKGSGSLRDAAQSLLGQGGARAAYSPPAGMLERLSIKLHNCRPDQLPPDLAERLVQLLASTDASVQQGFVRPGCTNLIIDLLYGDWERLLAGLLLYSCQSQAQESEPAGAASGGPSAAPSSLEAHAALEGRIHVQLGNQLLVIDGSHVQLRRRAVMVPAAVPPWVDGCGSGEGSSTASCPADGSRFVDRQRRRPAATTSSGPRWARSSSSDTAVSSAAGGGGRCTAWSGPELAGVAPMAVVAGQPFTLELAGRGLQLPGSCVHVRFRGGHLDALPETGTNENAGDTTSCCSLTGAMGDNGGLPMTLLMSSSAATSAAGQQQPQHAPHSQLDSRLQLQPLLMGCRQPHDAAAAGGGGGGRSVAAAAEASCTFRPRQGPSAAAAAPPAAVASEGIPAAAPSAVPASAASAAGAVSPHAVESPVGGVVIGAAAVAVSLPPAILPTATGYGSAAATVRAAALPEGPALMSKGGGSSCVRMAAGARQQQVVGEGKVASAHRALPIDAVAHDVAMGGAGTIATAGCVSYNEVDGETFSRPSNSGDGWLSLQHRGGRLGAAGELSRSGGGSQRSSSGAEAASLQGSASAPPPLCGGKATAALLPSKHSSLGLISRGRSSSARELMRTATTGGGSMAALGVDDTMNDILQTTAFAHAVALRRNTCDAAGGAGDRATAAQLPAEQPPRQHPLTSYQQWLLEQQAAAGGAVVLPETAANGDGSTAAAGVISRTLVFARAAGSRSTLPSSKSAIRPHQEQQQLECLTLLQQQQTIEPASGQQQAAQRLLQPPAVSAQPSTSTTGALLGGWPAGGCGGSERFEHSSSLPTSVLLGDLTATEAAAFMGFTAASTELKGVAGAISGGWPPAALLGYPHCAGLVLAYLLRRDGVNPQLADAVAGFASPLVPRDWRGVAAAGTAEPAAAAAAEPTSPPSSAEQSTASSLAQCAAVAGPGAKEQLRSRGERQEAQEGKEVDVLSGAFARLCARLRLRAGGVGLLHHAASEQQQEYQHAGSGHTQQASPQQRGTQPSAADEEQPEQQQQTHSLQQVPADAHMQSQQRQEQRSRMRPSGGGRWHKAAAVVVCMLKY

SEQ ID NO: 12499 - protein, 443 aa, Chlamydomonas reinhardtii
MRCFDTARIYLKGGDGGNGCVAFRREKFVEHGGPSGGNGGRGGNVWAVVDPNLNSLSVFRGQVHFRAEGGVNGQGSNCEGADAEDLIVPVPAGTIIRRKDAEEDEPPLAELLKPGEKALLAVGGRGGRGNFSFKTSRDRAPTIAEKGEKGEELWVDLELKVVADAGIIGVPNAGKSTLLSVITAARPKIANYPFTTLVPNLGVCEMDYSTTVFADVPGLLEGAHEGLGLGHEFLRHVQRCRVLVHVVDGTSPDPVGDFNAINLELELFNPDLKDKPQLVAYNKVDIPDSGDFWEMVREQLTTELGVPADRIFPISAATGQGVIELVRAVRGVLDELGPQQLTYETNALNQTAVQRREVRIDDFTVAMEDLPPGSASTAPRVFYVEGEGIERFAQMTNWDYYEAVKRFQRVLEVSGINGALKARGVRQGDSVVIGETEFSWSDD

SEQ ID NO: 12500 - protein, 72 aa, Chlamydomonas reinhardtii
QVEGCNADMTAERPYYRRYSVCEAHIRALQVQHAGKTQRFCQQCGKFQELVDFDGDKRSCRTQLAKHSARRR

SEQ ID NO: 12501 - protein, 77 aa, Chlamydomonas reinhardtii
ARAQVTGCGLCLEGLKRYYIRMRVCEKHLHAPAVLVNGTISRFCQQCGKWQAVAEFEGSKKSCIATLERHNARHRAK

SEQ ID NO: 12502 - protein, 2983 aa, Chlamydomonas reinhardtii
MLLANAMEGRCSTCQQLVEAEAACRVCHIPWSSNQTNVTACDACGFSMHNDCVAKGALQSTSQGRIWTTCPHCPPTLHTTPGGAAAPPARDSADGTGSATVAAVAGGGGGSERRMKRESSGGAASAALAMQLSNGQGGRAGGSMAGGNSGSGAAAAAALASPSGAGALSTVAAAAGPQLQQVASLLQGQLRMLQAQQAALLAQYEEQLRAVTPALQPNAYALFQLDMIRVYEEEGLHIDPPELQPIISNAWHQLTPEERAGYDGRAAAEAAAWSANAALYTSLYLEYEALAAQLDMAPDAAGLMPKHVQGVLAAARQQAAAAAGPARLAGKGGGGRQSAGSGGGVGGRGRAASLGSGGRPEAGASGRGVKRGLDALVGASALLGMGGGSSGGPGGLREGSGGGGSGRERLAAASATDGDDEDDEDYEAEAGLVAAAGKRARRAISPAVTTAPVSSSAAAAASAAAAAAAAAAVAAGAGGSLASRPQPRNTRLPVDLLPTGVADLPASMPVSCCDVAGTFVMDGIKVVCQCKDCAGLPRAQREFHPTHWEQHCGAGTAKKWKASIKIEPGGAPEVPPGANPMQIGKWFDMLGVEFRPAKTTGGPPVLEFTGATIRRLEAAEGANGGSVGPPPLAAAAAAPACSNGAAAAAALGTGLLGLGLAAAADGNLPASLPTPAPPQSMAQQPSPPPPPPPAAPISAPPALRPGRPPAATSASRASAPPAGSATSGGAAAAAGPSLDGVPAAAPTPPTPAAANTTTAAASKPPRPPVSAEPWLDYLRPGQLYRPVRARWAGDRCSVCDSEIDADSDRLVSCDCCGITVHQICYGITEAPGLDEMWLCRACELRQPGPPGQPPAQCCLCPVAGGALKPTTLGPGTWAHMVCLNWLPELTCGDPITGEPVDNIPGIQRERWELSCCICKQRMGAKIQCALCYQAYHPLCGRMAGLHMEVAVAPGGKGLKRTNFCPRHCKPHPKLSGVQRIREDGTTDADDGAVNGLWNAQPYPPQPSVPVPQPEAGCSRAQALELKRMSHGTGNGYTTVKGFWIPDPPASPPAPAAALIGGGGGSAGAGAAAGGTAGGGITAAPAPASRRPGPKRRGRGGRITGAAAAAAAAKAAAKAAAGAGGGFTAKAAPAALRPAKVDLIAMPDDLPDELPVVCCGRHGLLYLRAQTVLHSGAVMTVSHFERICGRGDAKKWKASLLIVDEDGVGKQSVGDWLAENKIDSKMLNRLQANAAAYEAYSRWRAENPELAEEEEQRQQQQQQAEAEAEGAAVKAEAEVAEAGVKEELGVKEEAAGGAAGGAVKGEGEPDGSGSGEGTAAGAQALPRVKLEVEEQEPGAAQVRAAGLEQADVEAVEAGREGAASPTTDGGGGSRGVSPTPGSFSAGGGVTTGLETAPSATPSAAAEADGGASEPPPSPTRRVRLFHLDPPTRRGLLAFVAETRGNLAAAAAAASGPTLTAPPPPQLPLPLQLLPAMDPEAAALMATEAPLGPTADLMDADGPEGPGSMAGWALAPAAGPGRGRGRGRGRGYYGRGGGGGAAAAALAAASAGLLPGEWPGWPHNSPHVIGTPARLRNGSASTAPHGCVGHSVRLFWMDDVEWYEADVAGYDPASGRHYLWYHLDEATEWIDLAAEDRAGRVQWLPFAVDVEDWPPPPPPPPPPPVAGASAGKPHRSGGRPAGAGGGGYRSRDDDWGADEDEEFRPRMRSKRGGGRVGGRGRGRGGRGRSRGRGGSGFSYRLSAAERGGYDDEEDFMDVGGDELGGLGGGGGAELDVEADGVGAAGGADGAGGGSGGGGGLEALALLGGLDALAAAALEEDGEGGGGGGPDVSGAVTDGGAATDGELGDAAREAGGDGGEGGAADEMEVEEDRVGQPPPTAGAECVGWRVRCLPMASGGAAGATAAGATDGEPGGGAAATATRSDDWFTCLIMSYDPDSDLYGVELDSGEPYTLRLGSMAQVVWLGGGAAARRAHEAAREAGEREAAAAERRRNAPPEIPVVCNGMQGWFLVAQGLVRMQAGRVLSPTEFERVSGKAASKKWKVTLRVLQPDGSLGMTLGEQLVELGLEEPTVPKPRGQPPPAPSLLDGSRRRAAARDAVAAAAAAVAAVGGGGSGTIRAAKAATAAAVAAGSWTALASASGGSARTAAYGSRSLVGAAGSNVPRVHRPGCTCIICKQGRKDGGGSGGGFSSWGGGGSGGGWGRSGGGRGAGARAAAAAAALALPLPPPPPARTAPVQQLRSGKQAFVSATPQLVRGPMQHGYWTMPPTRCYSPQEYMAMRAAELEAQAAAEAAAEAEAEAERQREAAERDTARQMASRAVAMGAAAARAAAAAELPQPPAVGEEAAGCAVAAAVGAAEEEAAYAGGPSSMDIDGQAGAQPTPAFATPRTMPGHLSDALAAAGAAAPRAAGGGDEEGDGGDEEAHPTTASKAAAAAAAAAAAAAAAAALSPGSGGGLNLGGSSIVPTGDLSDSDSEDEEEALADEGAAAAAAAATAQAPGAAAAGMTAPHTQLGHPQEQATAGGAAAPGSSAVADGAAPSVPAGVSATAPPAPAAAAGLGLPTGPGSGVGQLALPPALNLGRLVAPGTDPAVAATAVAAAAAAAAAAPPGAESSAVMAAMMAAAAAAAPGIDSAAAAAAAAAAAASGMFPMRLAAPPLAQQQQQQEQLAVPGLMLGSMSGPGAAGFQFAPLAPPHMAAAAAAAAATANAAGGGGAGVPPPLLPFPQQLQALPFMPGTGFPFTGISPEQLMQQGLPPPLMSAPPSLEPPPTLGPAAAAPGAPASAASQAFTGTPAAAAIVAGAAGASPGREALRASERRLKAVRWEERLQRALATERARITFGKSGIHGWGVFARVDIPQDAVVTEFRGEVVRPVLAEMRERRYRAAGRAWACAGKDCYLFHVSRELVLDSTHLGHYGRFANHSCSPSLYTKVLEFEGGRRVRLAFCARVDIRAGQELTFDYRFKEEEGSAKVACRCGAPNCKGTLN

SEQ ID NO: 12503 - protein, 463 aa, Chlamydomonas reinhardtii
MKQFLRGLRGAADAREAGGGQDGAQEVVGGPSEPSRAAPTPSTSSAPAAAEDPGKPQAPSSFYCPISMELMHDPVMVATGHTYDRQCIEKWLNQGNRTCPVTGMRLRHLELTPNYALRTAIQEWATTHGVSMNAGGGKLNAPYRYEDEPRNILQGHEEIVWAVEVCGRRLFSASADKTIRVWDIESRRCEQVMEDHTRPVLSLSIANGKLFSGSYDYTIKVWDLATLQKIQTLSGHTDAVRALAVAGGRLFSGSYDSTVRVWDENTLQCLDVLKGHNGPVRTLVHCRNQMFSGSYDRTVKVWDCNTLECKATLTGHGGAVRALVASSDKVFSGSDDTTIKVWDAKTLKCMKTLLGHDDNVRVLAVGDRHMYSGSWDRTIRVWDLATLECVKVLEGHTEAVLALAVGNGVLVSGSYDTTVRFWDINNNYRCVRKCDGHDDAVRVLAAAEGRVFSGSYDGTIGLW

SEQ ID NO: 12504 - protein, 413 aa, Chlamydomonas reinhardtii
MAAAERRDDLGIEDGDDDDIDENELRRQEEAYQRQYENEQTWDQLQEDEHGNLFVDKTAEQRARRQRLLSAAQSARIRKGMIRYVLLVVDLSRAASAQDLRPNRLGCMLSLCRSFVREFFDQNPLSQLGIAVMRGGLVEKLTDLSGSPEAQVARLDAGKLGAPAGDASLQNALELGVSLLKQLPPYGHRELLLLFAALASCDPGNVLDSVKACKDNNIRVSVVGVAAEVYVCRRITEDTGGTYGVALNEGHLEQLLMAHSPPPPATAAQAKAELVRMGFPQRSTEEASSAVFVGQEARLLPGSYTCPRCRSRVPELPVECHTCGLTLISSPHLARSYHHLFPVQPYHEDSEVMTTTGAYCFGCLREVSEPGVKGQLHLTLRCGQCKQVFCFECDAYVHESLHNCPGCEFLGAG

SEQ ID NO: 12505 - protein, 474 aa, Chlamydomonas reinhardtii
MLQAQRVGRACTNARQQQPVARPAMLAGRAHLTSPALRSRPAPGTATFTQPKQQPKPVVHTQAAAGAGASATPAPQSSGGNSTFTQAVFNVVNVMMGVGVLSLPFALKSSGWVGLLVLWVMGVATNYTAKALCECADAVSAKTGGGPVGYEEIAEAAFGPLGRLLVSAIIYVELFGTCALLFILEGDNMFKLFGASSLASNASTYQLLAAALMIPTVWLPDLKALSFLGAAGVTATCTVSAAVAYTFLSGSFAPGAPTDLANWATLPLVLGICTFCYSGHGVFPAIQKSMADPKQFPQVLNVAYLAVAVICTLMGAAGYYMYGTGALDLVTFNMVGPLAAVCASVILINPVAKFALTMEPPAAALQGVIPGAKKGIMRLLTRTALAIGILLAARSVPFLGQVMALVGSFLTISVSVTFPPLCHQVLCGHNNSALRSAWNYFIAALGLICTFCGTTASMKSLAAKAAATAAGAPA

SEQ ID NO: 12506 - protein, 570 aa, Chlamydomonas reinhardtii
MATTVSPADANLGLHIANRLVEIGCTSCFAVPGDFNLLLLDQLLKQPELSLVWCCNELNAGYAADGYARKRGVGCLCVTFCVGGFSALNAVGGAYSEDLPLIVISGGPNSQDHASNRILHHTTGANEYGQQLRAFREVTCCQVVIQHIEDAHMLLDTAISEAMLKRKPVYIEVACECVVTWYLLGGRVMGGPSLWAAVEAAVEWLGGGVKPLLLAGVRTRPPAARKAMLALAEASRYPVAVMPDAKGMFPEDHEQYIGMYWGPVSTPCVCEVVESSDIVLCVGGVWTDYSTAGYSLLLKPEKMLRVDNNRVTLGNGPTFGCIVMTDFLEALAKRVAPNDTGHVIYKRMALPPSEPPPQAEGELLRTNVLFKHIQHMLTPSTSLISEVGDSWFNTLKLKLPAGCEYELQMRYGSIGWSVGAVLGYGVAERQTAPDRRVVACIGDGSFQMTAQEVSTMLRYGLDPIIFLINNGGYTIEVEIHDGPYNVIKNWDYPGMVRALHNGQGKLWTAEARTEPELQAAVAEAVQRRGELCFIMVVTHRDDCSKELLEWGSRVAAANSRKPPTTGYGGH

SEQ ID NO: 12507 - protein, 475 aa, Chlamydomonas reinhardtii
ILALPGFVNSLPSRHFAGYVTVDEARGRRLFYYFVESERDPANDPVVLWLNGGPGCSSFDGFVYEQGPFLYDLIPGPGGRGAQAVSLRRNPHAWSKVANMIFLDSPAGVGLSYSEHAADYVVDDGRTAQDADAFLRGWFARYPQYQANDFYVSGESYAGIYVPNLVREVLIGNEAGEEPNINLVGYLVGNGCTDERYDGNAHPLYAATKSLLPWRQFRQLEAECGGEYWNRTGGSTCDKLWGKLSANLAALNIYNTLQDCFHDGPASTTTSASASSSGGTPSLLGTVSQEVRRAEGEGEGSPLPSGKPLPAGRQAGRGGRRAGGPHSGTQRPRQPHTGWGVPAGTHAPAVSVWGVWATCVDKISYSRNHGSMIPIHVNNTKNHGLRALIYSGDHDMAVPHTGSEAWTSELGYPVKSPWQPWFVADRQVAGYYVEYGHGLTYATVKGAGHMVPETNPRDSLAMFERFLADTPLSGL

SEQ ID NO: 12508 - protein, 434 aa, Chlamydomonas reinhardtii
DVRDFYTFDKQLGKGNFGIVHLVFDKKTNEKYACKSISKRKLVTPEDVEDVRREIQIMNHLAGAGLMGPHGDTNFIHIAIEVCSGGGLRCRALGAGRGAEQGEGLASVMRTIVSVVHHCHTMNVVHRDLKPENFLLTERGPGGVIKATDFGLSRFFKEGNQLDEIVGSPFYVAPEVLKRSYGKEADIWSCGVILYILLCGWPPFHGDSTQVGGLGGFGVWAWVWHAADAKDCVRRMLARDPRKRLTAEQVLNHPWMRENGAAPDEAFVPEILIRMRQFTKMNMLKREALKVIARSLPHMELAGMREMFQEMDEDGSATITVDELREGLRRKGAEIALGEVQRILNDIDLDGNSKIDYEEFLAATMHLNKLSREENMIAAFEYFDKDKSGFITRDELMNAMKDIDAEVDVDAILAQVDQNGDGRIDYEEFCAMMR

SEQ ID NO: 12509 - protein, 234 aa, Chlamydomonas reinhardtii
MKGSGEAPRCGFSSKVVAALQKLGVAFKSVDILSDEAVRQGLKEYSNWPTYPQLYVKGELVGGCDIVLEMAGSGELEALLRDKLGRDFQAVAAAAVAAGSSAAPAAAAPAAAAPSAAAPSSEDAGAVQERIKALLAGPKPVMLFMKGSPEQPRCGFSRKVVEALQSEAVDFGAFDILSDEAVRQGLKEYSNWPTYPQLYVRGELLGGCDIVLEMKAAGELGSTVQEMLHRMDVA

SEQ ID NO: 12510 - protein, 267 aa, Chlamydomonas reinhardtii
MRRPRWSLDDYQLLKQLHKGYASDVYQARCKVTGEVVGLKVYKLAGQGDIQRMQLYREIKLHAGLRHSNVVQYYACFLEQNRVVLVVEFCTGGDLLRLMYKCGGRLLERQAVNMVLQPFLTALHYLHTQGIVHRDIKPENVLFAEGKILKLADFGLAISLKEERANTRAGTLDYMAPEAVSAHYHQSVDAWAVGVFAYELIVGAPPFKAAQMIDTARNIIHANVSFPDAVSDLARDFISRALHKDAAERLTVLEMLHHPWITMFQRR

SEQ ID NO: 12511 - protein, 370 aa, Citrus sinensis
MAAFSYQQHHHPFLLDSSEFIEEGSFFSQLYYPPKFPTHDDHQEMIVVNNNSNNLLDAAAVFKTSCGDNHNHHSDDNCNEPSNNNSLATKNQSTAVSSTEQQVTQSTVTTTATTTRMDKKRKNRTNASSSFNSAQSKDPREVKSKKQKKGNVNDAKKEEKENSPKADSEKKVAKEPPKDYIHVRARRGQATDSHSLAERVRREKISERMKILQKLVPGCDKVTGKAFMLDEIINYVQFLQNQVEFLSMKLASVNPMFYDFGMDLDNTFMVRPDDQQNLNSIIAASASAPQVQCSPTAQLTAFADTTTAFAPADHRNNYPVLDTALLLQQGQRPNALIYQDNGNSLLWDVEDQKQRFLNPSGFTSNLCSFN

SEQ ID NO: 12512 - protein, 368 aa, Pisum sativum
MATVMQKIKDIEDEMAKTQKNKATAHHLGLLKAKLAKLRRELLTPTTKGGGGAGEGFDVTKSGDARVGLVGFPSVGKSTLLNKLTGTFSEVASYEFTTLTCIPGVITYRGAKIQLLDLPGIIEGAKDGKGRGRQVISTARTCNCILIVLDAIKPITHKRLIEKELEGFGIRLNKEPPNLTFRRKEKGGINFTSTATNTHLDLDTVKAICSEYRIHNADITLRYDATADDLIDVIEGSRIYTPCIYVVNKIDQITLEELEILDKLPHYCPVSAHLEWNLDGLLDKVWEYLCLTRIYTKPKGMNPDYEDPVILSSKKKTVEDFCDRIHQDMLKQFKYALVWGSSAKHKPQRVGKEHELEDEDVVQIIKKV

SEQ ID NO: 12513 - protein, 436 aa, Nicotiana tabacum
TSVHPSTSAFSRKQLPLLISKDFPTELYHSLPCSRNLENGQIKKVKGAVKATIAEAPATIPTTDLKKVPQKKLKVLVAGGGIGGLVFALAAKKRGFDVLVFERDLSAIRGEGQYRGPIQIQSNALAALEAIDMDVAEDIMNAGCITGQRINGLVDGVSGNWYCKFDTFTPAVERGLPVTRVISRMTLQQILARAVGEDIIMNESNVVNFEDDVEKVTVTLEDGQQYSGDLLVGADGIRSKVRTNLFGPSDVTYSGYTCYTGIADFVPADIETVGYRVFLGHKQYFVSSDVGGGKMQWYAFHNEPAGGVDDPNGKKARLLKIFEGWCDNVIDLLVATDEDAILRRDIYDRPPTFSWGKGRVTLLGDSVHAMQPNLGQGGCMAIEDSYQLALELDKALSRSAESGSAVDIISSLRSYESSRKLRVGVIHGLSRMAAIM

SEQ ID NO: 12514 - protein, 70 aa, Photobacterium phosphoreum
MSNTTTGLVKWFNEEKGFGFITQDNGGADVFVHFRAIASEGFKTLAEGQKVSFEVEQGQKGLQAANVVAL

SEQ ID NO: 12515 - protein, 465 aa, Sinorhizobium meliloti 1021
MDDTTSAAPEPDRLRLLRVLGPAHVWALGVGIVLVGEYMGWNFSVGKGGMIAGLMACWVAGLLYTCVAMIDSEVTSTVAAAGGQYAQAKHIVGPLMAFNVGLFLVMAYTMLEAANAITVGFLLDTVAGMQGQTGLNQQPFIVLAIMFLAWLNYRGVLATLTFNLVITAIAFLAIVALFVSVQFGASAVPLDFSAITSDPLPYGWVGIVASLHFGLWYYLGIEGTCQAAEEVRSPARSLPYGTMAGIMTLLIAATMTWYICSGLMPWEYLGQAGTPLFDAARVTGSTGLMVLLFVGTAFATLASANGCINDASRAWFSMSRDRYLPSWFGAVHPVYRTPYRAIVFLVPIALIFALGAPLDQVVTFSILSGLLGYTFMTFNMVMFRNKWPLGRIKRGYVHPFHPLPTVVLLILCSTAYFAVFLGYGTQLSAMMCFYIVASLWFHFRRYKFVRRGDQFTMPWPKPHGY

SEQ ID NO: 12516 - protein, 601 aa, Sinorhizobium meliloti 1021
MNAKDRNKRAVDSETITGILKRVIAENGRDHIRGYAFAIACLVVVAATTGFTAWIMEAVVNEAFANRRADIVLLICGAIFAAFVLRGLATYGQAVALSKIGNNIVARYQRRLYAHLMALSVGYFHEHRSAQLAAKVSQNVSGIRDVLNMTVTSIARDLLTLIGLVVVMFSKDWLLSLIVFFVAPPLLLGLRYISRRLRLATREAVEVNSRVLGAMQETIQGITIVKAFTMENELRRKVESIIDRAENRANRIARLSERTAPMTETFAGLAISSVLAYAAFRTIYHNVPPGAFFAFVTALLMAYDPARRLARLQVSMERAAVNARMIYEILDTVPHQRDRPDATELRLGEATVELRDVRFAYGTGEEILKGVSFRAEGGKTTALVGPSGAGKSTIISLIPRFYDPLSGEILIDGQNIAGVTKQSLRAGLAYVSQQPYLFEGSIRDNIRYGRPDATDAEIEEAARLAYAHDFILAQPQGYDTPVGEHGVTLSGGQRQRLSIARALVRNAPVLLLDEATSALDTESEAAVQKALEEAMSGRTVIVIAHRLSTVVNADKIVVMKEGIVVEEGSHEELARRPDGLYARLHNLQGSGADTVAEAQIL

SEQ ID NO: 12517 - protein, 334 aa, Sinorhizobium meliloti 1021
MTSKKKPTVYITRKLPDVVETRMRELFDAELNIDDTPRSQPELVAAVKRADVLVPTVTDRIDAALIEQAGPQLKLIAAFSNGVDNIDVDAAARKGITVTNTPNVLTEDTADMTMALILAVPRRLAEGAQVLTDRKGEWAGWSPTWMLGRRIAGKRIGIVGMGRIGTAVARRAKAFGLSIHYHNRHRVKPETEEMLEATYWDSLDQMLARVDIVSVNCPSTPATYHLLSARRLALMRPDSYIVNTARGGIIDEAALIKSLREGKIAGAGLDVFENEPCVNPKLIKLAGEGKVVLLPHMSSATLEGRIDMGEKVVINIRTFFDGHRPPDRVLPGRD

SEQ ID NO: 12518 - protein, 641 aa, Sinorhizobium meliloti 1021
MAKVIGIDLGTTNSCVSVMDGKDAKVIENAEGARTTPSMVAFTEDGERLVGQPAKRQAVTNPENTLFAIKRLIGRTFEDPTTQKDKGMVPYKIVKADNGDAWVEAHGTSYSPSQISAMILQKMKETAESYLGEKVEKAVITVPAYFNDAQRQATKDAGKIAGLDVLRIINEPTAAALAYGLDKKEGKTIAVYDLGGGTFDISVLEIGDGVFEVKSTNGDTFLGGEDFDMRLVEYLASEFKKEQGIDLKNDKLALQRLKEAAEKAKIELSSSQQTEINLPFITADASGPKHLTMKLSRAKFESLVEDLIQKTIAPCKAALKDAGVSAAEIDEVVLVGGMTRMPKVQETVKQLFGKEPHKGVNPDEVVAMGAAIQAGVLQGDVKDVLLLDVTPLSLGIETLGGVFTRLIERNTTIPTKKSQVFSTADDNQSAVTIRVSQGEREMAADNKLLGQFDLVGIPPAPRGVPQIEVTFDIDANGIVQVSAKDKGTGKEHQIRIQASGGLSDAEIEKMVKDAEANAEADKKRREGVEAKNQAESLVHSSEKSLQEHGDKVSETDRKAIEDAIAALKSAVEVSEPDAEDIKAKTNTLMEVSMKLGQAIYEAQQTDAAHADAAADAKRSGDDVVDADYEEVKDEDDRKRSA

SEQ ID NO: 12519 - protein, 761 aa, Sinorhizobium meliloti 1021
MPGIDKTDRAMTSVTAQEALDFHSQGRPGKLEISPTKPMATQRDLSLAYSPGVAVPVKAIADDPATAYDYTARGNMVAVISNGTAILGLGNLGALASKPVMEGKAVLFKRFADVDSIDLEVDTENVDEFVNCVRFLGPSFGGINLEDIKAPDCFIIEQRLREVMDIPVFHDDQHGTAIIAAAGLVNALTLTGRDFKTAKLVCNGAGAAAIACIELIKAMGFNPENIILCDTKGVIYKGRTDGMNQWKSAHAVETDRRTLAEALDGADVFFGLSAKGALSADMVRSMGARPIIFAMANPDPEITPEEVALIRDDAIVATGRSDYPNQVNNVLGFPYIFRGALDVRASTINDAMKIAAAEALANLAKEDVPDDVAAAYQGNRPRFGPQYIIPVPFDPRLISAIPMAVAKAAMETGVARKPIEDLKAYGQQLSARRDPIASTLQRIVERVRRQPKRIVFAEGEEVQMMRSAIAYANQQLGTALLLGREEVMRETAEREGIDLDRAGIQIVNARLSKRVGAYTDFLYSRLQRKGYLFRDVQRLINTDRNHFAASMVALGDADGMVTGLTRNYSTALEDVRRCIDPKPGHRVIGVSIALCRGRTVLVADTAVHDMPTSEELADIAEEAAGLAKRLGYVPRVAMLAYSTFGHPSGERSERVREAVKILDRRRVDFEYDGEMAADVALNARVMEQYPFCRLSGTANVLVMPAFHSASISTKMLQELGGSTVIGPLLVGLDKSVQIASMSAKDSDLVNLAAIAAYNAGT

SEQ ID NO: 12520 - protein, 595 aa, Sinorhizobium meliloti 1021
MMENNRNYFVAIALSVLILIAWQFFYVSPKMEKDRIAAEQAQQAQQTQQQPGAQPAAPGQALPGGAIPSAGESRDQAIGKSARVAIDTPALSGSINLTGARFDDLKLKGYRETVDPKSPVITLFSPAETADGYFTEIGYIGSDATGSVPGPQTTWTLSGGDKLTPSTPVTLSYTNDKGITFARTISVDDRYMFQVVDSIKNETAAPVSLSSYGRVTRFNKPTTPSIYVLHEGFVGVAGEHGLQEVGYSKVEDDEPVEPGKSTGGWLGITDKYWAATIVPPQATPFDIRFSHFADGRPRYQSDYKSDAVTVAPGQSVELKNLVFAGAKEVPVVDNYEVAYSIPNFDKLIDWGWFYFITKPMFKMMDFFFRLFGNFGIAILITTIVVKLIFFPLANKQYASMANMKKVQPKMEELKKKFGDDRMGLQQAMMQLYKEEKINPLAGCWPILIQIPVFFALYKVIYVTIEMRHAPFFGWIQDLSAPDPTTIINLFGLLPFEGPAFLHLGIWPIIMGVTMFLQMRMNPTPPDPTQAMLFTWMPVVFTFMLASFPAGLVIYWAWNNTLSILQQGIIMKRQGVKVELFDNLKSLFSKKPKPAE

SEQ ID NO: 12521 - protein, 388 aa, Sinorhizobium meliloti 1021
MTIMTSLSPRATAAPESGIVEVVNYARGREGLIPLWVGEGDLPTPDFVSRAAADALMAGETFYTWQRGIPPLREALVRYYQRRFQKALSPENFYVTGSGMQAIKLAIEAVGSPGDEVVLLTPAWPNFAAAADLSGVRPVAVPLQFEGGKWRLDPERLQAAIGERTRALFINTPSNPTGWTATHDDLKAILALAREHGLWIIADEIYALYYYPDGRAPSFLDVMEEDDRILFVNSFSKNWSMTGWRVGWIVAPPAMGQVLENLIQYSTSGVAQFMQRGAVAALDEGDGFVEENIAKAKRNRDTLCDALIATNRVETLKPDGALYAFLKIDGVTDSRAAALDIVDRTGVGLAPGTAFGEGGALFMRACFLRDPLQIAEAADRLQRYILSR

SEQ ID NO: 12522 - protein, 396 aa, Sinorhizobium meliloti 1021
MRYASITSRLAELGSGKWTLHTRARQLKASGAELIELTIGEPDLPPDRALLEECQRAMNAGRYRYSNGRGEPAVVAALTEKYRRRRAAVTAENILCFPGTQTALFAVMFALAEAGDGVLVGDPLYATYEGVIRSTGAHPVFVPLNPENGFHMRAEDLEKAVTPECRVLLLNTPHNPTGAVLTAEEIAAIGEVARRHDLWIVCDEVYEELVFDALFASPFDNPDLAERTVVVSSISKSHAAPGFRSGWAVGPAEFTERLLPISETMLFGQQPFIADMTAYALTHDIDTARQMRESYSRRARRIIDGLAGASGVSVLPPEAGMFALIDVSGTGLSGEAFAWALLEEEGVAVMPGSSFGDKARNFLRVSLTVPDAAIEEACRRIAALAERCTIRKERRA

SEQ ID NO: 12523 - protein, 537 aa, Sinorhizobium meliloti 1021
MTVESKTVGETLVDLLEANGVEVVFGIPGVHTVELYRGLAASKIRHVTPRHEQGAGFMADGYARVSGKPGVALVITGPGLTNTITAMAQARQDSIPMLVISGVNRRDSLGHGRGLLHELPDQNGMMKTLALYSHTLLNPADLPLVVDRAFAVLLSGRPGPVHIEIPTDVMALKIEGRPAKPAAATRPRSDSETLQRAAILCAEAARPVILCGGGALTAEAEVRELAERIGAPVVTTVNARGMLAGHPLRVPASPSLKAVRALLREADLVLALGTEMGQTDYDLYADGGFPLLKNLIRTDIDAAQLARGPQAALSILSGAKAATAGILGFLPDHAAAKDGVLRAEAARKAALKELTPKMLAEIGVVETIYRTLPDCTIVGDSTQAVYAGNLYCDAPRQRAWFNSATGYGSLGYAPPAAVGAAVADRGRPVICLVGDGGFQFSLAEIGSAVDANARVVFLVWNNDGYREIESYMVESGITPEGVKPSAPDFLLTAKAYGLPAERLATVKDLPRALAAAASRPGPSLIEIHQERTAGATA

SEQ ID NO: 12524 - protein, 337 aa, Sinorhizobium meliloti 1021
MMGVRHATADAHAGGTVLESIGRTLTTATNGIKALADHLTSDQAFAGALVDAVELMGDGDGRVVVSGVGKSGHIGRKIAATLASTGTSAHFVHPTEASHGDLGMITAQDALVLLSWSGETAELANMLTYAKRFKVPIVSICSNRESTLARNSEIALVLPKVPEACPHGLAPTTSAMLQLAVGDALAIALLERRGFSAEDFKTFHPGGKLGAQLRLVQELAHGTGQMPLLSVGRPMSEAVIEMSAKGFGVVGITDESGKLIGVITDGDLRRHMAGDLLAQPVQEVMSRNPRVIKGDVLASAAMEFMQDHKVTVLFLVDEAGAPVGILHIHDLLRAGVA

SEQ ID NO: 12525 - protein, 412 aa, Sinorhizobium meliloti 1021
MAFEKGGVWRNWVGNQYCVSQYKASPGTEAELAELVAEADKRDLGVRVSGSGHSFTPVVGTSGLLLSLADLRGVQKVDKARKQITVAGGTRINEVGKTLKQHGLSLINQGDIDSQAVAGAFTTGTHGTGIKLGNMASSIAGMRIVKANGEILDIDGSDEELLHAAQVSVGTLGIISSMTLNVMDAYNLHERLWRDDFETCMERHDELAANHRHFGFFWCPTPESRHLYCLPDTSAVSSTNKSADVCEMKVMDITDAAPMESEFEKIAYSSEVYPIEYVPNFVELEYAVPVEHGKAAVRAVRDLMLNKHTNCIYPIEYRFTAGDPAWMSPFHHQDSITLSVSGGPGIDYWAFLKGVDQILRGYDSRPHWGKMHFLDTDDVTHLYPRAGDFRALRRELDPKGRFLNDHLKMLLG

SEQ ID NO: 12526 - protein, 364 aa, Sinorhizobium meliloti 1021
MEMPRSFRHFDELDPWRDRQHMLECMSAVAETADVMTFTFRSDKPAWFRYLPGQFVTLELPVAAKPVMRTYTLSSSPSRPLSVAVTVKAQPGSIGTRWMFDNLKPGMMLKAFGPLGDFSFVRHPGEKYLFISAGSGVTPMMSMTRWMADCAPETDVTFISCARRPDDLLFRSELEVLARQMPGLNLGFLVEGHEARHGWHGLRGRIDAAKLPMLAPDFLERTVFCCGPEPFMGNVRAMLEAAGFDMARYHQESFQPAAAPAAEELAIRAGPTADAGAGAARVTFTMSGKEATAVPGQTILQTARANGVRIGAACEGGICGTCRVLKIAGDVEMNHNGGILDDEIEEGYILACCSRPTSDVQIEA

SEQ ID NO: 12527 - protein, 313 aa, Sinorhizobium meliloti 1021
MTDIMTDTQKDTAAGAVPTRSGFVALIGATNAGKSTLVNRLVGAKVSIVSHKVQTTRAIIRGIAIHGSAQIVFMDTPGIFKPRRRLDRAMVTTAWGGAKDADLIMLLIDSERGIKGDAEAILEGLKEVHQPKVLVLNKVDQVRREDLLKLAAAANDVVAFERTFMISALTGSGCEDVMDYLAETLPEGPWYYPEDQISDLPMRQLAAEITREKLFLRLHQELPYASHVETEKWEERKDGSVRIEQVIYVERDSQKKIALGKGGEAIKAISTAARKEISEILEQPVHLFLFVKVRENWGDDPERFREMGLDFPK

SEQ ID NO: 12528 - protein, 318 aa, Sinorhizobium meliloti 1021
MANKSIDHAITAKSLTTAASDPTHAGILSFMRRKYTKELKGVEAVVWGIPFDAATSNRPGARFGPQAIRRASAIFDNDPQYPFQRDLFADMATIDYGDCLLDYGNHARTPQTIEREASKILKSGAYLLTLGGDHFVTYPILRAHAALHGPLALVQFDAHQDTWPDEKGRIDHGAFVGRAAREGLIDVERSIQIGIRTHAPEDCGIRIVYGYELEEMRAEEIADTIIRHVDNRPAYLTFDIDCLDPAFAPGTGTPVAGGPSSAKILSVLRKLGALHIAGSDVVEVAPAYDHADLTAIAGSTIAMYMLGLRAEWLAERRG

SEQ ID NO: 12529 - protein, 557 aa, Sinorhizobium meliloti 1021
MYRYDEFDHAFVSARVEQFRDQVQRRLSGELAEDAFKPLRLMNGVYLQLHAYMLRVAIPYGTLSSRQMRMLAHIARKYDRGYGHFTTRQNIQYNWPRLSDTPDILQELASVEMHALQTSGNCIRNVTADHFAGAAADEVADPRPYAEILRQWSSVHPEFSFLPRKFKIAVTGAERDRAAIQVHDIGLHLKKDENGKLGFAVYVGGGQGRTPLIAKKIRDFLPEEDLLSYTTAIMRVYNLHGRRDNKYKARIKILVHETGAEELARQVELEFANLKDTELKLPDADIQAIAAYFAPATLPNRTEGWGSLARWKKADPEFARWVHQNVQPHKHPDYGMVTISLKPIGGIPGDASHEQMDAVADIAEEYAFDEIRVSHEQNLILPHVALADLEPVYRALVAAGLATANAGLITDIIACPGLDYCALANARSIPVAQEISNRFGSPERQAEIGELKIKISGCINACGHHHVGHIGLLGVEKKGAELYQITLGGSGDEHTSIGEIIGRGFEPERVTDAVETIVDTYLGLRRDKSETFLEAYRRVGPQPFKDALYGGGAQAAA

SEQ ID NO: 12530 - protein, 372 aa, Sinorhizobium meliloti 1021
MRVGCPKEIKNHEYRVGLTPGSVREYVAHGHEVIVETKAGAGIGADDDSYRAAGARIVPTAREVFEKADMIVKVKEPQPSEWAQLREGQILYTYLHLAPDPEQTQGLLKSGVTAVAYETVTDERGGLPLLAPMSEVAGRLAIQAGATSLQKANGGRGILLGGVPGVLPAKVAIIGGGVVGLHAAKMAAGLGADVSILDRSLPRLRQLDDIFNGRVHTRYSTIDALEEEVFSADMVIGAVLIPGAAAPKLVTREMLSAMKKGAVIVDVAIDQGGCFETSHATTHSEPTYEVEGIVHYCVANMPGAVPITSAHALNNATLQYGLQLADRGLKAIAEDRHLRAGLNVHRGRVTNAAVAEALGYDAHAPEAVLHVA

SEQ ID NO: 12531 - protein, 192 aa, Sinorhizobium meliloti 1021
MADRTSSKDVIHNGEFGNDALDLIEITGVIKWFDVAKGFGFIVPDNGMQDVLLHVTCLRRDGYQTVLEGARVVALIQKRDRGYQAFRILSMDQSTAVHPSQLPPVRTHVQVTPTSGLERVLVKWFNRTKGFGFLTRGEGTEDIFVHMETLRRFGLTELRPGQVVLCRFGDGEKGLMAAEIHPDGPTPTTRSH

SEQ ID NO: 12532 - protein, 440 aa, Sinorhizobium meliloti 1021
MADALKIGIAGLGTVGASLVRILQDRHETMATTCGRAIEITAVAARDRSKDRGVKLTGIAWFEDAVSLASEADVDVFVELMGGAGDPAYSCVKAALTRGVHVVTANKALLAAHGIELAEIAEQHGALLNYEAAVAGGIPVIKALRESMTGNTISRVYGIMNGTCNYILTKMEKEGLSFEECLKEAQRLGYAEADPAFDIEGNDTAHKLSILTSLAFGTAIAADDIYLEGITNISIEDIQAASDLGYRIKLLGVAQRTDSGIEQRVHPTMVPHDTVIAQVDGVTNAVAIESDILGELLMVGPGAGGDATASAVLGDIADIAKSRPGAQHVPAFGRPAKALLPYKRARMQSHEGGYFIRLKVVDRTGVFANVAKHMAENDISLESIMQHSKHYADPAEPKTIILVTHATSEASVRKAIVSIKGEGYLVGEPQVIRIERPKAW

SEQ ID NO: 12533 - protein, 251 aa, Sinorhizobium meliloti 1021
MLEIKNLHARIAEDGTEIIRGLNLTVKAGEVAAIMGPNGSGKSTLSYILSGREDYEVTEGDILYNGESILELDASERAAKGIFLAFQYPVEIPGVATMQFLKVAMNEQRKYRGEEELTTPEFMRRVKEAAAELKIAPEMLRRPLNVGFSGGEKKRAEILQMALLEPKLCVLDETDSGLDIDALKIVADGVNALRSPDRAVVVITHYQRLLNYIVPDTVHVLYKGQVIKSGDKTLAHELEANGYADIIEAAA

SEQ ID NO: 12534 - protein, 388 aa, Sinorhizobium meliloti 1021
MSGSRIYMDWNATAPLLPEAREALLFALDQLGNPSSVHGEGRAVRALVESARRDVATLCGAQPAAVVFTSGATEAANLVLTSEFRMGRTPLKAGKLYVSAIEHPAVREGGRFAREDVCEIAVTNAGIVDCAALEDLLRAHDRETGLPMVAVMLANNETGIIQPVAEVAALVRAHGGILVVDAVQAAGRLPLSISSLGADFLILSSHKIGGPKGAGALVARGEIMMPSPLIRGGGQEKGHRSGTENAAALAGFAAAARAAAADIDGRMAAIAALRDGLEAEMQSCAPDVVIHGRDQSRLANTCFFTLPGLKAETGQIAFDLEGVALSAGSACSSGKVGQSHVLTAMGYDPRQGALRISIGEATTQAEIERCAAVFAKVAARRRSAGQAA

SEQ ID NO: 12535 - protein, 111 aa, Sinorhizobium meliloti 1021
MSGINDFIDNEVKSNDVVLFMKGTPQFPQCGFSGQVVQILDYVGVDYKGINVLADADLRQGIKDYSNWPTIPQLYVKGEFVGGCDIVREMFQAGELQSLLQGQGISVKGAA

SEQ ID NO: 12536 - protein, 770 aa, Sinorhizobium meliloti 1021
MNTGDKAKSQAVPASGDIDQQALFFHRYPRPGKLEIQPTKPLGNQRDLALAYSPGVAAPCLAIKDNPETAADFTARANLVAVVSNGTAVLGLGNIGPLASKPVMEGKAVLFKKFAGIDVFDIEIDAPTVDRMVDVISALEPTFGGINLEDIKAPECFEVERRLREKMEIPVFHDDQHGTAIIVAAAVLNGLELAGKDIAEAKIVASGAGAAALACLNLLVTLGARRENIWVHDIEGLVYKGREALMDEWKAVYAQESDNRVLADSIGGADVFLGLSAAGVLKPELLARMAEKPLIMALANPTPEIMPEVARAARPDAMICTGRSDFPNQVNNVLCFPHIFRGALDCGARTINEEMKMAAVRAIAGLAREEPSDVAARAYSGETPVFGPDYLIPSPFDQRLILRIAPAVAKAAAESGVATRPIQDFDAYLDKLNRFVFRSGFIMKPVFAAAKNAAKNRVIFAEGEDERVLRAAQVLLEEGTAKPILIGRPQIIETRLRRYGLRIRPDVDFEVVNPEGDPRYRDYVDDYFALVGRLGVIPEAARTIVRTNTTVIGALAVKRGEADALICGVEGRYSRHLRDVSQIIGKRSGVLDFSALSLLISQRGATFFTDTYVSFSPSAEEIAQTTVMAANEIRRFGITPRAALVSHSNFGSRDSESAFKMRTALQLVRELAPDLEVDGEMHGDSAISEVLRQRVMPDSTLNGEANLLVFPNLDAANITLGVVKTMTDSLHVGPILLGSALPAHILSPSVTSRGVVNMAALAVVESSHPV

SEQ ID NO: 12537 - protein, 70 aa, Sinorhizobium meliloti 1021
MATKGIVKFFNQDKGFGFITPEGGSKDVFVHITAVQAAGLTTLNDGQEVSFDTEPDRMGKGPKAVNLQAL

SEQ ID NO: 12538 - protein, 69 aa, Sinorhizobium meliloti 1021
MNSGTVKWFNSTKGFGFIQPDDGATDVFVHASAVERAGMRSLVEGQKVTYDIVRDTKSGKSSADNLRAA

SEQ ID NO: 12539 - protein, 69 aa, Sinorhizobium meliloti 1021
MASGTVKWFNSTKGFGFIQPDDGAADVFVHISAVERAGLSTLKDGQKVSFELTQDRRSGKTSADNLRAL

SEQ ID NO: 12540 - protein, 592 aa, Sinorhizobium meliloti 1021
MSGTENQMTGAEIVLQALKDNGVEHIFGYPGGAVLPIYDEIFQQEDIQHILVRHEQGAGHMAEGYARSTGKVGVMLVTSGPGATNAVTPLQDALMDSIPLVCISGQVPTSLIGSDAFQECDTIGITRPCTKHNWLVRDVNELARVIHEAFRVAQSGRPGPVVVDIPKDVQFATGTYTPPSAVPTQKSYQPKTQGDLKKIEEAVALMKTARQPVIYSGGGVINSGPQAAHFLRELVELTGFPITSTLMGLGAYPASGKNWLGMLGMHGTYEANLAMHDCDVMICIGARFDDRITGRLNAFSPNSKKIHIDIDPSSINKNVRVDVPIIGDVAAVLEDMIRLWRAAAKTVDQTRLGDWWKSISKWRARNSLAYTPSADVIMPQYAIQRLYELTKDRDTYITTEVGQHQMWAAQFFGFEEPNRWMTSGGLGTMGYGFPAAVGVQVAHPESLVIDIAGDASIQMCIQEMSCAVQYGLPVKIFILNNQYMGMVRQWQQLLHGNRLSHSYTEAMPDFVKLAEAYGGVGIRCEKPGELDDAIRQMIDTPAPVIFDCRVANLANCFPMIPSGKAHNEMLLPDEATDEVVANAIDAKGRQLV

SEQ ID NO: 12541 - protein, 400 aa, Sinorhizobium meliloti 1021
MAFLADALSRVKPSATIAVSQKARELKAKGRDVIGLGAGEPDFDTPDNIKKAAIDAIDRGETKYTPVSGIPELREAIAKKFKRENNLDYTAAQTIVGTGGKQILFNAFMATLNPGDEVVIPAPYWVSYPEMVALCGGTPVFVPTRQENNFKLKAEDLDRAITPKTKWFVFNSPSNPSGAAYSHEELKALTDVLMKHPHVWVLTDDMYEHLTYGDFRFATPVEVEPGLYERTLTMNGVSKAYAMTGWRIGYAAGPLHLIKAMDMIQGQQTSGAASIAQWAAVEALNGPQDFIGRNKEIFQGRRDLVVSMLNQAKGISCPTPEGAFYVYPSCAGLIGKTAPSGKVIETDEDFVSELLETEGVAVVHGSAFGLGPNFRISYATSEALLEEACRRIQRFCAACR

SEQ ID NO: 12542 - protein, 71 aa, Sinorhizobium meliloti 1021
MAETGTVKFFNTDKGFGFIKPENGGADIFVHISAVQASGLSGLTENQKVSFDTEPDRRGKGPKAVNLQIVG

SEQ ID NO: 12543 - protein, 310 aa, Sinorhizobium meliloti 1021
MKVFAGNSNRLLAEAICNYLNLPLGKATVRRFADQEIFVEIGENVRGEDVFIVQSTSFPTNDHLMELLIMIDAVRRSSARRITAVLPYFGYARQDRKPGPRTPISAKLVANLITEAGADRVLTLDLHAGQIQGFFDIPTDNLYAIPILARDVKENYNLKNVMVVSPDVGGVVRARALAKRLDCLLAIVDKRRDRPGESEVMNVIGEVNGKDCLLIDDIVDSGGTLCNAAEALLKNGATSVTAYITHGVLSGGAVARVTSSMLKELVITDSIQPTTAVQSAHNIRVISTAALLGEAISRTSQEESVSSLFD

SEQ ID NO: 12544 - protein, 210 aa, Sinorhizobium meliloti 1021
MSSHPYSADEFRRRALQQAGGPIETSWRDHGDFLLNPGIVSYLESLHLKDAAVLVPVVDDGEDASVIFTQRTSNLRKHSGQVAFPGGAVDPEDHSIEVAALREAEEEIGLDPRFVETVARLPHYMAMSGFRITPVLAVVQPGFVLEPNPEEVESVFEVPLSFLMNPRNHGRGSSHWQGAERHFYRMPYGERNIWGITAGIVRMLYERLYA

SEQ ID NO: 12545 - protein, 325 aa, Sinorhizobium meliloti 1021
MMTAKPRILITRRWPQAVERVLAERFDTVLNEEDRPLDRSALADALRNFDAVLPTVSDRLPADVFTGGGLRTRILGNFGVGYNHIDAGAAKEAGIVVTNTPGVLTDCTADLAVSLLLAAARRTGEGERQVRAGAWDGWRPTHMIGTKVTGKTLGIIGFGRIGKAMAKRCHFGFDMDIVFYNRSRVAPEEAARFGARQLDTVEDVLRAADFVSLHCPGGGENRHLINAARLAAMKPAAYLINTSRGDVVDEAALIAALEKGVIRGAGLDVYEAEPDVPTRLRALENVVLLPHLGSATEETRTAMGMKVVDNITAFFAGLQPPDRVA

SEQ ID NO: 12546 - protein, 461 aa, Sinorhizobium meliloti 1021
MANVASTTASAGSELTARALREAVFAGLITLGMFVLFVGLKTDQNIRNELILTQRWGLLATFVAIAMVGRFLMVAYVQPRLAQRKAAKAAAPDVVKEETFFSRNWSKIAVILLLIYPPVIVALVGVQGSLKWVDNFGIQILIYVMLAWGLNIVVGLAGLLDLGYVAFYAVGAYSYALLSSYFGLSFWVLLPIAGLLAACWGVVLGFPVLRLRGDYLAIVTLAFGEIIRLVLINWTEVTKGTFGVSGIAKATLFGIKFDATKDGFAAMMGLPMSSAYYKIFLFYLILGLALLTAFVTIRLRRMPIGRAWEALREDEIACRSLGINTVTTKLTAFATGAMFGGFAGSFFAVRQGFVSPESFVFLESAVILAIVVLGGMGSLTGIAIAAVVMIGGTEILRELTFLKMIFGPTFTPELYRMLIFGLAMVVVMVWKPRGFVGSREPTAFLRERRAISGSFTKEGHG

SEQ ID NO: 12547 - protein, 352 aa, Sinorhizobium meliloti 1021
MAWDEQKLNELKAKYGESHGGELFDPTFRKVADKIFTKSGTRLAPYSGIPTFLTAPHMPVDADDPDFGNLQVAMIGVPMDLGVTNRPGSRFGPRALRAIERIGPYNHVLGCAPVHDLRVADIGDVPFRSRYRLEISHEDIEKRISQIVDAGVLPLSVGGDHSITHPILKAVGRKQPVGMIHIDAHCDTGGAFDLTKFHHGGPFRNAVLDGVLDPTRVIQIGIRGSAEYLWEFSYESGMTVIHAEEVTGLGIPAIIEKAKKIVGDGPTYLSFDVDSLDPSFAPGTGTPEVGGLTTREVLELIRGLKGVNLVGGDVVEVAPQYDTTTNTAHAGAQVLFEILSLMVFSPAVAGKG

SEQ ID NO: 12548 - protein, 364 aa, Sinorhizobium meliloti 1021
MARAFGGPNKYIQRAGEIDKLAAYLAPLGKRALVLIDRVLFDALSERIGKSCGDSLDIRFERFGGECCTSEIERVRKVAIEHGSDILVGVGGGKTADTAKIVAIDTGARIVIAPTIASTDAPCSAIAVRYTEHGVYEEALRLPRNPDAVVVDSALVAAAPARFLVAGIGDALSTWFEARSNIESRTDNYVAGGFPATEAGMAIARHCQDVLTRDAVKAKIAVEAGLLTPAVENIIEANTLLSGLGFENCGCSAAHGIHDGLTVLEEVHGYFHGEKVAFGTLCLLMLENRDRAEIEAMIRFCRSVGLPTKLADLGIVDDVPAKIGRVAEAACRPGNIIYATPVTITVPAVRDAILALDAFSRSIH

SEQ ID NO: 12549 - protein, 424 aa, Sinorhizobium meliloti 1021
MARIVMKFGGTSVADLNRIHNVARHVKREVDAGHEVAVVVSAMSGKTNELVGWVENMPKVAGSNAPFYDAREYDAVVASGEQVTSGLLAIALQSMGINARSWQGWQLPIKTDNAHGAARILEIDGADVIRRMGEGQVAVVAGFQGLGPDNRLATLGRGGSDTSAVAIAAAVKADRCDIYTDVDGVYTTDPRIEPKARRLKKIAFEEMLEMASLGAKVLQVRSVELAMVHKVRTFVRSSFEDPDAPGMGDLMNPPGTLICDEDEIVEQEVVTGIAYAKDEAQISLRRLADRPGVSAAIFGPLAEAHINVDMIVQNISEDGSKTDMTFTVPSGDVDKALRVLGDNKEKIGYDVIQSESGLVKVSVIGIGMRSHAGVAASAFRALADKGINIKAITTSEIKISILIDGPYAELAVRTLHSVYGLDKS

SEQ ID NO: 12550 - protein, 331 aa, Sinorhizobium meliloti 1021
MALFATAFLAGTTAQAATLDVVKQRGELRCGVSQGVLGFSAPDDKGEWSGFDIDFCRAVAAATLGSPDKVKYVPLSTKERFTALQSGEVDLLSRQTTWTLSRDTDLGMSFVGVNYYDGQAFMVRGDIGVKSVKELSGASVCTETGTTTEQNMADYFSANKIEYQVIAFEKADQTIQAFNSGRCDVYSTDASALYSQRLTLNDPDRFVVLPEVISKEPLGPAVRQGDDQWFKVVRWTLFAMIEAEELGITRENAASLLESGTAAQKRFLGIDNEAGKALGLDPKWAYQTVAAVGNYGEIFERHLGKESALRIDRGLNKLWNNGGLIYAPPVR

SEQ ID NO: 12551 - protein, 531 aa, Sinorhizobium meliloti 1021
MAPRVLVSDELSETAVQIFRDHGVEVDFQPKLGKDKEKLAEIIGNYDGLAIRSATKVTEKLIAAATNLKVVGRAGIGVDNVDIPAASRRGIIVMNTPFGNSITTAEHAIALMFAVARQLPAADGSTQAGKWEKSKFMGVEITGKVLGVIGAGNIGSIVCARAIGLKMHVIAYDPFLSKERAEEMGVVKVELDELLAQADFISLHVPLTDKTRNILNAEAIAKAKPGVRIINCARGGLVDEKALAEALKAGHVAGAGFDVFEVEPATESPLFGLPNVVCTPHLGASTTEAQENVALQVAEQMSEYLVKGAVTNAINMPSITAEEAPILKPFIRLADVLGAFVGQVTESAIKEIEILYDGSTAAMNTKALTSAALAGLIRPQVADVNMVSAPVMVKEKGVILSEVKRDKTGVFDGYIKLTVKTANQTRSVAGTVFSDGKPRFIQIKGINLDADVGNHMVYITNTDVPGMIGFIGSTLGDAGVNIANFQLGREKQGGDAIALLYVDGPVSEIVLDKLRANEAIRQAKPLVFNID

SEQ ID NO: 12552 - protein, 645 aa, Sinorhizobium meliloti 1021
MNPNFRNFALWAIIALLLIALFSMFQQPTERAGSREIPFSQFLKDVDASRVKDVVITGSKVIGSYTESGATFQTYAPAVDTALTERLEAKDVTVTVRPETDGSSGFLSYIGTLLPMLLILGVWLFFMRQMQGGSRGAMGFGKSKAKLLTEAHGRVTFDDVAGVDEAKQDLEEIVEFLRDPQKFQRLGGRIPRGVLLVGPPGTGKTLLARSVAGEANVPFFTISGSDFVEMFVGVGASRVRDMFEQAKKNAPCIIFIDEIDAVGRHRGAGLGGGNDEREQTLNQLLVEMDGFEANEGIILIAATNRPDVLDPALLRPGRFDRQVVVPNPDINGRERILKVHVRNVPLAPNVDLKVLARGTPGFSGADLMNLVNESALMAARRNKRLVTMQEFEDAKDKIMMGAERRSSAMTEAEKKLTAYHEAGHAILALNVPSADPLHKATIIPRGRALGMVMQLPEGDRYSMSYKWMISRLAIMMGGRVAEELTFGKENITSGASSDIEQATKLARAMVTQWGFSDQLGQVAYGENQQEVFLGHSVAQQKNVSESTAQKIDNEIRRLIDEAYETARRILVEKNHEFVALAEGLLEYETLTGDEIKALIRGEKPARDLGDDTPPHRGSAVPSAGTKKEAGTKGEEPEGGFEPQPQ

SEQ ID NO: 12553 - protein, 604 aa, Sinorhizobium meliloti 1021
MPRQEKQTPARRSIRPLATVLPYLSRYRGLAIGAAVSLTIAAATTLTLPLAVRRMIDHGFSNSDSGFINTYFSMLMVLAVVLALASAARYYFVISLGERIVADLRRDVFARVMQLSASFFDVNQSGEIVSRLTADATQIKSAVGATASVALRNLILCLGAMGMMVYTSPKLSSLVLAAIPLIVFPLVGFGRSVRRRSREAQDMLAAASAYAGEAIAATRTVQAFNGEESARSRYGSAVEAAYRAARAATRARSVLTAFAITMVFGSVVAVLWFGARDVLADSLSAGTLGQFLLYSVFAAGSLGALSEVWGELSQAAGAAERLNELLNEVPEIEAPEHPVAMPVPATGAVEFENVHFAYPARPDYKSLRGLSFAVRPGETVAIVGPSGAGKSTVFSMLLRYYDPAKGTIRVDGTDVRAVDPEELRERLAIVPQDVTIFATSVHDNIAFGVPDASREAVRAAAVAAQADEFIGRLDRGYDTLVGERGVTLSGGQRQRIAIARAILKNAPILLLDEATSALDAESETLVQKALDVLMQERTTLVIAHRLATVLKADRILVMEHGRIVEEGTHESLIRQGGLYAKLARLQFDHGAEALFVASPAPISP

SEQ ID NO: 12554 - protein, 513 aa, Sinorhizobium meliloti 1021
MTSHILVIDDDPVQRRLLTNMIERLGHVAHLADNGRSGLELLQRKGGIINVILLDLLMPEMNGHGLLEALAERGIDIPVIVQTGQGGIETVVQAMQAGAFDFLVKPVSPERLSIALGNALKMASRDGKVKTARRPRGGAVGFDDIVSASPAMIRVIDLARRAAQSNIPIVLEGESGVGKEMVARAIQAASDRAAKPFVTVNCGAIPHNLVESILFGHEKGAFTGASEKHSGKFVDADGGTLFLDEIGDLPLDVQVKLLRAVQQGEIETIGARQPQKVNVRLISATNKDLITEVREGRFREDLYYRLNVFPITIPALRRRKEDIPVLVRAFVERFSAEQRLDQRLTVSSGAMALLTSYDWPGNIRQLENAIFRAVVLADGHELTVRDFPQVATQIPGYIVADRSGLSWGEAGPERRPASGQLAAAQADAGAREQPAHSEQTPEGRLENAIASLSEGGEVRKLAEVEEELIRFALKFYRGQMSQVARKLGIGRSTLYRKLKDYGIDPDNPLREAA

SEQ ID NO: 12555 - protein, 382 aa, Sinorhizobium meliloti 1021
MSEIVFIAKESDPNEGRVAGSVESVKKLKSLGFDVVVEAGAGLGSRIPDQEYEKAGARVGTAADAKTADVILKVRRPSAQEISGYRSGAVVIAIMDPYGNEEAISAMAGAGLTTFAMELMPRITRAQSMDVLSSQANLAGYQAVIDAAYEYDRALPMMMTAAGTVPAAKIFVMGAGVAGLQAIATARRLGAVVSATDVRPAAKEQVASLGAKFIAVEDEEFKAAETAGGYAKEMSGEYQVKQAALVAEHIAKQDIVITTALIPGRPAPRLVTREMLDSMKPGSVVVDLAVERGGNIEGAEAGKVTEVGGVRIVGHLNVAGRIAASASLLYAKNLVTFLETMVSKETKALALNMEDELVKATALTHGGAVVHPAFGGAMRGEK

SEQ ID NO: 12556 - protein, 307 aa, Sinorhizobium meliloti 1021
MKTITLIGAPIEEGSGRRGAAMGPTALRIAGIDTVLAELGHTVNDEGDLRPLPARDLANHPGANNLQSVAAFARALDEAVHDTARKGHFPIILGGDHALSMGSVSGMARHAQDVGRPLFVLWLDAHADFNSPATSPSGNMHGMPVAFFCGEAEFAPILPKDRPLVDPKKVYQVGIRSVDAREREEIAEHGVNVFDMRAIDEMGMAHIIRQIVDEVRAANGLLHVSLDVDFMDPELAPGVGTTVPGGATFREAHLIMEVLCDSGLVSSLDVVELNPFLDDRGKSARILVELTASLFGRRILDRPTRAA

SEQ ID NO: 12557 - protein, 123 aa, Sinorhizobium meliloti 1021
MFAVIKTGGKQYRVAANDVITIEKLEGVAGDKIEFTEILMVGVGADATIGAPFVEGAVVSAEVVDQGRAKKVIAFKKRRRQNSKRSRGHRQHQTIVRILDIAAAGGKAKKASKKTEAAAEAAN

SEQ ID NO: 12558 - protein, 405 aa, Sinorhizobium meliloti 1021
MASHKDVKKVVLAYSGGLDTSIILKWLQTELGAEVVTFTADLGQGEELEPARKKAEMLGIKEIYIEDVREEFVRDFVFPMFRANAVYEGVYLLGTSIARPLISKHLIDIARKTGADAIAHGATGKGNDQVRFELSAYALNPDIKIIAPWRDWSFKSRTDLLEFAEKHQIPVAKDKKGEAPFSVDANLLHSSSEGKVLEDPAREAPEYVHMRTISPEAAPDKATVIKVGFERGDAVSIDGVRMSPATLLAKLNEYGRDNGIGRLDLVENRFVGMKSRGVYETPGGTILLAAHRAIESITLDRGAAHLKDELMPRYAELIYYGFWFSPEREMLQAAIDRSQEHVEGEVTLKLYKGNVMVIGRESGKSLYSDKLVTFEDDQGAYDQKDAAGFIKLNALRLRTLAARNR

SEQ ID NO: 12559 - protein, 393 aa, Sinorhizobium meliloti 1021
MSNPSIVIASAARTAVGSFNGAFGNTLAHELGAAAIKAVLERAGVEAGEVDEVILGQVLPAGEGQNPARQAAMKAGLPQEKTAWGMNQLCGSGLRAVALGMQQIATGDAKVIVAGGMESMSMAPHCAHLRGGVKMGDYKMIDTMIKDGLTDAFYGYHMGITAENVARKWQLTREEQDEFALASQNKAEAAQKAGRFADEIVPFVVKTRKGDVNVDQDEYIRHGATLDSIAKLRPAFDKEGTVTAGNASGLNDGAAAALLMTEAEAARRGIQPLARIVSWATAGVDPQIMGTGPIPASRKALEKAGWSVADIELVEANEAFAAQACAVNKDLGWDPSIVNVNGGAIAIGHPIGASGARVLNTLLFEMKRRGVSKGLATLCIGGGMGVAMCVERL

SEQ ID NO: 12560 - protein, 473 aa, Sinorhizobium meliloti 1021
MIDEHHIDALTKLLGDKGVVTRREDMEAYEAGARYDRGRAAAVLRPVTTEEVSAAVGYCVRSGIALIPQSGNTGLVSGSTPDESGSEVVVSLDRLTRQFALDLDNRSVRVDAGFRLSELNRRLEEHGLFFPIDLGADPRIGGMIATNTGGSRFLKYGDVRRNTLGLKVVLADEAGTVLDLGSDLRKNNTGVDWKQIFIGTSGAFGIVTECVLNLERLPKQTATAFLVPASGAHVLPLLKAMEERLGAYLSAFEGMSRNAIAAAFAHVPALKNPFQGGKVPDYVILAEISRTSSPREGEQPLDAVLESVLAEIWEMEEVLLADALVGPPHEIWALRHALSEGVKHLGKLIAFDLSFRRGDIMAFCDHMKTEMPEKFPGVTVCDFGHIGDGGVHFNLVVAKDSPLLADATFEQRLREWVFAVAVEQYHGSFSAEHALGRRNQAFYDLYTPEKLKNMAAGLKTLTSPGKLGSVRFG

SEQ ID NO: 12561 - protein, 410 aa, Sinorhizobium meliloti 1021
MTINATVKEAGFQPASRISSIGVSEILKIGARAAAMKREGKPVIILGAGEPDFDTPEHVKQAASDAIHRGETKYTALDGTPELKKAIREKFQRENGLAYELDEITVATGAKQILFNAMMASLDPGDEVIIPTPYWTSYSDIVHICEGKPVLIACDASSGFRLTAEKLEAAITPRTRWVLLNSPSNPSGAAYSAADYRPLLEVLLRHPHVWLLVDDMYEHIVYDGFRFVTPAQLEPGLKNRTLTVNGVSKAYAMTGWRIGYAGGPRELIKAMAVVQSQATSCPSSISQAASVAALNGPQDFLKERTESFQRRRDLVVNGLNAIDGLDCRVPEGAFYTFSGCAGVLGKVTPSGKRIKTDTDFCAYLLEDAHVAVVPGSAFGLSPFFRISYATSEAELKEALERIAAACDRLS

SEQ ID NO: 12562 - protein, 220 aa, Streptomyces lincolnensis
MKIFLDTPDLSVVEQWLPHGIVDGVTTNPTLLRKSGIEDWTGTVGVLARRIAPRDLSVQVSGVDHDDMVSQAKMLASRGENIVIKVPVISPDGRPHLDVMTTLREYGIPVNATACLSAGQALAAAKAGVRYASLLWGRVGDEGGCPESVVADITGLLRRHGMTAQLLVGSVRAPADITRALTAGADAVTVPPALLARWLDHHYARATVRDFQADAGVKYE

SEQ ID NO: 12563 - protein, 423 aa, Streptomyces lincolnensis
MSNPPTAAGVPEELERRLGVSDAVVIGLGSMIGAGIFAALAPAAHAAGSGLLLGLALAAVVAYCNATSSARLAARYPASGGTYVYGRERLGDFWGYLAGWAFVVGKTASCAAMALTVGSYVWPGQAHAVAVAAVVALTAVNYAGVHKSALLTRVIVAVVLAVLAAVVVAALTSDATDTARLDIGSDASVGGVLQAAGLLFFAFAGYARIATLGEEVRDPARTIPRAIPLALGITLVVYAVVAVAVLMVLGPKGLADAAAPLSDTARAAGVDWLAPVVRVGAAVAALGSLLALILGVSRTSLAMARDRHLPHALSAVHPRFKVPHRAELVVGAVVAVVAATADVRGAIGFSSFGVLAYYAVANASAWTLTPEEGRPARVIPVLGLAGCLILAFALPVSSVISGTAVLALGAVAYGIRRGLAARR

SEQ ID NO: 12564 - protein, 313 aa, Arabidopsis thaliana
MMHQMLNKKDSATHSTLPYLNTSISWGVVPTDSVANRRGSAESLSLKVDSRPGHIQTTKQISFQDQDSSSTQSTGQSYTEVASSGDDNPSRQISFSAKSGSEITQRKGFASNPKQGSMTGFPNIHFAPAQANFSFHYADPHYGGLLAATYLPQAPTCNPQMVSMIPGRVPLPAELTETDPVFVNAKQYHAIMRRRQQRAKLEAQNKLIRARKPYLHESRHVHALKRPRGSGGRFLNTKKLLQESEQAAAREQEQDKLGQQVNRKTTCLDSKLICCRTTKTAAQPLLAQTSPLFPTVLISLDTLNSSFQVSQLR

SEQ ID NO: 12565 - protein, 370 aa, Geobacillus stearothermophilus
MAAERVFISPAKYVQGKNVITKIANYLEGIGNKTVVIADEIVWKIAGHTIVNELKKGNIAAEEVVFSGEASRNEVERIANIARKAEAAIVIGVGGGKTLDTAKAVADELDAYIVIVPTAASTDAPTSALSVIYSDDGVFESYRFYKKNPDLVLVDTKIIANAPPRLLASGIADALATWVEARSVIKSGGKTMAGGIPTIAAEAIAEKCEQTLFKYGKLAYESVKAKVVTPALEAVVEANTLLSGLGFESGGLAAAHAIHNGFTALEGEIHHLTHGEKVAFGTLVQLALEEHSQQEIERYIELYLCLDLPVTLEDIKLKDASREDILKVAKAATAEGETIHNAFNVTADDVADAIFAADQYAKAYKEKHRK

SEQ ID NO: 12566 - protein, 568 aa, Nicotiana benthamiana
MAPKLLALSSLSSISPFRLPNYHVSTPNSTLSKLNIFKFHTTKTNLILCKSTESQTVSESEPDGYGAAAPTRGDIYLQRQQAVAASSTVLATIKKKKKKKDKIFKISNLAPCCYGCGAPLHTSEVDAPGYVHQETYDLKKKHHQLRKVLCGRCRLLSHGHMITAVGGNGGYSGGKQFVTAEELREKLSHLRHEKALIVKLVDIVDFNGSFLARVRDLAGANPIILVITKVDLLPKETDLNCVGDWVVEATMKKKLNVLSVHLTSSKSLVGIAGVVSEIQKEKKGRDVYILGSANVGKSAFINALLNTMSYNDPVAATARKYKPIQSAVPGTTLGPIPIDAFLGGGKVYDTPGVHLHHRQAAVIHTEDLPTLAPQSRLRAQAFPSSGLKLESQIADRVRSSGLNGLSIFWGGLVRIDVLKVLPETCLTFYGPKALQLHMVPTEEADEFYQKELGILLTPPTGKEKADGWMGLETKRQLQIKYEDIERPTCDVAISGLGWLSVIPVNKSVGTSDPVSEVTAGELTFVVHVPKPVEIFVRPPLPVGKAGGQWYDYRELTEEESEVRPKWFF

SEQ ID NO: 12567 - protein, 612 aa, Medicago truncatula
MKLKNGLLLFFMFLECVFSKVESKCVKGCDVALASYHVMLPFTYQNITSFMQSKIVSVSSLSDVIISYNKGKVSKNGNLFAFSRVNIPFPCECIGGDFLGHVFEYSAKEGDTYDLIANSYYASLTTVELLKKFNSYDQDHIPAKAKVNVTVNCSCGNSQISKDYGLFITYPLRTDDTLQKIANQSNLDEGLIQSYNSGVNFSNGSGIVFIPGRDQNGDYVPLYPRSGLAKGATVGIIIAGIFGLLLLVIYIYVRYFKKKEEEKTKLAEALSTQDGSAEYETSGSSVHATVFTGIMVAKSTEFSYQELAKATNNFSLDNKIGQGGFGAVYYAELRGEKTAIKKMDVQASSEFLCELKVLTHVHHLNLVRLIGYCVEGSLFLVYEHIDNGNLGQYLHGTGKEPLPWSSRVEIALDSARGLEYIHEHTVPMYIHRDVKSANILIDKNLRGKVADFGLTKLLEVGNSTLQTRLVGTFGYMPPEYAQYGDVSPKIDVYAFGVVLFELISAKNAVLKTGEFVAESRGLVALFEEALNQTDPLESLRKLVDPRLREDYPIDSVLKMAQLGRECTKDNPLLRPSMRSIVVSLMSLLSPSEDCDGDTSDENQTIINLLSVR

SEQ ID NO: 12568 - protein, 257 aa, Prochlorococcus marinus str. MIT 9211
MITQTTEVLLEINDLHAGIEGQKILNGVNLKVNAGEIHAIMGRNGSGKSTLSKVIAGHPLYSITSGEIIFKGQSLEKLDPEEIASMGIFLGFQYPVEIPGVSNSEFLRAATNSRRKYLGKEELDSFDFDEIVKESINLIQMKDSFLERNVNEGFSGGEKKRNEILQMSLLEPLISILDETDSGLDIDSLRIVSQAINALSKKDTATILITHYQRLLNEIEPTFVHIMDAGKIVKTGNKNLAIELEKGGYDLLKKKDI

SEQ ID NO: 12569 - protein, 248 aa, Prochlorococcus marinus str. MIT 9211
MTATSQSKEIILVADDEASIRRILETRLSMIGYQVVTASNGNEALEKFRNLEPDLVVLDVMMPKLDGYGVIQELRKESDVPIVMLTALGDVADRITGLELGADDYVIKPFSPKELEARIRCVLRRIEKEHIAGLPNSGVIQVASFRIDTNKRKVFRGDERIRLTGMEFSLLELLVSRSGEPFSRGEILKEVWGYTPERHVDTRVVDVHISRLRSKLEDDPANPELILTARGTGYLFQRIVDSMAAEKS

SEQ ID NO: 12570 - protein, 390 aa, Prochlorococcus marinus str. MIT 9211
MTGVMPEKPLDFDYQSTTPCSQMVLDAMSPYWQDLWGNPSNRQNRSGLYASAAISNAREKLASLIGIKPEKLIFTSGATEANNLALLGYARAKAIEVGKPGHLITLSTEHYAVLDPLKQLQREGFRVTKLSPNLDGIISLDRLENAFEDDTFMVSIMFANNEIGVIQPIEKISSMCKKRGIIMHSDIAQGFGYIPIDFNSLGIDFLSISGHKIYGPKGIGALIINEDLPIQPLQWGGGQQNGIRPGTMPVPLIIGLAKAAEIAISQLDEQFFRSQDLRNQLWDGLQKSNQGLKINGSMIARLPHNLNFTVLNVSGGRLHKLLKPFISCSSGSACSNGSPSHVLQSIGLSLKEAEASLRLSLGRDTNIEDIKEAIYCISQVISQLREGSTC

SEQ ID NO: 12571 - protein, 329 aa, Prochlorococcus marinus str. MIT 9211
MQFIDQACISVKAGRGGDGIVAFRREKYVPAGGPSGGDGGKGGEIVLQADSNLQTLLDFKFKKFIVAQDGRRGGPNKCSGASGKDLVLKVPCGTQVRHQTTGIILGDLKHHGEILVVAYGGKGGLGNAHYLSNSNRAPEKCTEGKEGEQWLLHLELKLLAEVGIIGLPNAGKSTLMSVVSSARPKIADYPFTTLIPNLGVVRKPTGDGTVFADIPGLIEGAAAGVGLGHEFLRHIERTRLLIHLVDAAAARPIEDIAIIEKELFAYGHSLMNRPRVLVFNKKELLNEQCLQKLQAEARAFTNRDIIFISAATSEGLDELLKNVWEKLEI

SEQ ID NO: 12572 - protein, 390 aa, Prochlorococcus marinus str. MIT 9211
MTSNQSHPKRQSEVIAPYGGSLVDLMLPKADQEKVKKNVRGKLECSDRNACDIELLVIGGFSPLRGFMLKDDYESVIKNHRTTSGDLFGLPIVMDTDREDLVIGDQVLLTYKGQDIAVLKIEEKWEPDKMLEAKGCYGTTSLEHPAVRMIAMQRKRFYLGGAVHGLELPKRVFPCKTPAELRKELPKDEDVVAFQCRNPIHRAHYELFTRALDADNVSKNAVVLVHPTCGPTQEDDIAGEVRFQTYERLASEVNNPRIKWAYLPYSMHMAGPREALQHMIIRRNYGCTHFIIGRDMAGCKSSLNGDDFYGPYEAQDFAKKYSTELSMDTVPSLNLVFTEEEGYVTAEHAKSCNLHIKKLSGTEFRKMLRNGEDIPEWFAFKSVVEVLRKA

SEQ ID NO: 12573 - protein, 244 aa, Prochlorococcus marinus str. MIT 9211
MATAASGFSRYSNQSLGGQSPNQGNDPNQPKKTLLEVIRGLDGATSELVERSKTIFFPGDPAERVYLIRRGAVRLTRVYESGEEITVALLRENSLFGVLSLLTGHRSDRFYHALAFTRVEMVSAPAGSVRNAIEADSGVGLLLLQGLSSRILQTETMIETLTHRDMSSRLVSFLLVLCRDFGVPGDRGITIDLRLSHQAIAEAIGSTRVTITRLLGDLRGLGLLQIDRKKITVFDPIALAKRFN

SEQ ID NO: 12574 - protein, 476 aa, Prochlorococcus marinus str. MIT 9211
MTSALQTPSSRRVERLQEASLLRGPMLLLKSIRGFNSRSSLIWLACVPLALFGLGLFNLSAHAGDFALTTQALADNLWIMVAAVLVIFMNAGFAMVEAGMCRQKNAVNILAKNLIVFTLAVSAYWFIGYKLMYTGSWVIPGVLKLGTPFFNPAPTDPAGLVPSIDFLFQAAFAGTAATIVSGVVAERIKFGEFVVFSLVLTAVIYPIAGSWQWNGDGWLAQLGFYDFAGSSIVHSVGAWAGLIGAIALGPRIGKFVDGRSQALPGHNMAIATLGALILWIGWYGFNGGSVLAFNEAVPYVAVTTTLGAAGGGIAATLLSQLNTGKPDLTMTINGILAGLVSVTAGADGLSLWSSWLVGAIGGLLVVWSVAFVDGLQIDDPVGAVSVHGTCGVWGTLAVGLFYGGKGVFAGGTLSQLLIQAVGAASYAIFTILTCWIAWSIIGGFFGGIRVTEEEELKGLDIGEHGMEAYPDFASAQ

SEQ ID NO: 12575 - protein, 617 aa, Prochlorococcus marinus str. MIT 9211
MTLTSSPVNLGDSENQENSQILGADALMDSLRLHGVSTIFGYPGGAILPIYDSVYKAEKQGWLKHILVRHEQGAAHAADGYARSTGSVGVCFGTSGPGATNLVTGIATAQMDSVPIVVITGQVPRPAIGTDAFQETDIFGITLPIVKHSWVVRDPSEIASVVAQAFFIAASGRPGPVLIDIPKDVGQELFNYQPVQPGSLIPPGFQLPKEPDSLSIAKALKLIEDSQRPLVYAGGGVISAGAHNSLSELAKRHHLPVTTTLMGKGAFDERDSLSVGMLGMHGTAYANFAVTECDLLIAIGARFDDRVTGKLDTFAPRAKIIHFEVDPAEVNKNRTADVALIGDLGISLKQLLELSLRKKVQPNTSQWLGLIDKWKKQYPLVVPPAEGMIYPQEVLLAVRDIVPEAYITTDVGQHQMWAAQYLRNGPRQWISSAGLGTMGFGVPAAVGVQTALPNEKVVCIAGDASILMNIQELGTISQYKLNTKIIIINNHWQGMVRQWQQSFYEERYSATNMLNGEPDFVGLANAFGIKGILIKNRNEFVDQLKEALLEPGPILIDVNVRRDENCYPMVPPGKSNAQMVGLPAHPELAINPNRKCPSCGFTSSSKNKFCPECGSSI

SEQ ID NO: 12576 - protein, 393 aa, Prochlorococcus marinus str. MIT 9211
MSKSHLISERTQELQLSLTLEISARAKLLKKEGKDICSLSAGEPDFDTPNYIVNAAIEALRNGITRYGPAAGDPELREAIAQKLTTSNNVPSKAENILITNGGKQAIFNLFQIILNPGDEVLIPSPYWLSYPEIAKLAGAIPVPLHTSPKDGFKLSSEKLEEKITNRTKLLILNSPCNPTGRVIQKEELISIAEVLRRNKQLLVMTDEIYEYLISENESHHSLAAIAPDLRERIFIVNGFAKAWAMTGWRIGYLAGPKEFIKTAIALQSQSTSNVCSFAQRGALAALLGPKESIKTMSRSYNERREILTKGLNSINGISLIPQKGAFYAFPELAPSLPNSLSFCKLALEKVGLAIIPGIAFGEDRCVRLSCAVSEDTIKEGIARLEKLITQLI

SEQ ID NO: 12577 - protein, 637 aa, Prochlorococcus marinus str. MIT 9211
MNQRVKLILLWLLPIGMVVLISWQILGNGDTTALNQSSSSLATRNSAVSKMSYGRFIDYINAGRVTSVDIYEGGRNAVVEAIDPELDNRVQRIRVDLPGLAPELINKLKSEGISFDVHPPRTAPPALGIIGNLIFPILLIVGLVFLARRSNSMPGGPGQAMQFGKTKARFAMEAETGVKFDDVAGVNEAKQDLEEVVTFLKQPERFTSVGAQIPKGVLLVGPPGTGKTLLAKAIAGEAGVPFFSLSGSEFVEMFVGVGASRVRDLFKRAKENSPCLIFIDEIDAVGRQRGAGIGGGNDEREQTLNQLLTEMDGFEGNSGIIIIAATNRPDVLDSALMRPGRFDRQVSVDAPDIKGRLSILKVHSRNKKLDKVLSLENIARRTPGFTGADLANLLNEAAILTARRRKDFIGITEIDDAVDRIIAGMEGQPLTDGRSKRLIAYHEVGHALIGTLVKDHDPVQKVTLIPRGQAKGLTWFSPDDDQMLVSKAQLKARIMGALGGRAAEDVIFGNAEVTTGAGGDIQQVASMARQMVTKFGMSDLGPISLENSSQEVFIGRDLMTRSDNSDAIAKQIDDQVREIVKKCYRETLDIVNNNKAAMDGLVEVLVEKETIDGDEFREILSNYCEIPDKKNVENIVI

SEQ ID NO: 12578 - protein, 399 aa, Prochlorococcus marinus str. MIT 9211
MRYNTTSNNSNLYLDACSTTPPLKSVIEEISRIQMYQWGNPSSLHKFGLRSAEILERSRYDIAKCFKFKEDQIVFTSGATESINLAIRGSLVNTNPGRIVISSVEHPAVVSATQALIRYGWEVITWPVDNHGIIKLEYLEELVSPPTKLVSLIWGQSEIGSIQPVKLVGEICRNKNIIFHIDASQIISQGLFNLDDIYFDLISLSAHKFQGPQGIGMLLMGDNIKDCLTRFHGAGEQEYGIRSGTQAVALVAGMSIAVNSIKKRLYCEHEDTIFEETKVKNLTNLLRKELTLIKGLKLTGHPSKRLPHHLSFTVSDENNSPISGRDIVRELSRKGLFISSGTACSSGQANDSLILEAIGVEKQLRQSGIRLSLGPWLCGQDLNQIPSILRTVIEFLTIR

SEQ ID NO: 12579 - protein, 863 aa, Prochlorococcus marinus str. MIT 9211
MQASPENFTENAWNSILLAQSHAQENNNQYIETEHLLLSLIEKSDFCQKVLNKAGCEIDKVISDLNDFIKNQPKMKSRPETLFVGQGLNVIISKAEDKRLEWKDDYISVEHLLLTLTNDKRCCKDILSRANIEEKNLNSKIVSMRGSQGVTDKNPENKYESLEKYGRDLTSAAKEGKLDPVIGRDDEIRRTIQILSRRTKNNPVLIGEPGVGKTAIVEGLAQRIINGDVPSALQNRQLIALDMGALIAGAKYRGEFEERLKAVLKEITSSDGQIILFIDEIHTVVGAGATGGSMDASNLLKPMLARGELRCIGATTLNEHRQHFEKDPALERRFQQVLISQPSVEDTVSILRGLKERYEVHHGVRISDNALVAAATLSNRYIADRFLPDKAIDLIDESASKLKMEITSKPEELDEIDRRILQLQMEKFSLKRESDITSKNRLLIIEEELKSFKNKQSELNNQWQKEKDSISELSLIKEEIEKVQFQIDQSKRNYDLNKAAELEFGVISQLQSKLSEKEDLLREENSSREKPLLREEVTEDDIAEVISKWTHIPVKKLVKSEVEKILDLEEKLNRKVIGQPKAIKSITEAIQRSRTGLSDPYRPIATFLFLGPTGVGKTELTKSLAQELFDSEKSIIRIDMSEYMEKHSISRLIGAPPGYIGYESGGQLSEAVRRRPYSVILFDEVEKAHPEIFNLMLQIFDEGRVTDNQGRTINFTNTIIILTSNIGSQSIIELCGQHSNYDRITEVVNKELKNHFRPEFLNRIDESIIFNSLTKKDLNEIILIQLERIKQRLLDKGLDLKIDQQAISWLSEKGYDPSYGARPLKRTIQNELETPIARKILMNNYAKNKAINVEIKGGELNIS

SEQ ID NO: 12580 - protein, 107 aa, Prochlorococcus marinus str. MIT 9211
MDSDTRSKIESLINSNPIMVFMKGTKLMPQCGFSNNVVQILNALGISFETFDVLSDMDIREGIKEFSNWPTIPQVYLKGEFLGGSDILIEMYNSGELKEKLEIALAS

SEQ ID NO: 12581 - protein, 604 aa, Prochlorococcus marinus str. MIT 9211
MATKKTQAGSSCLKKTGSSKELSLESESVSEVASKDQSKLSINENPEVHKSLGFEGFGFSDDLINTLESKGYKDPTPIQKAAFPELMLGRDLLGQAQTGTGKTAAFALPILERIKQDTRAPQVLVLAPTRELAMQVADSFRAYAQGRPEVQVLAVYGGSDFRAQINALRRGVQIVVGTPGRVMDHIRQGTFIKTDLETLVLDEADEMLRMGFIDDIEWILEQLPAKRQMIFFSATMPSEIRRLSKQYLHEPAEITIKAQKKEAQLIRQRYIVIQNSFKLEALKRVLETTADEGVIIFARTKAITLRLSESLEALNHNVAVLNGDVPQTLRERTIERLRQGGIDILVATDVAARGLDVERIGLVINYDMPFDSEAYVHRIGRTGRAGRTGEAILFVSPRERSFINNLERAVGQSIEKMEIPNNEIINQHRINKLKNNLSQAVETPRQHEEETEILKCLIKEVGEELEIETKDIAVAALNLAIGSLPLKIQEDESWLSQQNISRKNYDRRDDRGRSRRKNSFNSSHPDKDKERYKLDVGHRDRVKPGNIVGAIANESGLKGNMIGRIQIFDNYSLVDLPKGMPTNIYKSLKTVKVMNKELNINLYK

SEQ ID NO: 12582 - protein, 465 aa, Prochlorococcus marinus str. MIT 9211
MRLSALLTFNRGQNLFLPAHGRGAALPREFRKLLRQSPGVWDLPELPDIGSTLVSTGAIAISQEKSAKDFGVDHCWYGVNGATGLLQASLLSMAKPSEAVLMPRNIHRSLIQACVLGDIQPILFDLPYMADRGHTSPPDLNWLNKVLNSVVSSGIKIVAAVLVNPTYHGYASDLTPLIERLHNYGISVLVDEAHGTYFAANISRDLPHSALRAGADLVVHSLHKSSTGIGQTAVLWSQGNLIDPITIERSLGMFQTTSPSSLLLSSCEATLRDLCSRAGQRRLISQIDSCRDVYSRLLTLGVPLLKTDDPLRIILHTSSEGISGFRADDWFIKKRIVAELPEPGTLTFCMGFASPKGFVRALDKQWHGMLEKKISDEIYPPFTFPKVPFLTIPRCSCSLASRGRSHFVLLNDAVGSISADLICPYPPGIPIVIPGESLDHDRVNWMIEQNKLWPNQIPSQIRVLY

SEQ ID NO: 12583 - protein, 331 aa, Prochlorococcus marinus str. MIT 9211
MTSFITAANTKQKNISHDTRRLRLISGTSNPALSKEIAQYIGIPCVPLVSKRFADGELYIQIQQSIRGCDVFLIQPTCAPVNDSLMELMIMVDACKRASARQITAVIPYYGYARADRKTAGRESITAKLTANLLVSSGVDRVLAMDLHSAQIQGYFDIPCDHIYGSPVLVDYLATKQLDEVVVVSPDVGGVARARAFAKQMKDAPLAIIDKRRSAHNVAESLTVIGEVANKTAILIDDMIDTGGTICAGAELLRKEGAKRVFACASHAVFSPPAYSRLSIPNLFEQVIVTNSIPVPNDLNFEQLQVLSVANMLGEAILRIHEESSVSSMFR

SEQ ID NO: 12584 - protein, 361 aa, Prochlorococcus marinus str. MIT 9211
MSYSEANVIAGGLAHIPVLIGVFGFIQSFILKRTQAKGTSNQPSTQTKPASSVASSQPKVIKKPAHPNVPVNTYKPKTPFIGTVKENYSLLKSGAIGRVNHITFDLSSGDPLLKYVEGQSIGIIPAGEDANGKPHKIRLYSIASTRHGDDYKGNTVSLCVRQLQYEKDGKTIDGVCSTYLCDIKPGDKVKITGPVGKEMLLPEDENANIIMLATGTGIAPMRAYLRRMFDPTEQEKNSWNYKGNAWLFMGAPKTANLLYDSDFEGYKSKFPNNLRYTKAISREQKNARGGRMYIQDRVLEHADEIFALIENPKTHIYLCGLKGMEPGIDEAMTQAAASKGLVWSELRPQLKKAGRWHVETY

SEQ ID NO: 12585 - protein, 289 aa, Prochlorococcus marinus str. MIT 9211
MKEESLGFVGLGAIGLPIAKNLLAAGYNLRVHTRSRTAEKDPGLKGANACSSPRDVAKGCEVFFICVSDDDAVEDVLFGSKGASQSLDKGSLIIDLSTISPSSARSNERTLAKKHIQYIDAPVTGGTEGAINGDLAIFLGCSKQTLGKINPLIKSIATHIYTFGEVGKGQEVKAINQILVAGSYAAVAEAIALGQTLELPMNIVIDALSKGAASSWALANRSKAMLEDQYPLGFKLGLHYKDLLIALKTAEELGLTLEVTKKVKDIEKKLIHNGFSDYDVSVLRRSVAK

SEQ ID NO: 12586 - protein, 382 aa, Prochlorococcus marinus str. MIT 9211
MTLPRLLIPRESLPGETRVAATPETIKKFLGLGCHVHVQEGAGLLAGFIKEDYIKAGAEVFAAEDSNLLRQVDAVLCVNSPQQALLSKLSKGTLLVGLLAPYGNSSLEASLKSNQLSALALELLPRISRAQSSDALSSQANIAGYKATLLAASALDRYFPMLMTAAGTVQPAKVVILGAGVAGLQAIATAKRLGAVVYVSDIRPAVKEQVESLGARFINPPELEEKPNEAGGYARQASELFLAAQRKQLMEQLSEADVAICTAQVPGKKAPRLLNEEMLDQMRPGSVVIDLAVSQGGNCFGTKPGETIVRKGVRLIGASDLPCSVPNHASVLYSRNLLSLISPLVKDGEFILDTNDEMIDGSLISENGVIRHENVFNAGGTN

SEQ ID NO: 12587 - protein, 566 aa, Prochlorococcus marinus str. MIT 9211
MRDDRLEELKKGLSQILDEENILSGNSQTKSYREGIRVGKGIASFVVLPQNLVQFWDILNLCIFLDKIVIIQAANTGLTGGSTPDGDTYDRDVVIINTLAIDRIILLNNAKQVIALPGSTLSNLENILLDYGREPHSLIGSSCIGASIIGGICNNSGGNLVNRGPAYTELSLYASVDKNGELELINNLGIDLGETPQEILCNLENAKFDQNNLPYTHRKASDYEYKNRLRDMTSKIPARFNSDKRRLYDSSGCAGKIAVFAVRLDTFIKPKNEQVFLVGTNNPGNFSQIRKEILTSFDQLPDMAEYMHKSFFDGADKYGKDTFLIIKYFGQRFMPRLFKLKKRFDLFFDRLPFAKKNLFEKILHNHAQLLPDHLPVRIRQYRHAYSHLLIIKSSDLCIEETRDMLAKKINNTSDVKFLECSQSEGEDLLLHRYVAGIAPKRFCIINEDQTTSLLPLDVALPRNNKNWHEILPESAFLESEASFQMGHFLCMVFHWDFVFNSESDLVKIKKEILSVLDKAGAKYPAEHNVGHLYFAEHDLSNFYKKIDPTNSFNAGIGKMSKNKYYA

SEQ ID NO: 12588 - protein, 314 aa, Prochlorococcus marinus str. MIT 9211
MSLVEPKEKIFRSGFVALIGRPNVGKSTLVNELVGQKVSITSPVAQTTRNRLRAILTTQNAQLVFVDTPGIHKPHHLLGQRLVQSARRSIGEVDTILLIFEGCHPPGKGDYFVVNLLREEERPVLIVLNKWDLLPLEKSKQRENEYKDLFRELDWPIFCCSATHGTGLEGLIEEISRNLPIGPRLFPPEMVSDQSEQTIFRELIREQVLLHTREEIPHSVAVRIDRLEEILPKPGKKSQNVHTAILATILVERKSQKGILIGKGGSMLKQIGQAARLQMQVFINGSVYLELFVKVVPNWRSNPASLAELGYEGN

SEQ ID NO: 12589 - protein, 528 aa, Prochlorococcus marinus str. MIT 9211
MTKVLVSDPIDQAGIEILSQVAQVDQRIDLSNEQLKEVISEYEALMIRSGTQVTSEVIEASDRLRIIGRAGVGVDNVDVPAATKRGVLVVNSPGGNTIAAAEHALALLLALSRNIPQAHSSTFGGLWERKKYVGNELYKKILGVVGLGKIGSHVAKVANAMGMEVIAFDPFVSADRAQQMQVRLSSIDNLFEEADYITLHLPRTPETENLVNAQLLSTMKSTARLVNCARGGIIDEAALADALNSEVIAGAALDVYAEEPLKKDSPLLSVNKGLILTPHLGASTAEAQENVAIDVAEQIRDVLLGLPARSAVNIPGLSAEIMDSLKPHLQLAETLGLLASQISGGHIQKLEVRLQGEFAQHPSQPLVVATLKGLLSTALGDRINYVNASLEAKGRGINVLEVKDESCPDFSGGSLQLTTVADDGSHSLAGTVFADGDLRITCIDEFPVNVAPSRHMLFTRHRDMPGIIGKIGSLLGVHNVNIASMQVGRRIVRGEAVMVLSIDDPIPSELLKSILQIQGINEAHPVTL

SEQ ID NO: 12590 - protein, 1531 aa, Prochlorococcus marinus str. MIT 9211
MVEFMPLDSSSPKSPYCDSKSPDSMIGEKDACGVGFLAHTKGVPSHWVLQQALRGLECMEHRGGCGGDSDSGDGAGILCEIPWKYLKSIWSAAKTANRYTGLGMIFMPNDEKERNSAKAIFEKEARGLGLISKGWREVPVKTSVLGVLARDTAPFIEQWLIEGQEHGEKLERLLYRLRKRIEKRCIETLGENAKDLYIASLSNRTVVYKGMVRSEVLASFYTDLLDPRFEIAFAVYHRRFSTNTLPRWPLAQPMRLLGHNGEINTLLGNLNWAKATEVHLREIWNDSTDDLKPVVNASSSDSANLDATLELLVRSGRPITESLLTLVPEAFRDQPELEGQSAIKSFYEYSACTQESWDGPALLVFADGCFVGATLDRNGLRPARYCVTKDDLVIMGSETGVVDIEDERILEKGRLGPGQMLAVDLQQGRLLRNWDVKKEAASRHPYKEWLSDNRLNLSKQPWKKETYLSQLDLIQIQTAFGFSAEDLDLVIEAMASEGKEPTYCMGDDIPLAILSSKPHLLYDYFKQRFAQVTNPPIDPLREKLVMSLEMHLGKRGSPLKPKPNAFSVVHINSPILNENDLAQISKASLPVKTLTTLLDIEQGVTGLKESLMQLCNEAEKAVRDGNRILILSDRGICATKTYIPPLLAVGAVHHHLLLHKLRLDASIIVDTAQCWSTHHVGCLIGYGASAICPWLTWESTRHWWEHPKTQKLIQSGKIPNLTINKAQENLKKALEDGLRKILSKIGISLLASYHGAQIFEAVGIGSDLINLAFAGTTSRIAGLSLKELAIETLSFHSKAYPQLDRKRLEFLGFVQYRTGGEYHLNNPEMSKALHAAVKAGPQYNHFTTYKSLLESRPATALRDLLTLRESKKTLPLDQVESAESICKRFCTGGMSLGALSREAHEVLAIAMNRIGGKSNSGEGGEDPDRFKTLNDVDSENQSQILPNIKGLRNGDTACSAIKQIASGRFGVTPEYLRSAKQLEIKMAQGAKPGEGGQLPGPKVDSYIAKLRNSKAGVALISPPPHHDIYSIEDLAQLIHDLHQVHPSAKVSVKLVAEIGIGTIAAGVAKANADVIQISGHDGGTGASPLSSIKHAGLPWELGLTEVHRSLIENGLRSRVLLRTDGGLKTGWDVVIAALLGAEEFGFGSIAMIAEGCIMARICHTNKCPVGVATQQEALRKRFPGLPEHVVNFFLFVAEEVRHILSNLGVARLEDLIGKTELLEPRNLKLPKTNKLDLSSLLKPLETANDRSWLQHKNTAHSNGIVLEDKLLKDSEIKQSIISHANVIKEIPILNTDRSVCARISGEIAQLYGNKGFKGNLNLTFKGSAGQSFGAFLLQGMNIRLVGEANDYVGKGMNGGVLTIVPPSNNQNVSNHVILGNTCLYGGTGGKLFSLGRAGERFGVRNSGVHAVIEGAGDHCCEYMTGGIVVVLGSTGRNVGAGMTGGVAFLLDEEDQATARINQENVGIHGLSTKEQEDLLKPLLEEHLVQTQSTKAHDILNRWAYWKELFKVIVPPSEKSKVGLEAVDIALV

SEQ ID NO: 12591 - protein, 588 aa, Prochlorococcus marinus str. MIT 9211
MVLLVQKFGGTSVGSVERIQSVAQRIALCKDQGFELVIVVSAMGKATDELTQLAQEISHKAPKREMDMLLATGEQVSIALLSIALNEIGIPATSMTGAQVGIVTESSHGRARILEIKTARIENLLSQGQVVVVAGFQGTSLGSGGTAEITTLGRGGSDTSAVALAAALHADACEIYTDVPGVLTTDPRKVPNAQLMNSISCDEMLELASLGAAVLHPRAVEIARNYGIKLVVRSSWDETPGTTITSQGNREIGKEGLELGRPVTGVELVENQAVLGLAHIPDKPGIAADLFETLSKGGVNVDLIIQSTHEGNSNDITFTVAEEELSLAKALCKQFINKFGGELSTQSEMSKLSIRGAGIMGRPGIAAKLFETISKAGINLRLIATSEVKLSCVIDSGMGCKALRAVSEAFEIKKDHIHINPEICNLEEPEVRGVALDTNQAQMSVINVPDIPGTAATLCRALTESGISLDTIVQSERKHKKGGRNISFTLHKEDREKLNKVLLPLLKTWHEAYLQDGKAIARISSVGAGMPATIGTAARMFRALANAEINIEMIATSEIRTTCIVSESYGTKALQAVHEFFQLNESDK

SEQ ID NO: 12592 - protein, 296 aa, Prochlorococcus marinus str. MIT 9211
MKINQNLTFNNSEGIFIGSQTNCKDCKIGIYGVPYDGTTSFRPGTRFGPSAIRNISNGIESFCPQLNLDLEDLKYVDLGSLDIPFGAPEKVINLVKQATILLMQKGIKPLLLGGEHSITEGAIAGIVDFHPELIILQLDAHADLRDEWLGSKHNHACVMRRCIEILPSKKIFQMGIRSGTSKEFKELKEKKRLISHQSGQVAKSLDKAMQPYLGMPIYLTLDLDWFDPSVMPGTGTPEPGGFLWQDFAAVIEVIKKHNLIAADIVELAPKLDHSEISSILAAKIARSLIMLLSLEK

SEQ ID NO: 12593 - protein, 634 aa, Prochlorococcus marinus str. MIT 9211
MGKVVGIDLGTTNSCVAVMEGGKPTVIANAEGFRTTPSVVAYTKNQDQLVGQIAKRQAVMNPENTFYSSKRFVGRRVDEVNSESKEVSYSVEKAGSNVKLKCPILDKQFSPEEVSAQVLRKLSEDAGKYLGENVTQAVITVPAYFNDSQRQATKDAGKIAGLEVLRIINEPTAAALAYGLDKKSNERILVFDLGGGTFDVSVLEVGDGVFEVLSTSGDTHLGGDDFDKVIVDHLASTFKSNEGIDLRQDKQALQRLTESAEKAKIELSNATQSEINLPFITATPEGPKHLDLTLTRAKFEELASNLIDRCRVPVEQALKDAKLSTGEIDEIVMVGGSTRMPAVKELVKRVTGKDPNQTVNPDEVVAVGAAIQGGVLAGEVKDILLLDVTPLSLGVETLGGVMTKMITRNTTVPTKKAETYSTAVDGQTNVEIHVLQGEREMASDNKSLGTFRLDGIPPAPRGVPQIEVTFDIDANGILSVTAKDKGSGKEQSISITGASTLSDNEVDKMVKDAEVNATADKDKRERIDLKNQAETLVYQTEKQLGELGDKVEPDAKVKVEEKRMKLKEATDKDDFETMKTLVEELQQELYSLGASVYQQANAASQAAETSGNDTGNSNGGNNDDVIDAEFTESK

SEQ ID NO: 12594 - protein, 400 aa, Prochlorococcus marinus str. MIT 9211
MEVKKVVLAYSGGVDTSSCIPYLINEYGVEEVVAFAADLGQGDELEPIREKALSAGASECLVDDLVKPFIEDFAFPAIRANALYEGKYPLSTALARPLISKRLVDIAKELEADAVAHGCTGKGNDQVRFDIAIATLAPELKVLTPARQWGMSREEVIAYGERYGIPAPVSKKSPYSIDLNLLGRSVEAGPLEDISLSPPEEVYQITSSIENTPDQSQEIEIIFEGGNPIAIDGVELDPLSLIVLANQLAGKHGFGRIDMIENRVVGIKSREIYETPGLLLLIKAHQELESLTLPADVLRTKSTLETQWADLVYQGLWFSPLKNALDGFIDRTQDEVNGSVKVKLHKGNATITGRSSSQNSLYLPDFSTYGSQDKFKHDNAEGFIYIWGLPSRLWAQSKNK

SEQ ID NO: 12595 - protein, 675 aa, Oryza sativa
MSAPVCLVNTGGGTPFVSTVELRPFESLAYPTDNQSLSLYERKSMRSGADVDIIRFPDDQYDRYWYAWELTGNDPYSNISTQSAIELNTTFMVPLRVLQTAFVPDNKTREFTVSIDSGMQSGPISPPYLKGWSIINWSSDSEDLSIKLVATATSSLPPILNAYEVYSRIIHEYPMTFSQDFDAIMAIKHEYGIRKNWMGDPCYPSNSVWDGVECTNPGDDKTMRIISLDLSNSELQGQISYNFTLFSALKYLNLSCNQLTGTIPDYLRKSNGSIVFSYESDGDMCKKPITSSSRNRAATLAVYVAAPVLVVAMLVVAYLIWRAKRKPHFSTDDSPTVPEQISPPGHWTNHWDHLQKPENRRFTYEELAKFTDSFKCLIGHGGFGNVYYGCLEDNTEVAVKMRSESSSHGLDEFLAEVQSLTKVNHRNLVSLIGYCWEKDHLALVYEYMSSGNLSDYLRGKTSMGGTMNWATRVRVMLEAAQGLEYLHKGCNLPIIHGDVKTNNILLGGNLKAKIADFGLSKTYHSDSQTHISAIAAGSMGYIDPEYYITGRLTESSDVYSFGVVLLEVTSGEPTIIPGNGHIVERVKQKMVTGNISSVADARLGGSYNVNSMWKVLDAAMMCTADIAAQRPMMSAVVMQLKESLELEEAHGDMGDMENIARDNKFSMSMLGPSAR

SEQ ID NO: 12596 - protein, 175 aa, Zea mays
MSATDHLVMARVIQDVLDPFTPTIPLRITYNNRLLLPSAELKPSAVVSKPRVDIGGSDMRAFYTLVLIDPDAPSPSHPSLREYLHWMVTDIPETTSVNFGQELIFYERPDPRSGIHRLVFVLFRQLGRGTVFAPEMRHNFNCRSFARQYHLSIATATYFNCQREGGSGGRRFREE

SEQ ID NO: 12597 - protein, 175 aa, Zea mays
MSRDPLVVGSIVGDVVDYFSASALLRVMYGGREMTCGSELRPSQVASEPTVHITGGRDGRPVLYTLVMLDPDAPSPSNPSKREYLHWLVTDIPEGAGANHGNEVVAYESPRPSAGIHRFVFIVFRQAVRQAIYAPGWRANFNTRDFAACYSLGPPVAATYFNCQREGGCGGRRYR

SEQ ID NO: 12598 - protein, 173 aa, Zea mays
MSRGRDPLALSQVIGDVLDPFIKSATMRINYGDKEITNGTGLRASAVLNAPHVEIEGHDQTKLYTLVMVDPDAPSPSKPEYREYLHWLVTDIPEARDIRFGNEIVPYESPRPPAGIHRTVFVLFKQQARQTVYAPGWRPNFNIRDFSAIYNLGPPVAALYFNCQKESGVGGRR

SEQ ID NO: 12599 - protein, 430 aa, Streptomyces sp. NRRL 5331
MMRTRPLKVALLGCGVVGSEVARIMTTHADDLAARIGAPVELVGVAVRRPSKVREGIDPALITTDATALVQRGDIDVVIEVIGGIEPARTLITTAFENGASVVSANKALLAEDGAALHAAAEKYGRDLYYEAAVAGAIPLVRPLRESLAGDKVNRVLGIVNGTTNFILDKMDTSGAGYSEALDEATALGYAEADPTADVEGFDAAAKAAILAGIAFHTRVKIGDVHREGITEVTAADIASARGMGCTVKLLAICERAADGASVTARVHPAMIPLSHPLASVREAYNAVFIEAEAAGQLMFYGPGAGGSPTASAVLGDLVAVCRNKLGEATGPGESAYTRLPVSPMGEVVTRYHISLDVADKPGVLAQVATVFAEQGVSIDTVRQQGKDGEASLVVVTHRAPDAALSGTVEALRKLDTVRGVASIMRVEGE

SEQ ID NO: 12600 - protein, 204 aa, Mesorhizobium plurifarium
TLEQLPLWGFDGSSTNQAEGRSSDCVLKPVAVYPDPARTNGVLVMCEVMMPDGVTPHASNSRATILDDEDAWFGFEQEYFFYKDGRPLGFPESGYPAPQGPYYTGVGFKNVGDIARQLVEEHLDLCLAAGINHEGINAEVAKGQWEFQIFGKGSRKAADQMWMARYLLLRLTEKYGIDIEFHCKPLGDTDWNGLGACKNDVEGE

SEQ ID NO: 12601 - protein, 188 aa, Mesorhizobium septentrionale
IKDYAEFPTLEQLPLWGFDGSSTQQAEGHSSDCVLKPVAVFPDPARTNGVLVMCEVMMPDGVTPHSSNKRATILDDEGAWFGFEQEYFFYKDGRPLGFPESGYPAPQGPYYTGVGYSNVGSVARQIVEEHLDQCLAAGINHEGINAEVAKGQWEFQIFGKGSKKAADQMWMARYLMQRLTEKYGIDIE

SEQ ID NO: 12602 - protein, 480 aa, Bacillus subtilis subsp. subtilis str. 168
MNTPLYKALIQHARRNSHSFHVPGHHNGDVFFDDAKSIFDPLLTIDVTELAGLDDLHHPSGVIKEAQELASQLYGSAESFFLVNGTTVGNLAMILSVCEPGDTILVQRNCHKSVFHAVDLSGAEPVYLAPDVDSAMHVPTHVPLGTIKEALEAYPDAKGLVLTNPTYYGHSADLTEIITEAHHYGIPVLVDEAHGAHFILGEPFPVSALKMGADIVVQSAHKTLPAMTMGSYLHLNSSCRINRDRVAEYLNRLQSSSPSYPIMASLDIARAYVQHIIEEQKLSDILQRIETLKQTFDSLTNAEAVNPANPLIITDPLKLTIRSKRGHSGYTLQSILERANIFTELADENQVLLVLPLGGKRRINAEIIRSIDEEIEKTPPDQTFVSAEWGVQPVTVLPYPKKVLHSFKKEYVSFEEAAGRLNAEDIIPYPPGIPMIMAGERITKESVQKLSRLISMKTHVQGNMKIKEKQLLVYIEEEKS

SEQ ID NO: 12603 - protein, 317 aa, Bacillus subtilis subsp. subtilis str. 168
MSNQYGDKNLKIFSLNSNPELAKEIADIVGVQLGKCSVTRFSDGEVQINIEESIRGCDCYIIQSTSDPVNEHIMELLIMVDALKRASAKTINIVIPYYGYARQDRKARSREPITAKLFANLLETAGATRVIALDLHAPQIQGFFDIPIDHLMGVPILGEYFEGKNLEDIVIVSPDHGGVTRARKLADRLKAPIAIIDKRRPRPNVAEVMNIVGNIEGKTAILIDDIIDTAGTITLAANALVENGAKEVYACCTHPVLSGPAVERINNSTIKELVVTNSIKLPEEKKIERFKQLSVGPLLAEAIIRVHEQQSVSYLFS

SEQ ID NO: 12604 - protein, 454 aa, Bacillus subtilis subsp. subtilis str. 168
MKVVKFGGSSLASGAQLDKVFHIVTSDPARKAVVVSAPGKHYAEDTKVTDLLIACAEQYLATGSAPELAEAVVERYALIANELQLGQSIIEKIRDDLFTLLEGDKSNPEQYLDAVKASGEDNNAKLIAAYFRYKGVKAEYVNPKDAGLFVTNEPGNAQVLPESYQNLYRLRERDGLIIFPGFFGFSKDGDVITFSRSGSDITGSILANGLQADLYENFTDVDAVYSVNPSFVENPKEISELTYREMRELSYAGFSVFHDEALIPAFRAGIPVQIKNTNNPSAEGTRVVSKRDNTNGPVVGIASDTGFCSIYISKYLMNREIGFGRRALQILEEHGLTYEHVPSGIDDMTIILRQGQMDAATERSVIKRIEEDLHADEVIVEHHLALIMVVGEAMRHNVGTTARAAKALSEAQVNIEMINQGSSEVSMMFGVKEAEERKAVQALYQEFFAGVLIS

SEQ ID NO: 12605 - protein, 574 aa, Bacillus subtilis subsp. subtilis str. 168
MAHKTAGQAMTELLEQWGVDHVYGIPGDSINEFIEELRHERNQLKFIQTRHEEVAALAAAAEAKLTGKIGVCLSIAGPGAVHLLNGLYDAKADGAPVLAIAGQVSSGEVGRDYFQEIKLEQMFEDVAVFNREVHSAESLPDLLNQAIRTAYSKKGVAVLSVSDDLFAEKIKREPVYTSPVYIEGNLEPKKEQLVTCAQYINNAKKPIILAGQGMKKAKRELLEFADKAAAPIVVTLPAKGVVPDKHPHFLGNLGQIGTKPAYEAMEECDLLIMLGTSFPYRDYLPDDTPAIQLDSDPAKIGKRYPVTAGLVCDSALGLRELTEYIERKEDRRFLNACTEHMQHWWNEIEKDETEATTPLKPQQVVARLQEAAADDAVLSVDVGTVTVWMARHFKMNANQDFIVSSWLATMGCGLPGAIAASLSEPERQAIAVCGDGGFSMVMQDLPTAVKYKLPITVVILNNENLGMIEYEQQVKGNIDYVTKLQNVDYAAFAESCGAKGIKVTKAEELAPAFHEALHSDQPVVVDVMIGNEPPLPGKITYGQAKGFSKYMLKNFFENQKFEMPSLKKSLKRLF

SEQ ID NO: 12606 - protein, 66 aa, Bacillus subtilis subsp. subtilis str. 168
MEQGTVKWFNAEKGFGFIERENGDDVFVHFSAIQSDGFKSLDEGQKVSFDVEQGARGAQAANVQKA

SEQ ID NO: 12607 - protein, 458 aa, Bacillus subtilis subsp. subtilis str. 168
MTDDMTKDNINQQTLQRGLKNRHIQLIAIGGAIGTGLFLGSGKSIHFAGPSILFAYMITGIICFLIMRSLGELLLSNLNYHSFVDFVQDYLGDMAAFITGWTYWFCWISIAMADLTAVGLYTQYWLPGVPQWVPGLIALIILLIMNLATVKLFGELEFWFALIKVIAILALIVIGLVMIFKGFSTSSGVSSFTNLWSHGGLFPNGMHGFILSFQMVVFAFVGIELVGLTAGETENPEKVIPKAINNIPVRVLLFYIGALLVIMSIYPWDIINPSESPFVQVFVAVGIVGAASIINFVVLTSAASACNSAVFSTSRMVYSLAKDHNAPESMAKLTQRKVPRNALFFSAIVILIGVTLNYIMPEGVFTLITSISTVCFIYIWGITVICHMKYRKTRPELAKTNKFKLPLYPFTNYLILAFLAFVLVVLALAQDTRVSLFVTPVWFILLIVIYKVRKAKHQ

SEQ ID NO: 12608 - protein, 492 aa, Bacillus subtilis subsp. subtilis str. 168
MSIEIIISLGIYFIAMLLIGWYAFKKTTDINDYMLGGRGLGPFVTALSAGAADMSGWMLMGVPGAMFATGLSTLWLALGLTIGAYSNYLLLAPRLRAYTEAADDAITIPDFFDKRFQHSSSLLKIVSALIIMIFFTLYTSSGMVSGGRLFESAFGADYKLGLFLTTAVVVLYTLFGGFLAVSLTDFVQGAIMFAALVLVPIVAFTHVGGVAPTFHEIDAVNPHLLDIFKGASVISIISYLAWGLGYYGQPHIIVRFMAIKDIKDLKPARRIGMSWMIITVLGSVLTGLIGVAYAHKFGVAVKDPEMIFIIFSKILFHPLITGFLLSAILAAIMSSISSQLLVTASAVTEDLYRSFFRRKASDKELVMIGRLSVLVIAVIAVLLSLNPNSTILDLVGYAWAGFGSAFGPAILLSLYWKRMNEWGALAAMIVGAATVLIWITTGLAKSTGVYEIIPGFILSMIAGIIVSMITKRPAKASYRLFGVMEKLLKRKK

SEQ ID NO: 12609 - protein, 369 aa, Bacillus subtilis subsp. subtilis str. 168
MKHMLIAGGGIGGLSAAISLRKAGFSVTLCEAASENRKTGAGILQPQNALAVLKELGVFEDCCKHGFQTEWFKTFDEQGNLLFQVSESFLDDSLPGRNNILRKTLNDILMKHAEAVGVDIKWGKKVVAYEETAESVTALCEDGEKMQADILAGFDGIHSVVRDKMLQKETEKEHLGMGAWRFYIELPDYTFEDATFMYRSGDTQIGVVPLAQHAGYVFVLQPCTSDYWDEEDTRFDRVKEILSGFRGLDFVTKHMSKQHPVIFNKLEQVAVQEPWHKGRVIIGGDAAHAGAPTLAQGAAMAIEDAIVLAEELQNHADHETALQAYYKRRAPRALKVQNLSSEIVRRRLKGEPGAEELIGECYAVLREGY

SEQ ID NO: 12610 - protein, 461 aa, Bacillus subtilis subsp. subtilis str. 168
MSSLFRKKPLETLSAQSKSKSLARTLSAFDLTLLGIGCVIGTGIFVITGTVAATGAGPALIISFILAGLACALAAFCYAEFSSSIPISGSVYSYSYVTLGELLAFLIGWDLMLEYVIALSAVATGWSSYFQSLLAGFNLHIPAALTGAPGSMAGAVFNLPAAVIILLITAIVSRGVKESTRFNNVIVLMKIAIILLFIIVGIGYVKPDNWSPFMPFGMKGVILSAATVFFAYLGFDAVSNASEEVKNPQKNMPVGIISALAVCTVLYIAVSLVLTGMMPYAKLNVGDPVSFALKFVGQDAVAGIISVGAIIGITTVMLALLYAQVRLTFAMSRDGLLPGLFAKVHPSFKTPFRNTWLTGIVAAGIAGFINLGTLAHLVNMGTLAAFTVISIAVIVLRKKHPEIKASFRVPFVPVVPIISAGICLWFMYSLPGVTWLSFVIWIAVGTLVYFLYSRKHSLLNK

SEQ ID NO: 12611 - protein, 604 aa, Bacillus subtilis subsp. subtilis str. 168
MLKDIRKPFQYPKLPIDKKEGAKKRAKAKDTKGTLRRIWSYLAERKGLLILVMLMVVISAIFGLLGPFVIGKAIDHFIVGKTVSGLIPVLLLLLAIYIIQSLSLWFQNYWMITISQGTVFRMRSELFTHLHELPIPFFDKQRHGELMSRVTNDIENVSSTLNTSVIQILSSVITFVGTIAVMLYMSPLLTLITLTIIPVMAASLKWITNRTGKLFKEQQKNLGDLNGYIEESVSGAKVIKAYSREKQITAEFLEKNAALKTSGFWAQTISGFIPKVMNSLNNLSFTMIAAIGGLFALKGWISIGSIVVFAEYSRQFTRPLNDLANQFNTMLSAIAGAERVFDVLDEKEEREDEKNAVHQPIQTGSIEFRDVSFGYDKGQQTLKHLQFTVPAGQSIAFVGPTGAGKTTVTNLLARFYEPNDGKILIDGTDIKTLTRASLRKNMGFVLQDSFLFQGTIRENIRYGRLDASDQEVEAAAKTANAHSFIERLPKGYDTVLTQNGSGISQGQKQLISIARAVLADPVLLILDEATSNIDTVTEVNIQEALARLMEGRTSVIIAHRLNTIQRADQIVVLKNGEMIEKGSHDELIRQKGFYSDLYESQFEK

SEQ ID NO: 12612 - protein, 589 aa, Bacillus subtilis subsp. subtilis str. 168
MIKREGESTVGVMKRYMQFVKPYKKQIFVTVLIGIVKFSIPLALPLLLKYVVDDIIQGGGTASDKTTSLFTIMAIMFALFLILRPPVEYYRQYFAQWTASKVLYDIRAKLFDHIQKLSLRFYANTRTGEVISRVINDVEQTKDFVITGLMNIWLDMLTILIVISIMLTLDVKLTLISIVLFPLYGISVKYFYGRLRKLTRERSQALAQVQGHLHERIQGMPVIRSFAIEDHEQAQFNEKNGHFLDKAIRHTNWNAKTFAVVNTITDLAPLIVIACAGYFVINGPLTVGTMVAFVGYIDRMYNPVRRLINSSTTLTQSIASMDRVFEFIDEPYELTDKPNAIKADQIRGGVEFQNVSFQYEKDKENILHDVSLKVNRGETVALVGMSGGGKSTLVSLIPRFYDVTSGRLLIDGTDIRDYEARSLRNQVGMVLQDTFLFSETIRENIAIGKPDATLEEIIEAAKAANAHEFIMSFPEGYETRVGERGVKLSGGQKQRISIARVFLKNPPLLILDEATSALDLESEHYIQEAMDKLAKDRTTFVVAHRLSTITHADKIVVMENGTIIEIGTHDELMDYESQYKHLFTIQNLN

SEQ ID NO: 12613 - protein, 67 aa, Bacillus subtilis subsp. subtilis str. 168
MLEGKVKWFNSEKGFGFIEVEGQDDVFVHFSAIQGEGFKTLEEGQAVSFEIVEGNRGPQAANVTKEA

SEQ ID NO: 12614 - protein, 465 aa, Bacillus subtilis subsp. subtilis str. 168
MKGSVFRKKSIQDLIAATSGEKSLKRELGAFDLTLLGIGAIIGTGIFVLTGTGAVTAGPGLTISFVVAALACLFAALSYAEFASSVPVSGSVYTFTYATLGELMAFIIGWDLILEYMLAVSAVSVGWSGYFQSFLSGLGIHLPVALTAAPGAVKGTFTLFNLPAFVIVMAITYLLYLGIKESKRVNNIMVILKILVVLLFIAVAAVYVKPHNWQPFMPMGFGGVFSAAALVFFAFIGFDAVSSAAEETKNPAKDLPKGIIFSLLVCTILYVTVSAIMTGVIPFAQFAGVDHPVSLVLQSAGQNWVAGIIDIGAVLGMTTVMLVMLYGQTRVMFAMSRDGLVPGSLSKVHPKHKTPYVATWFFGTMSALLGSLVPLDELAKLVNIGTLSAFVLISVAVIVLRKKQPDLPRAFKCPGVPVIPGLAILFCLFLILNLGWVTIVRFLVWLLIGLVIYFLYSRKHSKLNQ

SEQ ID NO: 12615 - protein, 393 aa, Bacillus subtilis subsp. subtilis str. 168
MKLAGLSREVEENLNKGSWIRKLFDEGARLKKEFGEDQVFDFSLGNPIVEPPEAFKRALIEEAEKGSHGYIQNQGLLAAREKVAQFLGSRFEADFSAERIVMTVGAGGALNVALKSIVNPGEEVIILAPYFAEYKLYIENYGGKAVSCPLTSRFEIDIEAVRQSITPQTKGLILNTPHNPTGTVLSQKNIDDLGALLKEIEEKSGQTIYVLFDEPYSQLIYDEELANPFQSYHRVILASSFSKDLGIAGERLGYIGLDSRMPDADLLINAFVYCNRTLGFVNAPVMMQRAVARMDDLRVDASAYKERRDLMVDILKEAGFEFEMPKGGFFVFPKSPIEDEVAFCVHAAQKYKLLIVPSSGFGMSGHFRLSFSVPIEQIKNSRDIFISLYKDFA

SEQ ID NO: 12616 - protein, 489 aa, Bacillus subtilis subsp. subtilis str. 168
MNAALIIIFGVLLLSIFLGIRAQKGKDMNLEQWTVGGRGFGTVFVFLLMAGEIYTTFTFLGGSGWAYGKGGPAFYIIAYGCLAYILSYWLLPAVWTYAKQHKLMSQSDFFTKKYNSPLLGILVSLVGIAALIPYLVLQLKGLGLIVSETSYGKITPTAAIWIGAVSITVYVMVSGIHGSAWISVVKDIMILVVVLFLGVYLPIHYYGGFQDMFQQIETAKPGFLTLPESGQSVAWFSSTVLLTALGFYMWPHTFSASYSAENPKVFRKNAIIMPLYQLVLLFVLFVGFAAILQVPDLNGADGDLSLLRLSLQAFDPWFVGIIGAAGLLTALVPGSMILMSASTLFAKNVYKVIAPRTTEQQVSALAKFLVPVIALISVYFTFKGGNTIVTLLLMGYSLVTQLFPALLFSLLKHNMVTKQGAFAGIIAGVGAVTYITMTETTIGTLFPALPQAAKDLNVGIVALLLNITVMMAVSLMTRKAKSAAADQAA

SEQ ID NO: 12617 - protein, 438 aa, Bacillus subtilis subsp. subtilis str. 168
MHTEDNGLKKEIGLLFALTLVIGTIIGSGVFMKPGAVLAYSGDSKMALFAWLLGGILTLAGGLTIAEIGTQIPKTGGLYTYLEEVYGEFWGFLCGWVQIIIYGPAIIGALGLYFGSLMANLFGWGSGLSKVIGIIAVLFLCVINIIGTKYGGFVQTLTTIGKLIPIACIIVFGLWKGDQHIFTAVNESISDMNFGAAILATLFAYDGWILLAALGGEMKNPEKLLPRAMTGGLLIVTAIYIFINFALLHILSANEIVTLGENATSTAATMLFGSIGGKLISVGIIVSIFGCLNGKVLSFPRVSFAMAERKQLPFAEKLSHVHPSFRTPWIAISFQIALALIMMLISNPDKLSEISIFMIYIFYVMAFFAVFILRKRAKGEKRAYSVPLYPFMPILAIAGSFFVLGSTLITDTMSCGLSILIGLAGLPVYYGMKKRKAS

SEQ ID NO: 12618 - protein, 399 aa, Bacillus subtilis subsp. subtilis str. 168
MLDNKTIEIIKSTVPVLQQHGETITGRFYDRMFQDHPELLNIFNQTNQKKKTQRTALANAVIAAAANIDQLGNIIPVVKQIGHKHRSIGIKPEHYPIVGKYLLIAIKDVLGDAATPDIMQAWEKAYGVIADAFIGIEKDMYEQAEEQAGGWKEYKPFVIAKKERESKEITSFYLKPEDSKPLPEFQAGQYISIKVRIPDSEYTHIRQYSLSDMPGKDYYRISVKKDGVVSSYLHDGLQEGDSIEISAPAGDFVLDHASQKDLVLISAGVGITPMISMLKTSVSKQPERQILFIHAAKNSEYHALRHEVEEAAKHSAVKTAFVYREPTEEDRAGDLHFHEGQIDQQFLKELIANTDADYYICGSPSFITAMHKLVSELGSAPESIHYELFGPQLSLAQSV

SEQ ID NO: 12619 - protein, 585 aa, Bacillus subtilis subsp. subtilis str. 168
METFKRLKMYYWPYRKVFMWSLLAMLLMTAITVVYPIILQITIDEIVLGRQYQLAAWVSLGFIAVMVLKGMATFFHQYLGDMFGIKSVYRLRNGLYEKLQRLSFSYYDNAKTGDLMSRLTADVEGLRFFLSYGLAELIRFGLLVAISLSVMFYYSVPLTLVTIAVLPFLAVAVYRFDKRVHPAFRGIRKSFAKLNTKVQENISGINTVKSLSREDFQISTFNKANAEYRAQYLQTSSIWSAYFPLMEFIGNTCIVALLSYGGYLVMQNQLNPGELVAFFSLVNYMMWPIMNLGFVINMFSQAKASGERLLDILEKEEDITDHPHALHKQKLTGDVHFKNVSLAYGKEQTNALCNVSFEANSGKVIGLLGPTGSGKSSVTQLLTRFYSPVGGMITIDHKPITDYSLKTLRSNIGVVLQESFLFSSTIRSNISYGRPDASMEDVIEAAKRAQAHNFIMELPDGYDTMLGERGMGLSGGQKQRIAIARAICLNPSILILDDATSAVDMQTEHSIQLALKEVMKNRTTFIVAHRISSLKHADEILVFNKGRIRERGTHHELLEKGGYYKKIYDLQYRDVKMINEPHEVG

SEQ ID NO: 12620 - protein, 490 aa, Bacillus subtilis subsp. subtilis str. 168
MSQHETPLYTGLKKHASRQPVQFHIPGHKKGAGMDPEFRQFIGENALSIDLINIEPLDDLHAPKGIIKQAQDLAAEAFGADHTFFSVQGTSGAIMTMVMAVCGPGDKIIIPRNVHKSIMTAIVFSGAVPIFIHPEIDNELGISHGITLESAKRALTEHPDAKGLLVINPTYFGVAADLKSIVELAHSFDVPVLVDEAHGVHIHFHDELPLSAMQAGADIAATSVHKLGGSLTQSSILNMREGLVSKDRVQSILSMLTTTSTSYLLLASLDVARKRLATEGRQLAEETLKLANQTRDRLNQIEGIYCVGSEILGSKAAYSYDPTKLIISVKSLGLTGHDVEKWLRESFNIEVELSDLYNILCIFTPGDSQNDADRLVEALTEIAQQMSEQDVTHQQTEVLLPEIPLLAMTPRDAFYANTEVIPLKEASGRIIAEFVMVYPPGIPIFIPGEIITEENISYIFKNLDAGLPVQGPEDSTLHMIRVIKEQKAIQ

SEQ ID NO: 12621 - protein, 496 aa, Bacillus subtilis subsp. subtilis str. 168
MQGNLTALLITAIIVLTVVCIGFLAGRDKSSRTSVEEWSVGGRRFGGLLVWFLVGADLYTAYTFLGLTSTAFTGGSVAFFAIPYSVLAYFIAYFFLPKLWKVAKIHKLTTLADYARERFNSKLLASLVAIVGVLMLIPYICLQLSGIQDTLQVAGTGYINVKFVVIISFILVALYTFFSGIKGPTYTAIIKDILVWVIMLFMVVSLPLIHFNGWTPMIDTLVKEAPQMLTIPSEGPKGIPWFITASIVSALALFMWAHAATGVFTAKSADAVRKNSMFLPLYNIVLILVIFLGFIAFLVLPEDTNPRLALLHLIQTSYGGVAQGFAYATIALASLIPCSIMAIGASNLFANNLYRDLIHPNVSQSKLTLVTRSMVFVVIGLALLFGMLFPTALVTLQLLGVSGMVQIFPAIAVSLFWKNQTKEATVIGLLAGLAVTFIVYITQSAHGIYEGFWGLAANMIAVVILNPLFVKNAGSNPVIEGLFGKKQDANPNQKGA

SEQ ID NO: 12622 - protein, 66 aa, Bacillus subtilis subsp. subtilis str. 168
MQNGKVKWFNNEKGFGFIEVEGGDDVFVHFTAIEGDGYKSLEEGQEVSFEIVEGNRGPQASNVVKL

SEQ ID NO: 12623 - protein, 393 aa, Bacillus subtilis subsp. subtilis str. 168
MKLAKRVSALTPSTTLAITAKAKELKAAGHDVIGLGAGEPDFNTPQHIIDAAVRSMNEGHTKYTPSGGLAELKNSIAEKFKRDQNIEYKPSQIIVCTGAKHALYTLFQVILDEEDEVIIPTPYWVSYPEQVKLAGGKPVYVEGLEENHFKISPEQLKNAITEKTKAIVINSPSNPTGVMYTEEELSALGEVCLEHDILIVSDEIYEKLTYGGKKHVSIAQLSDRLKEQTVIINGVSKSHSMTGWRIGYAAGSEDIIKAMTNLASHSTSNPTSIAQYGAIAAYNGPSEPLEEMREAFEHRLNTIYAKLIEIPGFSCVKPEGAFYLFPNAKEAAQSCGFKDVDEFVKALLEEEKVAIVPGSGFGSPENVRLSYATSLDLLEEAIERIKRFVEKHS

SEQ ID NO: 12624 - protein, 127 aa, Bacillus subtilis subsp. subtilis str. 168
MYRTMMSGKLHRATVTEANLNYVGSITIDEDLIDAVGMLPNEKVQIVNNNNGARLETYIIPGKRGSGVICLNGAAARLVQEGDKVIIISYKMMSDQEAASHEPKVAVLNDQNKIEQMLGNEPARTIL

SEQ ID NO: 12625 - protein, 393 aa, Bacillus subtilis subsp. subtilis str. 168
MRKTVIVSAARTPFGKFGGVLKEVKAAELGGIVMKEALQQAGVSGDDVEGNVMGMVVQAGSGQIPSRQAARLAGMPWSVPSETLNKVCASGLRAVTLCDQMIRAQDADILVAGGMESMSNIPYAVPAGRWGARMGDGELRDLMVYDGLTCAFDEVHMAVHGNTAAKEYAISRREQDEWALRSHARAAKAADEGKFQDEIVPVNWIGRKGKPNVVDKDEAIRRDTSLDQLAKLAPIYASDGSITAGNAPGVNDGAGAFVLMSEEKAAELGKRPLATILGFSTTGMPAHELAAAPGFAINKLLKKNGLTVQDIDLFEVNEAFASVVLTCEKIVGFDLEKVNVNGGAIALGHPIGASGARILMTLVYELKRRGGGLGVAAICSGAAQGDAVLVQVH

SEQ ID NO: 12626 - protein, 301 aa, Bacillus subtilis subsp. subtilis str. 168
MTNESFKSGFVSIIGRPNVGKSTFLNRVIGQKIAIMSDKPQTTRNKVQGVLTTGTSQTIFIDTPGIHKPKHKLGDFMMKVAQNTLKEVDLILFMINAEEGYGKGDEFIIEKLQTMSTPVFLIVNKIDKIHPDQLLLLIDEYRKRYPFKEIVPISALEGNNIETLLAQIEAYLPEGPQFYPSDQVTDHPERFIISELIREKVLHLTREEIPHSIAVAIESIKGQDNGSVHVAATIVVERDSQKGIVIGKKGSLLKEVGKRARADIEALLGSRVYLELWVKVQKDWRNKMSQLRDFGFKEDEY

SEQ ID NO: 12627 - protein, 611 aa, Bacillus subtilis subsp. subtilis str. 168
MSKVIGIDLGTTNSCVAVLEGGEPKVIANAEGNRTTPSVVAFKNGERQVGEVAKRQSITNPNTIMSIKRHMGTDYKVEIEGKDYTPQEVSAIILQHLKSYAESYLGETVSKAVITVPAYFNDAERQATKDAGKIAGLEVERIINEPTAAALAYGLDKTDEDQTILVYDLGGGTFDVSILELGDGVFEVRSTAGDNRLGGDDFDQVIIDHLVSEFKKENGIDLSKDKMALQRLKDAAEKAKKDLSGVSSTQISLPFITAGEAGPLHLELTLTRAKFEELSSHLVERTMGPVRQALQDAGLSASEIDKVILVGGSTRIPAVQEAIKKETGKEAHKGVNPDEVVALGAAIQGGVITGDVKDVVLLDVTPLSLGIETMGGVFTKLIDRNTTIPTSKSQVFSTAADNQTAVDIHVLQGERPMSADNKTLGRFQLTDIPPAPRGVPQIEVSFDIDKNGIVNVRAKDLGTGKEQNITIKSSSGLSDEEIERMVKEAEENADADAKKKEEIEVRNEADQLVFQTEKTLKDLEGKVDEEQVKKANDAKDALKAAIEKNEFEEIKAKKDELQTIVQELSMKLYEEAAKAQQAQGGANAEGKADDNVVDAEYEEVNDDQNKK

SEQ ID NO: 12628 - protein, 366 aa, Bacillus subtilis subsp. subtilis str. 168
MEKVVCIGCGVTIQTEDKTGLGYAPPASLTKENVICQRCFRLKNYNEIQDVSLTDDDFLNILHGIGETDSLVVKIVDIFDFNGSWINGLQRLVGGNPILLVGNKADILPKSLKRERLIQWMKREAKELGLKPVDVFLVSAGRGQGIREVIDAIEHYRNGKDVYVVGCTNVGKSTFINRIIKEVSGEEDIITTSQFPGTTLDAIEIPLDDGSSLYDTPGIINNHQMAHYVNKKDLKILSPKKELKPRTFQLNDQQTLYFGGLARFDYVSGERSPFICYMPNELMIHRTKLENADALYEKHAGELLTPPGKDEMDEFPELVAHTFTIKDKKTDIVFSGLGWVTVHDADKKVTAYAPKGVHVFVRRSLI

SEQ ID NO: 12629 - protein, 266 aa, Bacillus subtilis subsp. subtilis str. 168
MAFRKPDEIAEAAIEAGMKKIKLPLPSLLVLGFLGGAFIALGYLLDIRVIGDLPKEWGSLSSLIGAAVFPVGLILVVLAGAELITGNMMSVAMALFSRKISVKELAINWGIVTIMNLIGALFVAYFFGHLVGLTETGPYLEKTIAVAQGKLDMSFGKVLISAIGCNWLVCLAVWLSFGAQDAAGKILGIWFPIMAFVAIGFQHVVANMFVIPAAIFAGSFTWGQFIGNIIPAFIGNVIGGAVFVGLIYFIAYHKKDRSRKEMKQVS

SEQ ID NO: 12630 - protein, 273 aa, Bacillus subtilis subsp. subtilis str. 168
MKKIFSLALISLFAVILLAACGSKGSNGEASKESKKDTLAAIKDNDKIVFGVKTDTRLFGLKNPSSGEIEGFDIDIAKQIAKDILGDEKKAQFKEVTSKTRIPMLQNGDIDAIVATMTITEERKKEVDFSDVYFEAGQSLLVKKGSKIKSVENLGKGSKVLAVKGSTSSQNIREKAPEASVLEFENYAEAFTALKSGQGDALTTDNAILYGMADENKNYQLTGKPFTDEPYGIAVKKGQSALAKEINASLKKMKSDGRYDEIYKKWIKEDPAE

SEQ ID NO: 12631 - protein, 395 aa, Bacillus subtilis subsp. subtilis str. 168
MIYLDYAATTPICEEALTVYQKLSMDMYGNASSLHDAGGKAKHILEYCREKIANIIGGEASGIYFTSGGTESNFLAIQSLLNGLPKTKRHFITTAMEHQSIHNCAAFLEQQGYDVTVIEPNEYGLITEEILLTHIRPETGLVSIQHANSETGIIQPIQHLSSYLHNKGILLHCDAVQTFGKIPINTKNLGVDALSMSSHKIHGPKGVGAVYIRPDVPWKPVYPLTTHEYGFRAGTVNVPGIGAFTAAAELIVSEMEKQISRNEALRTYFLDQIRIRSLPVTLAADTSKAECLPHIIGCFFHSFEGQYVMLECNRSNICISTGSACSAGYHGPSETMKALRKTEQEALQFIRISFGRHTTAEQLEQLLHTFTVLWEQKKGEFDIDRRIKANGRQQA

SEQ ID NO: 12632 - protein, 428 aa, Bacillus subtilis subsp. subtilis str. 168
MFVDQVKVYVKGGDGGNGMVAFRREKYVPKGGPAGGDGGKGGDVVFEVDEGLRTLMDFRYKKHFKAIRGEHGMSKNQHGRNADDMVIKVPPGTVVTDDDTKQVIADLTEHGQRAVIARGGRGGRGNSRFATPANPAPQLSENGEPGKERYIVLELKVLADVGLVGFPSVGKSTLLSVVSSAKPKIADYHFTTLVPNLGMVETDDGRSFVMADLPGLIEGAHQGVGLGHQFLRHIERTRVIVHVIDMSGLEGRDPYDDYLTINQELSEYNLRLTERPQIIVANKMDMPEAAENLEAFKEKLTDDYPVFPISAVTREGLRELLFEVANQLENTPEFPLYDEEELTQNRVMYTMENEEVPFNITRDPDGVFVLSGDSLERLFKMTDFSRDESVKRFARQMRGMGVDEALRERGAKDGDIIRLLEFEFEFID

SEQ ID NO: 12633 - protein, 408 aa, Bacillus subtilis subsp. subtilis str. 168
MGLIVQKFGGTSVGSVEKIQNAANRAIAEKQKGHQVVVVVSAMGKSTDELVSLAKAISDQPSKREMDMLLATGEQVTISLLSMALQEKGYDAVSYTGWQAGIRTEAIHGNARITDIDTSVLADQLEKGKIVIVAGFQGMTEDCEITTLGRGGSDTTAVALAAALKADKCDIYTDVPGVFTTDPRYVKSARKLEGISYDEMLELANLGAGVLHPRAVEFAKNYQVPLEVRSSTETEAGTLIEEESSMEQNLIVRGIAFEDQITRVTIYGLTSGLTTLSTIFTTLAKRNINVDIIIQTQAEDKTGISFSVKTEDADQTVAVLEEYKDALEFEKIETESKLAKVSIVGSGMVSNPGVAAEMFAVLAQKNILIKMVSTSEIKVSTVVSENDMVKAVESLHDAFELSKHPSAV

SEQ ID NO: 12634 - protein, 403 aa, Bacillus subtilis subsp. subtilis str. 168
MSEQKKVVLAYSGGLDTSVAIKWLQEQGYNVIACCLDVGEGKDLAFVQQKALEVGATNSYVIDAKEEFAQDYALISLQAHTMYEGKYPLVSALSRPLIAKKLVEIAEKEDAQAIAHGCTGKGNDQVRFEVSIKSLNPDLEVIAPVREWQWSREEEIEYAASRGIPIPINLDSPYSIDQNLWGRANECGILEDPWAAPPEGAYDLTAPLEKTPDTPEVIEIAFEQGVPVSIDGVSYSLSELILKLNEMAGAHGVGRIDHVENRLVGIKSREVYECPGAMTLIKAHKELEDLTLVKEVAHFKPIIEQKMSEIIYNGLWFSPLKDALHAFLKETQKHVTGIVRVKLFKGHAIVEGRKSEYSLYDEKLATYTKDDAFDHHAAIGFIELWGLPTKVNSIVKKKEQIKA

SEQ ID NO: 12635 - protein, 395 aa, Bacillus subtilis subsp. subtilis str. 168
MSKIIAINAGSSSLKFQLFEMPSETVLTKGLVERIGIADSVFTISVNGEKNTEVTDIPDHAVAVKMLLNKLTEFGIIKDLNEIDGIGHRVVHGGEKFSDSVLLTDETIKEIEDISELAPLHNPANIVGIKAFKEVLPNVPAVAVFDTAFHQTMPEQSYLYSLPYEYYEKFGIRKYGFHGTSHKYVTERAAELLGRPLKDLRLISCHLGNGASIAAVEGGKSIDTSMGFTPLAGVAMGTRSGNIDPALIPYIMEKTGQTADEVLNTLNKKSGLLGISGFSSDLRDIVEATKEGNERAETALEVFASRIHKYIGSYAARMSGVDAIIFTAGIGENSVEVRERVLRGLEFMGVYWDPALNNVRGEEAFISYPHSPVKVMIIPTDEEVMIARDVVRLAK

SEQ ID NO: 12636 - protein, 381 aa, Bacillus subtilis subsp. subtilis str. 168
MIYLDNSSTTKPYDEVLNVYEQTSSRYFGNPSSLHRYGAETEQLLQAAKNQIKRSLGLKKYDIVFTSGATEANNAALKGAALSKIKTGKHIIATSIEHPSVTESLEQLKELFGFDITYLSVNEDGFVSIEDLKAAIRPDTVLVSMMHVNNEVGSVQPIEAAGEVLKEHSNILFHVDYVQGIYKVPLAIEKAGIDLCSISGHKFHGLKGTGALIVKEGTRLIPLITGGSQQKGIRAGTEHTAGAVSLAKAINLASADFDTRLDTMTAVKELFMNRLSEIEGVVINTPQMNSAPHIINFSVPGIKAEVLLHMLEEQDIFVSTTSACSAKEHKPSKVLLEMGKGEQIAGSSIRISLNYSQTSDVAEPFMNALRPGIKKLREMMR

SEQ ID NO: 12637 - protein, 512 aa, Bacillus subtilis subsp. subtilis str. 168
MLKHISSVFWIVIAITAAAVLWGVISPDSLQNVSQSAQAFITDSFGWYYLLVVSLFVGFCLFLIFSPIGKIKLGKPDEKPEFGLLSWFAMLFSAGMGIGLVFYGAAEPISHYAISSPSGETETPQAFRDALRYTFFHWGLHAWAIYAIVALCIAYFQFRKGAPGLISSTLSPILGDKVNGPIGKAIDCIAVFATVVGVSTSLGLGATQINGGLNYLFGIPNAFIVQLVLIIIVTVLFLLSAWSGLGKGIKYLSNTNMVLAGLLMLFMLVVGPTVLIMNSFTDSIGQYIQNIVQMSFRLTPNDPEKREWINSWTIFYWAWWISWSPFVGIFIARVSRGRTIREFLIGVLVTPCILTFLWFSIFGVSAMDLQQKGAFNVAKLSTETMLFGTLDHYPLTMVTSILALILIAVFFITSADSATFVLGMQTSYGSLNPANSVKLSWGIIQSAMAAVLLYSGGLAALQNTAILAALPFSIVILLMIASLYQSLSKERREIKKAEKLDKPRSPRVKKAY

SEQ ID NO: 12638 - protein, 632 aa, Bacillus subtilis subsp. subtilis str. 168
MCGFVGVFNKHPLAQTADQEELIKQMNQMIVHRGPDSDGYFHDEHVGFGFRRLSIIDVENGGQPLSYEDETYWIIFNGEIYNYIELREELEAKGYTFNTDSDTEVLLATYRHYKEEAASKLRGMFAFLIWNKNDHVLYGARDPFGIKPLYYTTINDQVYFASERKSLMVAQNDIEIDKEALQQYMSFQFVPEPSTLDAHVKKVEPGSQFTIRPDGDITFKTYFKANFKPVQTEEDKLVKEVRDAIYDSVNVHMRSDVPVGSFLSGGIDSSFIVSVAKEFHPSLKTFSVGFEQQGFSEVDVAKETAAALGIENISKVISPEEYMNELPKIVWHFDDPLADPAAIPLYFVAKEAKKHVTVALSGEGADELFGGYNIYREPLSLKPFERIPSGLKKMLLHVAAVMPEGMRGKSLLERGCTPLQDRYIGNAKIFEESVKKQLLKHYNPNLSYRDVTKTYFTESSSYSDINKMQYVDIHTWMRGDILLKADKMTMANSLELRVPFLDKVVFDVASKIPDELKTKNGTTKYLLRKAAEGIVPEHVLNRKKLGFPVPIRHWLKNEMNEWVRNIIQESQTDAYIHKDYVLQLLEDHCADKADNSRKIWTVLIFMIWHSINIEKRYMPEELSHQPKEVIFV

SEQ ID NO: 12639 - protein, 378 aa, Bacillus subtilis subsp. subtilis str. 168; identical to SEQ ID NO: 321

SEQ ID NO: 12640 - protein, 261 aa, Bacillus subtilis subsp. subtilis str. 168
MAASTLTIKDLHVEIEGKEILKGVNLEIKGGEFHAVMGPNGTGKSTLSAAIMGHPKYEVTKGSITLDGKDVLEMEVDERAQAGLFLAMQYPSEISGVTNADFLRSAINARREEGDEISLMKFIRKMDENMEFLEMDPEMAQRYLNEGFSGGEKKRNEILQLMMIEPKIAILDEIDSGLDIDALKVVSKGINKMRSENFGCLMITHYQRLLNYITPDVVHVMMQGRVVKSGGAELAQRLEAEGYDWIKQELGIEDETVGQEA

SEQ ID NO: 12641 - protein, 391 aa, Bacillus subtilis subsp. subtilis str. 168
MKEAVIVSGARTPVGKAKKGSLATVRPDDLGAICVKETLKRAGGYEGNIDDLIIGCATPEAEQGLNMARNIGALAGLPYTVPAITVNRYCSSGLQSIAYAAEKIMLGAYDTAIAGGAESMSQVPMMGHVTRPNLALAEKAPEYYMSMGHTAEQVAKKYGVSREDQDAFAVRSHQNAAKALAEGKFKDEIVPVEVTVTEIGEDHKPMEKQFVFSQDEGVRPQTTADILSTLRPAFSVDGTVTAGNSSQTSDGAAAVMLMDREKADALGLAPLVKFRSFAVGGVPPEVMGIGPVEAIPRALKLAGLQLQDIGLFELNEAFASQAIQVIRELGIDEEKVNVNGGAIALGHPLGCTGTKLTLSLIHEMKRRNEQFGVVTMCIGGGMGAAGVFELC

SEQ ID NO: 12642 - protein, 447 aa, Bacillus subtilis subsp. subtilis str. 168
MKNDNQTLKRTMTSRHIMMMALGGAIGAGLFKGSSSAIDVAGPSVIIAYLLGGIILLFIMQGLAEMAVRNRNARTFRDLVQQVLGNYAAYFLDWIYWKMWVLNIAAEAVVAAIFIQYWLPGCPIWVLALGISLIVTIVNLLSVKIFAETEYWLAMIKITVIIIFIILGLLLLFVSFGDHTASGFSNLTDHGGFFPHGGTGLITAMLVVIYSYGGTEIIGVTLAETKNPEKVVPKAVRSTLTRIVAFYLLPFFIIVSLIPWNQVNSVPESPFVMVFKMVGIPGADHIMNAVILLAIISSMNSGLYGSSRILYTQASDGRLPKVFSKLSSKNVPMFAILMCTSSLYIGVLISLFAGSQTFNYLMGSLGYTVLFIWLIIGFAHLKSRKQQTETPAYYVKWFPYTTWFAIVALLAILIGVIMTTSIVITGITAAIYLLITVAYLVKGRKHQ

SEQ ID NO: 12643 - protein, 530 aa, Bacillus subtilis subsp. subtilis str. 168
MRFSGRFKGYNLQKFQKDLIAGIVVGVVAIPLGMAFAIASGVEPEYGLYTVVIAGICISLFGGSKYQIGGPTGAFVPILFGIIMQYGLENLLIAGFMAGVMLVLFGLFKLGKIMKFVPKPVIVGFTAGIAVLIFTEQIANFLGLRNVEKHENFHHNMFEIVQQLGTFNVYAILTAVIGLVILLVSAKVMPKVPGALLALLISTVVAVVFFPDRMATIGSTYGEIPRHLPEFQFPELTLDKMVMLFPAALVIALLGGLESILSAMVADNMKGSKHDSNKELVGQGIANMAAPLFGGIPATGAIARTATNIKNGAVSPVSGVVHGVVVLLVLLVFAPYASHVPLASMAPILMVVAWNMSERKEVANMLRLKNADSFILAATFALTVLFDLIIGVATGLLLAFVFFIRRMSEATRIHNQETHPVLAKREDPSVSMYAIEGPLFFGSIDSLESSLLEHVQKKPKTLILLMNKVHYMDTSAEAVLGNIMNRIKRHNGKLMIVGLQSQPKELLHKTGLFHKIGKQHFFDHHDEITG

SEQ ID NO: 12644 - protein, 325 aa, Bacillus subtilis subsp. subtilis str. 168
MLKPFVFITKPIPEEIEAFIGEHCRYEVWQEDTLPSDVLFEKLKEAEGLLTSGTSGPSINRELLEHAPKLKVVSNQSVGYDNFDIEAMKERGVVGTHTPYTLDDTVADLAFSLILSSARRVAELDRFVRAGKWGTVEEEALFGIDVHHQTLGIIGMGRIGEQAARRAKFGFDMEVLYHNRHRKQETEDSIGVKYAELDTLLEQSDFILLITPLTDETYHMIGEREFKLMKNSAIFVNISRGKTVDEKALIRALQEGWIRGAGLDVYEKEPVTQDNPLLQLDNVTLLPHIGSATAKVRFNMCKQAAENMLAAIQGQTPKNLTREFQ

SEQ ID NO: 12645 - protein, 589 aa, Bacillus subtilis subsp. subtilis str. 168
MPTKKQKSKSKLKPFFALVRRTNPSYGKLAFALALSVVTTLVSLLIPLLTKQLVDGFSMSNLSGTQIGLIALVFFVQAGLSAYATYALNYNGQKIISGLRELLWKKLIKLPVSYFDTNASGETVSRVTNDTMVVKELITTHISGFITGIISVIGSLTILFIMNWKLTLLVLVVVPLAALILVPIGRKMFSISRETQDETARFTGLLNQILPEIRLVKASNAEDVEYGRGKMGISSLFKLGVREAKVQSLVGPLISLVLMAALVAVIGYGGMQVSSGELTAGALVAFILYLFQIIMPMGQITTFFTQLQKSIGATERMIEILAEEEEDTVTGKQIENAHLPIQLDRVSFGYKPDQLILKEVSAVIEAGKVTAIVGPSGGGKTTLFKLLERFYSPTAGTIRLGDEPVDTYSLESWREHIGYVSQESPLMSGTIRENICYGLERDVTDAEIEKAAEMAYALNFIKELPNQFDTEVGERGIMLSGGQRQRIAIARALLRNPSILMLDEATSSLDSQSEKSVQQALEVLMEGRTTIVIAHRLSTVVDADQLLFVEKGEITGRGTHHELMASHGLYRDFAEQQLKMNADLENKAG

SEQ ID NO: 12646 - protein, 238 aa, Bacillus subtilis subsp. subtilis str. 168
MNFLSVRPSDSDLISSDLYELLESISTKRKMEKHTYLFREGMDAEELYLIQSGLIEIGKLTSDGKDLTLRICQKHDIVGELTLFTEEPRYMLSAKVLEDGEVLVINKNKLEKELIQNGALTFEFMKWMSTHLRKIQSKIRDLLLHGKKGALYSTLIRLSNSYGVERSDGILINIVLTNQDLAKFCAAARESVNRMLGDLRKKGVISIDESGKIILHKRDYLRCEIECENCPLEICNID

SEQ ID NO: 12647 - protein, 290 aa, Bacillus subtilis subsp. subtilis str. 168
MRFDEAYSGKVFIASRPEWEEADAILYGMPMDWTVSYRPGSRFGPSRIREVSIGLEEYSPYLDRDLADLNFFDAGDIPLPFGNPQRSLDMIEEYVDSILEKGKFPMGMGGEHLVSWPVIKAMYKKYPDLAIIHFDAHTDLRVDYEGEPLSHSTPIRKAAELIGPHNVYSFGIRSGMKEEFEWAKENGMHISKFEVLEPLKEVLPKLAGRPVYVTIDIDVLDPAHAPGTGTVDAGGITSKELLASVHEIARSEVNVKGADLVEVAPVYDHSEQTANTASKIIREMLLGFVK

SEQ ID NO: 12648 - protein, 323 aa, Bacillus subtilis subsp. subtilis str. 168
MADLFSTVQEKVAGKDVKIVFPEGLDERILEAVSKLAGNKVLNPIVIGNENEIQAKAKELNLTLGGVKIYDPHTYEGMEDLVQAFVERRKGKATEEQARKALLDENYFGTMLVYKGLADGLVSGAAHSTADTVRPALQIIKTKEGVKKTSGVFIMARGEEQYVFADCAINIAPDSQDLAEIAIESANTAKMFDIEPRVAMLSFSTKGSAKSDETEKVADAVKIAKEKAPELTLDGEFQFDAAFVPSVAEKKAPDSEIKGDANVFVFPSLEAGNIGYKIAQRLGNFEAVGPILQGLNMPVNDLSRGCNAEDVYNLALITAAQAL

SEQ ID NO: 12649 - protein, 399 aa, Bacillus subtilis subsp. subtilis str. 168
MEITPSDVIKTLPRQEFSLVFQKVKEMEKTGAHIINLGQGNPDLPTPPHIVEALREASLNPSFHGYGPFRGYPFLKEAIAAFYKREYGVTINPETEVALFGGGKAGLYVLTQCLLNPGDIALVPNPGYPEYLSGITMARAELYEMPLYEENGYLPDFEKIDPAVLEKAKLMFLNYPNNPTGAVADAAFYAKAAAFAKEHNIHLIHDFAYGAFEFDQKPASFLEAEDAKTVGAELYSFSKTFNMAGWRMAFAVGNEKIIQAVNEFQDHVFVGMFGGLQQAASAALSGDPEHTESLKRIYKERIDFFTALCEKELGWKMEKPKGTFYVWAEIPNTFETSHQFSDYLLEHAHVVVTPGEIFGSNGKRHVRISMVSKQEDLREFVTRIQKLNLPFGSLQETSR

SEQ ID NO: 12650 - protein, 256 aa, Bacillus subtilis subsp. subtilis str. 168
METQALQKVEQYALKKQNIFASSKIRYVLRSILASIFIGFGITAASKTGSYFFMADSPFAFPAAAVTFGAAILMIAYGGGDLFTGNTFYFTYTALRKKISWRDTLYLWMSSYAGNLIGAILFAILISATGLFEEPSVHSFLIHLAEHKMEPPASELFFRGMLCNWLVCLAFFIPMSLKGEGAKLFTMMLFVFCFFISGFEHSIANMCTFAISLLIEHPDTVTLMGAVRNLIPVTLGNLTAGIVMMGWMYYTLNPDQ

SEQ ID NO: 12651 - protein, 319 aa, Bacillus subtilis subsp. subtilis str. 168
MDKYPFLREAGSSFKDRDVTKMSDLIATWDGQDIKGPALIGVPLSKSSISHSGASFAPGTIRQALKHSSAYSAELGEHVVSELLYDLGDIDIHVTDIVKSHHHIFQTMHALLSDHPDWVPLILGGDNSISYSTIKAIAQTKGTTAVIQFDAHHDVRNTEDGGPTNGTPFRRLLDEEIIEGQHLIQLGIREFSNSQAYEAYAKKHNVNIHTMDMIREKGLIPTIKEILPVVQDKTDFIFISVDMDVLDQSHAPGCPAIGPGGLYTDELLEAVKYIAQQPNVAGIEIVEVDPTLDFRDMTSRAAAHVLLHALKGMKLSPFK

SEQ ID NO: 12652 - protein, 296 aa, Bacillus subtilis subsp. subtilis str. 168
MDKTISVIGMPMDLGQARRGVDMGPSAIRYAHLIERLSDMGYTVEDLGDIPINREKIKNDEELKNLNSVLAGNEKLAQKVNKVIEEKKFPLVLGGDHSIAIGTLAGTAKHYDNLGVIWYDAHGDLNTLETSPSGNIHGMPLAVSLGIGHESLVNLEGYAPKIKPENVVIIGARSLDEGERKYIKESGMKVYTMHEIDRLGMTKVIEETLDYLSACDGVHLSLDLDGLDPNDAPGVGTPVVGGISYRESHLAMEMLYDAGIITSAEFVEVNPILDHKNKTGKTAVELVESLLGKKLL

SEQ ID NO: 12653 - protein, 563 aa, Thermoplasma acidophilum DSM 1728
MGEQSSIPSDANISYAENQDKKLRKALSTWDLLMLSVGGIIGSGWLFAAYAASVLSGPASILAWVLGGIIVIFIALVYAELGSMIPRSGAIVRYGHLSHGSFAGFLFGWAYFLSAVSVPAIEAEAVVTYAASYVTKPALIANGIMTGLGTLIAMILMIGFFFLNYAGVHIMGKTNQGLTWVKVIIPVITILVLIFVHFNPSEIIPSNGFMPYGWAPVFAAISSTGIVFSYFGFRQAIDYGGEARNPQRSIPIATIGSVLIGMLIYSLLQVVFVGGIDWSKVGLLPGQWQQLSSLASSSNAATAYPYAYDLMNAPFATVALSAGLVWLTYTLYASAYLAPSGTLNVYMGTSARTLYGMAVNGHLPKTFAKIEERNRIPLIPLITTLLVGFLFFLPFPSWYKMVGFISGATVFTYIVGGAALMNLRKQAPELKRPFRLPAADVFAPIAFILASEAVYWTGWPTTLYLAIGIFAGLVLYGILAALHKIEQSFNSTNVKAGLWVPFFIIVLTVLSYLGEYGGIDVIKFPLDLIVVAIVSALFYFWAIRSGIKTEEIAAMVANEDQYV

SEQ ID NO: 12654 - protein, 526 aa, Thermoplasma acidophilum DSM 1728
MNSAELQIHTDTERVEEKYIREDRKLRKDLGIVDLFLIGITGVIGSGWLFAPLYAARVAGPASIISWAIGGVLVLLVGLTFSHLMGFRTEAGGMVRYPIYTHGKLAGSITGWALWLAYTMNPPSEASALVEYMSSYVPGVFHSGTLTPEGMGIALGFMFLFVLVNYYGVKIFARIINGLTALKLVVPTVTMLTLILLSFRFRNFTVSGFYPYGLSSVLAAIVSAGIVYSYLGFQAVINLAGESKRPARDGPTALILVIIFSLVFYIALEITFIGSVPSSFLRHGWSGLFLASPFADIALYFNLTWLYSLIIADSIYSPSGSSMAAVASNSRATYALAKDGFFPSFFVRIDGKTGIPRIALIFNFVISAIVLLTLKSWHSIIEALGVLLLISFIGPAASSGVIRRTSPENQILKGLYGVVQPAIFVMAGIIIFITPFTKIDIVIALFSIPAVLLILKEKNFRNVDLGYGIWLPVYLIIILSFSFLHTYYESLNILVPITAFVFLSLFVYIIAVRAGISFMKSGKQKE

SEQ ID NO: 12655 - protein, 290 aa, Thermoplasma acidophilum DSM 1728
MDGGFMQKKVLLVGLGVMGSRIAANFASAGKLAGVYDRNVDKAKNTASMLKVGFYRDLGEAVKNSDIIVTMLYDDRSVKEVYSQMEQGVQGKVFIDMSTISPDTSIEIAKRIKEKGGKMYDAPVIGTSIAVEKKALVVLVGGDLSGYDEVRDLISATANQVVYMGDNGSGLYAKLVNNLFLGSYMASLAEAVRFGRKNGIPDSTISDVLTKYSSARSPTSDLKVPKMISEDYSVQFSIKNMLKDMEIVDRMASEKRIALPVASLALQLFRYLMDSGYGEEDIAAIYRALR

SEQ ID NO: 12656 - protein, 246 aa, Thermoplasma acidophilum DSM 1728
MILEIRNLSASVEDKQILKDVNLKIGGGEIHALMGPNGAGKSTLGNVLIGHPDYKITGGQIILDGKDITYATPEERARAGLFLAFQSPVAVEGVRISTFLRIAYSHLHPDEKIVISEFNKRIKEAMKTVGLDESFISRSVNDGFSGGERKRFEILQMLILKPKMIILDEIDSGLDVDALRMVAEQLKKYFSKDVGYLIITHYQRILKDIEPQFVHVLVNGTIAINGDKSLSDKIEENGYDWLKEVA

SEQ ID NO: 12657 - protein, 396 aa, Thermoplasma acidophilum DSM 1728
MNSEKVYLVDFKRTAFSRSRPNDPERDVFNSIRMDEAMAKLINVVIDETGIKPEEINDVITGCALQMDENWTYGGRHPILLANLPENVPGMALDRACSSSLNAITIGAMEIMTGNSDIVMAGGYEHMTHVPMGNSPFLKPNIKLMVRPEYMHWDMNTGYSMGLTAEKLAALRGITRDEMDRYSLRSHQLASKALDDGYFKGEIVPVEVEINGEEKVIDTDQSIRKNTSLEDMKKLKPAFKDDGVITAGNSSPLNAGASLTLLMSEKKVKEYGLKPMARIVSFGWAGVDPSIMGEGPVPATKNALAKAKMDVSDIDLWEINEAFAVVVLNAMKELGIEEDRVNVHGGAIAIGHPLGATGARIAGTLARIMNEKKKDYGVATLCVGGGQGYSVVFERY

SEQ ID NO: 12658 - protein, 388 aa, Thermoplasma acidophilum DSM 1728
MVLLFMNLSFAGFSRMVGISMSKFEECNIKEDLKSDLKRMGFVDMTAVQERTIEPALAGRDLIIRSKTGSGKTAAYLVPIINNISLGRKPSALIVLPTRELALQVHGVAEKLGHSSRIRSTVIYGGASMSRQIELLDRGTDIIVGTPGRILDLHERGFLNLSAVKYFVLDEADVMLDMGFIDDIKRMMSLLREDKQTFILSATMPEEIIDMANDFMRDPETIIVGSDEVTVKEIYHYYAISKRNRKLHVLQTYLKTYGPQKTIIFSRTKVGTKMVCDFLLNMGYNAVMINGDMSQSQRERAMYLFRNRADYLVATNVAARGIDIRDVTDIINFDLPDDPKVYVHRVGRTARLGSEGRAFSIVEEGQRDAVYQIEHMARVSLKQIKLQE

SEQ ID NO: 12659 - protein, 495 aa, Thermoplasma acidophilum DSM 1728
MFFVLFVLIGFLAKNFRRGNLNQLPEWALGGRRLGTFLVWFLVGADLYTAYTFIAVPSSMYAVGSIYFFAVPYVSLAFAIAMITMPKLWTLSKKRGYVTAGDFVSDRFNSNALAMIIALTGIVAELPYIALQIVGMRAILTGMLTPLGGNVDLASNIALVLAILVLIGFTYTSGLRGTSLTAVMKDAIIFTTVIVVIVTVFVAYHSALHEAFTVKPVYADLPPKFYNAYWTLFLMSAAALYLYPHAINGSLSSMSAQKLRLSTALLPIYGIGLAFLALFGVIIYGVPAAEHVLKITYANNGAMVVPTLIATVTPSWFTGFAFLGIFIGGLVPAAIMSMSQATLLTRNVIKYLGRELEEKRETFIAKVSMIFFQLLALAFVFIVPETYSISLQLIGGIIILQTLPAVFLGMYVKRLEKYAVAAGWLAGIVAGIYFEVYSNFVYFKYSIIKTTLMPSSLGFIFVGFTALVINLIVVGVVEAVVYALHRQPKNLPEYI

SEQ ID NO: 12660 - protein, 272 aa, Thermoplasma acidophilum DSM 1728
MTEKCVIKIGGSVLKDGSSLPRVMDIISHFRSPILVVSAFGGITDALYRFYEYDESRMDKLRDLLLMHLGILWKYNIEAHPEISIQDSSILDQDAYVSYGEKMSAFTLARFLTGNGIPAAPIYTDEAGLIVEEISKERTVDLEGSRAFFENIARVETSGKVPVVTGFFGIDRYGKTRILGRNSSDYSAVAVAAILGIREVILIKDVPGIYMNLEDRTSIVNRIDYETALRIVDRGSKVVHRAALRLAMKMGMNLLITSPENLESGTVIGDLF

SEQ ID NO: 12661 - protein, 557 aa, Thermoplasma acidophilum DSM 1728
MIEQDTFVKSTASDKRFRKELTTIDLLFLSLGGIIGSGWLFAAAGASMLAGPAAVLSWIIGGLIVLVIALVYAELGGMIPRSGAIVRYGQYSHGGLAGFLFGWAYFLSAVSVPAIEAEGVITYAGTYVKGLVTPTGVLTAVGILLAAILMLGFFFLNYFGIKVMGKTNTGMTWWKLIIPSATVALLLTVHFNIGNFFLKTGFVTYGWSSVFEAISVSGIVFSYLGFRQALDYGGEAKNPQRSVPIATILSVVIGIALYALLQVVFIGQVNWAAVGVAPGQWSALSGGVVTAPFATLASSAGLVFLSYFLFADAYVSPSGTLNVYLGTSQRTLYGLATLGYLGKSMSDVNRKHRVPILPLIASLVIGYIFFAPFPSWYKLVGFISSSTVFTYIVGGSALQVFRREASELKRPFRLKGASILSPIAFVGATLIVYWSGWPLVAYLVIAILIGLIVYAAFYLAGKSAINIFSGKHFKGGAWLLAYMGAITLLSYFGEKAYGGTGLIPFPWDFLVMILVAIGFYFWSVYSGFKTDEITEIIESGMQYLPSEEAAQAPAGKK

SEQ ID NO: 12662 - protein, 160 aa, Thermoplasma acidophilum DSM 1728
METVRIIYVRDNQTLKTVFVDRDGTINRDCPYCHELDDLQIYDDTVGILKHYQGKGYRIIIVTNQSGIGRGYFSMEEFRRFNDGVVNRLLDLGVKVSATYFCPHRPDEGCSCRKPGIGLINEALSDFRVDIGGSLVIGDRDDVDGQLARNLGLPFRIVSH

SEQ ID NO: 12663 - protein, 388 aa, Thermoplasma acidophilum DSM 1728
MRDVFIVAAKRTAIGKFGRSFSKLKAPQLGGAAIKAVMDEAHVDPASVEEVIMGNVIQAGNGQNPAGQAAFHGGLPNSVLKYTVNVVCASGMLAVESAAREIALGERDLVIAGGMESMSNAPFLLPADLRWGPKHLLHKNYKIDDAMLTDGLLDAFYFEHMGVSAERTSRKFGITREMADEYSVQSYERAIRATESGEFADEIVQFEGLDHDEGIRKTTMEDLARLPPAFDKNGILTAGNSAQLSDGGSALMIASEKAINEYGLKPIARITGYEQASLDPLDFVEAPIPATRKLLEKQHKSIDYYDLVEHNEAFSIASVIVRNELKIDNERFNVNGGAVAIGHPIGNSGARIIVTLMNALKHRHLKTGLATLCHGGGGAHTLTLEMVE

SEQ ID NO: 12664 - protein, 223 aa, Thermoplasma acidophilum DSM 1728
MKIFLDTANIDEIRTGVNWGIVDGVTTNPTLISKEAVNGKKYGDIIREILKIVDGPVSVEVVSTKYEGMVEEARKIHGLGDNAVVKIPMTEDGLRAIKTLSSEHINTNCTLVFNPIQALLAAKAGATYVSPFVGRLDDIGEDGMQIIDMIRTIFNNYIIKTQILVASIRNPIHVLRSAVIGADVVTVPFNVLKSLMKHPKTDEGLAKFLEDWKKVSPDGKLIL

SEQ ID NO: 12665 - protein, 405 aa, Thermoplasma acidophilum DSM 1728
MFAMDKALLLYSGGLDTSVMIKWIQENLSMDVATLTLNVGNSDLVAIEEKARMLGADPVFVHDAKDEFAEKFIAKSIMANGSYEGYPLSTALARPLMAEKAVKYAQKIGAKYIVHGSTGRGNDQVRFEVSIRALDPSMQVLVPVREWNMMRKDEVEYAKTHGIPVKLDGKYSIDENIWGRSVEGPDLEDIGKGVPEDVYEWVVPPWKANAEHTLKIAFDGGIPSEIDGEKMKLADLIVFLNTLAGSSGIGLIDHMENRVVGLKSHEVYECPAATVITHAHRYLESLILNRNEAEVKMNMDWQFAKFVYGGLWHDPVMNAVNAAEAEFNRDISGEIKIRMSHGIMYIEGAWGNSFLYSKDLINYSSMAFDQRASKGFIDIYGNATVHSHNRNPKMVKEVQGSSVEF

SEQ ID NO: 12666 - protein, 385 aa, Thermoplasma acidophilum DSM 1728
MKQIQLSRNVVDDISFGAIVKIRDQLLEMQRAGKKVYRLESGDPSFPIPEHVRLAIEDALKKNRTHYTDSTGIPELRKAIAEKLVKKNGIRSATPENVLVSNGGMNALYITFRSLIAPGEKVIIPDPMWTEIAEIIKLADGIPIRIPVERYVEEMRKYENDDRVRAVFINSPHNPTGYVFGEKQISDIIDFAESKGIFIVSDEAYEDVIFDGLKHLSPGSLYDDTISLFSMSKSYAMSGLRIGYAHTSNEILYDRMKKLLRCTINGVNSATQYGAVAALTGPQDYIGEMRKEYQKRRDIIYEAVSESRYLEPIKPHGTFYLWNRIKEYPPGVSDSWGMTSYLLEKTGVGSSPGPVFGPAGEGYIRFAFSAATDHIQEAADVLRNF

SEQ ID NO: 12667 - protein, 309 aa, Thermoplasma acidophilum DSM 1728
MKVLVVVPNFLPLDQIRSAVSTITQDVEVRTDTDFDRSDAEILIVTTFTPVNGDLLKKMPRLRFVQVASIGYDNVDMNAMKKNGIMVSNIPTASADSVAEHALSMVLSLIKDQRFLDAEIRSGRWPRITRSSDLMGKTFGIVGMGSIGRALAARLLPFKVAIIYNDTKRMSEAEEEEYGATFVSLDRLLSDSDVISVHVPLNETTRHMFNSSRFGLMKDGAIFINTSRGEVVVEKDLIEAIQKKGIRAGLDVFEHEPPDPNSPLFRLENTLFSPHIAGVTAESQMRFFRETIANVMRYMQGYDPNFRVI

SEQ ID NO: 12668 - protein, 591 aa, Thermoplasma acidophilum DSM 1728
MMNEDTNFGNAKLRRSLGMWDLFFLSITGMIGSGWLFAALDAADYVGPASIFTWIIAALFFFVIALTYAELSGIIPYSGSIVRFNQYSHGSMSNFLIGWAYLIGAVSTVTVEAISVVTYTSTYMPQFYNSSAGVLTPLGILVSIVLIGFFFFIQFIGVNVYGKLNTIMTAWKLAIPVITVVLIMSLSFNPRNFYVAHGFLPYGSAAIFAALIPSGVVYAFEGFRQGIEYAGEARNPQRDVPISLIAAMLATIGIYVALEIAFIGSIKWGAIGISPGDWAALSTSSWASGPFYYATKYSGVLILSVFAVVILIDAFISPFASLGVYEGTSARSFYGMARLNVIPEFFGSIHPRFRTPWVGLIFTLILSSLFLAPFPSWYLIVGINASFTVYAYLSAGITNTVIRKNAPDIHRPFRLPAASVLSPIAFVVASMLVYWSGFSIIDFLILVVYAGLPLILLSKFREKLNLSLRASIIISAVYWILIAVVGFSGYTGRLPFVYYWPLISAIPSATFAYAYLKSRSIEIVSSVWIIVYNILIGAVSYYGSLGTGVIAYPYDYAIFAVISLGIYFLAVRTGYSTEELKNLVTYGPVAE

SEQ ID NO: 12669 - protein, 548 aa, Thermoplasma acidophilum DSM 1728
MATSVANVIIDVLADLGVKRIYGLPGDSINPLVDAIRTQDRIKFVQVRHEEGAALEAAFEAKFTGELTVCMGTSGPGSIHLINGLYEAKMSRVPVIALTGQIETDLLYHDYFQEVNLDRLFDDVSVFNAQILNPESAAYIVERAYRESVSKRGVSHLTLSVDVLRMGADHRPVQHMAVESSHFSIDPGAAEKIINESKKPLLFVGRGIIGHSDEVLKFAERIGSPIIYSVNAKGLLDDDDPKVMGPLGLLGTKPSVEAMKRADLIVLLGTIFPYVTFMNEKAEVLQVDVDPSNLGKRVRADIAYQCTVADFLSQVKPDEKPEKFYSEMSRDRDDWISSMEKLESDTSKPIKPEFLARVISKKADRDAVFIVDTGNVTVWATRHIRASKERTFLLSPWLGTMGVGIPGAVGVSFATDRQVIAITGDGSAAMTMMELITAKKYSRPVKIAIFNNSKLGMIKFEEEVMGYPEWGVDLLNPDFSKIAEAVGIKGMRVEDPDKVEDAVEEFLRTEGPAVLDAVVDGDERPMPPKLTFAQVRGYVTSILREKLD

SEQ ID NO: 12670 - protein, 745 aa, Thermoplasma acidophilum DSM 1728
MESNNGIILRVAEANSTDPGMSRVRLDESSRRLLDAEIGDVVEIEKVRKTVGRVYRARPEDENKGIVRIDSVMRNNCGASIGDKVKVRKVRTEIAKKVTLAPIIRKDQRLKFGEGIEEYVQRALIRRPMLEQDNISVPGLTLAGQTGLLFKVVKTLPSKVPVEIGEETKIEIREEPASEVLEEVSRISYEDIGGLSEQLGKIREMIELPLKHPELFERLGITPPKGVILYGPPGTGKTLIARAVANESGANFLSINGPEIMSKYYGQSEQKLREIFSKAEETAPSIIFIDEIDSIAPKREEVQGEVERRVVAQLLTLMDGMKERGHVIVIGATNRIDAIDPALRRPGRFDREIEIGVPDRNGRKEILMIHTRNMPLGMSEEEKNKFLEEMADYTYGFVGADLAALVRESAMNALRRYLPEIDLDKPIPTEILEKMVVTEDDFKNALKSIEPSSLREVMVEVPNVHWDDIGGLEDVKREIKETVELPLLKPDVFKRLGIRPSKGFLLYGPPGVGKTLLAKAVATESNANFISIKGPEVLSKWVGESEKAIREIFKKAKQVAPAIVFLDEIDSIAPRRGTTSDSGVTERIVNQLLTSLDGIEVMNGVVVIGATNRPDIMDPALLRAGRFDKLIYIPPPDKEARLSILKVHTKNMPLAPDVDLNDIAQRTEGYVGADLENLCREAGMNAYRENPDATSVSQKNFLDALKTIRPSVDEEVIKFYRTLSETMSKSVSERRKQLQDQGLYL

SEQ ID NO: 12671 - protein, 550 aa, Thermoplasma acidophilum DSM 1728
MMMYEDDIRRIALINAYQHEGKADLKSVMGKVMAEIPDLRRDPRSAREMVSRIVDEVNSMSAYEIRETVETRYTSSIRKEKKVEEHRLPDLEGVNGPVVMRMAPSPSGPLHIGHTRMAILNDEYVKRYGGELILRIEDTNPKNIDPDAYHMIPEDLEWLGVNVTKIVIQSDRFDLYYAEAKKLMENGHMYVCTCPREEFKKRKLESIPCKDRDNPPETNLELFDKMIDGTIKEGDAVAVVKTDLKHPNPSVRDWIAFRIIEARHPRVDDKYRVYPMMSFSVAVDDHYLGLTHVLRGKDQLTNTDKQRYIFDYNGWKKPYYYHYGMIKFPGIKLKTSLMKKGILSGQYEGWSDIRLGTVRAFAKRGYRPETFRRYWINSGLREIDAIFSIEIFDSINREIVDPRAYRFSFVKDPVPVRIEGMPNISAKLPLHPTHPEYGFREYEVKGSVYIASRDFAAISEGERIRLKDLCYIRKKGNGIIYDGVEMTEKTKIINWCPEGSRDFSVLKPDGSKDSGLIEPKSSGYRGIAQLERYGYVNFADGDDLAYFTHP

SEQ ID NO: 12672 - protein, 303 aa, Thermoplasma acidophilum DSM 1728
MGDHGDAKDHASELKDIFSLKKIADAKYSYEDSDYVIFGVPFDNTSSYRRGSKYAPDSIRSAYVNLESFEFSYRFDLLRARISDLGDMEESEDVEYVVDQVDRVTKMVFSDGKIPIMLGGEHSITVGAVRNFPEDVHMVIVDAHSDFRDSYMGNKLNHACVTKRALEILGPNRITSIGTRSVSLEEYQDPDFEKVEFIPSFSVREYGIERFINDIERRPGRVYISIDMDGIDPAYAPAVGTPEPFGLTDYEVRRLVERLSYKAIGMDINEFSPLYDNGNTSMLAGKLIQVFIASREKYRIEHI

SEQ ID NO: 12673 - protein, 129 aa, Thermoplasma acidophilum DSM 1728
MSWQEAEVRELKVGRYILIDDAPCKIVEITMSKPGKHGEAKGRIVAIGVFDNQKRSVVYPVKHKVKIPIIEKKNAQVLSVQNNEVQLMDSETFETFVLPLDPEIADKIKPGMEVPYWETMGMRKIMLQN

SEQ ID NO: 12674 - protein, 339 aa, Thermoplasma acidophilum DSM 1728
MRILEEDLKNSTYRIRIESLDDLWYLRNILSEGDEVSAITFRRVEESADVQRSRERERIPITIRLKVEKIEFQDFDNRLRILGTVIEGPEDTKGKHQSITVTVDSEISITKEWDDQHIDLLKEATDEKYVTVYTAVAMDEDEAQIFLIHPYGIQQVGTVYSGRSGKYAEGNYSEASYFDQIVNALKNYSNSIIILGPGFARDRFARYCAQRGVNVIGSFPANRTDSGAVYEFITSADGAKLLSNERIARDKEIVDEFLVAVKKDMGVYGRDQTESALQMGALSDLIITDEMFRTEDGRRSLSIAQTVGTRIHIVSVSNDPGQIVKKFGGFAGILRYRVQ

SEQ ID NO: 12675 - protein, 474 aa, Thermoplasma acidophilum DSM 1728
MEFLTVAGTLKKDVITFWGLVFYAIMVISPAGPFAFTGASAMDYAGKTAPLTFLIGGLTLFLAVIAVYVYSGRISNAGGYYKFVEATFNNRYFSKSVGFYYLFVVLSSIIGSSILLGWFTWIGLETMIGYSLPFVYVIAISFVTPIIYLIVGYLSLNYSQKIAVTVGLIDLAFYLALSIAIILKSPYNGLQYFNIMNSNDGLHGFFLGMIVGGFVAFSGYGSIVVLAEEAKMPATSIKKAIITSLIIMISYDTFVIYANVAGAGPRLPAALKYFAPGLFVTKSYYGMDVTLAAFFVFLVSALISTVIFGNSAARDLFSLARDGILPPVFARVHDKYGSPYMAVITVFVIAIIGIGFGLIPLVHYYGENYGMYYLLVINAIVGSTFTLVYHIIINESLPFFMYRLRQLKPLVHIAGPTIASGIIGIAMYYSLTGLSYPLSLVYAIIPILVILSLFIIYIMRNRSIRMDTFTSVKQ

SEQ ID NO: 12676 - protein, 375 aa, Thermoplasma acidophilum DSM 1728
MRVLDDIDEKIDKATKLLQGGIKEESLGHKDKAKEYYFAAYRLMLEAANASPPDLKKKRLDQCNIILSAYQRVNENRTAPAEEKTSDRISEGEALLEEIGLEKPEIPKVTFEDVAGLDDVKNEILGKIVYPMKFKELSQEYNIQFGGGMLLYGPPGTGKTFIVKAIANEVRARFINVNPASLYSQWFGMFEKNISKLFRAAALLSPSIIFFDEIDALVPKRDTSNSDAAKRGVAQLLNEVGGINSQKNKNLFIIAATNNPWEIDEAMLRPGRFDIKIYVPPPDIIARKKIFELNMAKVKQAGNIDYNLLAQQTEGYSGADIEFICKKASQNVFMEAVKSGKQRQVETRDLLDVIGSIKPSIDADLLSKYREFAGF

SEQ ID NO: 12677 - protein, 441 aa, Thermoplasma acidophilum DSM 1728
MKYIVVSSRCPFSHDKAAGKEIIKENVGGVATALRRAMEKYGGTWICWGDGKLDGKYLDEDVGKYRIRRVMLSVPEKHGYYDLYSNRTLWPLFHYFRERVKYTDNGYEIYRRVNEKFTNMIVQSLSPEDVIWIHDYQLSLVPKMLRDRGITNRIIFTWHIPWVSKEMFETLPESRDIIDSLSRSDFITFHTETYRKNFTDLLDENSRAKSLVIPLGIDYRYFSKTRGTDIKSYALMDRKLIFSIDRLDYTKGLVNRVLSIEELLRRHPDLVGKFVYVMIVTPSRTTVSDYVAMKRELEMHIGRINGEFGSISWMPILYMYRKISDKMLVSYYKNADIALITPLIDGLNLVSKEFVASSDKGILILSRFAGASNCLDGAVVVNPNSLGEVAEAIYSAMNMGEDEIRERLRKMKEEVSRRDTDWWIRRINAIAKRKINDRTVT

SEQ ID NO: 12678 - protein, 463 aa, Thermoplasma acidophilum DSM 1728
MNNHRYSSLKRNAIGFKENMFQGVAGSAPAGAAVATLTGAAAYALGSLPLAAFIAFLVVFLNAFIISRLSTRIAGAGGYYYYVRDGLGNRPARFTGFLYIFYQIMALAFISLSVGVFVPAVLGAVFGIAIPGYLMYLLIVAVLAAGFLISYSGVRESTRYTMYMAIAEMAIVAGMGVIILVMKPSINTISVFTPKFAYGGFSGVGIGVLLMYTAFSGFGASTPLGEESMDAEKTISRSVLFTVVVLGAFFVFASYYFTVAWGPANMASYANPNNLAPGITMIRNYLGTGAAILITALFINSLLTGTVVVTNSTSRVMMAMARDGIINESFSGVSRRKTPHISAAFVSAGSAIIAIVSAAVLGGFGAFIMTATAATLGVLLVHALINISLPASDMHLHRSFYGSMILSVVSVAVLGFIFYSTFMSISLPVIVGSLAFAIFSVSALVYSLKNRTSEVHSEMAVES

SEQ ID NO: 12679 - protein, 303 aa, Thermoplasma acidophilum DSM 1728
MSLVECVPNFSEGRDRDRVNRIRDAIASVDTVKILDVEMDPNHNRSVITFVCDSSKAVDAAFAGIKAAAEIIDMDAHRGEHPRFGAADVIPFVPLQDTKMETCVRLARDLGKRVGEELGIPVYLYAEAAQRPDRSDLAAIRNKNFQYEQLKEAIKEEKWKPDFGPSVVGKAGASIIGARDFLIAYNVNLNTSNMEIGKKIASAIRAKDGGLTFVKSLAFFLKDKNMVQISMNLTNYRKTPIYRAYELVRLEAARYGVLPVESEIVGLVPEQALIDVAKYYLQLNGFDEGNILERKMEKAANME

SEQ ID NO: 12680 - protein, 620 aa, Thermoplasma acidophilum DSM 1728
MYENRQYQVEAIDFLRSSLQKSYGVALESPTGSGKTIMALKSALQYSSERKLKVLYLVRTNSQEEQVIKELRSLSSTMKIRAIPMQGRVNMCILYRMVDDLHEINAESLAKFCNMKKREVMAGNEAACPYFNFKIRSDETKRFLFDELPTAEEFYDYGERNNVCPYESMKAALPDADIVIAPYAYFLNRSVAEKFLSHWGVSRNQIVIILDEAHNLPDIGRSIGSFRISVESLNRADREAQAYGDPELSQKIHVSDLIEMIRSALQSMVSERCGKGDVRIRFQEFMEYMRIMNKRSEREIRSLLNYLYLFGEYVENEKEKVGKVPFSYCSSVASRIIAFSDQDEEKYAAILSPEDGGYMQAACLDPSGILEVLKESKTIHMSGTLDPFDFYSDITGFEIPFKKIGEIFPPENRYIAYYDGVSSKYDTLDEKELDRMATVIEDIILKVKKNTIVYFPSYSLMDRVENRVSFEHMKEYRGIDQKELYSMLKKFRRDHGTIFAVSGGRLSEGINFPGNELEMIILAGLPFPRPDAINRSLFDYYERKYGKGWEYSVVYPTAIKIRQEIGRLIRSAEDTGACVILDKRAGQFRKFIPDMKKTSDPASDIYNFFISAQAREKYGA

SEQ ID NO: 12681 - protein, 345 aa, Thermoplasma acidophilum DSM 1728
METVAVKLTGTKFFDTGLSTGTYFLFETAFASVTLALVSVVVLRKMKMSAFMLFSIIYFIFIWTIPAAWIWNPTGWLYKLGVRDFAGGLVVHVASGFAALAIMVRIWQEEKKMGLKESKKENLNLNSGWLTLSIILLWVGWFGFNPGSELAFTTETVIVVITTFLAAASAMVSTMLTKFLVSKQDPGLIYAVNGVLMGLIVITPLAGYVSPGSAIILGLISGPIFVSAESIFSKHKWYSDPIGVLPGHMVGGIFGLLMIAFFTQTPFADASGASNLPNGILFGGGIMALHQLGLEAMAVVVVGAFVFTVSYASVYAISLLLNGILRDSEYSPARPANRLAKDTGA

SEQ ID NO: 12682 - protein, 508 aa, Thermoplasma acidophilum DSM 1728
MLKKELGIIDLMMASVTGMIGSGWLFSAFYASSMAGPYSIFSWLVGTGIVAILALIYADLSGRVPMAGAAAGYPFLTNGTVAGSLNAWSLFLGYASTPPLEVIASISYLSFLVPGLLNNNGLLTTTGILLAVALLVAFFILNATGIRNTSRFNNIISYMKIAIPIITSFFFIFTIFSIRNFTLVGTVKPEGIFTAVPGAGIAFSFLGFRQAVELSGEAKNPQKTVPIAIMLSVAVASAIYMIVQIAFIGSLQWGSIKPGDWAALADSGYSSGPMLVLASTLGLGALATVLLFDGIISPLGTSSIYQTTTSRISYRISEMGFFPKKISTTNSRSVPIFALILDLVVMILFVLPFPSWQSLVSVNSDLTIIAYMSGPISLAIFEKYGIEAKGFRLPASKILAPLGFALSALIVYWSGYPTTLYMSAIAIAGLVLFVFARKNPIRDISQGSYMIAILAILPVVSYLGSYGIGIIPFPLDLIVISAVALAIFYAGTRAAPQSVALMENFISS

SEQ ID NO: 12683 - protein, 382 aa, Thermoplasma acidophilum DSM 1728
MLSERMQYINESATVSASNNVEKLRKQGLKIYNFGIGEPDFTTPEGIIDYAFEMAKQGKTHYTPSAGIMELREKIASKLKTRNRIDANAENVLVTPTKFGINLAMMVILNPGDEVIIPDPYYVSYPDIVKLAGGKPVPVRTTDDYDIDLDEMRKFVTPRTRAIILNNPNNPTGKVLSEKEIRDLVDFALENDIYIVSDEIYEDLIYEGSLYSPASMGKEAFEHTITLNGFSKGYAMTGWRIGYFVATEEIVEAANIIQQQTITCASSISQYAALRALDDNESPARMRSEFRKRRDLAYGILSESTDMKVHKPEGAFYMFPGYSKDIPSEKIAEMLLNQEHVVVTPGSAFGDRGRHHFRISFATSEDIIKEGLERLVKFMHTL

SEQ ID NO: 12684 - protein, 280 aa, Thermoplasma acidophilum DSM 1728
MEQSLAEYYRPILKWAGGKRQLLPILLKYSPAKFNTYYEPFIGGAALLISLYSLNKIKSAVVSDTNKDLYNLYKTMKENPLKLIAALKDLKFKNNREDYYEARSLFNSTEDPVKRSALLIYLNRHGYNGLYRVNSENKFNVPFGRYSNPRMPSSENIMAFSNILKSCTILNLDFEMAVSHATRGDFVYFDPPYMPLNRTSYFTEYTNSGFDEKDQERLFRVYYELSKRGVYVMESNSSTEFIKELYKDFCIIEVDAKRNINSIGNRRNGIKELIITNYDV

SEQ ID NO: 12685 - protein, 642 aa, Rickettsiella grylli
MNDMLKNLFLWLIIAVILITVFNNLEPRNNAGERLTYSEFLQNVQQGNVQSVTIQSNQIIKGQLHSDKTFTSYMPIPDQYLLPELLKKHVNVKGEPPQQESFLMRIFINWFPMLLLIGVWIFFMRQMGGAGGKGALSFGRSRARLLGEDQVKVTFADVAGAEEAKEEVSELVEFLKDPAKFQKLGGKIPRGVLLMGPPGTGKTLLARAVAGEAKVPFFTISGSDFVEMFVGVGASRVRDMFEQAKKQAPCIIFIDEIDAVGRHRGAGLGGGHDEREQTLNQLLVEMDGFEGNEGVIVMAATNRPDVLDPALLRPGRFDRQVIVGLPDIRGREQILKVHLRKIPYGKDVKPGIIARGTPGFSGADLANLINEAALFAARENKSTVDMIDLEKAKDKVMMGSERRSMVMNEKEKKLTAYHEAGHAIVGRLVPDHDPVYKVTIIPRGKALGVTMFLPEEDRYSYTKQRLESQIASLFGGRIAESLIFGPEQVTTGASNDIQRATEIARNMITKWGLSDRLGPLTYNQENEEVFLGHQIAKNNKFSDDTAQLIDEESRHIIDRNYKLAESLLQDNIEKLHIMAEALIKYETIDSAQINDIMKGKLPREPKGWNNGNKNDQSTSPEEKLSSKKDSTIIDHDPATDSL

SEQ ID NO: 12686 - protein, 319 aa, Rickettsiella grylli
MSEMMLFTGNANRPLAEKVANHLDKELGQATVSHFSDGEIMVEILVNVRGQDVFIIQPTCPPVNSNLMELIIMADALRRASAKRITAVVPYFGYGRQDRRIRSSRVPITARVVADMMTAVGISRLLTVDLHADQIQGFFDIPVDNVYATPEILKDMEGQKIFKGHEQLIIVSPDVGGVVRARAIAKRFNDADIAIIDKRRTGPNRTEVMHIIGEVNDRNCLLVDDIVDTGGTLCLAAQALKENGANLITAYCTHPVLSGNAIADIRHSYINELVVTDTIPLSDDALHCEKIRQLSLSDMLAKTICRINSEESVSSMFVD

SEQ ID NO: 12687 - protein, 682 aa, Rickettsiella grylli
MIPVKNELLIAEKFMASAQPKNTIIGIDLGTTNSCMAIMEGGKAKVIDNIEGRKTTPSIVSFDHNEIKVGEVAKRQSVTKPAETIFAVKRLIGRKFTDAEVQKDIKMVPYKIVPAKNGDAWVEVNGKKLSPQEISAQILMKLKRDAEKYLGYEVKDAIITVPAYFNDSQRQATKDAGRIAGLEVKRIINEPTAAALAYGLDKKNKSAKGTDAKIAVYDLGGGTFDISIIEIAEVDGEHQFEVLATNGDTFLGGEDFDLRVINYLADEFKKDQGIDLHKDPLALQRLKEAAEKAKIELSSTHETDINLPYITADSSGPKHLHIKLTRAKLESLVDDLIKQSIEPCKKAIKDAKLSVEEISQIILVGGQTRMPKVQEIVKNYFGKEARHDVNPDEAVAIGAAIQGGVLAGDVKDVLLLDVTPLSLGIETLGGIMTPLIERNTTIPTKKSQVFSTAEDNQPAVTIHVLQGEREQAKDNRTLGRFDLTDIPPGPRGTPQIEVTFDIDANGIINVSAKNKTTGKEQKIVIKSGSGLSEEEIQKMVKDAEIHADEDRKFRELIKTRNEADSLIDGVSKALTNAGDKINADEKAQLEKAIEELKDALKGTDKENIEAKLKALTETSSKMSDRLHAQPDASAQDTTTANQTDDAPHEQTESAKDNKDDVVDAVFEEVKDKDKKDNDKNKG

SEQ ID NO: 12688 - protein, 323 aa, Rickettsiella grylli
MNTKKFSDSARNVIEIEANAILNLLPQLDSKFERACELFLNCQGHIVVIGIGKSGHIGNKIAATLASTGSPAFFIHAAEANHGDLGMINSKDVVLAISHSGETDELISILPTLKFLNIPFILMTGNPNSTLAQQATVTLHIPIEQEACSLGLAPTSSSTATLVMGDAIAIALLNRRGFSSNDFAKVHPRGHLGRRLLLKVADIMHTGPALPNVRSGTPLIQTLFEISQKRLGMTIITDENQRLLGIFTDGDLRRAIDQGLNLQTTLVDHVMTAHCKTINKDKLATEALHLMETSKITTLIIADKEKKPLGVVHIHDILSRKIT

SEQ ID NO: 12689 - protein, 868 aa, Rickettsiella grylli
MSLNKLTSQFQNALAESQSIAIGHDNAFIEPIHLMSALLRQEKGTVRPLLSKANVNLNQLTKSVDEAIAHLPSVETSTPGEIYPSKDFTRLLNITDKFAQQRQDEYLSSELFVLAAVGDKSILGELLRKAGADKTMIEQAIKDIRGGETVNDPEAEGRRGALEKYTIDLTTQASQGKLDPVIGRDDVIRRTIQVLQRRTKNNPVLIGEPGVGKTAVVEGLAQRIVNHEVPEGLRNKRLLALDIGSLIAGAKYRGEFEERLKAVLNELAKQEGQIILFIDELHTMVGAGKAEGAMDAGNMLKPALARGQLHCIGATTLNEYRNYIEKDAALERRFQKILVDEPNVEDTIAILRGLKQRYEIHHGVEIMDSAIVAAATLSHRYISDRNLPDKAIDLIDEAASRIRIEIDSKPEKLDRLDRRLIQLKIEREALKKETDESSKIRLKNLDNEITELSKKYADLNEIWKAEKATLQGEQKIKSELEKAQFELEKARRSGDLNRMSELQYGHIPALEKKLVAAQKIEKKEQPALIRNKVSEKEIAEIVSQWTGIPVAKMLEGEREKLLQMEDALHKRVVGQDEAISVVANAIRRSRAGLSDPNRPIGSFIFSGPTGVGKTEVCKALAGFLFDSDEAMVRLDMSEFMEKHSVARLIGAPPGYVGYEEGGYLTEAVRRKPYSVVLLDEIEKAHADVFNILLQVLEDGRLTDSHGRTVDFRNTVIVMTSNLGSQIIQEFTSKQDYAALKSTLMDIIAQHFRPEFINRVDEVVVFHALNETQIHSITKIQLQRLRQRLGERDLHLEVSEAAINHIAKMGYDPVYGARPLKRTIQQELENPIAKEMLEEKFLPGDKIFVDYSDDKIKLTAKKQRQKMRK

SEQ ID NO: 12690 - protein, 338 aa, Rickettsiella grylli
MKFLDEVEIRVEAGKGGAGCVSFRREKFIPFGGPDGGDGGDGGGVYLKASVNLNTLIDFHCHRLYKAGHGEPGKGNDSAGKKGADLVLEVPVGTEIADADTQELIGDLTAPNQIQCVARGGWHGLGNARFKSSTNRSPRQFTTGYLGEARRLKLSLKLLADVGLVGLPNAGKSSLIRAVSAATPKVADYPFTTVQPHLGVVRLEAGCSFVMADVPGLMTGASEGFGLGIRFLKHLSRTRLLLHIVDVKPVDGSDPLQNIALIENELEKYSPELAQKPRWLVLNKIDLLSAEELEQCVQRIATQISEKVQIFKISALQRVATQALCYALFDFLKRHTKT

SEQ ID NO: 12691 - protein, 372 aa, Rickettsiella grylli
MRIGVPKEIKNHEYRVAIVPSIVRELTAQNHRVFLETKAGNGVGIDDNDYQEAGAVIVNTAQEVFGESDLILKVKEPQPQECAYLNEKKTLFTFLHLAADRKQTELLLASKCTAIAYETVTDAQGGLPLLTPMSVVAGRMSIQAGTHCLEKAQRGRGILLSGVPGVASASVVVLGGGVVGSNAIRMALGLEAQVTVLDKSAMKLRELDLHFGGQLNTVFSTQDAIEKYVPLADLLIGAVLVPGAEAPKIVTRELLKKMRPGSVVVDVSIDQGGCFATSRPTTHTHPTYYVDDIVHYCVSNMPGAVPRTSTFALTHATLPYILTLANKGIDRALTEDVYLRNGLNISQGRITHQAIAHGFDKPYVSAGEILSA

SEQ ID NO: 12692 - protein, 453 aa, Rickettsiella grylli
MSKKVKQQKLGLWMLTALVTGNMIGSGIFLLPASLAAYGSISLLSWVVTAVGALLLALVFAKLSNVMPLIGGPYAYCREAFGEFVGFQMAYNYWIALWVGNAAIVVALIGYLSFFWPKLAHDTRWTCLVSISVVWLVTFINILGVRQAGIFQLLTTVLKLIPLLLIALVGIFYIHPHFLSAFNLSGQSNLKAFSGAATLTLWSFIGLESASVPAGHVNNPHRTIPKATILGVVITTVVYLLSSTAAMGVMPLTVLAHSNAPYADAARIMFGPIGSILVAIGAVISCLGALNGWVLLQGQIPLAAAQDKLFPAVFLKKSKSGTPIVGLIVSSILISLLLLMTLNHSLVKQFTLIILLATLASLIPYFLTTMSELVIFYKYPGLFKKDRKLLRSVIIAILAGIYSFWVIIGSGKEIVFYGTLLLLSSVPVYVWMKWRSSSNGNVINVNEQSLPLP

SEQ ID NO: 12693 - protein, 187 aa, Rickettsiella grylli
MAKNRAFIILDRDGVINVESKNYIKTPEEWLPLPGSLEAIGLLSQTGYTVVVATNQAGVGRGLYTEIDLANIHQKMQDSLKQFGGKIDQIFYCPHHPDTACHCRKPESGLFEQIADYYQMDLTGIHSIGDSLRDIQAARKVGCQPSLVLTGNGEKTLLNNQELVNEIPIFSDLKCAVETLLQEKQHV

SEQ ID NO: 12694 - protein, 628 aa, Rickettsiella grylli
MCGIVGILSNLDKSFHISNLLNSMSGTLTHRGPDGSGVYLDDNIAMAHRRLSIIDLSSNANQPFSSYDKSLVLIFNGEIYNYSKIKNLVYNYPFKSTSDGEIILPLYQKFGPDFIKHLEGMFAFALYDKKQKLLFLVRDRVGEKPLYYTWYKNCLFFSSELKSFWEITDFRPPLSKIAILNYLAYTQSPAPYSMYENIYKVIPGHYLIIDCKNKVTQKNYWNIDFTNKTKITAYEATEQLDTLLRDTMKKTLVSDVSIGITLSGGIDSSVLLGHMSGIYSEAINSFTLGSNHQPNSIDPELDRAKIVAKLYQTHEHFCDFKDISFKDFLKANSYYDEPVGILDTVHSMFLSQYISQYHKVVITGNGADEVFGGYKSYSNFLRKNFLKQCLIQASRKYAIKNIQSFFTKTVLKTISNYSLKFLTNDMILFSNNPYLIEYLDVYYKMSNFDNLLDGKLFFELLVTLNHCASMSDTLGMTHSLEIRSPFLNHHIVEFAASLPVYYKVKFFSPSNRNKYILKRLALKYMPKELIFIKKYGCGSFINYHGKFKTSWRADIEQILFHSAAGIYEFFSKEKTRCLWIKFLSGVLSPNEKMLLNKLIILFAWYNSVFLKRKSSFQLASNQIQPNLH

SEQ ID NO: 12695 - protein, 252 aa, Rickettsiella grylli
MLIIKNLQVEIDNKKILRGINLHIKPGEIHAIMGPNGSGKSTLANIIAGRFHYTITQGEIRYLGEDLTRLAPEQRAHAGLFLAFQYPIEIPGVSNIYLLKAALNAIRKARGETELDAMDFLKRVKEKLNVVEMDHDFLYRAVNAGFSGGEKKRNEILQMALLEPQLALLDETDSGLDIDALKIVAKGVNTLRSPERAMMLITHYQRLLDYIKPDYVHILAGGKIIRSGDFSLAQTLEKEGYATFLQQEKSWV

SEQ ID NO: 12696 - protein, 297 aa, Rickettsiella grylli
MHCIEPKKAFLGLAQEDAVDYEKAKAVIIPFGLENSVTYGKGTAKGPAAIIRASYEVELFDEQLWCEPFRQIGIVTLNEPKIDAEMPKALQQLETIVEKVLKDKKFPFVLGGEHAITIGAIRPYLKKYNDLILLHFDAHADLRDGYQGQHYSHASAIRRCLDHDSLNVVSVGIRNVSREEIPFIEENRDRIHLYWGKDKKKWDINTIVSHLKNRPIYLTFDVDAFDSSVMPATGTPEPGGLFWEDALEIITAASQVGRIVGADINELAPIPQLPSCDFLVAKLVYKILSLFALDERL

SEQ ID NO: 12697 - protein, 577 aa, Rickettsiella grylli
MHYHKGFYSYRRLLHYLHPYWGWFLLGILGTILLANTDAGLIWFLKPLLNKAFVNKDEHFIHLLPFILMIAFLMRSSANFSSSYCLARVARSVVMNIRQDILIKLLRLPTTFYDKTTSGQLLSTIIYNVDQVANASTDALITLVQESFFVLGLIIVMLMASWQLSVLFFITVPCMVWIARYSSRRMRSLNSAVQESMSEMTQVAEEVIDGYKVIRMFGGEDYEIKKFKKLLARNRFRELKVVVTNSLASSGVQLIAGAIAVVTIYLAISHLTHITAGGFTSLVSAMLLLLKPMRNLAAVNNIIQRGIAAAGSIFLLLDEKNEPDEGTHTLNVLKGHLECRKVSFAYLSEQLILQDIRFTIKPGETIALVGRSGSGKSTLVNLLPRFYDNYLGNILIDGMDIREIKLKDLRNQFALVSQHVVLFNDTIAHNIAYGQLSHVSEATIVRAAQAAHAMEFIEQLPQGLNTLIGENGVLLSGGQRQRIAIARALLKNAPFLILDEATSALDTEAERHIQAALEKLMQNRTTFVIAHRLSTVERAKQILVLDAGQIIERGTHQELLEKNGYYAKLYSMQFRDC

SEQ ID NO: 12698 - protein, 400 aa, Rickettsiella grylli
MKINLSHRVSQIKPSPTLSLSATANQLKAQGKPVINLTVGEPDFDTPYHIKRAAHQAIDDGFTKYTAVDGIPRLKQAVIDKFKRDNQLDYSLDQVIISSGAKQSIYNLMQSLLNPGDEVIIPAPYWVSYPDIVLLAEAKPVFIPTSTESSLKITPQQLQAAITDKTRLMIINSPSNPSGMVYTPTELKQLAQILLRTPHVFILTDDIYEHIYWGDQPFKNILNVCPELANRTLVLNGCSKAYAMTGWRIGYAAGPKTIIRGMMNLQSQSTSNPNSIAQFAATAALTGQQTDVLHMNKIYHWRHDFFVAELNKIPGIHCLPAQGAFYSFPSFHAFIGEDKPFASDYELADFLLNNAHVAVVPGSAFGAPGYLRLSYALEETLLEKALLQLKTTLMNAMPLT

SEQ ID NO: 12699 - protein, 110 aa, Rickettsiella grylli
MSMTQLTTFEIIKQQIERYPLILYMKGTPEKPCCGFSARVVDILKACRVKFAHVNILEQSDIRRDLPQYSNWPTFPQLYYKGELLGGCDIVEQLYITGQLEKIIGKLDFN

SEQ ID NO: 12700 - protein, 538 aa, Rickettsiella grylli
MELARVFLLGALFLVAFMLWNAWQNEYPSHHQEIGSANVITEQPDNKINLPAMKTIPVENRNKNRFIHVKTDVLDVWIDTVGGNIVKANLLHYPQYPNQPRSTPFQLLNNDNAHYYVAQNGLISTEKKQVFHYQSNKNNYTLNPEESVLKVSLVCNTCGKIKVQKQFTFKRNDYLIPVRYQISNVAPSIFEGRFYVQFQQRKIDKAHSLFNISSYTGGAISTQNKPYQKISFDKMKQGTLSLATQDGWVAMLQHYFLSAWIPPAGQEFHFYSYAKDDIYTLGMLGAPFQIQPGMEFVSESKLYLGPESMDRLKAVAPHLDLTVDYGILWFISMALFSLLKFIHHYVGNWGWSIVIVTVLIKLAFYHLSAKSYRSMASMRSLQPRLQALRERYGDDKQKLTQATMALYKTEKVNPLGGCLPILVQIPVFIALYWMLLESVELRQAPFILWIHDLSAKDPYYILPVLMGITMFVQQRLNPPPPDPTQAKVMQFLPIFFTALFLNFPSGLVLYWIVNNTLSILQQWFIMRRLSVELSKKKQ

SEQ ID NO: 12701 - protein, 266 aa, Rickettsiella grylli
MKPFLKWAGNKHRIFHKIKPYLLKSNRLIEPFLGSAAVFLNTSYQSYLLGDNNFDLIQLYKYLQKEGQFFIDYCRFFFKKKFNTTDEFYRLRRVFNNTKKCRQRAALLLYLNKHCFNGLARFNQKGEFNTPFSPYKNPYFPEKEMQYFYKHANKATFIHGDFLSTLASVKQGDIVYCDPPYVGLSNTANFTQYTSQGFSRSQQLSLAKTAKYLASKGIRVIISNHDTEFTRYIYREARLISFSVQRNISSKSVTRKKTKEILAIFS

SEQ ID NO: 12702 - protein, 407 aa, Rickettsiella grylli
MALIVQKFGGSSVGSIDKIQQVANKIIETRTQGHQLVVVVSAMEGETNRLISLAKILNEEPDSREYDLLLATGEQAATALLAMALLAQGCPARSYNSFHVPIYTDNHHKKARILNIKEEILRDDIKVGRIPIVAGFQGISDSGDMTTLGRGGSDTTAAALAAVLKADECQIYTDVDGIYTADPRFVPQAKRLERIGFIEMTEFARAGAKVVQHRAVELASKYHIPLRVLSSSQEGSGTLIQVNEEESAIEGVKITGVTASHREAKLTLQGLTAEKEAMSLFFSLLKDARIEIDMLTQQQISPNQMDITFTLARADYHQAKQRLQTLVKKKYALSIVGNKRLAKLSVVGMGLHSHPGIIHTLFQALESENIPIILTLSSALRISLMVNDGEVLQGVRILHQIFGLGEK

SEQ ID NO: 12703 - protein, 294 aa, Rickettsiella grylli
MKNLKTHCGKIAIIGRPNVGKSTLLNKILGEKLTITSSKPQTTRDQILGIKTDLHTQFIYKDTPGILQNAGRRLSRTFTRSAIQALIDVDLIGFVIEADRWTNEEAAILERIKPLKRPVILIINKVDKINDKHRLLPFLKCCYQKMSFLAIVPISALKGQNIDELEKVIAKALPHAAFIYPPDQLTDRSQRFLVGEFIREKLMRYLHQEIPYGLTVSIEQFIEEKKIIKISALIWAEHSRQKAIIIGKKGELLKKIASEARKDIEAFLHKKIYLDVWIKIKTRKPNEEGNLKRV

SEQ ID NO: 12704 - protein, 595 aa, Taiwania cryptomerioides
MGALNIGYDKFNGGTDKHTRRKITRTIFVSALASAFVVGTVIFLAMGINRHGSGRDDDEGSDHVRRWKSTSNAVKNACSSTLYQELCVSSISSYEGLSSQAGHMEILDAAVNVAINAVKKGQAHTRSLFSRDLDSRQRGALNDCMEMYDDTLDELHDTLSDLHNATFLSMPKHAADLETLLSAAITNQFTCLEGFTLCKGHLKQQVKGELHNVSHLVSNSLATVGNISARAKQALGIADSLADRRRLLSESFVSTDEEGFPSWMSVGDRRLLQVNVTNITANAVVAKDGSGHYSTISAAVDAAPEKSTTRFIIYVKKGVYQENVEIHKKKHFLMFIGDGEGVTVVTASRSVRGSNHTTFHSATVAVTGKGFIARDMTFENTAGPSNHQAVALRVGSDFSVFYRCSFKGYQDTLYVHSLRQFFRDCDIYGTVDFIFGNAAVVFQNCNLYARKPLENQQIMYTAQGRQDPNQNTGISIHNCRVTADSDMAAVKSSFKTYLGRPWKEYSRTVFLQSYLDDLIHPAGWLEWNETFALSTLYYGEYMNTGPGAGTANRVNWPGYRVITSATEASQFTVNQFIEGDTWLPSTGVEYSSGLA

SEQ ID NO: 12705 - protein, 230 aa, Triticum aestivum
MVRGKTQMKRIENATSRQVTFSKRRNGLLKKAFELSVLYDAEVALVVFSPRGRLYEFASATSLQKSIDRYKAYTKDTVNNKTVQPDIQQVKADALSLAKKLEALEDSKRRILGENLGGCSTEELHFLEGKIEKSLRVIRGKKTQLLEQQIAKLEEKERTLLKDNKDLRGKQRNLEARLLLPAPNSVAPLQPRGEPAPEQGPVQRDEDVETELYIGLPGVRCSSQRSGQAK

SEQ ID NO: 12706 - protein, 229 aa, Triticum aestivum
MVRGKTQMKRIENATSRQVTFSKRRNGLLKKAFELSVLCDAEVALVVFSPRGRLYEFASATSLQKSIDRYKAYTKDTVNNKTVQPDIQQVKADALSLAKKLEALEDSKRKILGENLGGCSTEELHFLEGKIEKSLRVIRGKKTQLLEQQIAKLKEKERTLLKDNEDLRGKRNLEARLLLPAPNSVAPLQPRGEPAPEQEPVQRDEDVETELYIGLPGVRCSSRRSGQAK

SEQ ID NO: 12707 - protein, 222 aa, Triticum aestivum
MVRGKTQMKRIENPTSRQVTFSKRRGGLLKKAFELSVLCDAEVALVVFSPRGRLYEFTSSSMKNTIERYKTVTKDNMSRQTVQQDMEKIKADAEGLSKKLDALEACKSKLLGQNLEECSIEELQSLEVKIEKSLLGIRAMKTRRFEEQLSTLRQKEMTLRQHNEELYSQCQKEQHLASEAAAPPAPATLAALPAPVTLEEQGQQMVDVETDLFLGLPGTGRS

SEQ ID NO: 12708 - protein, 570 aa, Lactococcus lactis
MGSSHHHHHHSSGLVPRGSHMASMYTVGDYLLDRLHELGIEEIFGVPGDYNLQFLDQIISREDMKWIGNANELNASYMADGYARTKKAAAFLTTFGVGELSAINGLAGSYAENLPVVEIVGSPTSKVQNDGKFVHHTLADGDFKHFMKMHEPVTAARTLLTAENATYEIDRVLSQLLKERKPVYINLPVDVAAAKAEKPALSLEKESSTTNTTEQVILSKIEESLKNAQKPVVIAGHEVISFGLEKTVTQFVSETKLPITTLNFGKSAVDESLPSFLGIYNGKLSEISLKNFVESADFILMLGVKLTDSSTGAFTHHLDENKMISLNIDEGIIFNKVVEDFDFRAVVSSLSELKGIEYEGQYIDKQYEEFIPSSAPLSQDRLWQAVESLTQSNETIVAEQGTSFFGASTIFLKSNSRFIGQPLWGSIGYTFPAALGSQIADKESRHLLFIGDGSLQLTVQELGLSIREKLNPICFIINNDGYTVEREIHGPTQSYNDIPMWNYSKLPETFGATEDRVVSKIVRTENEFVSVMKEAQADVNRMYWIELVLEKEDAPKLLKKMGKLFAEQNK

SEQ ID NO: 12709 - protein, 259 aa, Agrobacterium tumefaciens str. C58
MKLFKRIIAAATIAAALSAPAFADTLADVTSNGKLRVGVLLDAAPWGYKDAEGKDTGLDVELARIMAKDLNAELEIVPLTGASRIPSLLADKVDVLIAAAGATPERAQQVMFSQPYAAVSLGVFGGDGEKIDDVSGLAGKQIAVAKGSTLDTWLTDNAPEVKLVRFEDTPSAIAAFLAGQADYFAENSAIAVKVADDNPGKNVAIVYRIRLSPAHVGVKQGEQNFLNWINTFLFFHNMNGDLAKLQMTFFKEKQTLPHM

SEQ ID NO: 12710 - protein, 317 aa, Agrobacterium tumefaciens str. C58
MSKTVLVTATNYSRYCADAKAMLAAEGIDVVENGFGRPMTFDELSARLGDVDAVIAGVDTWNERVFNLAPRLKAIARFGVGVDNIDIDAAHRHGIAVTNAPGGNANAVAELTLGLILSAMRRIPYLHDALRGGAWDRFVGQELIGRRVGLLGFGNIARKIARKLCGFDVEVIAYDKFPDQVAATKLGVRMCEMDEVLSSSDILVMMMPSLPETRRLMDAGRFARMKPGSIFINTARGALVDEKALYDALVSGHLQAAAIDVYETEPALPDNPLFTLPQIVTTPHTAAETYETYTSIGRITAEAVIDVLANRQPRNQL

SEQ ID NO: 12711 - protein, 74 aa, Agrobacterium tumefaciens str. C58
MKGFIMTTGTVKWFNSTKGFGFIQPDNGGVDAFVHISAVERAGMRELVEGQKIGFDLERDMKSGKMSACNLQSA

SEQ ID NO: 12712 - protein, 755 aa, Agrobacterium tumefaciens str. C58
MSASALLDNQCDHFSTKMVDLIMVDKADELDRRVSDAFSEREASRGRRITQISGECSAGLACKRLADGRFPEISAGEKVAALSAYIYVGKEILGRILESEPWARARVSGLVAIDLAPFCMDFSEAQLLQTLFLLSGKRCASSDLSHFVAISISKTARSRTLQMPPYEKGTTKRVTGFTLTLEEAVPFDMVAYGRNLMLKASAGSFPTIDLLYDYRSFFDQCSDSGRIGFFPEDVPKPKVAIIGAGISGLVVASELLHAGVDDVTIYEASDRVGGKLWSHAFKDAPSVVAEMGAMRFPPAASCLFFFLERYGLSSMRPFPNPGTVDTNLVYQGLRYMWKAGQQPPKLFHRVYSGWRAFLKDGFHEGDIVLASPVAITQALKSGDIRRAHDSWQTWLNRFGRESFSSAIERIFLGTHPPGGETWSFPHDWDLFKLMGIGSGGFGPVFESGFIEILRLVINGYEENQRMCSEGISELPRRIATQVVNGVSVSQRIRHVQVRAIEKEKTKIKIRLKSGISELYDKVVVTSGLANIQLRHCLTCDTTIFRAPVNQAVDNSHMTGSSKLFLLTERKFWLDHILPSCVLMDGIAKAVYCLDYEPQDPNGKGLVLISYTWEDDSHKLLAVPDKKERFCLLRDAISRSFPAFAQHLVPACADYDQNVVQHDWLTDENAGGAFKLNRRGEDFYSEELFFQALDMTNDTGVYLAGCSCSFTGGWVEGAIQTACNAVCAIIHNCGGILAKDNPLEHSWKRYNYRNRN

SEQ ID NO: 12713 - protein, 737 aa, Halobacterium sp. NRC-1
MRLTVKQLKNRDPGSGMAVIDRDALQEIGVSSGDFVAIEGRNGGRTVARVWPSNTSDAGRGIIRIDGQLRQAANVSIDDRVEVEKTEVEPADRVTVSLPQNLQIRGDLGSHLREHLVDQAVRAGQTVAFPIGFGMFSGRSGRRIPLRVVDTQPSGTVVVQNTTEIEIADQSAQEVSVESGEPENTTAPALTYEDIGGLDDELEQVREMIELPMRHPELFGTLGIEPPKGVLLHGPPGTGKTLIAKAVANEIDAHFQTISGPEIMSKYYGESEEQLRDVFEEAEENAPAIVFIDELDSIAPKREDVSGDVERRVVAQLLSLMDGLEERGQLTVIGTTNRVDAVDPALRRPGRFDREIEIGVPDHDGREKILQIHTRGMPLGDGVDLDRYAENTQGFVGADLENLVKESAMHALRRIRPDLDLDEEEIPADILDSIEVTENDFKEALRGIEPSALREVFVEVPDVTWDHVGGLDDAKERLQETVQWPLEHADAYEQVALEPAKGVLLYGPPGTGKTLLAKAVANEANSNFISIKGPELFNKYVGESERGVREVFSKARENAPTVVFFDEIDAIASERGQGVGDSNVGERVVSQLLTELDGLEELEDIVVIATTNRPDLIDDALLRPGRLDRHVAVDEPDEAARREIFEIHTEDKPLAEDVDVDELVERTDGYVGADIEAVCREAATVAVREYVRATASAESANVDEIELSIEHFEQALEEVDSNAGSETQAFEKPAEAV

SEQ ID NO: 12714 - protein, 487 aa, Halobacterium sp. NRC-1
MSSSQTRSPDAELGLLDATMIGMGAMIGAGIFVLTGLAAEIAGPAAILVFALNGVVTAFTGLSYAELAASIPKSGGGYAFVREIFGDFSSFIMGWMLWFAYMIAGALYALGFAPNFLELLHVYGLVAPPDQVGAIAVPLLDASVPAAFVLAFIAVLGLVALNAVSTAASGSAETIFTIIKVSILVVFVAFGATSPLFSGAEFQPLFGVGGGPAAILPAMGLTFIAFEGYDLITTVTEEVKNPRENIPKAIFVSLIATVIVYLAVVTVAVGTLGADGLAAAGEAGIAEAATSFMPTGLPIIQNGGALIVFGAVFSTLTALNAVVIASSRVAFSMGREGQLLPSFGQIHHRYGTPFVAIIASAVVMLASVALPTQSAGNMSSLFFLLSFIIVNVAVIRLRRERPDMNRPYEMPFYPAPPLIGIALNLVLSVVLVDYLVRTDPLALALSAAWIVLGTAAYYAHASRQSAAGDDEDTTTISADAEHTPHDH

SEQ ID NO: 12715 - protein, 365 aa, Halobacterium sp. NRC-1
MTSVFKSPSTYVQGRNVTTDIGTHAESLGDTALLVADEIVMDMIESDVHESLAEAGLDGSSVVFNGESSEDEIERIASVAVDEGADIVIGAGGGKALDTAKAVREEVGGAMVSMPTIASMDAPTSSLSVIYSEHGEFEDYWYYEQHPDLVIVDTEVVAAAPARFLRSGIADGLATWFEADAVAQSGGDNEVGGKPTRAGHKLAELCYETLREHGAGALDAVEHDAVTESVDAVIEANTLLSGLGFESGGLAAAHSVHNGLTQLAETHDATHGEKVNIGTITQLVLEGHSDARIEEFIEFSVELGLPVTLGEIGITNPEQVDLDVVAEAACDEAETIHDEPFDVTPAMVRDALLTADEMGRRVRDR

SEQ ID NO: 12716 - protein, 631 aa, Caulobacter crescentus CB15
MSKIIGIDLGTTNSCVAIMDGKTPKVIENAEGARTTPSVVAFLEDGERLIGQPAKRQAVTNPTNTLFAIKRLIGRTASDPVVEKDKGMVPYEIVKGPTGDAWVKAHGKDYSPQEVSAFILQKMKEAAEAHLGEPVTKAVITVPAYFNDAQRQATKDAGKIAGLEVLRIINEPTAAALAYGLDKNDGKKIAVYDLGGGTFDVSILEIGDGVFEVKSTNGDTFLGGEDFDLRIVDYLADEFKKEQGVDLRKDKLALQRLREEAEKAKKELSSTAQYEVNLPFISMNASGPLHLNIKLSRAKLEALVDDLIARTIGPCEQALKDAGLKKSDIDEVILVGGMSRMPKVQQAVQDFFGREPHKGVNPDEVVALGAAVQAGVLQGDVKDVLLLDVTPLTLGIETLGGVFTPLIERNTTIPTKRSQTFSTADDNQSAVTIRVFQGERPMAQDNKMLGQFDLVGIPPAPRGVPQIEVTFDIDANGIVQVHAKDKATNKEHSIRIQANGGLSDSDIERMVKEAEANKAADEKKKQLVEAKNQGEAILHSTEKALAEHGDKVGAAEKTAIETGITELKTALEGEDVEAIQAKTQALIQASMKLGEAMYAAQQGSAEGGDAKADDGVVDAEFEEVDDNKPAA

SEQ ID NO: 12717 - protein, 195 aa, Caulobacter crescentus CB15
MAKLDDATLAQLFTEARSHNGWNPEPLPESVLRELYALTKFGPTAANGSPARFYFVTSAEAKERLAKLSSGSNGPKIMQAPCTVIIGYDLDFPQTLPKLFPHAPGAKDWFNDPVAKEWCALRNSSLQGGYFMIGARALGLDVGPMSGFDNAAVDAEFFAGTNIKSNFIVSIGHGTDEGLFPRNPRLDFDEAAKIL

SEQ ID NO: 12718 - protein, 408 aa, Caulobacter crescentus CB15
MADKSVKKVVLAYSGGLDTSIILKWLQTEYGAEVITFTADLGQGEEIEPARAKALAAGVKPENIFIEDVREEFVRDYVFPMFRANTVYEGQYLLGTSIARPLIAKKQIEIARKMGADAVSHGATGKGNDQVRFELGYYGLEPDITVIAPWREWDFKSREALLDFAEKHQIQITKDKRGEAPFSVDANLLHSSSEGKVLEDPAVEAPEFVHMRTIAPEDAPDAPTIITIDFEKGDPVAIDGVAMSPATLLTKLNELGRDNGVGRLDLVENRFVGMKSRGVYETPGGTILLAAHRGIESITLDRGAMHLKDELMPKYASLVYNGFWFSPEREMLQAAIDYSQDKVTGRVRVKLYKGNVTVIGRESPYSLYDQDLVTFEEGKVAYDHRDAGGFIKLNALRLRVLAKRDKRG

SEQ ID NO: 12719 - protein, 607 aa, Caulobacter crescentus CB15
MTAQDRPQPSNRALMGRMWREFLQPRWKGFLVSMISAVIVARLTVMLGEYVEPAVDKLIAHPQPGALIWVPLTIAALAVGRGVFQVIQASLINRIGNGVVGDMQTRLFGRLIRADLARLRGAHSGSYVASVLYDAGLIREAATTGVVNYVREALIVAITLWALFNSDPILAAGVLIIVPGVSGVIRHFAKRTTKAAKGAMGETSNLSTAIMESLDGVKIVKMENREAYEEARVAAVVERRQRHLIKGSNARAMAAPATELFSQLVIAAVFAYAGWRAITGALVVGPFTLPPITPGGFLKFVILLGIAAQSLRQVANLQTVFSEGLTAARRLFEALDVAPTIVDPADAKALPPGESMIALADVTFSYGADIPALSSVNLQARKGETVALVGPSGGGKSSILNLIPRFYDVNAGAVTIDGHDVRSVTIASLRDRIALVTQEPFLFDDTIRANIAYARPGASQLEIEAASRQAAAHEFIQALPEGYDTAVGEGGARLSGGQRQRIAIARAFLKDAPILLLDEATSALDTESEAQVQAALERLMAGRTTILIAHRLSTVKNADRIYVIDKGRVVETGSHAELVRAGGLYARLAKAQDLDHPAPDQDGEITA

SEQ ID NO: 12720 - protein, 354 aa, Caulobacter crescentus CB15
MKFLDQCKIYIRSGNGGGGSVSFRREKYIEYGGPDGGDGGRGGDVWIEAVEGLNTLIDYRYQQHFKAGTGVHGMGRARHGAAGEDVVLKVPVGTEVLEEDKETLIADLDHAGMRLLLAKGGNGGWGNLHFKGPVNQAPKYANPGQEGEERWIWLRLKLIADVGLVGLPNAGKSTFLAAASAAKPKIADYPFTTLTPNLGVVDLSSSERFVLADIPGLIEGASEGAGLGTRFLGHVERSATLIHLIDATQDDVAGAYETIRGELEAYGDELADKAEILALNKIDALDEETLAEKVAELEAVSGIKPRLVSGVSGQGVTELLRAAYKQVRIRRGDLEEEIDDDEDHVDETPGGWTP

SEQ ID NO: 12721 - protein, 171 aa, Caulobacter crescentus CB15
MYAVIKTGGKQYRVQAGDLLVVEKLEGEPGAAVAFGEVLMLGEGEAVTVGAPTVDGAVVSGTLLETRKGEKVKIFKKIRRQGYRRTRGHRQFESVVRVTSVAGAGKEAKWEGTIDLTPKVILDARARGLGDAAVPATIPAPVEAAPAKAEAAPKKKAAPKKAAAKTEEGEA

SEQ ID NO: 12722 - protein, 216 aa, Caulobacter crescentus CB15
MTREERRAWITSRLHPIAGYDPSLANPLRSDFDLNPGLKVDNPHALRPAAVLVGLVEHDDGPTILLTRRADTLRSHTGQIAFPGGRCDPGETPWGTALREAQEEVGLDPALVTVAGLLHGYQTVTGFHVTPVVGFIDPKATFTPSPEEVADVFETPFDFLMDPANHQRQHREVPGGPRRHFYAMPWNDRFIWGATAGMLRSLYEALHDETGLAPSE

SEQ ID NO: 12723 - protein, 500 aa, Caulobacter crescentus CB15
MQSMADAETADTFGCHALVGGTPKVSFWTRRKAIDTITAGHADSHQLKKTLSWPHLVALGVGAIVGTGIYTLTGVGAGLAGPGVILSFLIAGAVCACAALCYAELSTMIPASGSAYTYSYAAMGEPVAWFVGWSLILEYTLVCAAVAVGWSAHAHGLFKMIGFPDALLAGPHQGGLINMPAVFISMAVAGLLALGTRESATVNMVLVFVKIIALIVFVVLCLPAFNLAHFTPFMPNGFQAHVPEGAAADAAKVGVMAAASLIFFAFYGFDAVSTAAEETKNPKRDLTIGIVGSMAVCTAIYMIVAAVSIGASRTEVFSKSEAPLVFILESLNHGKIAQLVALAAVIALPTVILAFMYGQSRIFFVMARDGLLPRALSKVNAKTGTPVMMTLLTGVLAAVISGLLSLKDIAELANAGTLWAFIAVGASVILLRLREPNRPRVFSTPLWPIVAPAGILGCLYLFLSLPGKTQLYFLYAHLIGAVVYLAYGMRKSVLAQQERA

SEQ ID NO: 12724 - protein, 312 aa, Caulobacter crescentus CB15
MKLLSGNSNRPLSQAIAEYLDMPLTRAQVRRFADLEVFVTIDENVRGEDVFVIQSTSYPANDNLMELLICIDALKRASGKRITAVIPYFGYARQDRKTGGRTPISAKLVANLITRSGADRVLTMDLHAGQIQGFFDIPTDNLLPSRLMAEDIRRHYPMGDDLMVVSPDVGGVVRARALAKRLDDADLAIVDKRRSGPGQSEVMNIIGDVKDRRCILFDDIADSAGTLCNAAQALMAHGAKSVSAYITHGVLSGAAADRVANSVLTELVVTDSIEASDPAKACPKIRYVSCAPLIGEAIRRIANEESVSKLFD

SEQ ID NO: 12725 - protein, 391 aa, Caulobacter crescentus CB15
MSEIVIVSAARTPVGSFNGALASLPASELGKAVIEAAVSRAGIAPSDVDEVILGQVLQAAAGQGPARQASVKAGIPVEAPAWSLNQLCGSGLRAVALAAQQIADGSAKVVVAGGQESMSQAPHAQNLRGGQKMGDLQFVDTMIKDGLWDAFHGYHMGQTAENIASRWQITREDQDKFAVTSQNRAEAAQKAGKFDDEIVPITIKGRKGDTIVDKDEFIRHGATIESVQGLKPVFNKEGSVTAANASGLNDGAAALVLMSAEEAAKRGLKPLARIASWANAGVEPEIMGTGPIPASKKALEKAGWSVSDLDLVESNEAFAAQALCVVRELGLDPAKVNVNGGAIAIGHPIGASGARILTTLVHEMKRSGAKKGLATLCVGGGMGVAMCVEAV

SEQ ID NO: 12726 - protein, 430 aa, Caulobacter crescentus CB15
MIMTKTDKPTSGLTRRSALMGAAATLAAAKAAFPGGAHAAGAGPEVAKARLGFIALTDSSPLIIAKERGLFAKYGMPDIEVVKQASWAATRDNLVLGAERGGIDGAHILTPMPYLMTTGTITGGAPTPMYILARLNTNGQGISVGNDLKSVKVGLNSAGAKAKFLQMKAAGNIAKVAMTFRGGTHDLWIRYWLAAGGINPDVDVSTIVIPPPQMVANMKAGTQDAFCVGEPWNGQLVNQKVGYTACLTSELWMNHPEKALGMRASWVDRYPRAAQAITAAVQEAQMWCDKAANLPQMCSIVSGRQYVNVPMGDILPRLQGTVDYGDGRTLKNSPHRMKFWADNASFPFKSHDLWFLTEDIRWGVLPQKTNTKALVDKVNRSDIWRAAAKSIGQSGPAGDSRGVERFFDGKVFDPANPGAYLASQPIKKLV

SEQ ID NO: 12727 - protein, 69 aa, Caulobacter crescentus CB15
MATGTVKWFNAAKGFGFIQPSDGSADAFVHISAVERSGLGSIDEGQKLNYELERDQRSGKMSAGQLTAA

SEQ ID NO: 12728 - protein, 385 aa, Caulobacter crescentus CB15
MVHPVFDNLPTTIFERMSGLARQYGAINLGQGFPDDQGPLPVREAAARALIEGSNQYPPMRGLPELRAAVAGHYGRTQDLTLDPDTEIVVTSGATEALAAAFTSLISPGDEVVLFQPLYDAYLPLVRRAGGVPRLVKLSPPHWRFERAMLEAAFSNRTRMVVLNSPLNPAGVVAPDEDLALLAEVCVRHDVVAVCDEVWEAVVFDGRRHRPLMSFPGMRERTVKIGSAGKLFGMTGWKVGFLCAAPPLARALAAAHQFLTFTTPPNLQAGVAWGLDNHRAWFDDMPANLQRSRDRLTAGLRDAGYVVLESQGTYFLNVDLAASGIALDDVTFCERCVTEHGVAAIPVSAFFAEDPVTTVVRLCFAKADATLDEAVRRLAAAKAAL

SEQ ID NO: 12729 - protein, 615 aa, Caulobacter crescentus CB15
MQNDNKNTLMFIVSAFAILIGYQFFVLGPQQKKAEAEFRAKKAAEQQSAAKAGVTLDANGNPAPLRLSRDAAKALSPRIEVDTPALSGSIALKGARIDDLFLRKYDETTKKDSPPVELFRPEGAEHAWFADFGWAGANLPGLPDSRTVWTAAPGQVLRPNSPVTLTYDNGLGLTFTRVIAVDDQAMFTVTDSVKNNGTNGLQLAPYATVQRQGISDALGKNQIVHEGAIGVLGATDEQKLEMAKYGKWKKDKPLQSFDSVGGWTGITDKYWLAALIPGQNQAIKAQYRVTNVAGIDVYDVNFLGPVQVLNPGATVSQTTRLFAGAKTVPLLRKYEYGATPAPAIWEFWNKTKAEIPRFDDAVDWGMFRFFTRPIFNILEVFYKLVGNFGLAILLLTVVLKLVLYPMADKSYESMAKMKKIAPEVEKLKAKHKDDPAKQQQEMMALYQKEKINPMMGCLPMLIQIPVFYALYKVLTVTIEMRHAPFFGWIQDLSAPDPTTMFNLFGLIPWDPGSLPLIGAMIAHLGVWPLLYGFTMWLTTAMNPPAGDPIQQKIFQWFPVIFTFTLSGFAVGLVIYWCWSNVLTIFQQYIIMRRYKVENPIDQIIARLRGKTAGAT

SEQ ID NO: 12730 - protein, 390 aa, Caulobacter crescentus CB15
MGEAYIVAAARTAGGRKGGRVSGWHPADLAGEVLNALVDRSGADPALIEDVIMGCVGQVGEQAINIARNAVLASKLPESVPATSVDRQCGSSQQSIHFAAATVMSGAMDIVIAAGVESMSRVPMGLSSALPYKNGFGTYKSPRMEERYPGIQFSQFAGAEMLAKKYDLSREQLDAFALASHQRAMAATKGGKFAAEIVPIKVTLPDGSVETHDADEGIRWDATMESIGGVKLLSEDGRLTAATSSQICDGAAGVMIVNERGLKALGVAPLARIHHMTVIGHDPVIMLEAPIPATQKALERAGMKIDDIDLYEVNEAFASVPTAWLQVTGGDPDKLNVNGGAIALGHPLGGSGAKLMTTLVHALKDRGARYGLQTMCEGGGLANVTIVERL

SEQ ID NO: 12731 - protein, 415 aa, Caulobacter crescentus CB15
MSRLVMKFGGTSVADLERIRRVARLVAAEVATGKQVAVVVSAMSGKTNELVAWTDGAGRAAAGLPESDDEYDAVVASGEQVTAGLLAMTLRNMGHKARSFLGWQVPILTDEAHGRARIEEIPPENLEECFANGEIAVIAGFQGVTPNRRITTLGRGGSDTSAVAIAAAVKGDCDIYTDVDGVYTTDPRIESKARRLAKISYEEMLEMASLGAKVLQTRSVEMAMAHRVPVRVLSSFVEPGEAPGQGTIVCDEEEIMEKRIVSGVAYSRDEAKITLLGLPDHPGVSSQIFGRLAEANVNVDMIVQSRARSADTANMEFTVGKRDATRAVEIVQAAQKEIGFEAVAVNEDVAKVSVIGVGMRSHAGVAQSMFQALAEKNINIQVISTSEIKISVLIDAAYTELAVRALHAVYGLDQL

SEQ ID NO: 12732 - protein, 395 aa, Caulobacter crescentus CB15
MSAADPVVIVAYARTPMGGFQGALGGVKATDLGATAVKAAIERAGVAGDKVEQIIMGCVLPAGLGQAPARQAALGAGLPLSVEATTVNKMCGSGMQAAIMAHDALAAGSVDVVVAGGMESMTGAPYLMSKHRAGARIGHDQMWDSMYLDGLEDAYTPGKLMGAFAEDSAQTYQFTREAMDDYATRGLMKAKAAVESGAFKAEITPVSVVTRKGTEVVDTDEQPGKADPAKIPTLRPAFSRDGGVTAANSSSISDGAAALVMTRESVAKALGLPILAKVVSHAAHAHEPGLFTTAPVPAMQKALKKAGWSVADVDLFEVNEAFAVVAMIAQKELGIPDDKLNVNGGACALGHPIGASGARILCTLINALQSRGGKKGLASLCIGGGEATAMAIELV

SEQ ID NO: 12733 - protein, 399 aa, Caulobacter crescentus CB15
MTAAYICDGIRTPIGRYGGSLSKVRADDLAAIPLKALVARNPSLDLAAIDEIVLGSANQAGEDNRNVARMALLLAGYPVSVPGVTVNRLCASGLEAVGYAARAIASGHNDLVIAGGVESMSRAPFVMGKADSAFSRSAEIFDTTIGWRFVNPAMRKLYGVDSMPETAENVATDYGVNREDQDAFALRSQARAAAAQANGFLAGEITPVEIPGKAGPTIVDRDEHPRETTMEALAKLKPIVREGGTVTAGNASGVNDGAVALIIASEDAVKRHGLTPRARITGYASAGVEPRVMGIGPVPAVRKLMAKTGLAIGDFDVVELNEAFAAQGLAVLRQLGLPDDGAHVNANGGAIALGHPLGASGARLVLTALRQLEAIGGQRGLATLCIGVGQGAALAFERV

SEQ ID NO: 12734 - protein, 552 aa, Caulobacter crescentus CB15
MYQYDLIDKEFLADRSAEFRGQVARRLSGELTEDQFKPLRLMNGLYLQLHAYMLRVAIPYGSLNSTQARRLAQIARDFDKGYGHFTTRQNIQFNWIKLKDAPEILDKLAEVDLHAIQTSGNCIRNTTSDPYAGATAEEVDDPRVWSEVIRQWSTLHPEFSFLPRKFKIAITASAKDRTAAKVHDIGLMLRKGRDGTLGFEVIVGGGQGRTPYVGPTINEFLPTDRLLSYLEAVLRVYNRHGRRDNIYKARIKILVAALGAEEFARQVDEEWAKIDAARADLPTAELARIRAAFAKTPFETLPARSDAFETAKANDAAFARFVRNNVKPHKQPGYAIVEVSLKAQEQTPGDASAQQLEVVADLAERFSLNDLRVTHAQNLVLPHVKLDDLPTVFATLQASNLATPNIDLVSDIIACPGLDYCALANARAIPVAQDIARQFADLDRAEKVGELKIKISGCINACGHHHVAHIGILGVDKKGEEFYQLSLGGSGAEDASIGKILGPALPADKVATAVDQLVGAYLNVRNDGERFLDTYRRVGLEPFKEAVYAQAD

SEQ ID NO: 12735 - protein, 546 aa, Caulobacter crescentus CB15
MPDRRRFAGRWGNAHMAGNRLFLKKSIASIQKEAAHSQLKRTLGPINLMSLGVGAIIGAGIFVLTGQVASANAGPAIMLSFIVAGIACALAGLCYAELASTMPVSGSAYTYAYGTLGEVFAWIMGWLLVLEYGVAASTVAVGWSGYVVSTLHALGINFPMIQVAGADAPMWATPLIQAVAAPGGGTMFAMTGTLNLVAAIGIAMVSALLVVGVSESANVNNAIVVIKVIVLVTFIAVGAQYINPANWHPFIPEPTGQPGEFGIGGIFRGAAIIFFAYVGFEAVSTAAAEAKNPSRDVPIGILGALIICTLIYMAVAAVMTGVVPFRELASPAPIAVAIDRMGLEWADIPYAAAEGGKLNLLSFAIKIGAITGLSSVMLVLCYGQTRIFYTMARDGLLPKVFAEIHPKFRTPWLGTILLGVVIAIAASFLPISLLGDLVSLGTAVAFSIVCLSVIYLRIKHPDLPRPFKVPGGIFTAAAGIAACLFLPYQNFQPMIVHAMNDNPLPLMILGGYAAVGAIIYIAYGYWHSKLAKGIDITEETDPNSPA

SEQ ID NO: 12736 - protein, 468 aa, Caulobacter crescentus CB15
MISRRGALIAGGTGAAVVAGGAGAAYMVATGDKPEPPAPASVNAQGKVLWRNWSGVQHAYPAARLAPKDEGELATALKVAQAPIRPVGSGHSFTALAPTDGTLVSLDSMSGIVGWEGDEAIVRAGTRLGALGPLLAEKGRALANLPDINKQSLGGALGTATHGTGIKIPAMHGDVTGLRLVTPSGKIIDADASNNPEIFQAARVSMGALGVISQVRMRTSANRRLRRRVWLEPFEEAMAKADGRWAQHRNFEFYAVPFTGLAVNITHDETDDPAEARGPDQDVEFLQALRGLRNLLGFATPLRKAAAKALLSSAKPESSVDEGWKLLSTERPVRFNEMEFHLPVENQLKALEEVMRTIETERPDVFFPIEVRRIAADDAWLSPFYAAPRGSVAVHAYYRDDFTFLYELIEPIFRRYEGRPHWGKLHTLRGRQLEAIYPRWKDFLEVRQDLDPEARMLNPYLKGLFGLM

SEQ ID NO: 12737 - protein, 510 aa, Caulobacter crescentus CB15
MKLTFKPLAGLMLAATIAGAPLGATAFAQEAAPAPVAAAPAEAAPAPAAAPAEAAPAPAAAPTIEDKMDKGDNAWMLTSALLVLLMILPGLALFYGGLVRAKNMLSVMMQVSTVALIGFVAWMLWGYSFAFTDGGSWDKFVGGLGRVFLNGVTPASNVATFSTGVVIPELTFIAFQSTFAAITAALVVGSLVERMKFAAIVAFAILWPLLSYYPIAHMVWWWPGPNAIALAPEDTVKSGLLWGFGALDFAGGTVVHINAGIAALVGALILGKRQGYGKEPMPPHSLTLTLVGAGLLWVGWFGFNAGSNLESNGYASLAMVNTFIATAGAGLSWILVEWVTRKKPSALGLASGIVAGLVAVTPAAGFAGPMGALILGLVVSPICIIFCSVVKNALKYDDSLDAFGIHGIGGIVGAIGTGLVVNPAWGGAGVVDYTSCGKDGDLSTCDTAVYDMGVQLMAQLKAVGVTILWSAIATAIVFFIIKLVIGLRAAPEAEEDGLDISEHGERAYHS

SEQ ID NO: 12738 - protein, 298 aa, Caulobacter crescentus CB15
MTRIAFIGLGNMGGGMAANQAKAQHQVRAFDLSAAAVERAVAAGCLAAASVAEAVAEAEIVITMLPAGPHVRAVYAEQILPNAPKSALLIDCSTIDVDSARVVARQAAEAGFRFADAPVSGGIMAAEAGTLAFMVGCEASDFAAVEAALAPMSRVTIHAGDHGAGQAAKICNNMLLGVSMLGTCEAFALAEKLGLAADRFFEIASKSSGQCWSITSYCPVPGVGPQTPADRGYEGGFASAMMLKDLKLAQEAAAKAGASTPMGAQAEALYALFDANGFGGKDFSAVIELLRGRVADLH

SEQ ID NO: 12739 - protein, 261 aa, Caulobacter crescentus CB15
MRFPARRAVLSGLGLALLAACGKKPDAGASGWDRIKASGKLRVGLEGTYPPFNFQDKSGQLAGFEVDFAKALAEQLGVKAEFSPAPFAGLLGSLESGRIDVVINQITITPDRQAKYDFSEPYTVSGIQIIALKGKPAPTGPEGLTGKKVGVGLGTNYEQWLRANVPTADVRTYDDDPTKYQDLRAGRIDAVLNDRLVAADFVKTSPEFVASGQPFAAQGSGVAMQKDPALKVVINQAINALRANGKLAAISQQWFGMDVTQ

SEQ ID NO: 12740 - protein, 400 aa, Caulobacter crescentus CB15
MSLESAALRRIAPSATIAISAKARALKAAGRDVIALSAGEPDFDTPDNIKNAAIEAIKAGKTKYTDPDGMPELKAAICAKFKRENGLEYKPSQIHVAPGGKPVIYNALVATLNPGDEVIIPAPYWVSYPDMTLLAGGTPVSVETTAESGFKITPEALEAAITPKTKWLIINSPSNPSGGAYSRAELQAIADVLLRHPQVWVLTDDMYEHLVFDDFEFTTIAQVEPKLYDRTLTMNGVSKGYSMTGWRIGYAAGPEPLIKAMGKMISQTTSNPCSISQWAALEALNGTQDFIKPNAKLFQERRDLVVSMLNQATGLHCPTPEGAFYVYPSCAGLIGKTAPSGKVIESDEDFATELLESEGVAVVHGAAFGLSPFFRISYATSNEVLEDACSRIQRFCASVK

SEQ ID NO: 12741 - protein, 333 aa, Caulobacter crescentus CB15
MKPLATAEPPSVLHARVMTDTTSKTRAGFAAIIGAPNAGKSTLVNRMVGAKVSIVTQKVQTTRFPVRGVAIEGDTQIVLVDTPGIFSPRRRLDRAMVRAAWAGSEEAEATVHLVDVQAELASRADKATPGEYRSAQDVQTIIEGLKAADRKVILALNKIDGIKRDTLLAVAKDFFDTGVYSDVFMISASTGAGVEDLTAKLVSMMPEGPWLYPEDQTADLPARLLAAEITREKVYLRVHEELPYAATVETTAFEERKDGSVRIEQTILVEREGQRVIVIGKGGQTLKWIGQASREELCDILDRKVHLFLHVKVKENWAEERGLFSDIGLDFDV

SEQ ID NO: 12742 - protein, 286 aa, Caulobacter crescentus CB15
MKTAFIGMGVMGFPMAGHLKAAGHEVAVYNRSPEKARRWAEKHGGAAFETIAEAVAGAEVVLLCVGNDDDVRDLVAQVLPAMGEGGVIVDHTTTSAKVAREMAALAAQSGRAFVDAPVSGGQAGAESGQLTIMAGGDQAAYDRVLPVIEVYAKAVRRIGEVGAGQLTKMCNQIAIAGVVQGVAEALHFAKRACLPTDDVLAAISKGAAQSWQMENRWPTMAQGKFDFGFAVDWMRKDLGIALDEARTNGAKLPATALIDQFYAEVQAMGGNRWDTSSLVARLEKDG

SEQ ID NO: 12743 - protein, 249 aa, Caulobacter crescentus CB15
MLKIQNLHARVEDKPILRGVTLDVPAGEVHAIMGPNGAGKSTLSYVLTGRDGYEVTEGSASLNGEDLLALEPNERAAKGLFLSFQYPLEIPGVPALTFIRTALNAQRRARGEDEIAAPAFLKLAKEKAASLKIDFEMLKRGLNVGFSGGEKKRMEIFQMSMLSPKFLILDETDSGLDIDALKIVSEGVNALRSPERGMLVITHYQRLLDHIKPDKVHVLAAGRIVASGGPELALQLEAEGYDRIVGAAA

SEQ ID NO: 12744 - protein, 379 aa, Caulobacter crescentus CB15
MNASRPSVYLDYNATAPLRPEAKDALLRALESPANPSSVHAAGRAARDLVERARAEVAALVGVPAGSVTFVSGGTEANALAIESAKAAGVERIIISAIEHDAVMETAKASGLPVEALPVDNRGVADLDWLAQALDKPGKTLVCLMLANNETGVIQPVDKASTLVRAHDGWLHVDAVQAAGKIAIDFSGLGADTLALSAHKLGGPQGVGALIAGTRATVTRRLHGGGQERGRRAGTENVAGIAAFGAAAKVGRETLASMAEQAQWRDALAQRLKAEGAVVLGEGADRLPQTLCFAGEGFGSEVQVMTMDLAGVMVSAGSACSSGKVKASRVVDAMGRADLAPFALRVSGGWASTEDDWIKCGDAWLAAWKRIGARRREVA

SEQ ID NO: 12745 - protein, 582 aa, Caulobacter crescentus CB15
MTGAEIVVRGLVDQGVEVLFGYPGGAVLPIYDALFHEPRLQHILVRHEQGAAHAAEGYARSSGKPGVVLVTSGPGATNAITGIMDALMDSIPMVVITGQVPTHLIGTDAFQEADTVGMTRSCTKHNYLVKDVRDLPQIIHEAFKIATTGRPGPVLIDIPKDVQFAKGEYFGPGEVASTHAYAPRTKGDAGRIAEAARMIAQARRPIFYTGGGVINAGPKASAALREFAALTGAPVTSTLMGLGAFPAADPAWLGMLGMHGTFEANNAMHDCDVMICVGARFDDRVTGRLDAFSPGSKKIHIDIDPSSINKNVRVDLPIVGDAGSVLEDLIAAWKAANLQPNKAALTDWWAQIDQWRARQCLSYRRSDSVIKPQYAIERLYELTKDKDVYITTEVGQHQMWAAQFFRFEEPNRWMTSGGLGTMGYGLPAALGVQLAHPNSLVVDIAGEASIQMCIQELSTAIQFDLPVKIFILNNEWMGMVRQWQQLLHGERYSHSYSDSLPDFVKLAEAYGAVGIRCDNPAELDAKILEMVNSDKPVIFDCRVEKHENCLPMIPSGKAHNEMIMGEVEDIGNVIGEDGAGLV

SEQ ID NO: 12746 - protein, 319 aa, Caulobacter crescentus CB15
MPQTAAEKPQILLSHEMLMPLQPLLEGAYIVHRLWDYPDRMAFLEGPGQSIRAIVHAGEMALSRDMLAEMPRLGLIACVSVGYDGVDVPWCKAHGIAVTHSTGLNAADVADHAVGLVLAAWRGIVEGDQRLRGGHWSHAERMAPRPGLRGRKAGVVGLGHIGEAVAARLKAFDMKVAWWAPRPKETDYPRADSLMALARDSDVLIVCARPDDSNRHLINKPVIEAVGAQGLIVNVARGSLIDEDALIQALRAGTLGMAALDVFEQEPTPAARWADVPRTVLTPHTAGATLDSLPAMVSLTLENLRRYFHGEPLATPVAA

SEQ ID NO: 12747 - protein, 318 aa, Caulobacter crescentus CB15
MSAFNAVQVGRRVLAVEADALRVLADSLGEAFANAVETIFNAKGRVVCTGMGKSGHVARKIAATLASTGTQAMFVHPAEASHGDLGMIGPDDVVLALSKSGAGRELADTLAYAKRFSIPLIAMTAVADSPLGQAGDILLLLPDAPEGTAEVNAPTTSTTLQIALGDAIAVALLERRGFTASDFRVFHPGGKLGAMLRTVGDLMHGADELPLVAADAAMPDALLVMSEKRFGAVGVVDNAGHLAGLITDGDLRRHMDGLLTHTAGEVMTHAPLTIGPGALAAEALKVMNERRITVLFVVERERPVGILHVHDLLRAGVI

SEQ ID NO: 12748 - protein, 118 aa, Caulobacter crescentus CB15
MLLTMLKAKLHRATVTQADLDYEGSIAIDRDLLDASGILPNEQVDVLNITNGARFTTYAIEAPRGSKVIGVNGAAARLVQKNDLVIVVTYCQMPAEEARNYAPTVVLLDEGNLIKKAA

SEQ ID NO: 12749 - protein, 316 aa, Caulobacter crescentus CB15
MIKVRVASRARAAEGIAQLDLVCAEGRDLPAFEAGAHIDLFLGNGLTRQYSLCSDPAERSFYRIAVLRELTSRGGSAYVHEALTEGATLEISPPRNLFALDETAEEHLLFAGGVGVTPILAMAKRLSALGRAFTFHYCARDRSRAAFLNELSTAPFTSAVRLSFDAEPDTRLDLDVALARPKPGRRLYVCGPGGFMTHVIDGALARGWSGDQIRKEHFAAAPLSAGQDQPFELVIASSGQIVTVAADQTAAQALEAAGVFVPVSCEQGVCGTCLTRVIDGQPDHRDAFQTDEERAANDQFTPCCSRARSPRLVLDL

SEQ ID NO: 12750 - protein, 399 aa, Caulobacter crescentus CB15
MTAAYICDGIRTPIGRYGGSLSKVRADDLAAIPLKALVARNPSLDLAAIDEIVLGSANQAGEDNRNVARMALLLAGYPVSVPGVTVNRLCASGLEAVGYAARAIASGHNDLVIAGGVESMSRAPFVMGKADSAFSRSAEIFDTTIGWRFVNPAMRKLYGVDSMPETAENVATDYGVNREDQDAFALRSQARTAAAQANGFLAGEITPVEIPGKAGPTIVDRDEHPRETTMEALAKLKPIVREGGTVTAGNASGVNDGAVALVIASEDAVKRHGLTPRARITGYASAGVEPRVMGIGPVPAVRKLMAKTGLAIGDFDVVELNEAFAAQGLAVLRQLGLPDDGAHVNANGGAIALGHPLGASGARLVLTALRQLEASGGQRGLATLCIGVGQGAALAFERV

SEQ ID NO: 12751 - protein, 113 aa, Caulobacter crescentus CB15
MTDAATSPALDFIAKTVADHPVVVFMKGVPDQPRCGFSSVVVQILDHLGVEFVGVDVLQDEDLRQGVKTFTDWPTIPQLYVKGEFIGGSDIVREMFQSGELKTFLTEQGVIAA

SEQ ID NO: 12752 - protein, 758 aa, Caulobacter crescentus CB15
MDEDFRKAALDYHRLPRPGKLAIEATKRMATQRDLALAYSPGVAAPCIAIAENPELARDYTARGNLVAVISNGTAVLGLGDIGPLASKPVMEGKAVLFKKFAGIDVFDIEVDAKDPDRFIEVVAALEPTFGGINLEDIKAPECFVIERKLRERMNIPVFHDDQHGTAIVCAAAVRNALLVQGKQLKDVKLVTSGAGAAALACVDLLVSMGLPVENVTLTDIKGVVHAGREPDMPDNMARYARQTDARTLPEVLPGADIFLGLSAPRVFKPEWLPLLAPNPLILAMANPEPEILPELVYESRPDAIMATGRSDYANQVNNVLCFPFIFRGALDVGASEINEAMKVAAVEAIAELARAEASEVVASAYGGAAPVFGSQYIIPKPFDPRLILQIAPAVAKAAMDSGVATRPIADFDAYQAELELFVYRSGQLMRPVFERARKQPVKVAYAEAEDERVLRAVQTVVDEGLAYPVLVGRREVITGKIEELGLRLAGKVEIIDPQADKDLFAPLIADYQRLVGRRGVPPIAAERRVTGRRTVAASMLLATGYVEAALVGGSGDWWQHMKYALPIIPRRDNVSRVYAMSSLILDKGTLFFCDTHVNVDPTAEQIAECTQLAAEAVRRFGLTPKAALLSHSSFGASDSPTARKMREALALLRTQAPDLEVDGEMHADAALSQHLRDRMVADSPLKGSANLLVMPTLDAANIGLTLLSAATESLLVGPVLLGMAKPLHVLIPSVTARGIVNLTALAVNQAVSERAAS

SEQ ID NO: 12753 - protein, 69 aa, Caulobacter crescentus CB15
MANGVVKWFNPAKGFGFIQPEDGGQDVFVHIAAVERSGLSGLNEGDQVAYELEEDRRSGKTSAGNLRIL

SEQ ID NO: 12754 - protein, 69 aa, Caulobacter crescentus CB15
MATGTVKWFNSTKGFGFIQPDNGGADIFVHISAVERSGLGSLNEGQKISYEPEVDRRSGKTSAGQLQAA

SEQ ID NO: 12755 - protein, 433 aa, Caulobacter crescentus CB15
MTAVRSKPLGVWMCAALVVGNMIGSGVFMLPASLAPYGWNAVIAWILTIGGSLCLAYVFAKLAGAFPRAGGPFAYTEEAFGRAPGFLVAWSYWISVWVANAAIAIAAISYLSVFLPVIAKVPALPALLTVAVVWTATAINCAGARSAGWTQVVTTVLKLVPLIAVAGLAVSVLLRKGPAAITPFEPSALSGASITAAAALTLWALLGVETATIPADKVKDPARTIPRATLAGTAFAGLVYLVVSSGVLLLTPTAVLQGSNAPFVDFVSYHGGGDFRLALAAFATISALGALNGWSLIQGELPAAMAREGVFPAWFAKTSANGTPVRAHLVSSVLVTILVLMNYAKSMADAFTFMALLSTTSTLFAYLFCSLAVLRLQGQGRMDRSKALTLVAALGALYSVWTFSGAGWSVTLWGLVLLAVGAPIYWLMRRAAR

SEQ ID NO: 12756 - protein, 526 aa, Caulobacter crescentus CB15
MTAPRVLIADKLSPAAVEIFKNRGLAFDIKTGLSKDELIAVIGDYDGIAIRSGAKLDKDVIAAANKLRVIARAGIGVDNVDIPAATAKGIVVMNTPFGNSITTAEHAIAMMFALARQIPAADVSTQGGKWEKNRFMGVELYAKTLGLIGAGNIGGIVADRALGLKMKVVAYDPFLSPERAVEMGVEKVELDELLARADVITLHTPLTDKTRNILSAENLAKTKKGVMIVNCARGGLVDEAALRKLLDEGHVGGAAFDVFTVEPAKENPLFGSDKVVATPHLGASTNEAQENVALQVAEQVSDYLLTGAVTNALNSPSITAEEAPKLKPFVALAEKIGAFAGQMVDFGVKAIDIAYEGEVSNLNVKPMTSAALAGVLKPMLAEINMVSAPAIAKERGITVSESRQEVSPTYDSLMRVTITTEKGKRAFAGTVIAGAPRIVEVKGMELDAAFSPAMLYVNNLDKPGFIGALGMLLGEAGVNIATFNLGRVSADEDAIALVGVDQAPDAGLLAKIQALPHVKEARALTF

SEQ ID NO: 12757 - protein, 626 aa, Caulobacter crescentus CB15
MNFRNLAIWLVIVAVLGGVFVVSQNSRTKSSSEISYSQLLKDVDAGKIKSAEIAGQTVLAKTADNKTLTVNAPMNSEELVNRMVAKNADVKFKSGSISFLAILVQLLPILLVVGVWLFLMRQMQGGAKGAMGFGKSKARLLTENKNRITFEDVAGVDEAKEELQEVVDFLKDPAKFQRLGGKIPKGALLVGPPGTGKTLIARAVAGEAGVPFFTISGSDFVEMFVGVGASRVRDMFEQAKKNAPCIIFIDEIDAVGRHRGAGLGGGNDEREQTLNQLLVEMDGFEANEGIILIAATNRPDVLDPALLRPGRFDRQVVVPNPDVAGREKIIRVHMKNVPLAADVDVKTLARGTPGFSGADLANLVNEAALMAARKNRRMVTMQDFEQAKDKVMMGAERRSMAMNEEEKKLTAYHEGGHAIVALNVPLADPVHKATIVPRGRALGMVMQLPEGDRYSMKYQQMTSRLAIMMGGRVAEEIIFGKENITSGASSDIKAATDLARNMVTRWGYSDILGTVAYGDNQDEVFLGHSVARTQNVSEETARLIDSEVKRLVQYGLDEARRILTDKIDDLHTLGKALLEYETLSGEEIADILKGIPPKREEEEAATAVIAPSLVPLSPGAGASVTA

SEQ ID NO: 12758 - protein, 616 aa, Caulobacter crescentus CB15
MTDANSGDQKVEGRPGAGAELVQGMTEAGARRPRRKDIRPLAHLLPFVIAHKGDGLAAGFFLLFSTAATLGLTYAFKNVIDHGFSKGQDAAINSAFVGLGAVALVLALATALRFFFITRLGERVVADLRRKLYGHTLSLDQPYFLKTRTGEVLSRLTTDVALVEQLVGASISIALRNILNLIGGLTAMAVVSPKLAGFIVLMVPVILAPMFLVGRRVRKLTVTAQDRFADAVGYAGESLDALETVQAFGRESASSGRFGAAVEAAYKASVRRITTRATMTAMVITLAFGGITLLLWTGARLVLAGEMTGGTLAQFAMLAVMAAGSIGALGEVWGDVQKASGAMDRISELLNAKPDIAAPPQPKTLPVPGQGEIAFENVVFAYPGRPDLPALNGFDLRVKPGETVALVGPSGAGKSTVLRLLLRFYDPQSGCILLDGVNLRDAEPAEVRARMALVAQDSPLFSGSAMDNIRFGRPDATDEQVRAAADAAQATGFLSALPEGFDTPVGERAKTLSGGQRQRLAIARALVREAPILLLDEATSALDAESEQLVQQALATAMEGRTTLVIAHRLATVLKADRIVVMEEGRVVEQGAHAELFAKGGLYARLARLQFGVEAA

SEQ ID NO: 12759 - protein, 378 aa, Caulobacter crescentus CB15
MAVIAVTKETRADETRVAATPETVKKLGAAGFSVVIQAGAGTAASYPDADYEAAGAKIAKTAKDALKDADVLFKVRAPESAEIAALKKGAIVAAALNPYQDKETLDALAKAGATAIAMEFIPRITRAQVMDMLSSQANLAGYRAVIEGAEAYGKALPMMMTAAGTVAAAKVFIMGVGVAGLQAIATARRLGAVVTATDVRPATKEQVESLGAKFLAVEDEEFKNAQTAGGYAKEMSKEYQAKQAELVSSHIAKQDIVITTALIPGRPAPKLVSAAQVASMKPGSILVDLAIEQGGNVEGAKLNETVVTEGGVKILGHANLPGRIAADASALYARNLFALSSLFTNKEGAFAPNFEDEILQAAVVIRDGAIVHPNLKTA

SEQ ID NO: 12760 - protein, 488 aa, Caulobacter crescentus CB15
MTKTVLVVDDDPTQRRLIQAVLERDGFAVSHAEGGDAAIAHLTSGAPADVILLDLVMPGLNGQDALKEMRARGFNQPVIVLTASGGVDTVVKAMQAGACDFFIKPASPERITVSIRNALSMGDLKGEVERLTKRAGGKTTFADLIGASPVMTMVKRMGERAAKSGIPVLITGESGVGKELIARAVHGSSDRAGKPFVAVNCGAIPENLVESILFGHEKGSFTGATDKHLGKFKEADGGTLFLDEVGELPLDMQVKLLRALQEGEIDPIGSKRSIKVDVRIVSATNRDLQQAVSGGRFREDLFYRLNVFPIEAPSLRERREDIPALVEAFIRRFNVEEGKRVIGASPETMQLLTSFDWPGNVRQLENTVYRAIVLADAPYLQPFDFPAISGLAAPIEAVSISPSPPPAALLQATHAAMAAAVAEAPVRILDDRGHLRTLEEIERDLIQHAIDVYAGHMSEVARRLGIGRSTLYRKVREQGIEVDMKEAG

SEQ ID NO: 12761 - protein, 106 aa, Panax ginseng
MAMSKAKELVSSNGVVVFSKTYCSYCQTVKKLLTDIGASFKVIEMDKESDGSEIQSALVEWTGQRTVPNVFIGGKHIGGCDLTTAMHKSGKLVPLLTEAGAVASKS

SEQ ID NO: 12762 - protein, 766 aa, Caulobacter crescentus CB15
MGNADMSDAERKTFTDAEALAFHRYPTPGKIAIVPTKPMATQRDLSLAYSPGVAVPVHAIAADPDMAYEYTSKGNLVAVISNGTAILGLGDLGALASKPVMEGKSVLFKRFGDVDSIDIEVTTKDPDEIITVVKNIGVTFGGINLEDIKSPECFRIETELQELLDIPVFHDDQHGTAIICAAGLINACHITGKKIEDVKVVLNGPGAAGIASLELIKAMGVRAENCIAVDSKGVLYRGRTEGMNQWKSAHAVETDKRTLAEAVVGADVLLGLSAKGAFTPEMIASMAPNPVIFAMANPDPEITPEEVKRVRKDAIMGTGRSDYPNQVNNVLGFPYIFRGALDVRARRVNHEMKIACAQALAMLAREDVPDEVAAAYHGRQLKFGPDYIIPSAFDPRLIWYVPPFVAQAAMDTGVARKPIADMDAYRAGLAQRLDPTAGFLQKISGSVLANPKRIVFAEGEDPSVIRAAYAYQSGGFGKAILCGRENLVHENMKLVGLDPDTAGLEIINARLSDRNPDYVDALYARLQRQGYLKRDVQRLINQDRNSFAASMVTLGEADGMVTGVTRSFDQALEEVLRVVDPAPGGRIMGMSVVLAKGRTIFVADTNVTELPEAEELVEIACEAARAVRRLGFKPRVAFMSYSTFGNPMGLRSEKVREAVAMLDEMEVDFEYEGEMPPELALDPEKRANYPFMRLTDSANILIMPAIHAASISTKLVQSLGGATVIGPVLLGLSKSVQIAPLSASVSKILNMAMMAAYDQPVDDGEG

SEQ ID NO: 12763 - protein, 370 aa, Caulobacter crescentus CB15
MRVGVPSEIKPGEHRVGLTPTAVREYVGHGHTVIVQSGAGLGAGYADDVYVKAGASIVADADAVFAGADMIVKVKEPQKVEWEKLEPRHILFTYLHLAPDPAQTEGLLKSGCAAIAYETVTDAKGGLPLLAPMSEVAGRIAVFSAAETLLKHNGGMGLLLSGVPGVPPARVAVLGGGVVGSNAARMAAGLGAEVVVLERSIPRMRELDDLYQGRILTRYSTFGAVEEEILKADVVIGAVLTAGAAAPKLVRREHLKQMKPGSVLVDVSIDQGGCFETSKPTTHAQPTYTVDGVVHYCVANMPGAAPRTSSEALGNATLPFGLALADKGLDALKANAHLARGLNVLNGELTHPAVAEALGKTSIDPYGAWK

SEQ ID NO: 12764 - protein, 1508 aa, Caulobacter crescentus CB15
MAQNIDLYLKNRQALIDGHAYDPSTERDACGVGLVCAIDGQPRREVVELAIKALKALWHRGAVDADGKTGDGAGVLVSVPQDFFIDQVRRTGHALRQGPIAVGQIFLPRTDLGAQETCRTIVEAEALRFGFYIYGWRQVPVDTSVIGEKANATRPEIEQIMLAAPAGLEGEALERALFLCRKRIEKRVHAQNISDFYICSLSAKSLIYKGMFLAEAIDEFYPDLKDERFTAAVAIFHQRYSTNTFPQWRLAQPFRMLAHNGEINTIKGNINWMKSHEIKMAAQAFGEFGDDVKPVIQPGGSDSANLDNTFEVLVRAGRDAPMAKALLVPEAANPKMKDAHKALYSYCNAVMEPWDGPAALCATDGRWVVAGKDRSGLRPLRVAYTDDGLVIMGSEAGMCGVEEARITRKLAISPGRMIAIDLAEGRLYGEEEIIDELATRHPYTEWLGNMVDLEKEIGPGPEPRKFGREELTRRQAAAGYSLEDLEMILAPMVEEGKEAVGSMGDDTPLAVLSEKYRPLSHYFRQNFSQVTNPPIDPLRETGVMSLKTRFKNLGNILAQDAAQADVYVLESPVLTTGMYERIHGLLGEKNVAVIDCTMPLPAEEARAGDALRANLDRIRAEAEDAVLRGCGAIVLTDEASDAERVALPMILATGGVHAHLVAKGLRSYVSIIVRSAECLDTHYFAVLVGVGATAVNAYLAQESFQDRLERGLVGDKSLRDVCINFKTAIEGGLLKIISKMGISVISSYRGGYNFEAVGLSRAMAAEFFPGMPSRISGIGLAGIESKTVELHRKAWGAAAVTLPVGGLYKARRSGEAHAFEARLMHTLQTACDTGDYELYRRWSNGLRTQKPIQLRDLLDWRSDRNPIATDDVESVNEIRKRFVTPGMSLGALSPEAHGALNIAMNRIGARSVSGEGGEDSARYKPLPNGDNPNSAIKQVASGRFGVTAEYLNQCVELEIKVAQGAKPGEGGQLPGFKVTEMIARLRHSTPGVMLISPPPHHDIYSIEDLAQLIYDLKQINPIARVTVKLVAATGIGAIAAGVAKAKADVILVAGGVGGTGASPQTSVKYAGGPWEMGLSEANQVLTLNNLRHSVVLRADGGMRTGRDIVIAAMMGAEEFGIGTASLVAMGCIMVRQCHSNTCPVGVCTQDEALRAKFTGTPDKVINLFTFIAEEVREILAGLGFKSLQEIVGRTDLLAQVSRGGEHLDDLDLNPLLVRADPGANKPYNTVVGRNAVPDTLDAQIVRDAAPLLERGEKMQLTYTVRSTARTIGTRTSSHIVRKFGMKGLPSGHLTVQLKGSAGQSLGAFAVQGLRIELTGEANDYVGKGLSGATIVIKPARGLAAPETNTLIGNTVLFGATSGRLFAAGQAGERFAVRNSGATTVVEGCGANGCEYMTGGQVVILGPTGGNFGAGMTGGMAFVLDQHDRFEDNINPDSIVVQRLASPYWEGVLRALIAEHARETDSVFAATLLRDWDRVRDQFWQVCPKEMVSRLPQPLTAEEAVHERA

SEQ ID NO: 12765 - protein, 217 aa, Caulobacter crescentus CB15
MQIFLDSTDTKVIADLASTGLIDGVTTNPTLIAKSGRPMLEVIAEICDIVPGPISAEVAATTADAMIAEGQKLAKIAPNVVVKIPLTRDGLIACAAFADEEIKTNVTLCFSPTQALLAAKAGATYISPFIGRLDDYGFDGMDLIRDIRAIYDNYGYETEILAASVRNAAHVKEAAIVGADVVTIPPAVFSDLYKHPLTDKGLEQFLKDWASTGQSIL

SEQ ID NO: 12766 - protein, 202 aa, Caulobacter crescentus CB15
MRDEAKTSAWRFCARRVSARAMTSPPAPPPLKAVFLDRDGVLNIDHGYVHDPAKLDWIEGARDAVAAMTRAGLKVLVVTNQSGIGRGYFDEPALERFHAAMQGQLAQVGGRIDAFYHCPFHETAAVEAYRVADHPDRKPNPGMILRGLAEWGLRPDEAVIIGDRDIDVEAGRRAGMPGYLFAGGSLRAFVGAVLGDRVPALK

SEQ ID NO: 12767 - protein, 344 aa, Caulobacter crescentus CB15
MLQLSNACQRELFKPPMAARKLKVIVTRKLPDPVETRMCELFDTELNVSDKPMTADELVDAMSRADVLVPTITDRIDSRLLSRSGDRLKLIANFGAGVDNIDVATANARGIIVTNTPGVLTEDTADLTMTLIMAASRRIVEGAEVVKAGGFHGWSPTWMMGRRLWGKRLGIIGMGRIGQAVARRAKAFGMQVHYHNRKPVSPRIAEELGCTYWESLDQMLARMDFVSVNCPHTPATYHLLSARRLKLLRPHAVVVNTARGEVIDEGALANMLAKGEIAGAGLDVYEHEPAINPKLLKLPNVVLLPHMGSATVEGRIDMGEKVIVNVKTFMDGHRPPDRVIPAML

SEQ ID NO: 12768 - protein, 155 aa, Campylobacter jejuni
MGDALAAALMKVRNFKPDDFALFHPGGSLGRKLLTKVKDLMVSSNLPIVHPDTEFNDLVDVMTSGKLGLCVVLENEKLVGIITDGDLRRALKTSDKPRFDFRAKEIMSTNPKVVDADAMASEAEEIMLKHKIKEIVVSKENKIIGIIQLYAIGNV

SEQ ID NO: 12769 - protein, 338 aa, Acinetobacter sp. ADP1
MSNHQVALQFEDGVTRFIRIAQGETLSDAAYRQQINIPMDCREGACGTCRAFCESGNYDMPEDNYIEDALTPEEAQQGYVLACQCRPTSDAVFQIQASSEVCKTKIHHFEGTLARVENLSDSTITFDIQLDDGQPDIHFLAGQYVNVTLPGTTETRSYSFSSQPGNRLTGFVVRNVPQGKMSEYLSVQAKAGDKMSFTGPFGSFYLRDVKRPVLMLAGGTGIAPFLSMLQVLEQKGSEHPVRLVFGVTQDCDLVALEQLDALQQKLPWFEYRTVVAHAESQHERKGYVTGHIEYDWLNGGEVDVYLCGPVPMVEAVRSWLDTQGIQPANFLFEKFSAN

SEQ ID NO: 12770 - protein, 334 aa, Pyrococcus horikoshii OT3
MKPKVFITREIPEVGIKMLEDEFEVEVWGDEKEIPREILLKKVKEVDALVTMLSERIDKEVFENAPKLRIVANYAVGYDNIDIEEATKRGIYVTNTPDVLTDATADLAFALLLATARHVVKGDRFVRSGEWKKRGVAWHPKWFLGYDVYGKTIGIIGLGRIGQAIAKRAKGFNMRILYYSRTRKEEVERELNAEFKPLEDLLRESDFVVLAVPLTRETYHLINEERLKLMKKTAILINIARGKVVDTNALVKALKEGWIAGAGLDVFEEEPYYNEELFKLDNVVLTPHIGSASFGAREGMAELVAKNLIAFKRGEIPPTLVNREVIKIRKPGFE

SEQ ID NO: 12771 - protein, 299 aa, Staphylococcus aureus subsp. aureus NCTC 8325
MTEHKSGFVSIIGRPNVGKSTFVNRVIGHKIAIMSDKAQTTRNKIQGVMTRDDAQIIFIDTPGIHKPKHKLGDYMMKVAKNTLSEIDAIMFMVNANEEIGRGDEYIIEMLKNVKTPVFLVLNKIDLVHPDELMPKIEEYQSYMDFTEIVPISALEGLNVDHFIDVLKTYLPEGPKYYPDDQISDHPEQFVVGEIIREKILHLTSEEIPHAIGVNVDRMVKESEDRVHIEATIYVERGSQKGIVIGKGGKKLKEVGKRARRDIEMLLGSKVYLELWVKVQRDWRNKVNFIRQIGYVEDQD

SEQ ID NO: 12772 - protein, 732 aa, Nostoc sp. PCC 7120
MPIPRVSCLISASHREGVIVLLSGLTPCPGLFYATPAQDGILSRIRIPGGIINSTQCQAIADIADQYGGGYVDVTNRANVQIREIRASIDSTVLKYLQDLGLGSSNAGVDQIRNIMTSPTAGIDPQELIDTRPFVRSWDNYITENSVFSGLSAKFSVCFDGGGLVSVSDRLNDITFTATLVENKVCFRLCLSIGAKGKPPVDIGILLLPEECLPVLTALADVYLLHTDASSKRKPRLREVVNSLGLNNYLQEAEKRLTIPLGGKNLTPLPPSLRGKGEKTRHFSPILVEEGLGGRSNSKYHHIGIHPQHQQNLYYIGLVLPLGRLETWQVRGLADLSTKYGNGTLRLTPWQNLLLTDIPQQSLTDVQSQVLGLGLDFSLANIKSGLVACSGIQGCAAAATDTKSHALALANYLDSHISLEHPVTIHFSGCDKSCAHHGNSDITLLGVNNEMGEGYQVYVGDGDSNEKFGREIHPYITVAELPTTIERILKVYKNECTKTNESFGQFANHYETPQLKQLFSQPNPMSDYIHDANEIYRNSFAIIRSEANLDILPPDIAKVAVRLIHACGMTDIVTDLGYSATAAQSGRAALAAGAPILCDCRMVADGVTRRRLGANNQVICTLNEPEVPELAKKLGNTRSAAALELWRPHLEGAVVAIGNAPTALFRLLEMLDAGCPKPALILGFPVGFVGAAESKAALAADSRNIPYMTLHGRRGGSAIAAAAVNALATEEE

SEQ ID NO: 12773 - protein, 573 aa, Neisseria meningitidis MC58
MPSEAICSKKTMLNKDQFADNHFIRTIIEEDLESGKHTAVQTRFPPEPNGYLHIGHAKSICLNFGLAYIYDGLCNLRFDDTNPEKENDEYVNAIKEDVEWLGFHWAGEPRFASNYFDQLYDYAVGLIKDGKAYVDDLTPEEMREYRGTLTEAGKNSPYRDRSVEENLDLFTRMKNGEFPDGSKTLRLKIDMASGNINMRDPVIYRIRRAHHHNTGDKWCIYPMYDYTHCISDAIEGITHSLCTLEFEAHRPLYDCVLDNIPAPHATRPRQYEFSRLELLYTITSKRKLNQLVVEKHVSGWDDPRMPTISGMRRRGYTPEGLRLFAKRAGISKSENIVDMSVLEGAIREELENSAPRLMAVLNPLKVTLTNFETGRTQSRRAAFHPNHEEMGEREVPISQTIYIEADDFAENPPKGFKRLIPGGEVRLRHGYVIKCDEVVKDEAGNVVELKCSIDHDTLGKNPEGRKVKGVIHWVSAEHAAEIKVRLYDRLFTVERPDAVRGEDGEYLPFTDFLNPESVKEITAYAEPAAKDLPAESRWQFERIGYFVTDRKDHGKDTPVFNRTVTLKDSWQPK

SEQ ID NO: 12774 - protein, 393 aa, Escherichia coli O157:H7 EDL933
MKDVVIVGALRTPIGCFRGALAGHSAVELGSLVVKALIERTGVPAYAVDEVILGQVLTAGAGQNPARQSAIKGGLPNSVSAITINDVCGSGLKALHLATQAIQCGEADIVIAGGQENMSRAPHVLTDSRTGAQLGNSQLVDSLVHDGLWDAFNDYHIGVTAENLAREYGISRQLQDAYALSSQQKARAAIDAGRFKDEIVPVMTQSNGQTLVVDTDEQPHTDASAEGLARLNPSFDSLGSVTAGNASSINDGAAAVMMMSEAKARALNLPVLARIRAFASVGVDPALMGIAPVYATRRCLERVGWQLADVDLIEANEAFAAQALSVGKMLEWDERRVNVNGGAIALGHPIGASGCRILVSLVHEMVKRNARKGLATLCIGGGQGVALTIERDE

SEQ ID NO: 12775 - protein, 321 aa, Escherichia coli O157:H7 EDL933
  misc_feature (223)..(223): Xaa can be any naturally occurring amino acid
  unsure (1)..(321): unsure at all Xaa locations
MSEALLNAGRQTLMLELQEASRLPERLGDDFVRAANIILHCEGKVVVSGIGKSGHIGKKIAATLASTGTPAFFVHPAEALHGDLGMIESRDVMLFISYSGGAKELDLIIPRLEDKSIALLAMTGKPTSPLGLAAKAVLDISVEREACPMHLAPTSSTVNTLMMGDALAMAVMQARGFNEEDFARSHPAGALGARLLNKVHHLMRRDDAIPQVALTASVMDAMXELSRTGLGLVAVCDAQQQVQGVFTDGDLRRWLVGGGALTTPVNEAMTVGGTTLQSQSRAIDAKEILMKRKITAAPVVDENGKLTGAINLQDFYQAGII

SEQ ID NO: 12776 - protein, 220 aa, Escherichia coli O157:H7 EDL933
MELYLDTSDVVAVKALSRIFPLAGVTTNPSIIAAGKKPLEVVLPELHEAMGGQGRLFAQVMATTAEGMVNDARKLRSIIADIVVKVPVTTEGLAAIKMLKAEGIPTLGTAVYGAAQGLLSALAGAEYVAPYVNRIDAQGGSGIQTVTDLHQLLKMHAPRAKVLAASFKTPRQALDCLLAGCESITLPLDVAQQMISYPAVDAAVAKFEQDWQGAFGRTSI

SEQ ID NO: 12777 - protein, 245 aa, Cydonia oblonga
MEGYNVNLSVMRKGAWTREEDDLLRQCIGILGEGKWHQVPYKTGLNRCRKSCRLRWLNYLKPNIKRGDFTEDEVDLIIRLHKLLGNRWSLIAGRLPGRTANDVKNYWNTRLRINSRMKTLKNKSQETRKTNVIRPQPRKFIKSSYYLSSKGPILDHIQSAEDLSTPPQTSSSTKNGNDWWETLFEGEDTFERAACPSIELEEELFTSFWFDDRLSARSCANFPEEGQSRSEFSVSMDLWNHSKEE

SEQ ID NO: 12778 - protein, 246 aa, Eriobotrya japonica
MEGYNVNLRVKRKGAWTREEDNLLRQCIEILGEGKWHQVPYKAGLNRCRKSCRLRWLNYVKPNIKRGDFTEDEVDLIIRLHKLLGNRWSLIAGRLQGRTANDVKNYCNTRLRINSRMKTSQNKSQETRKTIVIRPQPRSFIKSSNYLSSKEPILDHIQSEEDSSTPSQTSLTKNGNDRWETLLKDEGTFERTAYPSFELEEELFTSFWADEMQQSARSCTVSFPEEGPSKSNLSFNMELWNHSKEE

SEQ ID NO: 12779 - protein, 245 aa, Mespilus germanica
MEGYNVNLSVRKGAWTREEDNLLRQCIEIHGEGKWNQVSYKAGLNRCRKSCRLRWLNYLKPSIKRGDFKEDEVDLIIRLHKLLGNRWSLIAQRLPGRTANDVKNYWNTRLRMDYSLKKMKNKSQETRKTNVIRPQAQKFIKSSYYLSSKEPILDHIQSAEDLSTPPQTSSTKNGNDWWETLLEVDDTFERAACPSLELEEEVFPSFWVDDMRLSARSCANFPEEGQSRSELSFSTDLWNHSKKNS

SEQ ID NO: 12780 - protein, 244 aa, Pyrus communis
MEGYNVNLSVRKGAWTREEDNLLRQCIEIHGEGKWNQVSYKAGLNRCRKSCRQRWLNYLKPNIKRGDFKEDEVDLILRLHRLLGNRWSLIARRLPGRTANDVKNYWYTRLRIDSRMKTVKNKSQETRKTNVIRPQPQKFIKSSYYLSSKEPILEHIQSAEDLSTPSQTSSSTKNGNDWWETLFEGEDTFERAACPSIELEEELFTSFWFDDRLSARSCANFPEEGQSRSEFSFSMDLWNHSKEE

SEQ ID NO: 12781 - protein, 244 aa, Pyrus pyrifolia
MEGYNVNLSVRKGAWTREEDNLLRQCIEIHGEGKWNQVSYKAGLNRCRKSCRQRWLNYLKPNIKRGDFKEDEVDLILRLHRLLGNRWSLIARRLPGRTANDVKNYWNTRLGIDSRMKTLKNKSQETRKTNVIRPQPQKFIKSSYYLSSKEPILEHIQSAEDLSTPSQTSSSTKNGNDWWETLFEGEDTFERAACPSIELEEELFTTFWFDDRLSARSCANFPEEGQSRSEFSFSMDLWNHSKEE

SEQ ID NO: 12782 - protein, 243 aa, Prunus armeniaca
MEGYNLGVRKGAWTREEDDLLRQCIEKQGEGKWHQVPYKAGLSRCRKSCRLRWLNYLKPNIKRGDFMEDEVDLIIRLHKLLGNRWSLIARRLPGRTANDVKNYWNTRLRTDYCMKKMKDKSQETIKTIIRPQPRSFTKSSNCLSFKEPILDHTQLEEKFSETSQTSTSTRIGSDWWETFLDDKDATETATGSGLGLDEEQLASFWVDDDMPQSTRTCINFSKEGLSRGDFSFSVDLWNHSKEE

SEQ ID NO: 12783 - protein, 243 aa, Prunus domestica subsp. insititia
MEGYNLGVRKGAWTREEDDLLRQCIENHGEGKWHQVPNKAGLNRCRKSCRLRWLNYLKPNIKRGEFAEDEVDLIIRLHKLLGNRWSLIAGRLPGSTANDVKNYWNTRLRTDSRLKRVKDKPQETIKTIVIRPQPRSFIKSSNCLSSKEPILDHIQTVENFSTPSQTSSSTKNGNDWWETFLDDEDAFERATCYGLALEEEEFTSFWVDDMPQSKRQCTNASEQGLGRGDFSFNVDLWNHSKEE

SEQ ID NO: 12784 - protein, 237 aa, Prunus domestica
MEGYNLGVRKGAWTREEDDLLRKCIEKQGEGKWHQVPYKAGLSRCRKSCRLRWLNYLKPNIKRGDFMEDEVDLIIRLHKLLGNRWSLIARRLPGRTANDVKNYWNTRMKKMKDKSQETIKTIIRPQPRRFTKSSNCLSFKEPILDHTQLEENFSTTSQTSTSTRIGSDWWETFLDDKDATETATGSGLGLDEELLASFWVDDDMPQSTRTCVNFSEEGLSRGDFSFSVDLWNHSKEE

SEQ ID NO: 12785 - protein, 244 aa, Prunus avium
MEGYNLGVRRGAWTREEDDLLRQCIENQGEGKWHQVPYKAGLNRCRKSCRLRWLNYLKPNIKRGDFMEDEVDLIIRLHKLLGNRWSLIAQRLPGRTANDVKNYWNTRLRTDCCLKKMKDKSQETIKTIIKRPQPRSFTKSSNCLSFKEPILDDTQLEENFSTPSQTSTSTRIGSDWWETFLDDKDATERATGSGLGLDEELLASFWVDDDMPQWTRTCINFSEEGLSRGDFSFSMDLWNHSKEE

SEQ ID NO: 12786 - protein, 225 aa, Prunus cerasus
MEGYNLGVRKGAWTREEDDLLRQCIENQGEGKWHQVPYNAGLCRCRKSCRLRWLNYLKPNIKRGDFMEDEVDLIIRLHKLLGNRWSLIAQRLPGRTANDVKNYWNTRLQTDYCLKKMKDKSQETIKTVVIRPQPRSFIKSSNCLSSKEPILDHIQTVENFSTPSQTSPSTKNGNDWWETFLDDKDATERATGSGLGLDEELLASFWVDDDMPQSTRTCINFSEVR

SEQ ID NO: 12787 - protein, 243 aa, Prunus cerasifera
MEGYNLGVRKGAWTRKEDDLLRQCIEKHGEGKWHQVPYKAGLSRCRRSCRLRWLNYLKPNIKRGDFMEDEVDLIIRLHKLLGNRWSLIARRLPGRTANDVKNYWNTRLRKDYCMKKMKDKSQETIKTIIRPQPRSFTKSSNCLSFKEPILDHTQLEENFSTPSQTSTSTRIGSDWWETFLDDKDATERDTGSGLGLDEELLASFWVDDDMPQSTRTCVNFSEEGLSRGDFSFSVDLWNHSKEE

SEQ ID NO: 12788 - protein, 71 aa, Helianthus annuus
AGASSLVFVFSLDYARTRLANDAKAAKKGGERQFNGLVDVYKKTYASDGIAGLYRGFPLSAAGIFIYRGLY

SEQ ID NO: 12789 - protein, 435 aa, Streptococcus pyogenes M1 GAS
MFLDTAKISVQAGRGGDGMVAFRREKYVPNGGPWGGDGGKGGSVIFRVDEGLRTLMDFRYNRKFKAKSGEKGMTKGMHGRGAEDLIVFVPQGTTVRDAETGKVITDLVEHGQEVVIAKGGRGGRGNIRFATPRNPAPEIAENGEPGEERQLELELKILADVGLVGFPSVGKSTLLSVVSSAKPKIGAYHFTTIVPNLGMVRTKSGDSFAMADLPGLIEGASQGVGLGTQFLRHIERTRVILHVIDMSASEGRDPYEDYVSINNELETYNLRLMERPQIIVANKMDIPEAQENLKAFKKKLAAQYDEFDDLPMIFPISSLAHQGLENLLEATAELLAKTDEFLLYDESDLVDEEAYYGFAETEKDFEITRDDDATWVLSGEKLERLFVMTNMERDESIMKFARQLRGMGVDEALRERGAKDGDPVRIGKFEFEFVD

SEQ ID NO: 12790 - protein, 346 aa, Glomus intraradices
TETLAKYLSLDQGGKVQAEYIWIDGDSGLRSKTRTLDFKPADVSEISEWNFDGSSTNQAPGGDSDVLLRPVAIFKDPFRGGDNILVLNECFNNDGTPNRTNHRRSCAKVMKTYTDQHPWFGIEQEYTLFESDGSVLGWPKGGFPGPQGPYYCSVGANVAFGRDVVEAHYRACLYAGVNISGINAEVMPGQWEFQVGPCEGIDMGDHLWITRFLLQRVAEDFGIIVSFHPKPIKGDWNGAGCHTNYSTQAMREEGGIKAIHAAIDKMAARHADHITVYGEDNDQRLTGRHETGHISQFSYGVANRGASIRIPRHVAAEGKGYLEDRRPASNIDPYRVTQIIVESSLA

SEQ ID NO: 12791 - protein, 434 aa, Streptococcus pneumoniae R6
MFLDTAKIKVKAGNGGDGMVAFRREKYVPNGGPWGGDGGRGGNVVFVVDEGLRTLMDFRYNRHFKADSGEKGMTKGMHGRGAEDLRVRVPQGTTVRDAETGKVLTDLIEHGQEFIVAHGGRGGRGNIRFATPKNPAPEISENGEPGQERELQLELKILADVGLVGFPSVGKSTLLSVITSAKPKIGAYHFTTIVPNLGMVRTQSGESFAVADLPGLIEGASQGVGLGTQFLRHIERTRVILHIIDMSASEGRDPYEDYLAINKELESYNLRLMERPQIIVTNKMDMPESQENLEEFKKKLAENYDEFEELPAIFPISGLTKQGLATLLDATAELLDKTPEFLLYDESDMEEEVYYGFDEEEKAFEISRDDDATWVLSGEKLMKLFNMTNFDRDESVMKFARQLRGMGVDEALRARGAKDGDLVRIGKFEFEFVD

SEQ ID NO: 12792 - protein, 435 aa, Streptococcus pyogenes MGAS8232
MFLDTAKISVQAGRGGDGMVAFRREKYVPNGGPWGGDGGKGGSVIFRVDEGLRTLMDFRYNRKFKAKSGEKGMTKGMHGRGAEDLIVFVPQGTTVRDAETGKVITDLVEHGQEVVIAKGGRGGRGNIRFATPRNPAPEIAENGEPGEERQLELELKILADVGLVGFPSVGKSTLLSVVSSAKPKIGAYHFTTIVPNLGMVRTKSGDSFAMADLPGLIEGASQGVGLGTQFLRHIERTRVILHVIDMSASEGRDPYEDYVSINNELETYNLRLMERPQIIVANKMDMPEAQENLKAFKKKLAAQYDEFDDLPMIFPISSLAHQGLENLLEATAELLAKTDEFLLYDESDLVDEEAYYGFAEAEKDFEITRDDDATWVLSGEKLERLFVMTNMERDESIMKFARQLRGMGVDEALRERGAKDGDLVRIGKFEFEFVD

SEQ ID NO: 12793 - protein, 359 aa, Pyrococcus furiosus DSM 3638
MVEKPVVVKFGGTSVRYAFEEALELVANLNENTRTIVVVSALAGVTDCLLRLANGDMSALLEIEEIHEELSQELDVQLDHLMYQLHKTLNSKSSFPSKEAFVDEIASFGERFSAELFSEGLKILGINAKAVDSKDILFAKGDYGNAEVDFKKSVYGAGILYRMLRRGIVPVVTGYYGNLNGFRATFGRGGSDYSATSIARLVNAKATLIMSDVEGIYTADPKLVPSAKLIHYISYREAKIAAKLGMKALHHRAIDPVEGRIPVILGKTRDLKFGTLISHKSQGIPVVVHKLIEDHAEVSVVSTRRSFSLPYEVYEEGDFYFKIKIPKEQFLEVLKDIHRRVVENESLRPSYDSELWAWV

SEQ ID NO: 12794 - protein, 493 aa, Yersinia pestis KIM
MLLGLILVLYIAVSKYGNIRLGEGKPEYRTIPWLFMFICAGLGSSTLYWGVMEWAYYYQTPGLNIAPKTPKALEYSVSYSFFHWGISAWATYALASLIMAYHFHVRKNKGLSLSGIISAITGVNPQGFWGRLVDLIFLIATIGALTISLVITAATFTRGLTALIGVPNNFAVQAGVMLVAAVIFSFSSYIGIDHGMQRLSKMVGWGAFGFAVLVLLVGPTEFIINNTINSIGLTTQNFLQMSLFTDPMGDGRFTRSWTVFYWLWWISYTPGVAMFVTRVSRGRKLKEVIWALLLGSSLGCWFFFGVLESYAIQQFISGALDVPLILNTQGGETAVQMLLSALPMGKLFLAAYLFIMIIFLASHMDAVAYCMAATSTRNLREGEDPNRMLRLFWCVVITLIPLSILFAGASLDTMKTTVVLTALPFLLILLIEVYGFVRWIKQDYAHVPAHLIEQSTPQVMLPAESLPPATASMLVVETLVVETAAPPASKHNQ

SEQ ID NO: 12795 - protein, 366 aa, Desulfovibrio desulfuricans subsp. desulfuricans str. G20
MRFVDEAVIKAISGNGGHGCVSFRREKFIPRGGPDGGDGGNGGNVVFKASTRLLSLYDFRLKRVYQAENGRPGQGSQMHGRGGKDLVVEMPVGTLVFERGENGAESLIADLSEPDVEVVIAHGGRGGKGNEHFKSSTMQAPRFSQPGEPGEEKSLRLELKILADAGLLGLPNAGKSTFISQVSAAKPKIAAYPFTTLVPNLGVMMDEFDPDRRMVIADIPGLIEGAHEGQGLGHRFLKHVERTRFLVHILSIEDVDMENPWAGFDLINDELQRFDETLGSREQIQVVNKIDLLPPEEVDGLRARAEADGRRIFFISALEGEGLDAVVSEMWRMLAELDRNVPLDSSRQIEPEPEEEFDVEVVWVRE

SEQ ID NO: 12796 - protein, 215 aa, Desulfovibrio desulfuricans subsp. desulfuricans str. G20
MEFFLDTADLDEIRLAGKQGLIDGVTTNPTLLSRQGGDWKKRMQQICDEVDGPVSLEVISPDAEGMLREAEELVRYGDNVVIKVPMTAEGLIATRTLTGKGIKTNVTLVFSAMQALLAAKAGATYVSPFLGRLDGIGHEGMEIVSQIRTIFDNYGYETKILAASIRHAQHVLDSALVGADVVTVPYSVLRQLMHHPLTDSGLDAFLADWNKLTQS

SEQ ID NO: 12797 - protein, 435 aa, Streptococcus agalactiae 2603V/R
MFLDTAKISVKAGRGGDGMVAFRREKYVPNGGPWGGDGGKGGSVIFKVNEGLRTLMDFRYNRNFKAKAGEKGMTKGMHGRGAEDLIVSLPPGTTVRDATTGKVITDLVEHDQEFVVARGGRGGRGNIRFATPRNPAPEIAENGEPGEERELQLELKILADVGLVGFPSVGKSTLLSVVSAAKPKIGAYHFTTIVPNLGMVRTKSGDSFAMADLPGLIEGASQGVGLGTQFLRHIERTRVILHVIDMSASEGRDPYDDYVSINNELETYNLRLMERPQIIVANKMDMPDSEENLAAFKEKLAANYDEFDDMPMIFPISSLAHQGLENLMDATAELLANTEEFLLYDETDMQEDEAYYGFNEDERPFEITRDDDATWVLYGDKLEKLFVMTNMERDESIMKFARQLRGMGVDEALRERGAKDGDIVRIGNFEFEFVD

SEQ ID NO: 12798 - protein, 407 aa, Herminiimonas arsenicoxydans
MRPIQKSKKLADVCYDIRGPVLEKARQMEEDGHKIIKLNIGNLATFGFDAPDEIVQDMIRNLSNASGYTDSKGLFAPRKAIMQYSQEKKIAGVTIDDIYLGNGASELIVMSMNALLNTGDEVLVPSPDYPLWTAAVSLSGGTPVHYVCDEQADWFPDIDDIRKKINSNTKAIVVINPNNPTGALYPVELLQQIVDLAREHQLIVFADEIYDKVLYDGAKHDSIASLADDVLFITFNGLSKNYRACGYRAGWMIVSGEKRYAKDYIEGLNMLASMRLCANAPGQYAIQTALGGYQSINDLVGPGGRLTRQRDLAHKLLTEIPGVTCVKPKSALYMFPRLDPKMYPIKDDQDFAYQLLAEESVLIVQGTGFNCPTPDHFRVVFLPNSDDLTIAIGRIAHFLEGYRKRLG

SEQ ID NO: 12799 - protein, 394 aa, Methanosarcina mazei Go1
MVKKVALAYSGGLDTSVCIPILKEKYGYDEVITISVDVGQPEEEIRKADAKAQKISNKHYTIDAKEEFVRDYIFPLIKANGNYEGYVMGTSVARPLIAKKVVEAAKKEGAIALAHGCTGKGNDQLRFEAVFRQTDMDVIAPMREMNLTREWEINYAKEHGIPVEATKSKPWSVDENIWSRSIEGGRLEDPSFVPPEEIFEWTKSAEDAPNEPRIVDIDFEAGVPVAIDGEKLGGYALVKKMNEIAGENGVGRTDMIEDRVLGLKARENYEHPAATVLLAAHADLEKLVLTRGELKFKKIVEEQWSEMAYAGLVDDPLFADLNAFIDKSQERVTGTVKVKLYKGALTILARSSPNALYSEDLVSFDSQTIDQKDAEGFAKYHGFQARMYRKVVGK

SEQ ID NO: 12800 - protein, 574 aa, Shigella flexneri 2a str. 301
MEMLSGAEMVVRSLIDQGVKQVFGYPGGAVLDIYDALHTVGGIDHVLVRHEQAAVHMADGLARATGEVGVVLVTSGPGATNAITGIATAYMDSIPLVVLSGQVATSLIGYDAFQECDMVGISRPVVKHSFLVKQTEDIPQVLKKAFWLAASGRPGPVVVDLPKDILNPANKLPYVCPESVSMRSYNPTTTGHKGQIKRALQTLVAAKKPVVYVGGGAIMAGCHQQLKETVEALNLPVVSSLMGMGAFPATHRQALGMLGMHGTYEANMTMHNADVIFAVGVRFDDRTTNNLAKYCPNATVLHIDIDPTSISKTVTADIPIVGDARQVLEQMLELLSQESAHQPLDEIRDWWQQIEQWRALQCLKYDTHSEKIKPQAVIETLWRLTNGDAYVTSDVGQHQMFAALYYPFDKPRRWINSGGLGTMGFGLPAALGVKMALPEETVVCVTGDGSIQMNIQELSTALQYELPVLVVNLNNRYLGMVKQWQDMIYSGRHSQSYMQSLPDFVRLAEAYGHVGIQISHPHELESKLSEALEQVRNNRLVFVDVTVDGSEHVYPMQIRGGGMDEMWLSKTERT

SEQ ID NO: 12801 - protein, 321 aa, Shigella flexneri 2a str. 301
MSEALLNTGRQTLMLELQEASRLPERLGDDFVRAANIILHCEGKVVVSGIGKSGHIGKKIAATLASTGTPAFFVHPAEALHGDLGMIESRDVMLFISYSGGAKELDLIIPRLEDKSIALLAMTGKPTSPLGLAAKAVLDISVEREACPMHLAPTSSTVNTLMMGDALAMAVMQARGFNEEDFARSHPAGALGARLLNKVHHLMRRDDAIPQVALTASVMDAMLELSRTGLGLVAVCDAQQQVQGVFTDGDLRRWLVGGGALTTPVNEAMTTGGTTLQAQSRAIDAKEVLMKRKITAAPVVDENGKLTGAINLQDFYQAGII

SEQ ID NO: 12802 - protein, 406 aa, Shigella flexneri 2a str. 301
MRKEMNEFPVVLVINCGSSSIKFSVLDASDCEVLMSGIADGINSENAFLSVNGGEPAPLAHHSYEGALKAIAFELEKRNLNDSVALIGHRIAHGGSIFTESAIITDEVIDNIRRVSPLAPLHNYANLSGIESAQQLFPGVTQVAVFDTSFHQTMAPEAYLYGLPWKYYEELGVRRYGFHGTSHRYVSQRAHSLLNLAEDDSGLVVAHLGNGASICAVRNGQSVDTSMGMTPLEGLMMGTRSGDVDFGAMSWVASQTNQSLGDLERVVNKESGLLGISGLSSDLRVLEKAWHEGHERAQLAIKTFVHRIARHIAGHAASLRRLDGIIFTGGIGENSSLIRRLVMEHLAVLGVEIDTEMNNRSNSFGERIVSSENAHVICVVIPTNEEKMIALDAIHLGKVNAPAEFA

SEQ ID NO: 12803 - protein, 1517 aa, Shigella flexneri 2a str. 301
MTRKPRRHALSVPVRSGSEVGFPQSLGEVHDMLYDKSLERDNCGFGLIAHIEGEPSHKVVRTAIHALARMQHRGAILADGKTGDGCGLLLQKPDRFFRIVAQERGWRLAKNYAVGMLFLNKDPELAAAARRIVEEELQRETLSIVGWRDVPTNEGVLGEIALSSLPRIEQIFVNAPAGWRPRDMERRLFIARRRIEKRLEANKDFYVCSLSNLVNIYKGLCMPADLPRFYLDLADLRLESAICLFHQRFSTNTVPRWPLAQPFRYLAHNGEINTITGNRQWARARTYKFQTPLIPDLHDAAPFVNETGSDSSSMDNMLELLLAGGMDIIRAMRLLVPPAWQNNPDMDPELRAFFDFNSMHMEPWDGPAGIVMSDGRFAACNLDRNGLRPARYVITKDKLITCASEVGIWDYQPDEVVEKGRVGPGELMVIDTRSGRILHSAETDDDLKSRHPYKEWMEKNVRRLVPFEDLPDEEVGSRELDDDTLASYQKQFNYSAEELDSVIRVLGENGQEAVGSMGDDTPFAVLSSQPRIIYDYFRQQFAQVTNPPIDPLREAHVMSLATSIGREMNVFCEAEGQAHRLSFKSPILLYSDFKQLTTMKEEHYRADTLDITFDVTKTTLEATVKELCDKAEKMVRSGTVLLVLSDRNIAKDRLPVPAPMAVGAIQTRLVDQSLRCDANIIVETASARDPHHFAVLLGFGATAIYPYLAYETLGRLVDTHAIAKDYRTVMLNYRNGINKGLYKIMSKMGISTIASYRCSKLFEAVGLHDDVVGLCFQGAVSRIGGASFEDFQQDLLNLSKRAWLARKPISQGGLLKYVHGGEYHAYNPDVVRTLQQAVQSGEYSDYQEYAKLVNERPATTLRDLLAITPGENAVNIADVEPASELFKRFDTAAMSIGALSPEAHEALAEAMNSIGGNSNSGEGGEDPARYGTNKVSRIKQVASGRFGVTPAYLVNADVIQIKVAQGAKPGEGGQLPGDKVTPYIAKLRYSVPGVTLISPPPHHDIYSIEDLAQLIFDLKQVNPKAMISVKLVSEPGVGTIATGVAKAYADLITIAGYDGGTGASPLSSVKYAGCPWELGLVETQQALVANGLRHKIRLQVDGGLKTGVDIIKAAILGAESFGFGTGPMVALGCKYLRICHLNNCATGVATQDDKLRKNHYHGLPFKVTNYFEFIARETRELMAQLGVTRLVDLIGRTDLLKELDGFTAKQQKLALSKLLETAEPHAGKSLYCTENNPPFDNGLLNAQLLQQAKPFVDERQSKTFWFDIRNTDRSVGASLSGYIAQTHGDQGLAADPIKAYFNGTAGQSFGVWNAGGVELYLTGDANDYVGKGMAGGLIAIRPPVGSAFRSHEASIIGNTCLYGATGGRLYAAGRAGERFGVRNSGAITVVEGIGDNGCEYMTGGIVCILGKTGVNFGAGMTGGFAYVLDESGDFRKRVNPELVEVLSVDDLAIHEEHLRGLITEHVQHTGSQRGEEILANWSTFATKFALVKPKSSDVKALLGHRSRSAAELRVQAQ

SEQ ID NO: 12804 - protein, 220 aa, Shigella flexneri 2a str. 301
MELYLDTSDVVAVKALSRIFPLAGVTTNPSIIAAGKKPLDVVLPQLHEAMGGQGRLFAQVMATTAEGMVNDALKLRSIIADIVVKVPVTAEGLAAIKMLKAEGIPTLGTAVYGAAQGLLSALAGAEYVAPYVNRIDAQGGSGIQTVTDLHQLLKMHAPQAKVLAASFKTPRQALDCLLAGCESITLPLDVAQQMISYPAVEAAVTKFEQDWQGAFGRTSI

SEQ ID NO: 12805 - protein, 502 aa, Corynebacterium efficiens YS-314
MNRFIDRVVLHLAAGDGGNGCVSVHREKFKPLGGPDGGNGGHGGDIILEVSPQVHTLLDFHYHPHVKAPRGANGAGDNRSGARGEDLILEVPAGTVVLNSKGETLADLTTVGMKFIAAAGGQGGLGNAALASRARKAPGFALNGEPGEQHDLILELKSMADVGLVGFPSAGKSSLISVMSAAKPKIGDYPFTTLQPNLGVVEVGHQTFIMADVPGLIPGASEGKGLGLDFLRHIERTSVLVHVVDTASMDPGRDPISDIEALEAELAAYQSALDEDTGLGDLDKRPRVVVLNKADVPEALELAEFLKGDIEQQFGWPVFIVSAVAQRGLDPLKYKLLEIVQQARKKRPKEKLAESVIIKPKPVDGRRRREEFEIRKDPDNPGGFLVVGEKPERWILQTDFENDEAVGYLADRLAKLGVEDKLRKAGAQTGSEVTIGGVTFEWEPMTSAVDTAASPRGTDIRLEKNERISAAERKRASQVRRGLIDEFDYGDGEEASRERWEG

SEQ ID NO: 12806 - protein, 324 aa, Escherichia coli CFT073
MKPSVILYKALPDDLLQRLQEHFTVHQVANLSPQTVEQNAAIFAEAEGLLGSNENVDAALLEKMPKLRATSTISVGYDNFDVDALTARKILLMHTPTVLTETVADTLMALVLSTARRVVEVAERVKAGEWTASIGPDWYGTDVHHKTLGIVGMGRIGMALAQRAHFGFNMPILYNARRHHKEAEERFNARYCNLDTLLQESDFVCLILPLTDETHHLFGAEQFAKMKSSAIFINAGRGPVVDENALIAALQKGEIHAAGLDVFEQEPLSVDSPLLSMANVVAVPHIGSATHETRYGMAACAVDNLIDALQGKVEKNCVNPHVAD

SEQ ID NO: 12807 - protein, 483 aa, Escherichia coli CFT073
MQLEVILPLVAYLVVVFGISVYAMRKRNTGTFLNEYFLGSRSMGGIVLAMTLTATYISASSFIGGPGAAYKYGLGWVLLAMIQLPAVWLSLGILGKNFAILARRYNAVTLNDMLFARYQSRLLVWLASLSLLVAFVGAMTVQFIGGARLLETAAGIPYETGLLIFGISIALYTAFGGFRASVLNDTMQGLVMLIGTVVLLIGVVHAAGGLSNAVDTLQTIDPQLVTPQGADDILSPAFMTSFWVLVCFGVIGLPHTAVRCISYKDSKAVHRGIIIGTIVVAILMFGMHLAGALGRAVIPDLTVPDLVIPTLMVKVLPPFAAGIFLAAPMAAIMSTINAQLLQSSATIIKDLYLNIRPDQMQNETRLKRMSAVITLVLGALLLLAAWKPPEMIIWLNLLAFGGLEAVFLWPLVLGLYWERANAKGALSAMIVGGVLYAVLAKLNIQYLGFHPIVPSLLLSLLAFLVGNRFGTSVPQATVLTTDK

SEQ ID NO: 12808 - protein, 1517 aa, Escherichia coli CFT073
MTRKPRRHALTVPVRSGSEVGFPQSLGEVHDMLYDKSLERDNCGFGLIAHIEGEPSHKVVRTAIHALARMQHRGAILADGKTGDGCGLLLQKPDRFFRIVAQERGWRLAKNYAVGMLFLNKDPELAAAARRIVEEELQRETLSIVGWRDVPTNEGVLGEIALSSLPRIEQIFVNAPAGWRPRDMERRLFIARRRIEKRLEADKDFYVCSLSNLVNIYKGLCMPADLPRFYLDLADLRLESAICLFHQRFSTNTVPRWPLAQPFRYLAHNGEINTITGNRQWARARTYKFQTPLIPDLHDAAPFVNETGSDSSSMDNMLELLLAGGMDIIRAMRLLVPPAWQNNPDMDPELRAFFDFNSMHMEPWDGPAGIVMSDGRFAACNLDRNGLRPARYVITKDKLITCASEVGIWDYQPDEVVEKGRVGPGELMVIDTRSGRILHSAETDDDLKSRHPYKEWMEKNVRRLVPFEDLPDEEVGSRELDDDTLASYQKQFNYSAEELDSVIRVLGENGQEAVGSMGDDTPFAVLSSQPRIIYDYFRQQFAQVTNPPIDPLREAHVMSLATSIGREMNVFCEAEGQAHRLSFKSPILLYSDFKQLTTMKEDHYRADTLDITFDVTKTTLEATVKELCDKAEKMVRSGTVLLVLSDRNIAKDRLPVPAPMAVGAIQTRLVEQSLRCDANIIVETASARDPHHFAVLLGFGATAIYPYLAYETLGRLVDTHAIAKDYRTVMLNYRNGINKGLYKIMSKMGISTIASYRCSKLFEAVGLHDDVVGLCFQGAVSRIGGASFEDFQQDLLNLSKRAWLARKPISQGGLLKYVHGGEYHAYNPDVVRTLQQAVQSGEYSDYQEYAKLVNERPATTLRDLLAITPGENAVNIADVEPASELFKRFDTAAMSIGALSPEAHEALAEAMNSIGGNSNSGEGGEDPARYGTNKVSRIKQVASGRFGVTPAYLVNADVIQIKVAQGAKPGEGGQLPGDKVTPYIAKLRYSVPGVTLISPPPHHDIYSIEDLAQLIFDLKQVNPKAMISVKLVSEPGVGTIATGVAKAYADLITIAGYDGGTGASPLSSVKYAGCPWELGLVETQQALVANGLRHKIRLQVDGGLKTGVDIIKAAILGAESFGFGTGPMVALGCKYLRICHLNNCATGVATQDDKLRKNHYHGLPFKVTNYFEFIARETRELMAQLGVTRLVDLIGRTDLLKELDGFTAKQQKLALSKLLETAEPHAGKALYCTENNPPFDNGLLNAQLLQQAKPFVDERQSKTFWFDIRNTDRSVGASLSGYIAQTHGDQGLAADPIKAYFNGTAGQSFGVWNAGGVELYLTGDANDYVGKGMAGGLIAIRPPVGSAFRSHEASIIGNTCLYGATGGRLYAAGRAGERFGVRNSGAITVVEGIGDNGCEYMTGGIVCILGKTGVNFGAGMTGGFAYVLDESGDFRKRVNPELVEVLSVDDLAIHEEHLRGLITEHVQHTGSQRGEEILANWSTFATKFALVKPKSSDVKALLGHRSRSAAELRVQAQ

SEQ ID NO: 12809 - protein, 393 aa, Escherichia coli CFT073
MKDVVIVGALRTPIGCFRGALAGHSAVELGSLVVKALIERTGVPAYAVDEVILGQVLTAGAGQNPARQSAIKGGLPNSVSAITINDVCGSGLKALHLATQAIQCGEADIVIAGGQENMSRAPHVLTDSRTGAQLGNSQLVDSLVHDGLWDAFNDYHIGVTAENLAREYGISRQLQDAYALSSQQKARAAIDAGRFKDEIVPVITQSNGQTLVVDTDEQPRTDTSAEALARLNPSFDSLGSVTAGNASSINDGAAAVMMMSEAKARALNLPVLARIRAFASVGVDPALMGIAPVYATRRCLERVGWQLADVDLIEANEAFAAQALSVGKMLEWDERRVNVNGGAIALGHPIGASGCRILVSLVHEMVKRNARKGLATLCIGGGQGVALTIERDE

SEQ ID NO: 12810 - protein, 571 aa, Escherichia coli CFT073
MSSMTTTDNKAFLNELARLVGHSHLLTDPAKTARYRKGFRSGQGDALAVVFPGSLLELWRVLKACVTADKIILMQAANTGLTEGSTPNGNDYDRDIVIISTLRLDKLHVLGKGEQVLAYPGTTLYSLEKALKPLGREPHSVIGSSCIGASVIGGICNNSGGSLVQRGPAYTEMSLFARINEDGKLTLVNHLGIDLGETPEQILSKLDDDRIKDDDVRHDGRHAHDYDYVHRVRDIEADTPARYNADPDRLFESSGCAGKLAVFAVRLDTFEAEKNQQVFYIGTNQPEVLTEIRRHILANFENLPVAGEYMHRDIYDIAEKYGKDTFLMIDKLGTDKMPFFFNLKGRTDAMLEKVKFFRPHFTDRAMQKFGHLFPSHLPPRMKNWRDKYEHHLLLKMAGDGVGEAKSWLVDYFKQAEGDFFVCTPEEGSKAFLHRFAAAGAAIRYQAVHSDEVEDILALDIALRRNDTEWYEHLPPEIDSQLVHKLYYGHFMCYVFHQDYIVKKGVDVHVLKEQMLELLQQRGAQYPAEHNVGHLYKAPETLQKFYRENDPTNSMNPGIGKTSKRKNWQEVE

SEQ ID NO: 12811 - protein, 554 aa, Escherichia coli CFT073
MCSIFGVFDIKTDAVELRKKALELSRLMRHRGPDWSGIYASDNAILAHERLSIVDVNAGAQPLYNQQKTHVLAVNGEIYNHQALRAEYGDRYQFQTGSDCEVILALYQEKGPEFLDDLQGMFAFALYDSEKDAYLIGRDHLGIIPLYMGYDEHGQLYVASEMKALVPVCRTIKEFPAGSYLWSQDGEIRSYYHRDWFDYDAVKDNVTDKNELRQALEDSVKSHLMSDVPYGVLLSGGLDSSIISAITKKYAARRVEDQERSEAWWPQLHSFAVGLPGSPDLKAAQEVANHLGTVHHEIHFTVQEGLDAIRDVIYHIETYDVTTIRASTPMYLMSRKIKAMGIKMVLSGEGSDEVFGGYLYFHKAPNAKELHEETVRKLLALHMYDCARANKAMSAWGVEARVPFLDKKFLDVAMRINPQDKMCGNGKMEKHILRECFEAYLPASVAWRQKEQFSDGVGYSWIDTLKEVAAQQVSDQQLETARFRFPFNTPTSKEAYLYREIFEELFPLPSAAECVPGGPSVACSSAKAIEWDEAFKKMDDPSGRAVGVHQSAYK

SEQ ID NO: 12812 - protein, 574 aa, Escherichia coli CFT073
MEMLSGAEMVVRSLIDQGVKQVFGYPGGAVLDIYDALHTVGGIDHVLVRHEQAAVHMADGLARATGEVGVVLVTSGPGATNAITGIATAYMDSIPLVVLSGQVATSLIGYDAFQECDMVGISRPVVKHSFLVKQTEDIPQVLKKAFWLAASGRPGPVVVDLPKDILNPANKLPYVWPESVSMRSYNPTTSGHKGQIKRALQTLVAAKKPVVYVGGGAITAGCHLQLKEAVEVLNLPVVSSLMGLGAFPATHRQALGMLGMHGTYEANMTMHNADVIFAVGVRFDDRTTNNLAKYCPNATVLHIDIDPTSISKTVTADIPIVGDARQVLEQMLELLSQESAHQPLDEIRDWWQQIEQWRARQCLKYDTHSEKIKPQAVIETLWRLTNGDAYVTSDVGQHQMFAALYYPFDKPRRWINSGGLGTMGFGLPAALGVKMALPEETVVCVTGDGSIQMNIQELSTALQYELPVLVVNLNNRYLGMVKQWQDMIYSGRHSQSYMQSLPDFVRLAEAYGHVGIQISHPQELESKLSEALEQVRNNRLVFVDVTVDGSEHVYPMQIRGGGMDEMWLSKTERT

SEQ ID NO: 12813 - protein, 1517 aa, Shigella flexneri 2a str. 2457T
MTRKPRRHALSVPVRSGSEVGFPQSLGEVHDMLYDKSLERDNCGFGLIAHIEGEPSHKVVRTAIHALARMQHRGAILADGKTGDGCGLLLQKPDRFFRIVAQERGWRLAKNYAVGMLFLNKDPELAAAARRIVEEELQRETLSIVGWRDVPTNEGVLGEIALSSLPRIEQIFVNAPAGWRPRDMERRLFIARRRIEKRLEADKDFYVCSLSNLVNIYKGLCMPADLPRFYLDLADLRLESAICLFHQRFSTNTVPRWPLAQPFRYLAHNGEINTITGNRQWARARTYKFQTPLIPDLHDAAPFVNETGSDSSSMDNMLELLLAGGMDIIRAMRLLVPPAWQNNPDMDPELRAFFDFNSMHMEPWDGPAGIVMSDGRFAACNLDRNGLRPARYVITKDKLITCASEVGIWDYQPDEVVEKGRVGPGELMVIDTRSGRILHSAETDDDLKSRHPYKEWMEKNVRRLVPFEDLPDEEVGSRELDDDTLASYQKQFNYSAEELDSVIRVLGENGQEAVGSMGDDTPFAVLSSQPRIIYDYFRQQFAQVTNPPIDPLREAHVMSLATSIGREMNVFCEAEGQAHRLSFKSPILLYSDFKQLTTMKEEHYRADTLDITFDVTKTTLEATVKELCDKAEKMVRSGTVLLVLSDRNIAKDRLPVPAPMAVGAIQTRLVDQSLRCDANIIVETASARDPHHFAVLLGFGATAIYPYLAYETLGRLVDTHAIAKDYRTVMLNYRNGINKGLYKIMSKMGISTIASYRCSKLFEAVGLHDDVVGLCFQGAVSRIGGASFEDFQQDLLNLSKRAWLARKPISQGGLLKYVHGGEYHAYNPDVVRTLQQAVQSGEYSDYQEYAKLVNERPATTLRDLLAITPGENAVNIADVEPASELFKRFDTAAMSIGALSPEAHEALAEAMNSIGGNSNSGEGGEDPARYGTNKVSRIKQVASGRFGVTPAYLVNADVIQIKVAQGAKPGEGGQLPGDKVTPYIAKLRYSVPGVTLISPPPHHDIYSIEDLAQLIFDLKQVNPKAMISVKLVSEPGVGTIATGVAKAYADLITIAGYDGGTGASPLSSVKYAGCPWELGLVETQQALVANGLRHKIRLQVDGGLKTGVDIIKAAILGAESFGFGTGPMVALGCKYLRICHLNNCATGVATQDDKLRKNHYHGLPFKVTNYFEFIARETRELMAQLGVTRLVDLIGRTDLLKELDGFTAKQQKLALSKLLETAEPHAGKSLYCTENNPPFDNGLLNAQLLQQAKPFVDERQSKTFWFDIRNTDRSVGASLSGYIAQTHGDQGLAADPIKAYFNGTAGQSFGVWNAGGVELYLTGDANDYVGKGMAGGLIAIRPPVGSAFRSHEASIIGNTCLYGATGGRLYAAGRAGERFGVRNSGAITVVEGIGDNGCEYMTGGIVCILGKTGVNFGAGMTGGFAYVLDESGDFRKRVNPELVEVLSVDDLAIHEEHLRGLITEHVQHTGSQRGEEILANWSTFATKFALVKPKSSDVKALLGHRSRSAAELRVQAQ

SEQ ID NO: 12814 - protein, 194 aa, Vibrio vulnificus YJ016
MTETDTLAKPAVFLDRDGVINVDHGYVHDEHDFEYIEGVFEATKALKDMGYLLVLVTNQSGIARGKFSEDRFLSLTQWMDWNFADNGVEFDGIYYCPHHAEHGVGDYKQDCDCRKPKPGMFISARDFLKIDMARSVMVGDKAEDMMAAEAAGVATKILVRTGKPVTQQGEQLATVVLDSIRDVPLYVKEQVKGR

SEQ ID NO: 12815 - protein, 637 aa, Vibrio vulnificus YJ016
MKRHFELIDKPTFFGALALLFSVIIPLLVWPSQGEYWIGVAKTFMTDKLGFLYLGLGLAAFFFMVYIIFSDIGQIKLGDADEKPEFATGSWAAMLFCGGIGASILYWGTIEWAYYYQNPPFQLEAGSEEAIRWAATYGIFHWGPIAWSIYLIPALPIAYFFYVRKQPVLKISAALMPVIGEARSYGKLGKVIDVLFIFGLLGGAATTLGLAAPLINEGISYLFGIPSTTLSQIGVLLLCTALFAYSSYKGMDGGIKVLSNINFWGALALLAFILVTGPTLFMLETGLDSIGRMLSNFFVMATWAEPFGGYGPFEDTHFPQDWTIFYWAWWLVFAPSMGLFVARISRGRTIKQMVSGSIFFGSMGCALYFMVLGNFGLSLQLSGQLDVVAILNQHGATRAIFAILEQLPLSTVVIAVFTILCIIFTATTFDSISFILASVVQNNVTEDPLRWNRLFWAFTLSLMPSILLFMGGLATLQTAAIVGGLPLLGIAIMLMISGIKAASLDLAHQEGYEDPVINIEEFPDVDPWSREGMALAKFERLKDEAVEAAEQEREALAAIWKLKKVIRSEALSRGESGLELGEAPEEQLTEIQRLTNAAMEAKEHKLQASEAAQAARIEFNELIKEKELQSLQSESLS

SEQ ID NO: 12816 - protein, 496 aa, Vibrio vulnificus YJ016
MIPVVALVGRPNVGKSTLFNRLTRSRDALVADFPGLTRDRKYGQAKVGEHDFIVIDTGGIDGSEEGVETKMAEQSLAAIREADVVLFMVDGRAGLTPSDEAIAAHLRKIEKATMLVVNKVDGIDADAASADFWQLGVDEMYQIAAAHGRGVTALIERALDPFFDNLLSTNSEGEIEDLTNMEDEEAEQQEYSEEDAEESLKRLQDQPIKLAIIGRPNVGKSTLTNRILGEERVVVYDMPGTTRDSIYIPMERDGREYVLIDTAGVRRRGKVHETVEKFSVVKTLKAVEDANVVLLVIDARENISDQDLSLLGFALNAGRSIVLAVNKWDGLDNEVKENVKKELDRRLGFVDFARIHFISALHGTGVGHLFESVQEAYRSATTRVGTSVLTRIMKMATEDHQPPMVRGRRVKLKYAHAGGYNPPIVVIHGNQVRELPDSYKRYLMNYFRKSLDIMGTPIRIQFQNSDNPFENRVNKMTLSQERARKRMMSAVKNRKK

SEQ ID NO: 12817 - protein, 447 aa, Salmonella enterica subsp. enterica serovar Typhi str. Ty2
MTTILKHLPAGQRIGIAFSGGLDTSAALLWMRQKGAVPYAYTANLGQPDEDDYDAIPRRAMEYGAENARLIDCRKQLVAEGIATIQCGAFHNTTGGLTYFNTTPLGRAVTGTMLVAAMKEDGVNIWGDGSTYKGNDIERFYRYGLLTNAELQIYKPWLDTDFIDELGGRHEMSEFMIACGFDYKMSVEKAYSTDSNMLGATHEAKDLEFLNSSVKIVNPIMGVKFWDESVKIPAEEVTVRFEQGHPVALNGKTFSDDVEMMLEANRIGGRHGLGMSDQIENRIIEAKSRGIYEAPGMALLHIAYERLLTGIHNEDTIEQYHSHGRQLGKLLYQGRWFDSQALMLRDGLQRWVASQITGEVTLELRRGNDYSILNTVSDNLTYKAERLTMEKGESVFSPDDRIGQLTMRNLDITDTREKLFGYAKAGLLTASSATGLPQVENLENKAK

SEQ ID NO: 12818 - protein, 434 aa, Streptococcus mutans UA159
MFLDTAKVSVKAGRGGDGMVAFRREKYVANGGPWGGDGGRGGDVIFVVNEGLRTLMDFRYNRHFKAKAGEKGMTKGMHGRGAENLYVSVPQGTTVRDAQTGKVIADLVKNGQEFIVAHGGRGGRGNIRFATPRNPAPEISENGEPGEERELALELKILADVGLVGFPSVGKSTLLSVITAAKPKIGAYHFTTIVPNLGMVRTKSGDSFAVADLPGLIEGASQGVGLGTQFLRHIERTRVILHVIDMSASEGRDPYEDYLAINKELETYNLRLLERPQIIVANKMDMPQAAENLEQFKEKLDANYGEFDDKPQIFPISGIAHQGLDALLDATAQLLAQTDDFLLYDESDMQEEAYYGFEEEEKAFDISRADDAAWVLSGEKLEKLFVMTNMERDEAIMKFSRQLRGMGVDQALRERGAKDGDIVRIGKFEFEFVD

SEQ ID NO: 12819 - protein, 104 aa, Clostridium tetani E88
MYAVVVTGGKQYKVTEGDVLFVEKLDAEVDAAIELDNVLAISKDNGEFVVGKPVVEGAKVTAKVLKQGKAKKVVVFKYKPKKHYRKKQGHRQPYTKIQIEKINA

SEQ ID NO: 12820 - protein, 214 aa, Clostridium tetani E88
MKFFIDTANVEEIKKVAKWGVLDGVTTNPTLIAREGRDLKEVIEEICSIVDGPISAEVISLESEKMVEEAKELIKIHKNIVIKVPMCEEGLKAVSELTKLGIKTNVTLIFSAQQALLAAKAGATYVSPFLGRIDDIGSFGIQLVEDIVTIFTNFGIESEIICASIRTPIHVLECARVGGDIATVPYKVFAQMLKHPLTDRGIEQFLEDYKSMNK

SEQ ID NO: 12821 - protein, 449 aa, Vibrio vulnificus CMCP6
MSALNVAKFGGTSVANFEAMSRCSAIIENNPETRLVVSSACSGVTNLLVELANGVQSQERRAELLAQLAEIHDAILNQLEDATEAAAEVYAILDTITSLAEAASIQASNKLTDHLVACGELMSTHILAQLMRERGVNAVRFDIREVLRTDDNFGRAEPDVAKIAELAQEKLLPLCRDYVVVTQGFIGSDEEGNTTTLGRGGSDYSAALIAEGVKASGLEIWTDVPGIYTTDPRIAAKAAPIPEISFAEASEMANFGAKILHPSTLVPALRHDIPVFVGSSKEPEKGGTWIRHEAQSSPLFRALALRCNQTMVTLRSAKMFHAYGFLAKVFEILAKHKISVDLITTSEISVSLTLDKTDTSGGAPELPQAAREELEELCTVEVEHNLCLVALIGNHMETKGYAKEVFSTLGDFNLRMICYGASDHNLCFLVDAHDSKSVIQKLHQDLFER

SEQ ID NO: 12822 - protein, 1486 aa, Pectobacterium atrosepticum SCRI1043
MLYDASQERDNCGFGLIAHIEGEPSHKVVRTAIHALARMQHRGAILADGKTGDGCGLLLQKPDRFFRLVAEEHGWRLAKNYAVGMMFLNQDEELARATRRIVEEELQNETLSVLGWREVPTNPDVLGEIALSSMPRIEQIFVNAPAGWRQRDMERRLFMARRRIEKRIEDKEFYVCSFSNLVTIYKGLCMPADLPRFYLDLADLRLESAICLFHQRFSTNTVPRWPLAQPFRYLAHNGEINTIAGNRQWARARAYKFKTPLIPDLQDAAPFVNETGSDSSSLDNMLELFLSGGMDIIRAMRLLVPPAWQNNPDMDPELRSFFDFNSMHMEPWDGPAGIVMSDGRYAACNLDRNGLRPARYVITKDKLITCASEVGIWDYQPDEVVEKGRVGPGELMVIDTRSGRILHSAETDNDLKSRHPYKEWMEKNVKRLVPFEELPDEQVGSREFNDELLETYQKQYGYSSEELDQIIRVLGENGQEATGSMGDDTPFAVLSSRPRIIYDYFRQQFAQVTNPPIDPLREAHVMSLATSIGREMNVFCEAEGQAHRLSFKSPILLYSDFTQLTSQDELHYRADTLDLTFDPSQQTLQQTIEKLCDEAESKVRDGAVLLVLSDRGISESRLPVPAPMAVGAVQRRLVEKSLRCDANIIVETASARDPHHFAVLLGFGATAIYPYLAYETLARMVDNHTIDKPYRAVMLNYRNGINKGLYKIMSKMGISTIASYRCSKLFEAVGLHKDVSTQCFLGVVSRIGGANYSDFEQDLLNLSKRAWLKRKTLEQGGLLKFVHGGEYHAYNPDIVTTLQTAVKSGEYSDYEQYAKLVNERPVATLRDLLALRPQEGAAIAIDNVEPATEMFKRFDTAAMSIGALSPEAHESLAEAMNGLGGFSNSGEGGEDPARYGTNKVSRIKQVASGRFGVTPAYLVNADVIQIKVAQGAKPGEGGQLPGDKVTPYIARLRYSVPGVTLISPPPHHDIYSIEDLAQLIFDLKQVNPKAMISVKLVSEPGVGTIATGVAKAYADLITIAGYDGGTGASPLSSVKYAGCPWELGLVETQQALVSNGLRHKIRLQVDGGLKTGLDIVKAAILGAESFGFGTGPMVALGCKYLRICHLNNCATGVATQDEKLRRDHYHGLPERVTNYFHFIAHETRVLMAELGVSRLVDLIGRTDLLVELDGFSAKQNKLDLSPLLHAAQPQPGKALHCTESNLSFDKGLLNKELLAQAQPHIDAKQGKALYFDIRNTDRSVGATLSGAIAEKHGDQGLAGDPIKAHFSGTAGQSFGVWNAGGLELKLIGDANDYVGKGMAGGSISVRPPVGSAFRSHEASIIGNTCLYGATGGKLFAAGRAGERFAVRNSGCITVVEGIGDNGCEYMTGGIVCVLGRTGVNFGAGMTGGFAYVLDEDGEFRKRVNPELVEVLDVEELAIHEEHLRGLITEHVQNTGSHRGEEILANWPIWAPKFALVKPKSSDVKALLGHRSRSAAELRVQAQ

SEQ ID NO: 12823 - protein, 320 aa, Pectobacterium atrosepticum SCRI1043
MKPSVILYKKVADDLRARLDQHFTVTELDAFPALDHPALATAEGIIGSGGKVDKDFLQHAPRLRAASTISVGYDTFNVDALNEKGVILMHTPTVLTETVADTVLALMLASARRVVEVVERVKAGEWKGGVGSDWFGTDVHHKTIGILGMGRIGLAVAQRAHFGFSMPVLYNARRHHAEAEERFNARHCDLDTLLAESDFLCITLPLTAETHHLIGREQLAKMKPSAILINIGRGAVVDEDALTEALVKGTIQAAGLDVFVKEPLPVDSPLLDLPNVVALPHIGSATHETRYDMAACAVDNLIAALSGQVKENCVNPQVLK

SEQ ID NO: 12824 - protein, 447 aa, Salmonella enterica subsp. enterica serovar Typhi str. CT18
MTTILKHLPAGQRIGIAFSGGLDTSAALLWMRQKGAVPYAYTANLGQPDEDDYDAIPRRAMEYGAENARLIDCRKQLVAEGIAAIQCGAFHNTTGGLTYFNTTPLGRAVTGTMLVAAMKEDGVNIWGDGSTYKGNDIERFYRYGLLTNAELQIYKPWLDTDFIDELGGRHEMSEFMIACGFDYKMSVEKAYSTDSNMLGATHEAKDLEFLNSSVKIVNPIMGVKFWDESVKIPAEEVTVRFEQGHPVALNGKTFSDDVEMMLEANRIGGRHGLGMSDQIENRIIEAKSRGIYEAPGMALLHIAYERLLTGIHNEDTIEQYHSHGRQLGKLLYQGRWFDSQALMLRDGLQRWVASQITGEVTLELRRGNDYSILNTVSDNLTYKAERLTMEKGESVFSPDDRIGQLTMRNLDITDTREKLFGYAKAGLLTASSATGLPQVENLENKAK

SEQ ID NO: 12825 - protein, 532 aa, Oceanobacillus iheyensis HTE831
MMNKRLIDWPTFIGALLILLTVVIPLILFPKAGSEVINSANRFVTGNFGILYLILGLSALIFILFVAFSRNGRIKLGGRDVKKEFGTFSWAAMLFSAGIGSSILYWAMIEWAFYYQGPPFGITPESEEAINWAASYGIFHWGPIAWALYTLPALPIAYFYYVRKKPVLKISEASRPVIGKYADGPLGVIIDILFIFGLLGGAGTTLALGTPMIAEGINHLTGIPVTLPLQAIIMIICTVIFAISSFSGINKGIKRLSDLNLWLAIFILAFVFIFGPTLFLSEMTFTSLGVIVNNFFSMATWLEPKANVPGVEGTNFPESWTVFYWAWWLVYAPFVGLFVARISRGRTIKEMILGTLIYGTLGCVLFFGILGNYGLYLQLSGSFDVIGYINEYSAPATIIAILDQLPLAWLVIPIFTVLAIVFLATTFDSASYILAAVAQKQVTKGEPLRWHRLFWAFTLMILPMTLMFIGGLETLQTASIVAGFPVIFIMILLAWSFMRASTNDLNQTKQSKSSSAIIVDVDRDQNRKEKNK

SEQ ID NO: 12826 - protein, 321 aa, Salmonella enterica subsp. arizonae serovar 62:z4,z23:--
MSDALLHAGRQTLMLELQEASRLPERLGDDFVRAANIIIHCEGKVIVSGIGKSGHIGKKIAATLASTGTPAFFVHPAEALHGDLGMIESRDVMLFISYSGGAKELDLIIPRLEDKSVALLAMTGKPHSPLGRAAKAVLDISVEREACPMHLAPTSSTVNTLMMGDALAMAVMQARGFNEEDFARSHPAGALGARLLNNVHHLMRQGDAIPQVMLATSVMDAMLELSRTGLGLVAVCDEQHVVKGVFTDGDLRRWLVSGGALTTPVSEAMTPNGITLQAQSRAIDAKELLMKRKITAAPVVDENGKLTGAINLQDFYQAGII

SEQ ID NO: 12827 - protein, 301 aa, Salmonella enterica subsp. arizonae serovar 62:z4,z23:--
MSIEKTYCGFIAIVGRPNVGKSTLLNKLLGQKISITSRKAQTTRHRIVGIHTEGPYQAIYVDTPGLHIEEKRAINRLMNKAASSSIGDVELVIFVVEGTRWTPDDEMVLNKLRDGKAPVILAVNKVDNVQEKADLLPHLQFLASQMSFLDIVPISAETGMNVDTIASIVRKHLPEATHHFPEDYITDRSQRFMASEIIREKLMRFLGAELPYSVTVEIERFVTNERGGYDINGLILVEREGQKKMVIGNKGAKIKTIGIEARKDMQEMFEAPVHLELWVKVKSGWADDERALRSLGYVDDL

SEQ ID NO: 12828 - protein, 396 aa, Salmonella enterica subsp. arizonae serovar 62:z4,z23:--
MLDAQTIATVKATIPLLVETGPKLTAHFYDRMFTHNPELKEIFNMSNQRNGDQREALFNAIAAYASNIENLPALLPAVEKIAQKHTSFQIKPEQYNIVGTHLLATLDEMFSPGQAVLDAWGKAYGVLANVFINREAEIYHENASKNGGWEGTRPFRIVAKTPCSALITSFEFEPVDGGTVAEYRPGQYLGVWLKPEGFTHQEIRQYSLTRKPDGKGYRIAVKREDGGQVSNWLHNHASVGDVVHLAAPAGDFFMNVAADTPVSLISAGVGQTPMLAMLDTLAKAQHTAQVNWFHAAENGEVHAFADEVRELGRTLPRFTAHTWYREPTETDHAQSVFDSEGLMDLRQLEAAIRAPAMQFYLCGPVGFMQFAAKQLISLGVNNENIHYECFGPHKVL

SEQ ID NO: 12829 - protein, 404 aa, Salmonella enterica subsp. arizonae serovar 62:z4,z23:--
MKLPIYLDYSATTPVDPRVAEKMMQFLTLDGTFGNPASRSHRFGWQAEEAVDIARNQIAELVGADPREIVFTSGATESDNLAIKGAANFYQKKGKHIITSKTEHKAVLDTCRQLEREGFEVTYLAPQSNGIIDLKALEAAMRDDTILVSIMHVNNEIGVVQDIATIGEMCRARGIIYHVDATQSVGKLPIDLSQLKVDLMSFSGHKIYGPKGIGALYVRRKPRIRIEAQMHGGGHERGMRSGTLPVHQIVGMGEAYRIAKEEMETEMARLRGLRNRLWNGIKDIEEVYLNGDLEQGAPNILNVSFNYVEGESLIMALKDLAVSSGSACTSASLEPSYVLRALGMNDELAHSSIRFSLGRFTTEEEIDYTIDLVRKSIGRLRDLSPLWEMYKQGVDLNSIEWAHH

SEQ ID NO: 12830 - protein, 759 aa, Salmonella enterica subsp. arizonae serovar 62:z4,z23:--
MDEQLKQSALDFHEFPVPGKIQVSPTKPLATQRDLALAYSPGVAAPCLEIEKDPLAAYKYTARGNLVAVISNGTAVLGLGNIGALAGKPVMEGKGVLFKKFAGIDVFDIEVDELDPDKFINVVAALEPTFGGVNLEDIKAPECFYIEQKLRERMNIPVFHDDQHGTAIISTAAILNGLRVVEKNISDVRMVVSGAGAAAIACMNLLVALGMQKHNIVVCDSKGVIYKGREPNMAETKAAYAVDDSGKRTLDDVIDGADIFLGCSGPKVLTQEMVKKMARAPMILALANPEPEILPPLAKEVRPDAIICTGRSDYPNQVNNVLCFPFIFRGALDVGATAINEEMKLAAVHAIAELAHAEQSEVVASAYGDQDLSFGPEYIIPKPFDPRLIVKIAPAVAKAAMDSGVATRPIADFDAYIDKLTEFVYKTNLFMKPIFSQARKDPQRVVLPEGEEARVLHATQELITLGLAKPILIGRPSVIEMRIQKLGLQIKAGVDFEIVNNESDPRFKEYWSEYYQIMKRRGVTQEQAQRAMIGNHTAIGAIMVQRGEADAMICGTIGDYHEHFGVVKAVFDYRDGVHTAGAMNALLLPSGNTFIADTYVNEDPTPEQLAEITVMAAETVRRFGIEPKVALLSHSNFGSSNSLSASKMRETLERVRERAPDLMIDGEMHGDAALVESIRNDRMPDSSLKGAANILVMPNMEAARISYNLLRVSSSEGVTVGPVLMGVSKPVHVLTPIASVRRIVNMVALAVVEAQTTPL

SEQ ID NO: 12831 - protein, 338 aa, Salmonella enterica subsp. arizonae serovar 62:z4,z23:--
MIIERARELALRAPARVVFPDALDERVLKAAHYLQQHGLARPILVASPFVLRQFALSHRMALDGIQVIAPPGNLPMRESFAQRWLARAGEKTPSDAVEKLNDPLMFAAAMVSAGDADVCIAGNLSSTANVLRAGLRVIGLQPGCQTLSSIFLMLPQYAGQALGFADCSVVPQPTAAQLADIAIASADTWRAITGEEPRVAMLSFSSNGSARHPNVANVQQATEIVRERAPQLLVDGELQFDAAFVPEVAAQKAPDSPLQGRANVMIFPSLEAGNIGYKIAQRLGGYRAVGPLIQGLAAPLHDLSRGCSVQEIIELALVAAVPRQADVSSESRLQTLVE

SEQ ID NO: 12832 - protein, 550 aa, Salmonella enterica subsp. arizonae serovar 62:z4,z23:--
MQTPYTVADYLLDRLAGCGIGHLFGVPGDYNLQFLDHVIDHPTLRWVGCANELNAAYAADGYARMSGAGALLTTFGVGELSAINGIAGSYAEYVPVLHIVGAPCSAAQQRGELMHHTLGDGDFHHFYRMSQAISAGSAILNEQNACFEIDRVLGEMVAARRPGYIMLPADVAKKTAIPPIEALTLPAHETQNGVETAFRYRARQCLMNSRRIALLADFLARRFGLRPLLQRWMAETSIAHATLLMGKGLFDEQHPNFVGTYSAGASSKAVRQAIEDADMVICVGTRFVDTLTAGFTQQLPAERTLEIQPYASRIGETWFNLPMAQAVSTLRELCLECAFAPPPTRPVCQPVQIEKGELTQENFWQTLQQYLKPGDIILVDQGTAAFGAAALSLPDGAEVVVQPLWGSIGYSLPAAFGAQTACPDRRVILIIGDGAAQLTIQEMGSMLRDGQAPIILLLNNDGYTVERAIHGAAQRYNDIASWNWTQIPQALNAAQQAECWRVTQAIQLAEVLERLARPQRLSFIEVMLPKADLPELLRTVTRALEARNGG

SEQ ID NO: 12833 - protein, 709 aa, Salmonella enterica subsp. arizonae serovar 62:z4,z23:--
MLIPTGTSVGLTSVSLGVIRAMERKGVRLSVFKPIAQPRAGGDAPDQTTTIVRANSTLPAAEPLKMSHVESLLSSNQKDVLMEEIIANYHANTKDAEVVLVEGLVPTRKHQFAQSLNYEIAKTLNAEIVFVMSQGTDTPEQLNERIELTRSSFGGAKNTNITGVIVNKLNAPVDEQGRTRPDLSEIFDDSSKAQVIKIDPAKLQESSPLPVLGAVPWSFDLIATRAIDMARHLNATIINEGDIKTRRVKSVTFCARSIPHMLEHFRAGSLLVTSADRPDVLVAACLAAMNGVEIGALLLTGGYEMDARISKLCERAFATGLPVFMVNTNTWQTSLSLQSFNLEVPVDDHERIEKVQEYVANYINADWVESLTATSERSRRLSPPAFRYQLTELARKAGKRVVLPEGDEPRTVKAAAICAERGIATCVLLGNPDEINRVAASQGVELGAGIEIVDPEVVRESYVARLVELRKSKGMTEPVAREQLEDNVVLGTLMLEQDEVDGLVSGAVHTTANTIRPPLQLIKTAPGSSLVSSVFFMLLPEQVYVYGDCAINPDPTAEQLAEIAIQSADSAIAFGIEPRVAMLSYSTGTSGAGSDVEKVREATRLAQEKRPDLMIDGPLQYDAAVMADVAKSKAPNSPVAGRATVFIFPDLNTGNTTYKAVQRSADLISIGPMLQGMRKPVNDLSRGALVDDIVYTIALTAIQASQQQQ

SEQ ID NO: 12834 - protein, 404 aa, Salmonella enterica subsp. arizonae serovar 62:z4,z23:--
MSPIEKSSKLENVCYDIRGPVLKEAKRLEEEGNKVLKLNIGNPAPFGFEAPDEILVDVIRNLPTAQGYCDSKGLYSARKAIMQHYQARGMRDVTVEDIYIGNGVSELIVQAMQALLNSGDEMLVPAPDYPLWTAAVSLSSGKAVHYLCDESSDWFPDLDDIRAKITPRTRGIVIINPNNPTGAVYSKELLMEIVNIAREHNLIIFADEIYDKILYEDAEHHSIAALAPDLLTITFNGLSKTYRVAGFRQGWMVLNGPKKHAKGYIEGLDMLASMRLCANVPAQHAIQTALGGYQSISEFILPGGRLYEQRNRAWELINDIPGVSCVKPRGALYMFPKIDAKRFNIHDDQKMVLDFLLQEKVLLVQGTAFNWPWPDHFRIVTLPREDDLEMAINRFGRFLSGYHQ

SEQ ID NO: 12835 - protein, 600 aa, Salmonella enterica subsp. arizonae serovar 62:z4,z23:--
MRKRIVIQSAMLNADILSHHKEWRMSSITMTDNKTFLNELARLVGHSHLLTDPAKTARYRKGFRSGQGDALAVVFPGSLLELWRVLNACVNADKIILMQAANTGLTEGSTPNGNDYDRDIVIISTQRLDKLHLLDSGQQVLAWPGTTLYSLEKALKPLGREPHSVIGSSCIGASVIGGICNNSGGSLVQRGPAYTEMSLFARIDEQGKLQLVNHLGIDLGHTPEQILSKLDDERIKDEDVRHDGRHAHDHDYVTRVRDINANTPARYNADPDRLFESSGCAGKLAVFAVRLDTFAAEKNQQVFYIGTNQPAVLTEIRRHILANFNNLPVAGEYMHRDIYDIAEQYGKDTFLMIDKLGTDKMPFFFTLKGRTDAMLEKVKFFRPHFTDRAMQKFGHLFPSHLPPRMKNWRDKYEHHLLLKMAGDGVAEAQRWLNEFFKSAEGGFFACTPEEGSKAFLHRFAAAGAAIRYQAVHADEVEDILALDIALRRNDTDWFEHLPPEIDSQLVHKLYYGHFMCHVFHQDYIVKKGVDVHALKAQMLELLQARGAQYPAEHNVGHLYKAPETLTRFYRQNDPTNSMNPGIGKTSKRKFWQENAPDEAH

SEQ ID NO: 12836 - protein, 355 aa, Salmonella enterica subsp. arizonae serovar 62:z4,z23:--
MSQKYLFIDRDGTLISEPPSDFQVDSFYKLAFEPEVIPVLLTLQKAGFKLVMITNQDGLGTQSFPQADFDGPHNLMMQIFTSQGIHFDDVLICPHLPAEDCDCRKPKVKLVERYLAEHAMDSANSYVIGDRATDIQLADNMGITGLRYHRETLNWSMIGKQLTKRDRYVHVARNTKETQIDVSVWLDREGNSKINTGVGFFDHMLDQIATHGGFRMEITVKGDLYIDDHHTVEDTGLALGEALKLALGDKRGICRFGFVLPMDECLARCALDISGRPHLEYKAEFTYQRVGDLSTEMIEHFFRSLSYTMGVTLHLKTKGKNDHHRVESLFKAFGRTLRQAIRVEGDTLPSSKGVL

SEQ ID NO: 12837 - protein, 428 aa, Salmonella enterica subsp. arizonae serovar 62:z4,z23:--
MMGLAYMQPMTLFDTFGIVSGLTDGHVPTAYAFALIAILFTALSYGKLVRRYPSAGSAYTYAQKSISPTVGFMVGWSSLLDYLFAPMINILLAKIYFEALVPSIPSWVFVVALVAFMTAFNLRSLKSVANFNTVIVVLQVVLIAVILGMVVYGVFEGEGAGTLASTRPFWSGDAHVIPMITGATILCFSFTGFDGISNLSEETKDAERVIPRAIFLTALIGGLIFIFATYFLQLYFPDISRFKDPDASQPEIMLYVAGKAFQVGALIFSTITVLASGMAAHAGVARLMYVMGRDGVFPKSFFGYVHPKWRTPAMNIILVGAIALLAINFDLVMATALINFGALVAFTFVNLSVISQFWIREKRNKTLKDHFQYLFLPMCGALTVGALWVNLEESSMVLGLIWAGIGLIYLACVTKSFRNPVPQYEDVA

SEQ ID NO: 12838 - protein, 404 aa, Salmonella enterica subsp. arizonae serovar 62:z4,z23:--
MTHNIMAINAGSSSLKFQLLAMPQGDMRCQGLIERIGMADAQVTIKTLSQKWQETVPVADHRDAVTLLLEKLLGYQIINSLRDIDGVGHRVAHGGEFFKDSTLVTDETLAQIERLAELAPLHNPVNALGIHVFRQLLPDAPSVAVFDTAFHQTLDEPAYIYPLPWRYYAELGIRRYGFHGTSHKYVSGALAEKLGVPLSALRVICCHLGNGSSVCAIKNGHSVNTSMGFTPQSGVMMGTRSGDIDPSILPWIAQRESKTPQQLNQLLNNESGLLGVSGVSSDYRDVEQAADTGNRQAKLALTLFAERIRATIGSYIMQMGGLDALVFTGGIGENSACARSAVCHNLQFLGLAVDEEKNQRNATFIQTENALVKVAVINTNEELMIAQDVMRIALPATEGLCVPA

SEQ ID NO: 12839 - protein, 70 aa, Salmonella enterica subsp. arizonae serovar 62:z4,z23:--
MTTKITGLVKWFNPEKGFGFITPKDGSKDVFVHFSAIQSNDFRTLNENQEVEFSVEQGPKGPSAVDVVAL

SEQ ID NO: 12840 - protein, 475 aa, Salmonella enterica subsp. arizonae serovar 62:z4,z23:--
MAMSRLVVVSNRIAPPDNKGGAGGLAVGVLGALKAAGGLWFGWSGETGNEDEPLKKVTKGNITWASFNLSEQDYEDYYCQFSNAVLWPAFHYRLDLVQFQRPAWEGYMRVNALLADKLLPLIKENDIIWVHDYHLLPFASELRKRGVNNRIGFFLHIPFPTPEIFNALPPHDELLEQLCDFDLLGFQTENDRLAFLDSLSSQTRVTTRSGKHHIAWGKDFQTEVYPIGIEPDEIALQAAGPLPPKLVQLKAELKNVKNIFSVERLDYSKGLPERFLAYEALLENYPQHRGKIRYTQIAPTSRGEVQAYQDIRHQLETEAGRINGRYGQLGWTPLYYLNQHFDRKLLMKIFRYSDVGLVTPLRDGMNLVAKEFVAAQDPANPGVLVLSQFAGAANELTSALIVNPYDRDDVAAALNRALTMPLAERISRHAEMLDVIVKNDINRWQERFIHDLKEVTPRSAERRQQNNVATFPKLA

SEQ ID NO: 12841 - protein, 192 aa, Salmonella enterica subsp. arizonae serovar 62:z4,z23:--
MDTSRLTLDHFLSRFQLLRPQITHETLNQRQAAVLIPVVRRPQPGLLLTQRAVHLRKHAGQVAFPGGAVDSSDASLIAAALREAQEEVAIPPEAVEVIGVLPPIDSVTGFQVTPVVGIIPSDLPWRASEDEVSAVFEMPLAQALHLGRYHPIDVYRRGNSHRVWLSWYEHYFVWGMTASIIRELALQIGVKP

SEQ ID NO: 12842 - protein, 337 aa, Salmonella enterica subsp. arizonae serovar 62:z4,z23:--
MRNHKQRDRVLNLPAGYFGIVLGTIGMGFAWRYASQIWAISHWPGDIMVILAMIIWALLTLAFLSRLVRFPHSVMAEVRHPVMSSFVSLFPATTMLVAIGFVPWYRPLAVALFSVGVVIQLAYAAWQTAGLWRGAHPEEATTPGLYLPTVANNFISAMACGALGYNDAGLVFLGAGVFSWLSLEPVILQRLRSCGELPAVLRTSLGIQLAPALVACSAWLSVNGGEGDTLAKMLFGYGLLQLLFMLRLMPWYLSQPFNASFWSFSFGVSALATTGLHLGHGSESGLFHILAVPLFIFTNAIIALLLVRTFLLLVQGKLLIRTERAALLKTEEKNDRS

SEQ ID NO: 12843 - protein, 509 aa, Salmonella enterica subsp. arizonae serovar 62:z4,z23:--
MRIGIPKERLPNETRVAATPKTVEQLLKLGFSVAIESGAGQLASFDDKAFAQAGADIVDGNAIWQSEIILKVNAPEEDEIALLNPGTTLVSFIWPAQNPGLMEKLAERKVTVMAMDSVPRISRAQSLDALSSMANIAGYRAIVEAAHEFGRFFTGQITAAGKVPPAKVMVIGAGVAGLAAIGAANSLGAIVRAFDTRPEVKEQVQSMGAEFLELDFKEEAGSGDGYAKVMSEAFIKAEMALFAAQAKEVDIIVTTALIPGKPAPKLITRDMVDSMKAGSVIVDLAAQNGGNCEYTVANQVVTTDNGVKVIGYTDLPGRLPTQSSQLYGTNLVNLLKLLCKEKDGNIDVDFDDVVIRGVTVIRDGDVTWPAPPIQVSAQPQAAPKAAPAPKEPGKPASPWRKYALMALAIILFGWLADVAPKEFLGHFTVFALACVVGYYVVWNVSHALHTPLMSVTNAISGIIVVGALLQIGQGGWVSFLSFIAVLIASINIFGGFTVTQRMLKMFRKN

SEQ ID NO: 12844 - protein, 115 aa, Salmonella enterica subsp. arizonae serovar 62:z4,z23:--
MSTTIEKIQRQIAENPILLYMKGSPKLPSCGFSAQAVQALSACGERFAYVDILQNPDIRAELPKYANWPTFPQLWVDGELVGGCDIVIEMYQRGELQQLIKETAAKYKTQEPDAG

SEQ ID NO: 12845 - protein, 248 aa, Salmonella enterica subsp. arizonae serovar 62:z4,z23:--
MLNIKGLHVSVEEKAILRGLNLEVRPGEVHAIMGPNGSGKSTLSATLAGREEYEVTGGSVTFNGKDLLELSPEERAGEGIFMAFQYPVEIPGVSNQFFLQTALNAVRAYRGQASLDRFDFQDLMEEKIALLKMPEDLLTRSVNVGFSGGEKKRNDILQMAVLEPELCILDESDSGLDIDALKIVAEGVNALRDDKRAFIIVTHYQRILDYIKPDYVHVLYQGRIVRSGDFTLVKQLEEQGYGWLTEQQ

SEQ ID NO: 12846 - protein, 582 aa, Salmonella enterica subsp. arizonae serovar 62:z4,z23:--
MHNDKDLSTWQTFRRLWPTIAPFKAGLIVAGIALILNAASDTFMLSLLKPLLDDGFGKTDRSVLLWMPLVVIGLMVLRGITSYVSSYCISWVSGKVVMTMRRRLFGHMMGMPVAFFDKQSTGTLLSRITYDSEQVASSSSGALITVVREGASIIGLFIMMFYYSWQLSIILVVLAPIVSIAIRVVSKRFRSISKNMQNTMGQVTTSAEQMLKGHKEVLIFGGQEVETKRFDKVSNKMRLQGMKMVSASSISDPVIQLIASLALAFVLYAASFPSVMDSLTAGTITVVFSSMIALMRPLKSLTNVNAQFQRGMAACQTLFAILDSEQEKDEGKRVIERATGDLEFRDVTFTYPGREVPALRNINLKIPAGKTVALVGRSGSGKSTIASLITRFYDIDEGHILMDGHDLREYTLASLRNQVALVSQNVHLFNDTVANNIAYARTEEYSREQIEEAARMAYAMDFINKMDNGLDTIIGENGVLLSGGQRQRIAIARALLRDSPILILDEATSALDTESERAIQAALDELQKNRTSLVIAHRLSTIEQADEIVVVEDGIIVERGTHSELLAQHGVYAQLHKMQFGQ

SEQ ID NO: 12847 - protein, 285 aa, Salmonella enterica subsp. arizonae serovar 62:z4,z23:--
MKADNPFDLLLPAAMAKVAEEAGVYKATKHPLKTFWLAITAGVFISIAFVFYITATTGTGAMPYGIAKLIGGICFSLGLILCVICGADLFTSTVLIVVAKASGRITWGQLAKNWLNVYFGNLIGALLFVLLMWLSGEYMTANGQWGFNVLQTADHKMHHTFIEAVCLGILANLMVCLAVWMSYSGRSLMDKAFIMVLPVAMFVASGFEHSIANMFMIPMGIVIRDFATPEFWTAVGSSPESFSHLTVTSFITDNLIPVTIGNIIGGGLLVGLTYWVIYLRGNDHH

SEQ ID NO: 12848 - protein, 555 aa, Salmonella enterica subsp. arizonae serovar 62:z4,z23:--
MSEAEARPTNFIRQIIDEDLASGKHTTVHTRFPPEPNGYLHIGHAKSICLNFGIAQDYQGQCNLRFDDTNPVKEDIEYVDSIKNDVEWLGFHWSGDIRYSSDYFDQLHAYAVELINKGLAYVDELTPEQIREYRGTLTAPGKNSPFRDRSVEENLALFEKMRTGGFEEGKACLRAKIDMASPFIVMRDPVLYRIKFAEHHQTGTKWCIYPMYDFTHCISDALEGITHSLCTLEFQDNRRLYDWVLDNITIPVHPRQYEFSRLNLEYTVMSKRKLNLLVTDNHVEGWDDPRMPTISGLRRRGYTAASIREFCKRIGVTKQDNTIEMASLESCIREDLNENAPRAMAVIDPVKLVIENYPQGESEMVTMPNHPNKLEMGSREVPFSGEIWIDRADFREEANKQYKRLVMGKEVRLRNAYVIKAERVEKDAEGNITTIFCTYDADTLSKDPADGRKVKGVIHWVSAAHALPIEIRLYDRLFSVPNPGAAEDFLSVINTESLVIKQGYGEPSLKAAVAGKAFQFEREGYFCLDSRYATADKLVFNRTVGLRDTWAKAGE

SEQ ID NO: 12849 - protein, 554 aa, Salmonella enterica subsp. arizonae serovar 62:z4,z23:--
MCSIFGIFDIKTDAVELRKKALELSRLMRHRGPDWSGIYACDNAILAHERLSIVDVNAGAQPLYNEKKTHVLTVNGEIYNHQALRAEYGDRYHFQTGSDCEVILALYQEKGPAFLDDLQGMFAFALYDSEKNAYLIGRDHIGIIPLYMGYDEFGNFYVASEMKALTPVCRTIKEFPAGSYLWSKDGEIRQYYQRDWFEFDAVKDNVTDKNALRQALEESVKSHLMSDVPYGVLLSGGLDSSIISAITKKFAARRVEDQEQTEAWWPQLHSFAVGLEGSPDLKAAQEVANHLGTVHHEIHFTVQEGLDAIRDVIYHIETYDVTTIRASTPMYLMSRKIKAMGIKMVLSGEGSDEVFGGYLYFHKAPNAKELHEETVRKLQALHMYDCARANKAMSAWGVEARVPFLDKKFLDVAMCINPQDKMCGNGKMEKHVLRECFELYLPASVAWRQKEQFSDGVGYSWIDTLKEVAAKQISDQQLETARFRFPYNTPSSKEAYLYREIFEELFPVPSAAECVPGGPSVACSSAKAIEWDEAFKTMDDPSGRAVGVHQSAYQ

SEQ ID NO: 12850 - protein, 386 aa, Salmonella enterica subsp. arizonae serovar 62:z4,z23:--
MRNNPLIPQSKLPSLGTTIFTQMSVLAQKYQAINLSQGFPDFDCPRYLQERLAYYVAQGANQYAPMMGAQALREAIADKTAELYGYRPDDACDIIVTAGATEALYAAITALVRKGDEVICFDPSYDSYAPAVELSGGVLKRIMLAPPHFSVDWQAFSELLSERTRLVILNTPHNPTATVWRQADIEALWQAIGEREIYVLSDEVYEHICFAAEGHASVLAHPQLRERAVVVSSFGKTFHMTGWKIGYCVAPAAISAEIRKIHQYLTFCVNTPAQLALADMLRAAPEHYRALPDFYRKKRDVLVNALAQSRLKVLPCEGTYFLLIDYSAVSTLNDVEFCQWLTKDVGVAAIPLSVFCAAPFPHQLIRLCFAKQELTLLAAADRLCKL

SEQ ID NO: 12851 - protein, 362 aa, Salmonella enterica subsp. arizonae serovar 62:z4,z23:--
MNNTEIRVVTGPANYFSHSGSLGRVTDFFTPEQLSHAVWLYGERAITAARPYLPEAFECAGAKHLRFTGHCSEGHVAQLAHACGNDRQVVIGVGGGALLDTAKALAHRLTLPFVAIPTIAATCAAWTPLSVWYNDAGQALQFEIFDDANFLVLVEPRIILQAPDDYLLAGIGDTLAKWYEAVVLAPQPETLPLTVRLGINSACAIRDLLLASSEQALADKQQRRLTQAFCDVVDAIIAGGGMVGGLGERYTRVAAAHAVHNGLTVLPQTEKFLHGTKVAYGILVQSALLGQDEVLAQLIAAYRRFHLPTRLADLAVDIKNHADIDKVIAHTLRPVESIHFLPIALMPQTLRAAFEKVETFNV

SEQ ID NO: 12852 - protein, 464 aa, Salmonella enterica subsp. arizonae serovar 62:z4,z23:--
MKNASTASGASVSDAASKNEPTLQRGLQNRHIQLIALGGAIGTGLFLGIGPAIQMAGPAVLLGYGVAGIIAFLIMRQLGEMVVEEPVSGSFAHFAWKYWGPFAGFLSGWNYWVMFVLVGMAELTAAGIYMQYWLPDVPTWIWAAAFFIIINAVNLVNVRLYGETEFWFALIKVLAIIGMIGFGLWLLFSGHGGEHASIDNLWRYNGFFATGWHGLLLSLAVIMFSFGGLELIGITAAEARDPQKSIPKAVNQVVYRILLFYIGSLVVLLALYPWVEVKSNSSPFVMIFHNLDSNVVASALNFVILVASLSVYNSGVYSNSRMLFGLSIQGNAPKFLTRVSHRGVPVNSLMLSGAITSLVVLINYLLPQKAFSLLMALVVATLLLNWIMICLAHLRFRAAMRRQGRETQFKALLYPAGNYLCIAFLALILVLMCTIDDMRLSAILLPVWVVFLFIAFNVLRRKAP

SEQ ID NO: 12853 - protein, 510 aa, Salmonella enterica subsp. arizonae serovar 62:z4,z23:--
MVDANGSDGDPGDYLGSLGGSTGDFQRSLKSLTYVYTTGLNAPWFFIVLIGLKLMESNNKLKRGLSTRHIRFMALGSAIGTGLFYGSADAIKMAGPSVLLAYIIGGVAAYIIMRALGEMSVHNPAASSFSRYAQENLGPLAGYITGWTYCFEILIVAIADVTAFGIYMGVWFPAVPHWVWVLSVVLIICAINLMSVKIFGELEFWFSFFKVATIIIMIAAGIGIIVWGIGNGGQPTGIHNLWSNGGFFSNGWLGMIMSLQMVMFAYGGIEIIGITAGEAKDPEKSIPRAINSVPMRILVFYVGTLFVIMSIYPWNQVGTDGSPFVLTFQHMGITFAASILNFVVLTASLSAINSDVFGVGRMLHGMAEQGSAPKIFAKTSRRGIPWVTVLVMTIALLFAVYLNYIMPENVFLVIASLATFATVWVWIMILLSQIAFRRRLPLEEVKALKFKVPGGVATTIAGLIFLVFIIALIGYHPDTRISLYVGFAWIVLLLIGWTFKRRRDRRLAQA

SEQ ID NO: 12854 - protein, 188 aa, Salmonella enterica subsp. arizonae serovar 62:z4,z23:--
MAKSVPAIFLDRDGTINVDHGYVHEIDSFEFIDGVIDAMRELKKMGYALVVVTNQSGIARGKFTEAQFETLTEWMDWSLADRDVDLDGIYYCPHHPQGCIEELRQACDCRKPHPGMLLAARDFLHIDMAASYMVGDKLEDMQAAAEANVGTKVLVRTGKPVTAAAENAADWVLNSLADLPSAIKKQQK

SEQ ID NO: 12855 - protein, 713 aa, Salmonella enterica subsp. arizonae serovar 62:z4,z23:--
MNIIAIMGPRGVYYKDEPIKELERALQSLGFQIIWPQNSVDLLKFIEHNPRICGVIFDWDEYSLDLCSDINQLNEYLPLYAFINTNSTLDVSVHDMRMALWFFEYALGQAEDIATRIHQYTNEYLDNITPPFTKALFTYAKEGKYTFCTPGHMAGTAYQKSPAGCLFYDFFGGNTLKADVSISVTELGSLLDHTGPHLEAEEYIARTFGAEQSYMVTNGTSTSNKIVGMYAAPAGSTLLIDRNCHKSLAHLLMMSDVVPLWLKPTRNALGILGGIPKREFTRDSIARKVAETAQAQWPVHAVITNSTYDGLLYNTNWLKQMLDVPSIHFDSAWVPYTHFHPIYQGKSGMSGERVPGKVIFETQSTHKMLAAFSQASLIHIKGEYDEETFNEAFMMHTSTSPSYPIVASIETAAAMLRGNAGRRLINRSVERALHFRKEVRRLREESDSWFFDIWQPEEVDEAECWPVAQGETWHGFTDADDDHMFLDPVKVTILTPGMDEQGNMSEEGIPAALVAKFLDERGVVVEKTGPYNLLFLFSIGIDKTRAMGLMRGLTEFKRAYDLNLRVKNMLPDLYAEDPDFYRNMRIQDLAQGIHKLIRQHDLPGLMLRAFDVLPEMIMTPHQAWQRQIKGEVETVALDQLPGRVSANMILPYPPGVPLLMPGERISKESRAVLDFLQMLCSIGQHYPGFETDIHGAKQNEDGVYQVRVLKHAC

SEQ ID NO: 12856 - protein, 126 aa, Salmonella enterica subsp. arizonae serovar 62:z4,z23:--
MIRTMLQGKLHRVKVTQADLHYEGSCAIDQDFLDAAGILENEAIDIWNVSNGKRFSTYAIAAERGSKIISVNGAAAHCASVGDIVIIASFVTMSDEEARTWHPNVAYFEGDNEMKRTAKAIPVQVA

SEQ ID NO: 12857 - protein, 457 aa, Salmonella enterica subsp. arizonae serovar 62:z4,z23:--
MMDSQQHGEQLKRGLKNRHIQLIALGGAIGTGLFLGSASVIQSAGPGIILGYAIAGFIAFLIMRQLGEMVVEEPVAGSFSHFAYKYWGGFAGFASGWNYWVLYVLVAMAELTAVGKYIQFWWPEIPTWASAALFFVVINAINLTNVKVFGEMEFWFAIIKVIAVIAMILFGAWLLFSDTAGPQATVRNLWEQGGFLPHGWTGLVMMMAIIMFSFGGLELVGITAAEADNPEQSIPKATNQVIYRILIFYIGSLAVLLSLLPWARVTADTSPFVLIFHELGDTFVANALNIVVLTAALSVYNSCVYCNSRMLFGLAQQGNAPKALLSVDKRGVPVNTILLSAIVTALCVLINYLAPESAFGLLMALVVSALVINWAMISLAHMKFRRAKQQQGVKTRFPALFYPLGNVLCLLFMAAVLLIMLMTPGMAISVWLIPVWLLILGVGYVCKEKTAKVVKAH

SEQ ID NO: 12858 - protein, 572 aa, Salmonella enterica subsp. arizonae serovar 62:z4,z23:--
MLSGAEMVVRSLIDQGVKQVFGYPGGAVLDIYDALHTVGGIDHVLVRHEQAAVHMADGLARATGDIGVVLVTSGPGATNAITGIATAYMDSIPLVILSGQVATSLIGYDAFQECDMVGISRPVVKHSFLVKHTEDIPQVLKKAFWLAASGRPGPVVVDLPKDILNPAKKMPYAWPETVSMRSYNPTTSGHKGQIKRALQTLASAKQPVVYVGGGAISAACYAPLRQIIETFNLPVVSSLMGIGAFPATHRQSLGMLGMHGTYEANMTIHNADVIFAVGVRFDDRATNNLAKYCPNATVLHIDIDPTSISKTVNADIPVVGDARVVLEQMLELLAQDTPSQPRDDIRDWWQQIERWRARQCLKYDAESESIKPQAVIETLWRLTKGDAYVTSDVGQHQMFAALYYPFDKPRRWINSGGLGTMGFGLPAALGVKMALPKEMVVCVTGDGSIQMNIQELSTALQYELPVLVLNLNNRYLGMVKQWQDMIYSGRHSQSYMQSLPDFVRLAEAYGHVGLQINRPDELESKLSEALEHVRNNRLVFVDVTVDGSEHVYPMQIRGGGMDEMWLSKTERT

SEQ ID NO: 12859 - protein, 505 aa, Salmonella enterica subsp. arizonae serovar 62:z4,z23:--
MKTDKKKSGIEPKVFFPPLIIVGILCWLTVRDLDAANNVINAVFSYVTNIWGWAFEWYMVVMLIGWFWLVFGPYAKKKLGDEPPEFSTTSWIFMMFASCTSAAVLFWGSIEIYYYISTPPFGLAPNSTGAKEIGLAYSLFHWGPLPWATYSFLSVAFAYFFFVRKMDVIRPSSTLVPLVGEKHAKGLFGTIVDNFYLVALIFAMGTSLGLATPLVTECMQYLFGIPHTLELDAIIITCWIILNAICVACGLQKGVRIASDVRSYLSFLMLGWVFIVSGASFIMNYFTDSVGTLLMYLPRMLFYTDPIGKSGFPQSWTVFYWAWWVIYAIQMSIFLARISRGRTVRELCFGMVLGLTASTWILWTVLGSNTLLLMDKNILNIPQLIDQHGVARAIIETWAALPLSTATMWGFFILCFIATVTLINACSYTLAMSTCREVRDGEEPPLLVRIGWSVLVGIIGIVLLALGGLKPIQTAIIAGGCPLFFVNIMVTLSFIKDAKTHWKDK

SEQ ID NO: 12860 - protein, 638 aa, Salmonella enterica subsp. arizonae serovar 62:z4,z23:--
MGKIIGIDLGTTNSCVAIMDGMQARVLENAEGDRTTPSIIAYTQDGETLVGQPAKRQAVTNPQNTLFAIKRLIGRRFQDEEVQRDVSIMPYKIIEADNGDAWLDVKGQKMAPPQISAEVLKKMKKTAEDYLGEPVTEAVITVPAYFNDAQRQATKDAGRIAGLEVKRIINEPTAAALAYGLDKEVGNRTIAVYDLGGGTFDISIIEIDEVDGEKTFEVLATNGDTHLGGEDFDTRLINYLVDEFKKDQGIDLRNDPLAMQRLKEAAEKAKIELSSAQQTDVNLPYITADATGPKHMNIKVTRAKLESLVEDLVNRSIEPLKVALQDAGLSVSDINDVILVGGQTRMPMVQKKVAEFFGKEPRKDVNPDEAVAIGAAVQGGVLTGDVKDVLLLDVTPLSLGIETMGGVMTPLISKNTTIPTKHSQVFSTAEDNQSAVTIHVLQGERKRASDNKSLGQFNLDGINPAPRGMPQIEVTFDIDADGILHVSAKDKNSGKEQKITIKASSGLNEEEIQKMVRDAEANAESDRKFEELVQTRNQGDHLLHSTRKQVEEAGDKLPADDKTAIESALSALETALKGEDKAAIEAKMQELAQVSQKLMEIAQQQHAQQQAGSADASANNAKDDDVVDAEFEEVKDKK

SEQ ID NO: 12861 - protein, 469 aa, Salmonella enterica subsp. arizonae serovar 62:z4,z23:--
MVDQVKVAADEQATAEQSLRRNLTNRHIQLIAIGGAIGTGLFMGSGKTISLAGPSIIFVYMIIGFMLFFVMRAMGELLLSNLEYKSFSDFASDLLGPWAGYFTGWTYWFCWVVTGMADVVAITAYAQFWFPGLSDWVASLAVVILLLSLNLATVKMFGEMEFWFAMVKIVAIVALIVVGLVMIAMHFKSPTGVEASFAHLWNDGGWFPKGISGFFAGFQIAVFAFVGIELVGTTAAETKDPEKSLPRAINSIPIRIIMFYVFALIVIMSVTPWSSVVPNKSPFVELFMLVGLPAAASVINFVVLTSAASSANSGVFSTSRMLFGLAQEGVAPKAFAKLSKRAVPAKGLTFSCICLLGGVVMLMVNPSVIGAFTMITTVSAILFMFVWTIILCSYLAYRKKRPHLHEKSIYKMPLGKLMCWVCMAFFVFVLVLLTLEDDTRQALMVTPLWFIALGLGWLLIGKKRMAGMR

SEQ ID NO: 12862 - protein, 445 aa, Salmonella enterica subsp. arizonae serovar 62:z4,z23:--
MSSDADAHKVGLIPVTLMVSGNIMGSGVFLLPANLAATGGIAIYGWLVTIIGALALSMVYAKMSSLDPSPGGSYAYARRCFGPFLGYQTNVLYWLACWIGNIAMVVIGVGYLSYFFPILKDPLVLTLTCVAVLWIFVLLNIVGPKMITRVQAVATVLALVPIVGIAVFGWFWFKGETYMAAWNVSGMNTFGAIQSTLNVTLWSFIGVESASVAAGVVKNPKRNVPIATIGGVLIAAICYVLSTTAIMGMIPNAALRVSASPFGDAARMALGDTAGAIVSFCAAAGCLGSLGGWTLLAGQTAKAAADDGLFPPIFARVNKAGTPVAGLLIVGVLMTIFQFSSMSPNAAKEFGLVSSVSVIFTLVPYLYTCAALLLLGHGHFGKARPLYLAITFIAFIYCIWAVVGSGAKEVMWSFVTLMVITALYALNYNRIHKNPYPLDAPVKQD

SEQ ID NO: 12863 - protein, 449 aa, Salmonella enterica subsp. arizonae serovar 62:z4,z23:--
MTEIVVSKFGGTSVADFDAMNRSADIVLSDANVRLVVLSASAGITNLLVALAEGLEPSERFATLDAIRKIQFDIIERLRHPNVIREEIERLLENITILAEAASLATSAALTDELVSHGELMSTLLFVEILRERDVQAHWFDVRKVMRTSDRFGRAEPDVAALAELAAQQLLPRLNETLVITQGFIGGESKGRTTTLGRGGSDYTAALLAEALHAARVDIWTDVPGIYTTDPRVVSVAQRIAEIDFEEAAEMATFGAKVLHPATLLPAVRSDIPVFVGSSKDPKAGGTLVCNKTQNPPLFRALALRRNQTLLTLHSLNMLHSRGFLAEVFGILARHNISVDLITTSEVSIALTLDTTGSTSTGDTLLTQSLLMELSALCRVEVEEGLALIALIGNNLSKACGVGKEVFGVLEPFNIRMICYGASSHNLCFLVPGEDAEQVVQKLHHNLFE

SEQ ID NO: 12864 - protein, 441 aa, Salmonella enterica subsp. arizonae serovar 62:z4,z23:--
MIRGKIDILVVDDDVSHCTILQALLRGWGYNVALAYSGHDALAQVREKVFDLVLCDVRMAEMDGIATLKEIKLLNPAIPILIMTAFSSVETAVEALKAGALDYLIKPLDFDHLQETLEKALAHTRETGAELPSASATQFGMIGSSPAMQHLLNEIAMVAPSDATVLIHGDSGTGKELVARALHACSARSDKPLVTLNCAALNESLLESELFGHEKGAFTGADKRREGRFVEADGGTLFLDEIGDISPLMQVRLLRAIQEREVQRVGSNQTISVDVRLIAATHRDLAEEVSAGRFRQDLYYRLNVVAIEMPSLRQRREDIPLLADHFLRRFAERNRKVVKGFTPQAMDLLIHYDWPGNIRELENAIERAVVLLTGEYISERELPLTIAATPIKTENSAGIQPLVDVEKEVILAALEKTGGNKTEAARQLGITRKTLLAKLSR

SEQ ID NO: 12865 - protein, 220 aa, Salmonella enterica subsp. arizonae serovar 62:z4,z23:--
MELYLDTANVAEVERLARIFPIAGVTTNPSIVAASKESIWDVLPRLQNAIGEEGTLFAQTMSRDAKGMVEEAKRLNNAIPGIVVKIPVTAEGLAAIKQLKKEGIVTLGTAVYSASQGLLAALAGAKYVAPYVNRVDAQGGDGIRMVQELQTLLERHAPDSMVLAASFKTPRQALDCLLAGCQAITLPLDVAQQMLNTPAVESAIEKFEQDWKNAFGNLNL

SEQ ID NO: 12866 - protein, 367 aa, Salmonella enterica subsp. arizonae serovar 62:z4,z23:--
MDRIIQSPGKYIQGANVIARLGDYLKPMANNWLVVGDKFVLGFAEETLRKSLTDAGLSVEIAPFGGECSQNEIDRLRAVAEKSQCGAVLGIGGGKTLDTAKALAHFMNVPVAIAPTIASTDAPCSALSVIYTDAGEFDRYLLLPHNPNMVIVDTQIVAGAPARLLAAGIGDALATWFEARACSRSGATTMAGGKCTQAALALAELCYNTLIEEGEKAMLAAEQHVVTPALERVIEANTYLSGVGFESGGLAAAHAIHNGLTAIPDAHHYYHGEKVAFGTLTQLVLENAPVEEIETVAALCHSVGLPITLAQLDIKQDIPAKMRTVAEAACAEGETIHNMPGGVTPDEVYAALLVADQYGQRFLQEWE

SEQ ID NO: 12867 - protein, 810 aa, Salmonella enterica subsp. arizonae serovar 62:z4,z23:--
MSVIAQAGAKGRQLHKFGGSSLADVKCYLRVAGIMAEYSQPDDMMVVSAAGSTTNQLISWLKLSQTDRLSAHQVLQTLRRYQCDLISGLLPADAADDLTSAFISDLERLAALLDGGVTDAVYAEIVGHGEIWSARLMSAVLNQQGLEAAWLDARAFLRAERAAQPQVDEGLSYPLLQQLLAQHPGKRLVVTGFISRNHDGETVLLGRNGSDYSATQIGALAGVSRVTIWSDVAGVYSADPRKVKDACLLPLLRLDEASELARLAAPVLHARTLQPVSGSDIDLQLRCSYTPDQGSTRIERVLASGTGARIVTSHDDICLIEFQVPASQDFRLAHKELDHILKRAQARPLAVGVHRDRQLLQFCYTAEVADSVLKLLDDVGLPGELRLRQGLALVAMVGAGVTRNPLHCHRFWQQLKGQPVEFTWQSEEGISLVAVLRTGPTESLIQGLHQSIFRAEKRIGLMLFGKGNIGSRWLELFAREQSTLSARTGFEFVLAGVVDSRRSLLSYDGLDASRALAFFDDEAVEQDEESLFLWMRAHPYDDLVVLDVTASEQLADQYLDFASHGFHVISANKLAGASASDKYRQIHDAFEKTGRYWLYNATVGAGLPINHTVRDLIDSGDTILSISGIFSGTLSWLFLQFDGTVPFTDLVDQAWQQGLTEPDPRVDLSGKDVMRKLVILAREAGYDIEPDQVRVESLVPAHCEEGSIDHFFENGDALNEQMVQRLEAARELGLVLRYVARFDANGKARVGVEAVRPEHPLAALLPCDNVFAIESRWYRDNPLVIRGPGAGRDVTAGAIQSDINRLAQLL

SEQ ID NO: 12868 - protein, 298 aa, Salmonella enterica subsp. arizonae serovar 62:z4,z23:--
MAVIAFIGLGQMGSPMASNLLKQGHQLSVFDVNPDAVQRLVDKGAQPASSPAQATIGAEFVITMLPNGDLVRSVLFGEQGVCETLSREALVIDMSTIHPLQTDKLIADMQSKGFSMMDVPVGRTSDNAITGTLLLLAGGTAEQVERATPVLMAMGNELVNTGGPGMGIRVKLINNYMSIALNALSAEAAVLCEALGLSFDVALKVMNGTAAGKGHFTTTWPNKVMKGDLSPAFMIDLAHKDLGIALDVANQLHVPMPLGAASREVYNLARAAGRGREDWSAILEQVRISAGLTANVKK

SEQ ID NO: 12869 - protein, 548 aa, Salmonella enterica subsp. arizonae serovar 62:z4,z23:--
MNGAQWVVHALRAQGVKTVFGYPGGAIMPVYDALYDGGVEHLLCRHEQGAVMAAIGYARSTGKTGVCIATSGPGATNLITGLADALLDSVPVVAITGQVSAPFIGTDAFQEVDVLGLSLACTKHSFLVQSLAELPRIMAEAFEVANAGRPGPVLVDIPKDIQLASGALEPYFTTVTNEAMFPQAAVEKARTMLSQAQKPILYVGGGVGMAQAVPALREFIALTQMPVTCTLKGLGAVEADYPYYMGMLGMHGAKAANYAVQQCDLLIAVGARFDDRVTGKLNTFAPNASVIHLDIDPAELNKLRQAHVALQGDLNTLLPALQQPLAIDEWRRHNAAMRSEHAWRYDHPGEAIYAPLLLKLLSERKPADCVVTTDVGQHQMWSAQHMTYSRPENFITSSGLGTMGFGLPAAVGAQVARPNDTVICISGDGSFMMNVQELGTVKRKQLPLKIVLLDNQRLGMVRQWQQLFFQERYSETTLTDNPDFLMLASAFGIPGQHITRKDQVEAALDTMLASEGPYLLHVSIDELENVWPLVPPGASNSEMLEKLS

SEQ ID NO: 12870 - protein, 350 aa, Salmonella enterica subsp. arizonae serovar 62:z4,z23:--
MNSDLILLLNHRQQDAGVKIMKTAYIAKQRQISFVKSHFSRQLEERLGLIEVQAPILSRVGDGTQDNLSGCEKAVQVKVKALPDAQFEVVHSLAKWKRQTLGQHDFSAGEGLYTHMKALRPDEDRLSPLHSVYVDQWDWERVMGDGERQFSTLKSTVEAIWAGIKATEAEVHKQFGLAPFLPERIHFVHSQDLLSRYPDLDAKGRERAIVKALGAVFLVGIGGTLSDGKRHDVRAPDYDDWSSASELGYAGLNGDILVWNPVLEDAFELSSMGIRVDADTLMRQLQLTGDEDRLQLEWHQALLRGEMPQTIGGGIGQSRLTMLLLQLPHIGQVQCGVWPAQVRESIPAIL

SEQ ID NO: 12871 - protein, 548 aa, Salmonella enterica subsp. arizonae serovar 62:z4,z23:--
MDSQRNLLVIALLFVSFMIWQAWEQDKNPQPQTQQTTQTTTTAAGSAADQGVPASGQGKLITVKTDVLDLTINTRGGDVEQALLPAYPKELGSSEPFQLLETTPQFIYQAQSGLTGRDGPDNPANGPRPLYNVEKDAFVLADGQNELQVPMTYTDAAGNTFTKTFVFKRGDYAVNVNYSVQNTGEKPLEISTFGQLKQSINLPPHRDTGSSNFALHTFRGAAYSTPDEKYEKYKFDTIADNENLNVSSKGGWVAMLQQYFATAWIPRNDGTNNFYTANLGNGIVAIGYKAQPVLVQPGQTGAMTSTLWVGPEIQDKMAAVAPHLDLTVDYGWLWFISQPLFKLLKWIHSFVGNWGFSIIIITFIVRGIMYPLTKAQYTSMAKMRMLQPKIQAMRERLGDDKQRQSQEMMALYKAEKVNPLGGCFPLIIQMPIFLALYYMLMGSIELRHAPFALWIHDLSAQDPYYILPILMGVTMFFIQKMSPTTVTDPMQQKIMTFMPVIFTVFFLWFPSGLVLYYIVSNLVTIIQQQLIYRGLEKRGLHSREKKNS

SEQ ID NO: 12872 - protein, 562 aa, Salmonella enterica subsp. arizonae serovar 62:z4,z23:--
MASSGTTSIPQRVTGAEFIVHFLERQGIRIVTGIPGGSILPVYDALSQSTQIRHILARHEQGAGFIAQGMARTEGKPAVCMACSGPGATNLVTAIADARLDSIPLICITGQVPASMIGTDAFQEVDTYGISIPITKHNYLVRNVNELPQVMSDAFRLAQSGRPGPVWIDVPKDVQTATIELEALPPPAEKSPSPDFSVESIREAAAMINAAKRPVLYLGGGVINAPARVRELAEKAQLPTTMTLMALGMLPKAHPLSLGMLGMHGARSTNFILQEADLLIVLGARFDDRAIGKTEQFCPNAKIIHVDIDRAELGKIKQPHVAIQADVDDVLAQLIPQIETQPREAWHQLVADLQQEFPCCIPQENNPLSHYGLINAVAACVDDNAIITTDVGQHQMWTAQAYPLNRPRQWLTSGGLGTMGFGLPAAIGAALANPDHKVLCFSGDGSLMMNIQEMATASENQLDVKIILMNNDALGLVHQQQSLFYKQGVFAATYPGSINFMQIAAGFGLDTCDLNNEADPQAALQAIIRRPGPALIHVRIDAEEKVYPMVPPGAANTEMVGE

SEQ ID NO: 12873 - protein, 401 aa, Salmonella enterica subsp. arizonae serovar 62:z4,z23:--
MFELDTLSTLVAATLVLLLGRKLVQSVSLLKKYTIPEPVAGGLLVAIALLVLKKSVGWEVNFDMTLRDPLMLAFFATIGLNANLASLRKGGRVVGVFLIVVVGLLLMQNAIGIGMASLLGLDPLMGLIAGSITLSGGHGTGAAWSKLFIERYGFANATEVAMACATFGLVLGGLIGGPVARYLVKHSTTPDGMPDDQAVPTAFEKPDVGRMITSLVLIETIALIAICLTVGKIVAQLLAGTVLELPVFVCVLFVGVILSNGLALAGFYRVFERAVSVLGNVSLSLFLAMALMSLKLWELASLALPMLAILVVQTIFMALYAIFVTWRMMGKNYDAAVLAAGHCGFGLGATPTAIANMQAITDRFGPSHMAFLVVPMVGAFFIDIVNALVIKLYLLLPIFAQ

SEQ ID NO: 12874 - protein, 425 aa, Salmonella enterica subsp. arizonae serovar 62:z4,z23:--
MKPMHIAMALFSAVMFFVLAGVFMGVQLELDGTKLVVDTAADIRWQWIFIGTAVVFFFQLLRPMFQKALKNVSGPKFILPAIDGSTLKQKLFLIALLIIAVAWPFMVSRGSVDIATLTMIYIILGLGLNVVVGLSGLLVLGYGGFYAIGAYTFALLNHYYGLGFWTCLPLAGLVSAAAGFLLGFPVLRLRGDYLAIVTLGFGEIVRILLLNNTEITGGPNGISQIPKPTLFGLEFSRSAREGGWDTFSNFFGVKYDPSDRVIFLYLVALLLVVLSLFVINRLLRMPLGRAWEALREDEIACRSLGLSPTRIKLTAFTISAAFAGFAGTLFAARQGFVSPESFTFAESAFVLAIVVLGGMGSQFAVILAAVLLVVSRELMRDFNEYSMLMLGGLMVLMMIWRPQGLLPMTRPQLKLKSGQAKGEQA

SEQ ID NO: 12875 - protein, 278 aa, Salmonella enterica subsp. arizonae serovar 62:z4,z23:--
MKKNRAFLKWAGGKYPLLDDIKRHLPKGDCLVEPFVGAGSVFLNTDFSRYILADINSDLISLYNIVKSRTDEYVQASRELFMPETNQAEVYYQLREEFNTCQDPFRRAVLFLYLNRYGYNGLCRYNLRGEFNVPFGRYKKPYFPEAELYHFAEKAQNAFFYCESYADSMARADKSSVVYCDPPYAPLSATANFTAYHTNSFSLTQQAHLAEIAENLVSNRIPVLISNHDTVLTREWYQLAKLHVVKVRRSISSNGGTRKKVDELLALYQPGVVSPAKR

SEQ ID NO: 12876 - protein, 269 aa, Salmonella enterica subsp. arizonae serovar 62:z4,z23:--
MFTDTINKCAANAARIARLSANDPLGFWVSSAMAGAYVGLGIILIFTLGNLLDPSVRPLVMGATFGIALTLVIIAGSELFTGHTMFLTLGVKAGTISHGQMWAILPQTWLGNLVGSVFVALLYSWGGGSLLPVDTSIVHSVALAKTTAPATVLFFKGALCNWLVCLAIWMAIRTEGTAKFLAIWWCLLAFIASGYEHSIANMTLFALSWFGHHSDAYTLAGIGHNLLWVTLGNTLSGVVFMGLGYWYATPKSERPVPQKINHIKVTANH

SEQ ID NO: 12877 - protein, 483 aa, Salmonella enterica subsp. arizonae serovar 62:z4,z23:--
MQLEVILPLLAYLVVVFGVSVYAMRKRSAGTFLNEYFLGSRSMGGIVLAMTLTATYISASSFIGGPGAAYKYGLGWVLLAMIQLPAVWLSLGILGKKFAILARRYDAVTLNDMLFARYQSRLLVWLASLSLLVAFIGAMTVQFIGGARLLETAAGIPYETGLLIFGVSIALYTAFGGFRASVLNDTLQGLVMLVGTIVLLVGVVHAAGGLSQAVDTLHAIDPQLVTPQGADDILSPAFMTSFWVLVCFGVVGLPHTAVRCISYKDSKAVHRGIIIGTIVVAMLMFGMHLAGALGRAVLPDLTVPDLVIPTLMVKVLPPFAAGIFLAAPMAAIMSTINAQLLQSSATIIKDLYLNLRPDQMQNEIRLKRMSAAITLLLGALLLLAAWKPPEMIIWLNLLAFGGLEAVFLWPLVLGLYWERANAAGALSAMIVGGVLYALLATFNIQYLGFHPIVPALLLSLLAFLIGNRFGSSASQATVLSTDK

SEQ ID NO: 12878 - protein, 1486 aa, Salmonella enterica subsp. arizonae serovar 62:z4,z23:--
MLYDKSLEKDNCGFGLIAHIEGEPSHKVVRTAIHALARMQHRGAILADGKTGDGCGLLLQKPDRFFRIVAQEHGWRLAKNYAVGMIFLNKDPEMAAASRHIVEEELQQETLSIVGWRDVPTNEGVLGEIAISSLPRIEQIFVNAPAGWRPRDMERRLFIARRRIEKRLQDDKDFYVCSLSNLVNIYKGLCMPADLPRFYLDLADLRLESAICLFHQRFSTNTVPRWPLAQPFRYLAHNGEINTITGNRQWARARTYKFQTPLIPDLQSAAPFVNETGSDSSSLDNMLELLLAGGMDIIRSMRLLVPPAWQNNPDMDPDLRAFFDFNSMHMEPWDGPAGIVMSDGRFAACNLDRNGLRPARYVITKDKLITCASEVGIWDYQPDEVVEKGRVGPGELMVIDTRSGRILHSAETDDDLKSRHPYKAWMEKNVRRLVPFEDLPDEEVGSRELDDDLLASYQKQFNYSAEELDSVIRVLGENGQEAVGSMGDDTPFAVLSSQPRIIYDYFRQQFAQVTNPPIDPLREAHVMSLATSIGREMNVFCEAEGQAHRLSFKSPILLYSDFKQLTTMAEHHYRADRLDITFDVTETTLDATVKALCDKAEQMVRNGTVLLVLSDRNIGRNRLPVPAPMAVGAVQTRLVEQSLRCDANIIVETASARDPHHFAVLLGFGATAIYPYLAYETLGRLIDSQAIAKNYRTVMQNYRNGINKGLYKIMSKMGISTIASYRCSKLFEAVGLHDDVVNLCFQGVVSRIGGASFDDFQQDLLNLSKRAWLARKPISPGGLLKYVHGGEYHAYNPDVVRTLQQAVQSGEYRDYQQYARLVNERPAATLRDLLAINPNGDAVAIDEVEPASELFKRFDTAAMSIGALSPEAHEALAEAMNCLGGNSNSGEGGEDPARYGTNKVSRIKQVASGRFGVTPAYLVNADVIQIKVAQGAKPGEGGQLPGDKVTPYIAKLRYSVPGVTLISPPPHHDIYSIEDLAQLIFDLKQVNPKAMISVKLVSEPGVGTIATGVAKAYADLITIAGYDGGTGASPLSSVKYAGCPWELGLVETQQALVANGLRHKIRLQVDGGLKTGVDIIKAAILGAESFGFGTGPMVALGCKYLRICHLNNCATGVATQDEKLRKNHYHGLPFKVTNYFEFIAHEVRELMAELGVTRLVDLIGRTDLLKELDGFTAKQQKLALSRLLETAEPHPGKALYCTENNPPFDNGVLNAQLLQQAKPFVDARQSKTFWFDIRNTDRSVGASLSGYIAQTHGDQGLAADPIKAYFSGTAGQSFGVWNAGGVELYLTGDANDYVGKGMAGGLIAIKPPVGSAFLSHKASIIGNTCLYGATGGRLYAAGRAGERFGVRNSGAITVVEGIGDNGCEYMTGGIVCVLGKTGVNFGAGMTGGFAYVLDEDGEFRKRVNPELVEVLDVDSLAIHEEHLRGLITEHVQHTGSPRGEEILSRWSSFSTQFALVKPKSSDVKALLGHRSRSAAELRVQAQ

SEQ ID NO: 12879 - protein, 328 aa, Salmonella enterica subsp. arizonae serovar 62:z4,z23:--
MSHLALQPGFDFQQAGKEVLEIEREGLAELDQYINQNFTLACEKMFNCTGKVVVMGMGKSGHIGRKMAATFASTGTSSFFVHPGEAAHGDLGMVTPQDVVIAISNSGESSEIAALIPVLKRMHVPLICITGRPESSMARAADVHLCVKVPKEACPLGLAPTSSTTATLVMGDALAVALLKARGFTAEDFALSHPGGALGRKLLLRVSDIMHTGDEIPHVNKQASLRDALLEITRKNLGMTVICDESMKIDGIFTDGDLRRVFDMGGDMRQLGIADVMTPGGIRVRPGILAVDALNLMQSRHITSVLVADGDQLLGVLHMHDLLRAGVV

SEQ ID NO: 12880 - protein, 391 aa, Salmonella enterica subsp. arizonae serovar 62:z4,z23:--
MKFVDEASILVVAGDGGNGCVSFRREKYIPKGGPDGGDGGDGGDVWLEADENLNTLIDYRFEKSFRAERGQNGASRDCTGKRGKDVTIKVPVGTRVIDQGTGETMGDMTKHGQRLLVAKGGWHGLGNTRFKSSVNRTPRQKTNGTPGDKRDLLLELMLLADVGMLGMPNAGKSTFIRAVSAAKPKVADYPFTTLVPSLGVVRMDSEKSFVVADIPGLIEGAAEGAGLGIRFLKHLERCRVLLHLIDIDPIDGSDPVENARIIIGELEKYSQDLAAKPRWLVFNKIDLMDKTEAEEKAKSIAEALGWEGKYYLISAASQLGVKDLCWDVMTFIIENPIAQAEEAKQPEKVEFMWDDYHRQQLDEVAAEAEDEEWDDDWDEDDEEGVEFIYKR

SEQ ID NO: 12881 - protein, 449 aa, Salmonella enterica subsp. arizonae serovar 62:z4,z23:--
MTTILKHLPAGQRIGIAFSGGLDTSAALLWMRQKGAVPYAYTANLGQPDEDDYEAIPRRAMEYGAENARLIDCRKQLVTEGIAAIQCGAFHNTTGGLTYFNTTPLGRAVTGTMLVAAMKEDGVNIWGDGSTYKGNDIERFYRYGLLTNAELQIYKPWLDTDFINELGGRHEMSEFMIACGFDYKMSVEKAYSTDSNILGATHEAKDLEFLNSSVKIVNPIMGVKFWDEEVKIPAEEVSVRFEQGHPVALNGKTLSNDVEMMLEANRIGGRHGLGMSDQIENRIIEAKSRGIYEAPGMALLHIAYERLLTGIHNEDTIEQYHAHGRQLGRLLYQGRWFDSQALMLRDSLQRWVASQVTGEVTLELRRGNDYSILNTVSDNLTYKPERLTMEKGDSVFSPDDRIGQLTMRNLDITDTREKLYGYAQSGLLVTSSATGLPQVGSLEKSKVAE

SEQ ID NO: 12882 - protein, 302 aa, Salmonella enterica subsp. arizonae serovar 62:z4,z23:--
MKRENVMTMKVGFIGLGIMGKPMSKNLLKAGYSLVVSDRNPEAIADVIAAGAETASTAKAIAEQCDVIITMLPNSPHVKEVALGENGIIEGAKPGTVLIDMSSIAPLASREISEALKARGIEMLDAPVSGGEPKAIDGTLSVMVGGDKTIFDKYYDLMKAMAGSVVHTGDIGAGNVTKLANQVIVALNIAAMSEALTLATKAGVNPDLVYQAIRGGLAGSTVLDAKAPMVMDRNFKPGFRIDLHIKDLANALDTSHGVGAQLPLTAAVMEMMQALRADGHGNDDHSALACYYEKLAKVEVIR

SEQ ID NO: 12883 - protein, 402 aa, Salmonella enterica subsp. arizonae serovar 62:z4,z23:--
MNEFPVVLVINCGSSSIKFSVLDVATCDLLIAGIADGINTENAFLSINGDKPLNLAHPNYEGALQAIAFELEKRDLTDSVALIGHRIAHGGDLFTQSVIITDEVIDNIRQVSPLAPLHNYANLSGIDAARHLFPGVRQVAVFDTSFHQTLAPEAYLYGLPWDYFARLGVRRYGFHGTSHRYVSQRAHELLGLDEKNSGLIVAHLGNGASICAVRNGQSVDTSMGMTPLEGLMMGTRSGDVDFGAMAWVANETGQTLSDLERVVNKESGLLGISGLSSDLRVLEKAWHEGHERARLAIKTFVHRIARHIAGHAASLHRLDGIIFTGGIGENSVLIRQLVIEHLGVLGLTLDVEMNKQPNYHGERIISANPSQVICAVIPTNEEKMIALDAIHLGNVKAPVEFA

SEQ ID NO: 12884 - protein, 283 aa, Salmonella enterica subsp. arizonae serovar 62:z4,z23:--
MNFQPYESDADWVITGVPFDMATSGRAGGRHGPAAIRQVSTNLAWEHHRFPWNFDMRERLNVVDCGDLVYAFGDAREMSEKLQAHAEKLLSAGKRMLSFGGDHFVTLPLLRAHAKHFGKMALVHFDAHTDTYANGCEFDHGTMFYTAPKEGLIDPHHSVQIGIRTEFDKDNGFTVLDACQVNDRGVDDILAQVKQIVGDMPVYLTFDIDCLDPAFAPGTGTPVIGGLTSDRAIKLVRGLKDLNIVGMDVVEVAPAYDQSEITALAAATLALEMLYIQAAKKGE

SEQ ID NO: 12885 - protein, 402 aa, Salmonella enterica subsp. arizonae serovar 62:z4,z23:--
MAVSFCAEVGMKEVVIVGALRTPIGCFQGTLARHSAVELGSMVVKALIDRTGVDVNAIDEVILGQVLTAGAGQNPARQSAIKGGLPNTVSAITINDVCGSGLKALHLATQAIQCGEADIVIAGGQENMSRAPHVLNDSRTGALPNADNLVDSLVHDGLWDAFNDYHIGVTAENLAREYGISRELQDAYALSSQQKARAAIDTGRFKDEIVPVVTQRNGQTVIVDTDEQPRADASAEGLALLHPAFDSLGSVTAGNASSINDGAAAVMMMSESKAQALGLPVLARIRAFASVGVDPALMGIAPVYATRRCLERAGWQLADVDLIEANEAFAAQALSVGKMLEWDERRVNVNGGAIALGHPIGASGCRILVSLVHEMVKRDARKGLATLCIGGGQGVALTIERD

SEQ ID NO: 12886 - protein, 610 aa, Brucella melitensis 16M
MENKRNFFITIALSILILALWQVFYLGPKTEAQREQARIEEQQRQAQQAAQNRQASSSTGDTPQMPANPDSIPGQGDTKAAGAPLTRDAAIAQSPRIEIDTPSLRGSINLTGARLDDLYLKKYHETVSDKSPEIELLAPSSLKQGYFVELGFTGNDATGAVPGPNTVWVVEGNNKLTPSTPVTLTYTNDKNLTFKRVISVDDAYMFTVDDTIINNGGSTVSLASYGRVTRFNQPEHASATYVLHEGLIGVMGQDGLQEIKYAKIEDNKDISFKDVIGGWVGITDKYWAATLIPPQDEKFTGRFSHFTNDRPRYQSDLLSAPLTVAPGQSQKIQNRVFAGAKVVNTIQNYETKYHIKQFDLLIDWGWFYFITKPMFYLIDWIYKFTGNFGVAILVVTVLLKALFFPLANKSYKSMARMKLMQPKMTEIREKYADDKMKQQQAMMELYKREKINPLAGCWPVLVQIPVFFALYKVLYVTIEMRHAPFFGWIQDLAAPDPTSIFNLFGLLPYTVPHFLMIGVWPIIMGIIMFLQMRMNPTPPDPTQAAIFTWMPIIFTFMLASFPAGLVIYWAWNNTLSIIQQSVIMKRQGVKIELFDNLKGLFRRKPKEANK

SEQ ID NO: 12887 - protein, 436 aa, Enterococcus faecalis V583
MFLDQVTIDVKAGKGGDGMVAFRREKYVPDGGPAGGDGGRGGDVVLVVEEGLRTLMDFRFNRHFKATPGENGMSKGMHGRGSEDLLVKVPPGTTVRDAETGALIGDLIENGQTLVVAKGGRGGRGNIRFASPRNPAPEIAENGEPGQERKIELELKVLADVGLVGFPSVGKSTLLSVISSARPKIGAYHFTTLVPNLGMVTTSDGRSFAAADLPGLIEGASQGVGLGTQFLRHIERTRVILHVIDMSGMEGRDPYEDYLAINKELASHNLRLMERPQIIVANKMDMPEAEENLAKFKEQLAKERTDEYADELPIFPISGVTRKGIEPLLNATADLLEVTPEFPLYEDEVVEEETVRYGFQPEGPEFTIDREPDASWVLSGEKLEKLFEMTNFDHDETVMRFARQLRGMGVDEALRARGAKDGDIVRIGNFEFEFVE

SEQ ID NO: 12888 - protein, 221 aa, Yersinia pestis biovar Microtus str. 91001
MELYLDTADVAAVKRLARVLPLQGVTTNPSILAKAGKSLWEVLPALRDALGGTGKLFAQVLASDSERMVSEAVQLSEQIPGLVIKIPVTAEGLAAIKKLKTMSIPTLGTAVYGAGQGLLSVLAGAEYVAPYVNRLDAQGSDGIAMVRELQQLLTLHAPKAKVLAASFRTPRQVLDCLLAGCQSVTIPVDVAEQFISTPAVKAAIEQFEQDWQGAFGTTMLS

SEQ ID NO: 12889 - protein, 434 aa, Mycoplasma gallisepticum R
MQFIDRCQIKLIAGNGGDGIIAWRREAHYDKGGPAGGSGGKGGNIILVADHNQSTLLSLKYSKIIRASNGDNGKPDLSSGQNGMDKYVKVPIGTTVYDEQTNEVIVDLIRDKQEYIICHGGKGGRGNAAFKSSTLRAPNLYELGDEGEEKTVRLELKYLANVGIVGYPNAGKSTLISKLSNAKPKIANYQFTTLVPILGIVENNDKRLVFADIPGLIENASEGYGLGHDFLRHVERCEVLIHLISMNPLDHDDVIDAYEKIMTELRKYSQLLVNKKMLVVANKMDVEGASENFNKLRSYLAKKGIDISSISAINGDVNNLVDRVFDLYQKTLSTTTETNPFSIPMVAEKVYYYDGEKTIDDDPLDVIKDGENRWIVSSKKLTYWFKKIPQTTLDNITRLGQKIKSLGVEDQLKKMGAKPNDVIVICDYEYLIDE

SEQ ID NO: 12890 - protein, 100 aa, Anaplasma marginale str. St. Maries
MFAVVEAGGKQYKVKESYVIKVELMDVSVGEKVKLDSLATFGGKKKDAVLQRQSSAVTAEVVARCRNDKIIVFKKRRRKNYRRKIGHRQELVVLRVLKVG

SEQ ID NO: 12891 - protein, 572 aa, Anaplasma marginale str. St. Maries
MSEARNLVLAVVASVAVMVGWRFVYERVLVKEYPQQQREVVSESLIPEAMDVAEYRPRVDAINSVPRVRLGNTSVRASISLKGALVDDVSLTKYQVSTDKHSENVVLMSPEGTREDSIVEFGWIDPEHKTKVPDKNTLWEVEQGSEASGEGSATLRWDNGQGLVFRLRFSIDRAYMFSVSQEVENSTGEDLRLSYYGRINKAHAQDGKSYWISHEGAIGSFGHGLQEWTYKDMQKGSGARVGATNEGTGSHWIGLADKYWFTALVPSSDKGKLAFRAKHVPRNDVDHFQVDFSRSYGTIPAGGKAESTTQLFIGAKELAVLDNYRSGLNIPLFDKAVDFGVLYFITKPVFQLLQYFHKVVGNFGLAIVMLTIAIKLVVFPLSSKSYVSMFKLKKLQPEISRIRELHKTDDVRISKEISALFRKHGVSPMSGFLPILVQIPVFFALYKVLFVTIEMRHAPLFAWIQDLSSHDTANLLNLFGLLRFEPPICVGVLPIILGITMVLQQKINQQDQATQDPYGVMKFLPYVFVFIFSSFPAGLVLYWICSNVITMLQQLFVRRFIFDRRDLVNNSA

SEQ ID NO: 12892 - protein, 315 aa, Geobacillus kaustophilus HTA426
MSDCQHQLKLFALNSNMKLAKEIAEVMGIELGKCSVSRFSDGEIQINIEESIRGDDVFVIQSTSVPVNEHLMELLIMIDALKRASARTINIVMPYYGYARQDRKARSREPITAKLVANLLETAGASRVITLDLHAPQIQGFFDIPIDHLMGVPILADYFKSKQLEDIVVVSPDHGGVTRARKLADRLKAPIAIIDKRRPKPNVAEVMNIVGQVAGKTAILIDDIIDTAGTITLAANALAENGAKEVYACCTHPVLSGPAIERIQNSRIKELVVTNSIALPEEKKIDKIVELSVAPLIAEAISRVYEMKSVSVLFD

SEQ ID NO: 12893 - protein, 234 aa, Deinococcus radiodurans R1
MEFFIDTAIVDEIREINAWGVLSGVTTNPSLIVASGRDFKEVIGEIAELVPGGAISAEVTALDAEGMIKEGKDVAAWHKQVVVKLPLTPAGLQACKALTSEGIKTNVTLCFSVPQALLAARAGATYVSPFVGRVDDTGWDGSELIRQIKEAFVLGDIQTKVLAASIRHPQHVVQAALAGADVATIPYKVFTQMVKHPLTQAGLDSFMADWAKRQGASPETPPSEAGTNPVKKEG

SEQ ID NO: 12894 - protein, 639 aa, Photorhabdus luminescens subsp. laumondii TTO1
MTTETEISFADLGLSAPILSALEDLGYEKPSPIQQQCIPHLLNGRDVLGMAQTGSGKTAAFSLPLLHNINAELKAPQILVLAPTRELAVQVAEACADFSKHMRNVNVVALYGGQRYDVQLRALRQGPQIVVGTPGRLLDHLKRGTLDLSNLSGLVLDEADEMLRMGFIEDVENIMSQIPAEHQTALFSATMPEAIRRITRRFMNDPQEVRIQASVTTRPDISQSYWSVYGMRKNEALVRFLEAEDFDAAIIFVRTKNATLEVAEALERNGYNSAALNGDMNQALREQTLERLKDGRLDILIATDVAARGLDVERISLVVNYDIPMDAESYVHRIGRTGRAGRAGRALLFVENRERRLLRNVERTMKLTIPEVELPNAELLSQRRLERFAANVQQQLESSDLDQYRTLLSKLQPAEDLDIETLAAALLKMAQGERPLILPPDPVRRPRREFNERDDRRRNGFDDRGERSDRPRRERRDVGEMELYRIEVGRDDGVEVRHIVGAIANEGDISSRYIGNIKLFATHSTIELPKGMPGDLLSHFTRTRILNKPMNMQLMGDAQPFERRERRGGGRNGNGNGNSSGSGPRRDRENFNGGGRRFNGERRGGEGRGEGQSRSNFRGRGDDHGSSAPRRRYNNSNAQ

SEQ ID NO: 12895 - protein, 481 aa, Photorhabdus luminescens subsp. laumondii TTO1
MQSEVILPLLGYLALVFLLSVYAYQRHQKGPFLTEYFLGNRSMGGFVLAMTITATYISASSFIGGPGAAYKYGLGWVLLSLIQLPAIWLSLGVLGKKFAILARRYNAVTLNDMLYARYGSRFLVWFASLSLLVAFVGAMTVQFIGGARLLETAAGIPYGTGLMIFGISIALYTAFGGFRASVLNDALQGLVMLLGTVLLLVAIIYKAGGLSEAVTTLRTINPELVSAQGADHILNGPFMASFWVLVCFGVIGLPHTAVRCISYRDSKAVHRGIIIGTIVMTILMFGMHLAGALGRAIIPDLTIPDQVIPTLMITVLPPFAAGIFLAAPMAAIMSTINAQLLQSSATIVKDLYLNLFPQQIVQEKKLARISSFSTLILGLLLLLAAWHPPEMIIWLNLLAFGGLQAVFLWPLVLGLYWEKANAYGAISSMITGATSYTLLASFNIHLLGFHPIVPSLLLSLLAFWMGNAIGQRLPPKAVRPH

SEQ ID NO: 12896 - protein, 1485 aa, Photorhabdus luminescens subsp. laumondii TTO1
MLYNKSQEKDNCGFGLIAHIEGEPSHKVVRTAIHALARMQHRGAILADGKTGDGCGLLLQKPDRFFRMVAQEQEWHLARNYAVGMLFLSQDPQIAQNCRAIIEQELQNETLSVVGWREVPINRDILGEIALSSLPHIEQIFVNAPAGWRARDLERRLFVARRRIEKRINDSDFYVCSLSNLVTIYKGLCMAADLPRFYPDLADLRLESAICLFHQRFSTNTVPRWPLAQPFRYLAHNGEINTITGNRQWARARAYKFKTPLIPDLHTAAPFVNETGSDSSSLDNMLELFLNGGMDLIRAMRLLVPPAWQNNPDMDEDLRAFFDFNSMHMEPWDGPAGIVMSDGRYAACNLDRNGLRPARYVITKDKLITCASEVGIWDYQPDEVVEKGRVGPGELIVIDTRQGRILHAEETDNDLKSRHPYKEWMDKNVKRLTPFEELLEDQAGHRDLNDQSLAVYHKQFAYSNEELDQIIRVLGENGQEATGSMGDDTPFAVLSSRPRIIYDYFRQQFAQVTNPPIDPLREAHVMSLTTCIGREMNVFCEAEGQAHRLSFKSPILLYSDFHQLITQQSPHYRAEQLDLTFNPQETNLQNALFALCDQAEQLARDGAVLLVLSDRNITPNKLPIPAPMAIGAIQHRLVEKNLRCDTNLIVETASARDPHHFTVLLGFGATAIYPYLAYESLAKMVDNGTINKPYADVMLNYRNGINKGLYKIMSKMGISTIASYRCSKLFEAVGLHSELTEFCFNGVVSRIGGANFSDFEQDLRNLSKRAWLARQPLDQGGLLKYVHNGEYHAYNPDVVSTLQAAVHSGEYNDYLKYSRLVNQRPITTIRDLLAIKTEAEPLPIEEVEPAEELFKRFDTAAMSIGALSPEAHEALAEAMNTLGGFSNSGEGGEDPARYGTKKVSRIKQVASGRFGVTPAYLVNADVIQIKVAQGAKPGEGGQLPGDKVTPYIAKLRYSVPGVTLISPPPHHDIYSIEDLAQLIFDLKQINPNALISVKLVSEPGVGTVATGVAKAYADLITIAGYDGGTGASPLSSVKYAGCPWELGLVETQQALVANGLRHKIRLQVDGGLKTGVDIIKAAILGAESFGFGTGPMVALGCKYLRICHLNNCATGVATQDEKLRRDHYHGLPERVMNYFRFIARETREIMATLGVKNLTDLIGRTDLLEVLEGISAKQSKLNLDPLLATAEPHQGKTLYCTENNPPFDNGALNKNLLTQAASYIENQQSKTFYFDIRNTDRSVGASLSGFIAARYGNQGIAAAPIKIHFNGTAGQSFGVWNAGGLELTLIGDANDYVGKGMAGGRIVIHPPVGSAFKSHQATLIGNTCLYGATGGKLFAAGRAGERFAVRNSGAITVVEGIGDNGCEYMTGGIVCILGRTGINFGAGMTGGFAYVLDENDDFRKRVNLELVEVLAVDALAIHEEHLRGLITEHVLLTGSQRGEDILANWQQWLSKFALVKPKSSDVKALLGHRSRSSAELRIQAQ

SEQ ID NO: 12897 - protein, 390 aa, Vibrio cholerae O1 biovar eltor str. N16961
MKFVDEAVIKVQAGDGGNGVVSFWREKFVTNGGPDGGDGGDGGDVYMVADENLNTLIDYRFQRFYEAERGKNGGGGNCTGKSGKDKELRVPVGTRAVDIHTNEIIGEVAEHGKKVMIAKGGWHGLGNARFKSSVNRSPRQKTLGTKGELRDIRLELLLLADVGMLGMPNAGKSTFIRAVSAAKPKVADYPFTTLVPSLGVVSVLPEKSFVVADIPGLIEGAAEGAGLGIRFLKHLERCRVLLHMIDIMPADQSDPAHNALTIIDELEQYSEKLAKKPRWLVFNKVDLMSEEEADEIIQNIIDALAWEGDYFKISAANRQGTKELCMKLAEFMDTLPREAEEKTEAEKVDFTWDYNHKDGLAGREVITEDDDDWDDWDDEEDDGHVIYVRD

SEQ ID NO: 12898 - protein, 410 aa, Chromobacterium violaceum ATCC 12472
MQPVHKSQKLANVCYDIRGPVLEHAKRMEDEGHRIIKLNIGNPAPFGFFAPDEIIEDVIVNLPAASGYSDSKGLFAARKAIMHYAQQKHLPNVAMDDIIVGNGVSELIVMAMQALLDNGDEVLVPAPDYPLWTAAVSLAGGKAVHYLCDEEQGWFPSIDDIRAKITPTTRAIVIINPNNPTGAVYPPALLQQIVDVARQHQLIIYADEIYDKVLYDAVRHTSIASLAPDLFVVTLNGLSKNYRACGYRAGWMILSGEKKHAKDYIEGLNMLASMRLCANVPSQYAIQTALGGYQSIDDLVAPGGRLARQRDLAHKLLTEIPGVSCVKPQGALYLFPRLDPKVYPIADDQQFILELLQQEKVLLVQGSGFNWIAPDHFRVVFLPNSDDLIEAIGRIARFLESYRKRHGAAE

SEQ ID NO: 12899 - protein, 385 aa, Arabidopsis thaliana
MVEQTQHPTILQKVSGQLLSSSVSQDIRGYASASKRPATYQKHAAYGNYSNAAFQYPLVAASQIATTTSPVFVQAPGEKGFTNFAIDFMMGGVSAAVSKTAAAPIERVKLLIQNQDEMLKAGRLTEPYKGIRDCFGRTIRDEGIGSLWRGNTANVIRYFPTQALNFAFKDYFKRLFNFKKDKDGYWKWFAGNLASGGAAGASSLLFVYSLDYARTRLANDSKSAKKGRGERQFNGLVDVYKKTLKSDGIAGLYRGFNISCAGIIVYRGLYFGLYDSVKPVLLTGDLQDSFFASFALGWLITNGAGLASYPIDTVRRRMMMTSGEAVKYKSSFDAFSQIVKKEGAKSLFKGAGANILRAVAGAGVLAGYDKLQLIVFGKKYGSGGA

SEQ ID NO: 12900 - protein, 563 aa, Bordetella parapertussis 12822
MDIRRTVLWMIFSFSLLLLWNNWQIHNGKPSLFGGPAPEAAATQQPKADANGTAASSTASIPSSPAAAPAAASVPGAAAPAAAKSEQVVITTDVLRLTFDSNGAQLIRAELLKYPSSSQSDKPTVLMDRSADLVYVAQTGVVGAPQGESFPTHQTPFHLVSSERSLTGDTLDVVFEAESGGLKVTKTYTLHRGRYDVDVRHAMANTGGAPLSPALYLQLERDGTDPAGTSSFYHTFTGVAVYSEQDKFQKVTFSDIEKKKGTYIKQADNGWIGIVQHYFATAWIPAQGKQRTNELLQVQQNLYAARTIEAVGTIAPGSSANVDAHLWVGPQDQKAMAAVAPGLELVVDYGWLTIIAKPLFTLMTWLHGLLGNWGWTIVALTVIIKAVFFPLAAASYRSMARMKQVAPRLQALKEKYGDDRQKLNQAMMEMYRTEKINPLGGCLPMVVQIPVFIALYWVLLASVEMRGAPWILWVHDLSVRDPFFILPAIMMATMFLQIKLNPTPPDPVQAKVMMIMPLVFGGMMFFFPAGLVLYWCVNNTLSIAQQWTITRNLERQAAAAANR

SEQ ID NO: 12901 - protein, 569 aa, Onion yellows phytoplasma OY-M
MQKQSNFIKTIIQKDLQSGKCSQIITRFPPEPNGFLHLGHARAIIINFELAHFFEGKTLLRYDDTNPSKEKQIYVNAILNDIKWLGYTPYKITFASDYFPQMYQMALFLIKQGKAYVDDQTAEQIAQSRGNLTQKGTNSPYRNRSIEENILLFEQMKKGKFVEGSKVLRAKIDMQSPNLNLRDPILYRILSAFTLKQKHWHIFPTYDYAHPLEDSFENITHSLCSLEFEDHRPLYDWIIKETKAKHTPRQIEFGRLNLTQTLMSKRHLNNLVEKNLVTGWDDPRMPTLSGIRKKGYTPEAIKNFVLETGLSKVNSQVKQEMLESFVRDDLKGKSLPRMAVINPLKLTITNFPENQIENLKAPWTNNFHTCKCCNTSQTQGKTPEQNQEQTKGKEQTQEREIYFSRHLYIEKDDFALQKPDKNYKRLTLGEEVRLFHAYFVKAYDVVKNNKGEITEILATYDPQTKSGSGFKDRKPNGTIHFVEAKTACKATFNFFAPLLCTNGNFNYKSWHIKKGFVESSLQKSCCCKNHLQFLRQGYFAADKITKDTNGKTQELNFNEVVSLKSNPQK

SEQ ID NO: 12902 - protein, 102 aa, Onion yellows phytoplasma OY-M
MFAIIKTGGKQFRVFEGQEIYVEKLNVEPETTYQFQEVLAVGGSNPVLGTPFVKDAKVTAQVIKHDRAKKIIVFKYKKRKKYRCKQGHRQSYTKLLITKITV

SEQ ID NO: 12903 - protein, 435 aa, Streptococcus thermophilus LMG 18311
MFLDTAKISVQAGRGGDGMVAFRREKYVPNGGPWGGDGGKGGSVIFKVDEGLRTLMDFRYNRKFKAKNGEKGMTKGMHGRGAEDLIVSIPPGTTVRDAETGKVITDMVEDGQEFVVAHGGRGGRGNIRFATPRNPAPEIAENGEPGEERELQLELKILADVGLVGFPSVGKSTILSVVTAAKPKIGAYHFTTIVPNLGMVRTKSGESFAMADLPGLIEGASQGVGLGTQFLRHIERTRVILHVIDMSASEGRDPYEDYLQINKELETYNLRLMERPQIIVANKMDMPEAEENLKEFKEKLAANYDEFDELPQIFPISSLAHQGLENLLEATAELLDQTDEFLLYNEDDMEQEEVYYGFNEEERPFEISRDDDASWVLSGEKLEKLFVMTNMERDESIMKFARQLRGMGVDEALRERGAKDGDIVRIGNFEFEFVD

SEQ ID NO: 12904 - protein, 102 aa, Zymomonas mobilis subsp. mobilis ZM4
MFAIVRTGGKQYRVAAGDKIVVEKIAGEAGTTVSLEDVLLAGEGADLQPVKGLTVSAEIIAQAKAEKVIVFKKRRRHNYRRRNGHRQQHTILKIVSVGNAAA

SEQ ID NO: 12905 - protein, 343 aa, Bdellovibrio bacteriovorus HD100
MKFIDEVSISLASGRGGPGCVSFRRESMQARGGPDGGNGGKGGDVIIRTSRHINSLVDIRQNKRYAAQSGRMGEGRQKSGMDGEDLILIVPQGTVFRNMDGEIIIDMTGISEHTLLKGGRGGKGNEFFKNSVNQAPEHAQPGEEGQEIEVRLELKLIADVGIVGFPNAGKSTLISRISAARPKIADYPFTTLTPNLGVVKAGDYSSFVVADIPGLVKGAHAGVGLGIQFLKHIERTRLFIHLVDASGMSGRDPLEDYTDINNELKMYDENNQDKEGFFPLSTRPQLVVLNKIDTLSESQLTKLKKQFKEASGSEPFAISAVTGKNIKEFVQELARQILKEEEE

SEQ ID NO: 12906 - protein, 566 aa, Salmonella enterica subsp. enterica serovar Paratyphi B str.
MVVRSLIDQGVKQVFGYPGGAVLDIYDALHTVGGIDHVLVRHEQAAVHMADGLARATGEVGVVLVTSGPGATNAITGIATAYMDSIPLVILSGQVATSLIGYDAFQECDMVGISRPVVKHSFLVKQTEDIPQVLKKAFWLAASGRPGPVVVDLPKDILNPAKKMPYAWPETVSMRSYNPTTSGHKGQIKRALQTLASAKKPVVYVGGGAISAACYAPLRHIIETFNLPVVSSLMGLGAFPATHRQSLGMLGMHGTYEANMTMHNADVIFAVGVRFDDRTTNNLAKYCPNATVLHIDIDPTSISKTVNADIPVVGDARLVLEQMLELLAQDAPSQPQDDIRDWWQQIEIWRARQCLKYDAESESIKPQAVIETLWRLTKGDAYVTSDVGQHQMFAALYYPFDKPRRWINSGGLGTMGFGLPAALGVKMALPKEMVVCVTGDGSIQMNIQELSTALQYELPVLVLNLNNRYLGMVKQWQDMIYSGRHSQSYMQSLPDFVRLAEAYGHVGLQINRPDELESKLSEALEHVRNNRLVFVDVTVDGSEHVYPMQIRGGGMDEMWLSKTERT

SEQ ID NO: 12907 - protein, 713 aa, Salmonella enterica subsp. enterica serovar Paratyphi B str.
MNIIAIMGPHGVYYKDEPIKELERALQSLGFQIIWPQNSVDLLKFIEHNPRICGVIFDWDEYSLDLCSEINQLNEYLPLYAFINTNSTLDVSVHDMRMALWFFEYALGLAEDIATRIHQYTNEYLDNITPPFTKALFTYAKEGKYTFCTPGHMAGTAYQKSPPGCLFYDFFGGNTLKADVSISVTELGSLLDHTGPHLEAEEYIARTFGAEQSYMVTNGTSTSNKIVGMYAAPAGSTLLIDRNCHKSLAHLLMMSDVVPLWLKPTRNALGILGGIPRREFTRASIESKIEETPQAQWPVHAVITNSTYDGLLYNTNWIKQMLDVPSIHFDSAWVPYTHFHPIYQGKSGMSGDRVPGKVIFETQSTHKMLAAFSQASLIHIKGEYDEETFNEAFMMHTSTSPSYPIVASIETAAAMLRGNPGKRLINRSVERALHFRKEVQRLREESDSWFFDIWQPEEVDEAECWPVTPGETWHGFADADDDHMFLDPVKVTILTPGMDEQGNMSEEGIPAALVAKFLDERGVVVEKTGPYNLLFLFSIGIDKTRAMGLLRGLTEFKRAYDLNLRVKNMLPDLYAEDPDFYRNMRIQDLAQGIHKLIRQHDLPGLMLRAFEVLPEMIMTPHQAWQRQIKGEVETVALDQLPGRVSANMILPYPPGVPLLMPGERITQQSRAVLDFLLMLCSIGQHYPGFETDIHGAKRNEDGVYQVRVLKHAC

SEQ ID NO: 12908 - protein, 301 aa, Salmonella enterica subsp. enterica serovar Paratyphi B str.
MSTDKTYCGFIAIVGRPNVGKSTLLNKLLGQKISITSRKAQTTRHRIVGIHTEGPYQAIYVDTPGLHMEEKRAINRLMNKAASSSIGDVELVIFVVEGTRWTPDDEMVLNKLRDGKAPVILAVNKVDNVQEKADLLPHLQFLANQMNFLDIVPISAETGMNVDTIAGIVRKHLPEAIHHFPEDYITDRSQRFMASEIIREKLMRFLGAELPYSVTVEIERFVTNERGGYDINGLILVEREGQKKMVIGNKGAKIKTIGIEARKDMQEMFEAPVHLELWVKVKSGWADDERALRSLGYVDDL

SEQ ID NO: 12909 - protein, 396 aa, Salmonella enterica subsp. enterica serovar Paratyphi B str.
MLDAQTIATVKATIPLLVETGPKLTAHFYDRMFTHNPELKEIFNMSNQRNGDQREALFNAIAAYASNIENLPALLPAVEKIAQKHTSFQIKPEQYNIVGTHLLATLDEMFNPGQEVLDAWGKAYGVLANVFIHREAEIYHENASKDGGWEGTRPFRIVAKTPRSALITSFEFEPVDGGTVAEYRPGQYLGVWLKPEGFAHQEIRQYSLTRKPDGKGYRIAVKREDGGQVSNWLHNHASVGDVVHLAAPAGDFFMNVAADTPVSLISAGVGQTPMLAMLDTLAKEQHTAQVNWFHAAENGDVHAFADEVSELGRTLPRFTAHTWYREPTEADRAQRVFDSEGLMDLSKLEAAISDPAMQFYLCGPVGFMQFAAKQLVSLGVNNENIHYECFGPHKVL

SEQ ID NO: 12910 - protein, 338 aa, Salmonella enterica subsp. enterica serovar Paratyphi B str.
MIIERARELAVRAPARVVFPDALDERVLKAAHYLQQYGLARPVLVASPFALRQFALSHRMAMDGIQVIDPHSNLSMRQRFAQRWLARAGEKTPPDAVEKLSDPLMFAAAMVSAGEADVCIAGNLSSTANVLRAGLRVIGLQPGCKTLSSIFLMLPQYAGPALGFADCSVVPQPTAAQLADIALASADTWRAITGEEPRVAMLSFSSNGSARHPNVANVQQATELVRERAPQLLVDGELQFDAAFVPEVAAQKAPDSPLQGRANVMIFPSLEAGNIGYKIAQRLGGYRAVGPLIQGLAAPMHDLSRGCSVQEIIELALVAAVPRQADVSRERSLHTLVE

SEQ ID NO: 12911 - protein, 550 aa, Salmonella enterica subsp. enterica serovar Paratyphi B str.
MQNPYTVADYLLDRLAGCGIGHLFGVPGDYNLQFLDHVIDHPTLRWVGCANELNAAYAADGYARMSGAGALLTTFGVGELSAINGIAGSYAEYVPVLHIVGAPCSAAQQRGELMHHTLGDGDFRHFYRMSQAISAASAILDEQNACFEIDRVLGEMLAARRPGYIMLPADVAKKTAIPPTQALALPVHEAQSGVETAFRYHARQCLMNSRRIALLADFLAGRFGLRPLLQRWMAETPIAHATLLMGKGLFDEQHPNFVGTYSAGASSKEVRQAIEDADRVICVGTRFVDTLTAGFTQQLPAERTLEIQPYASRIGETWFNLPMAQAVSTLRELCLECAFAPPPTRSAGQPVRIDKGELTQESFWQTLQQYLKPGDIILVDQGTAAFGAAALSLPDGAEVVVQPLWGSIGYSLPAAFGAQTACPDRRVILIIGDGAAQLTIQEMGSMLRDGQAPVILLLNNDGYTVERAIHGAAQRYNDIASWNWTQIPPALNAAQQAECWRVTQAIQLAEVLERLARPQRLSFIEVMLPKADLPELLRTVTRALEARNGG

SEQ ID NO: 12912 - protein, 397 aa, Salmonella enterica subsp. enterica serovar Paratyphi B str.
MTHVTSAIIVGGGIGGAATALSLARQGIKVMLLEKAHEIGEIGAGIQLGPNAFSALDSLGVGDVARQRAVFTDHITMMDAVNAEEVVCIETGQAFRDHFGGPYAVIHRVDIHATVWEAVLTHPGVEYRTSTHIVDIRQTPDDVTVFDEQGNSWTADILVGCDGVKSVVRQSLLGDAPRVTGHVVYRAVINCDDMPDDLRINAPVLWAGPHCHLVHYPLRGGQQYNLVVTFHSRQQEEWGVKDGSKEEVLSYFAGIHPRPRQMLDKPTSWRRWSTADREPVAKWGTERITLVGDAAHPVAQYMAQGACMALEDAVTLGKALERCDGDAQQAFALYESVRIPRTARIVWSTREMGRLYHAAGVERQVRNLLWKGKSQEAFYRGIEWLYGWKEDNCLEPR

SEQ ID NO: 12913 - protein, 452 aa, Salmonella enterica subsp. enterica serovar Paratyphi B str.
MSHNVTPNTSRVELRKTLTLVPVVMMGLAYMQPMTLFDTFGIVSGLTDGHVPTAYAFALIAILFTALSYGKLVRRYPSAGSAYTYAQKSISPTVGFMVGWSSLLDYLFAPMINILLAKIYFEALVPSIPSWVFVVALVAFMTAFNLRSLKSVANFNTVIVVLQVVLIAVILGMVVYGVFEGEGAGTLASTRPFWSGDAHVIPMITGATILCFSFTGFDGISNLSEETKDAERVIPRAIFLTALIGGLIFIFATYFLQLYFPDISRFKDPDASQPEIMLYVAGKTFQVGALIFSTITVLASGMAAHAGVARLMYVMGRDGVFPKSFFGYVHPKWRTPAMNIILVGAIALLAINFDLVMATALINFGALVAFTFVNLSVISQFWIREKRNKTLKDHFQYLFLPMCGALTVGALWVNLEESSMVLGLIWAGIGLIYLACVTKSFRNPVPQYEDVA

SEQ ID NO: 12914 - protein, 289 aa, Salmonella enterica subsp. enterica serovar Paratyphi B str.
MTHATTAVLPVEKSVPRTWRRPFLKWAGGKYSLLPELDRLIPAGKRLIEPFVGGGSVFLNSDKHERFLLADVNADLINLYQMLAVVPDSVIAEAIKAFRHLNDAENYTVIREAFNAKKLNATERAAAFLYLNRHCFNGLMRYNLDGFFNVGWGKYKAPYFPEEEIRAFRKKSRACVFMTAGFERTLRLAGDGDVVYCDPPYEPIPGTTGFTSYASGGFSWDSQVALAESCVAAHQRGAKVFISNSTAPRVIELYERHGFTLHRVNARRSISSKGSTRETANDIVASLGI

SEQ ID NO: 12915 - protein, 337 aa, Salmonella enterica subsp. enterica serovar Paratyphi B str.
MRNHKQSDRVLNLPAGYFGIVLGTIGMGFAWRYASQIWAISHWPGDIMVILAMIIWALLTLAFLSRLVRFPHSVMAEVRHPVMSSFVSLFPATTMLVAIGFVPWYRPLAVALFSVGVVIQLAYAAWQTAGLWRGAHPEEATTPGLYLPTVANNFISAMACGALGYNDAGLVFLGAGVFSWLSLEPVILQRLRSCGELPAVLRTSLGIQLAPALVACSAWLSVNGGEGDTLAKMLFGYGLLQLLFMLRLMPWYLSQPFNASFWSFSFGVSALATTGLHLGHGSESGLFHILAVPLFIFTNAIIALLLVRTFLLLVQGTLLIRTERAALLKTEEKNDRS

SEQ ID NO: 12916 - protein, 509 aa, Salmonella enterica subsp. enterica serovar Paratyphi B str.
MRIGIPKERLPNETRVAATPKTVEQLLKLGFSVAIESGAGQLASFDDKAFAQAGADIVDGNAIWQSEIILKVNAPEEDEIALLNPGTTLVSFIWPAQNSGLMEKLAERKVTVMAMDSVPRISRAQSLDALSSMANIAGYRAIVEAAHEFGRFFTGQITAAGKVPPAKVMVIGAGVAGLAAIGAANSLGAIVRAFDTRPEVKEQVQSMGAEFLELDFKEEAGSGDGYAKVMSEAFIKAEMALFAAQAKEVDIIVTTALIPGKPAPKLITRDMVDSMKAGSVIVDLAAQNGGNCEYTVANQVVTTDNGVKVIGYTDLPGRLPTQSSQLYGTNLVNLLKLLCKEKDGNIDVDFDDVVIRGVTVIRDGDITWPAPPIQVSAQPQAAPKAAPAPKEPEKPASPWRKYALMALAIILFGWLADVAPKEFLGHFTVFALACVVGYYVVWNVSHALHTPLMSVTNAISGIIVVGALLQIGQGGWVSFLSFIAVLIASINIFGGFTVTQRMLKMFRKN

SEQ ID NO: 12917 - protein, 582 aa, Salmonella enterica subsp. enterica serovar Paratyphi B str.
MHNDKDLSTWQTFRRLWPTIAPFKAGLIVAGVALILNAASDTFMLSLLKPLLDDGFGKTDRSVLLWMPLVVIGLMILRGITSYISSYCISWVSGKVVMTMRRRLFGHMMGMPVAFFDKQSTGTLLSRITYDSEQVASSSSGALITVVREGASIIGLFIMMFYYSWQLSIILVVLAPIVSIAIRVVSKRFRSISKNMQNTMGQVTTSAEQMLKGHKEVLIFGGQEVETKRFDKVSNKMRLQGMKMVSASSISDPIIQLIASLALAFVLYAASFPSVMDSLTAGTITVVFSSMIALMRPLKSLTNVNAQFQRGMAACQTLFAILDSEQEKDEGKRVIDRATGDLEFRNVTFTYPGREVPALRNINLKIPAGKTVALVGRSGSGKSTIASLITRFYDIDEGHILMDGHDLREYTLASLRNQVALVSQNVHLFNDTVANNIAYARTEEYSREQIEEAARMAYAMDFINKMDNGLDTIIGENGVLLSGGQRQRIAIARALLRDSPILILDEATSALDTESERAIQAALDELQKNRTSLVIAHRLSTIEQADEIVVVEDGIIVERGNHSELLAQHGVYAQLHKMQFGQ

SEQ ID NO: 12918 - protein, 271 aa, Salmonella enterica subsp. enterica serovar Paratyphi B str.
MAKVAEEAGVYKATKHPLKTFYLAITAGVFISIAFVFYITATTGTGAMPYGMAKLIGGICFSLGLILCVICGADLFTSTVLIVVAKASGRITWGQLAKNWLNVYFGNLIGALLFVLLMWLSGEYMTANGQWGLNVLQTADHKMHHTFIEAVCLGILANLMVCLAVWMSYSGRSLMDKAFIMVLPVAMFVASGFEHSIANMFMIPMGIVIRDFATPEFWTAVGSSPESFSHLTVMSFITDNLIPVTIGNIIGGGLLVGLTYWVIYLRGNEHH

SEQ ID NO: 12919 - protein, 454 aa, Salmonella enterica subsp. enterica serovar Paratyphi B str.
MSFDSLGLNPDILRAIAEQGYREPTPIQQQAIPAVLEGRDLMASAQTGTGKTAGFTLPLLQHLITHQPHAKGRRPVRALILTPTRELAAQIGENVRDYSKYLNIRSLVVFGGVSINPQMMKLRGGVDVLVATPGRLLDLEHQNAVKLDQIEILVLDEADRMLDMGFIHDIRRVLAKLPAKRQNLLFSATFSDDIKALAEKLLRNPLEIEVARRNTASEQVTQHVHFVDKKRKRELLSQMIGQGNWQQVLVFTRTKHGANHLAEQLNKDGIRSAAIHGNKSQGARTRALADFKSGDIRVLVATDIAARGLDIEELPHVVNYELPNVPEDYVHRIGRTGRAAATGEALSLVCVDEHKLLRDIEKLLKKEIPRITTPGYEPDPSIKAEPIQNGRQQRGGGGGRGRGQNQGGAGRSQQPRRQDSGAAKAKPKPRTGEGKPAGDKARPPRRPRRITPAQ

SEQ ID NO: 12920 - protein, 555 aa, Salmonella enterica subsp. enterica serovar Paratyphi B str.
MSEAEARPTNFIRQIIDEDLASGKHTTVHTRFPPEPNGYLHIGHAKSICLNFGIAQDYQGQCNLRFDDTNPVKEDIEYVDSIKNDVEWLGFHWSGDIRYSSDYFDQLHAYAVELINKGLAYVDELTPEQIREYRGTLTAPGKNSPFRDRSVEENLALFEKMRTGGFEEGKACLRAKIDMASPFIVMRDPVLYRIKFAEHHQTGNKWCIYPMYDFTHCISDALEGITHSLCTLEFQDNRRLYDWVLDNITIPVHPRQYEFSRLNLEYTVMSKRKLNLLVTDKHVEGWDDPRMPTISGLRRRGYTAASIREFCKRIGVTKQDNTIEMASLESCIREDLNENAPRAMAVIDPVKLVIENYPQGESEMVTMPNHPNKLEMGSREVPFSGEIWIDRADFREEANKQYKRLVMGKEVRLRNAYVIKAERVEKDAEGNITTIFCTYDADTLSKDPADGRKVKGVIHWVSAAHALPIEIRLYDRLFSVPNPGAAEDFLSVINPESLVIKQGYGEPSLKAAVAGKAFQFEREGYFCLDSRYATADKLVFNRTVGLRDTWAKAGE

SEQ ID NO: 12921 - protein, 389 aa, Salmonella enterica subsp. enterica serovar Paratyphi B str.
MKIMRNNPLIPKSKLPNLGTTIFTQMSALAQKHQAINLSQGFPDFDGPRYLHERLAYHVAQGANQYAPMTGAQALREAIADKTAEIYGYRPDDVSDITVTAGATEALYAAITALVRAGDEVICFDPSYDSYAPAVALSGGVLKRIALTPPHFRVDWQAFSALLSERTRLVILNTPHNPTATVWRQADIEALWQAIGEREIYVLSDEVYEHICFAAEGHASVLAHPQLRERAVAVSSFGKTFHMTGWKIGYCVAPAAISAEIRKVHQYLTFCVNTPAQLALADMLRAAPEHYRALPDFYRKKRDVLVNALAQSRLKVLPCEGTYFLLIDYSAVSTLNDVEFCQWLTEEVGVAAIPLSVFCAAPFPHQLIRLCFAKQESTLLAAAERLCKL

SEQ ID NO: 12922 - protein, 362 aa, Salmonella enterica subsp. enterica serovar Paratyphi B str.
MNHTEIRVVTGPANYFSHAGSLERLTDFFTPEQLSHAVWVYGERAIAAARPYLPEAFERAGAKHLPFTGHCSERHVAQLAHACNDDRQVVIGVGGGALLDTAKALARRLALPFVAIPTIAATCAAWTPLSVWYNDAGQALQFEIFDDANFLVLVEPRIILQAPDDYLLAGIGDTLAKWYEAVVLAPQPETLPLTVRLGINSACAIRDLLLTSSEQALADKQQRRLTQAFCDVVDAIIAGGGMVGGLGERYTRVAAAHAVHNGLTVLPQTEKFLHGTKVAYGILVQSALLGQDDVLAQLITAYRRFHLPTRLSELDVDIHNTAEIDRVIAHTLRPVESIHYLPVTLTPDTLRAAFEKVEFFRI

SEQ ID NO: 12923 - protein, 820 aa, Salmonella enterica subsp. enterica serovar Paratyphi B str.
MLNQEGGSIRPLLTSAGINAGQLRTAIDQALSRLPQVEGTGGDVQPSSELVRVLNLCDKLAQKRGDNFISSELFVLAALESRGTLTDLLKSAGATTANITQAIEQMRGGESVNDQGAEDQRQALKKYTVDLTERAEQGKLDPVIGRDEEIRRTIQVLQRRTKNNPVLIGEPGVGKTAIVEGLAQRIINGEVPEGLKGRRVLALDMGALVAGAKYRGEFEERLKGVLNDLAKQEGNVILFIDELHTMVGAGKADGAMDAGNMLKPALARGELHCVGATTLDEYRQYIEKDAALERRFQKVFVAEPSVEDTIAILRGLKERYELHHHVQITDPAIVAAATLSHRYIADRQLPDKAIDLIDEAASSIRMQIDSKPEELDRLDRRIIQLKLEQQALMKESDEASKKRLDMLNEELDDKERQYSELEEEWKAEKASLSGTQTIKAELEQAKIAIEQARRVGDLARMSELQYGKIPELEKQLEAATQSEGKTMRLLRNKVTDAEIAEVLARWTGIPVARMLEGEREKLLRMEQELHSRVIGQNEAVEAVSNAIRRSRAGLSDPNRPIGSFLFLGPTGVGKTELCKALANFMFDSDDAMVRIDMSEFMEKHSVSRLVGAPPGYVGYEEGGYLTEAVRRRPYSVILLDEVEKAHPDVFNILLQVLDDGRLTDGQGRTVDFRNTVVIMTSNLGSDLIQERFGELDYGRMKEMVLGVVSQNFRPEFINRIDEVVVFHPLGEQHIASIAQIQLQRLYKRLEERGYEIHISDEALKLLSANGYDPVYGARPLKRAIQQQIENPLAQQILSGELVPGKVIRLEANDDRIVAVQ

SEQ ID NO: 12924 - protein, 392 aa, Salmonella enterica subsp. enterica serovar Paratyphi B str.
MKEVVIVGALRTPIGCFQGTLARHSAVELGSMVVKALIERTGVDANAIDEVILGQVLTAGAGQNPARQSAIKGGLPTTVSAITINDVCGSGLKALHLATQAIQCGEADIVIAGGQENMSRAPHVLNDSRTGALPDADNLVDSLVHDGLWDAFNDYHIGVTAENLAREYGISRELQDAYALSSQQKARAAIDTGRFKDEIVPIVTQRNGQTAIVDTDEQPRADASAEGLALLHPAFDSLGSVTAGNASSINDGAAAVMMMSETKARALGLPVLARIRAFASVGVDPALMGIAPVYATRRCLERAGWQLTEVDLIEANEAFAAQALSVGKMLEWDERRVNVNGGAIALGHPIGASGCRILVSLVHEMVKRDARKGLATLCIGGGQGVALTIERD

SEQ ID NO: 12925 - protein, 402 aa, Salmonella enterica subsp. enterica serovar Paratyphi B str.
MNEFPVVLVINCGSSSIKFSVLDVATCDVLMAGIADGMNTENAFLSINGDKPINLAHSNYEDALKAIAFELEKRDLTDSVALIGHRIAHGGELFTQSVIITDEIIDNIRRVSPLAPLHNYANLSGIDAARRLFPAVRQVAVFDTSFHQTLAPEAYLYGLPWEYFSSLGVRRYGFHGTSHRYVSRRAYELLDLDEKNSGLIVAHLGNGASICAVRNGQSVDTSMGMTPLEGLMMGTRSGDVDFGAMAWIAKETGQTLSDLERVVNKESGLLGISGLSSDLRVLEKAWHEGHERARLAIKTFVHRIARHIAGHAASLHRLDGIIFTGGIGENSVLIRQLVIEHLGVLGLTLDVEMNKQPNSHGERIISANPSQVICAVIPTNEEKMIALDAIHLGNVKAPVEFA

SEQ ID NO: 12926 - protein, 447 aa, Salmonella enterica subsp. enterica serovar Paratyphi B str.
MTTILKHLPAGQRIGIAFSGGLDTSAALLWMRQKGAVPYAYTANLGQPDEDDYDAIPRRAMEYGAENARLIDCRKQLVAEGIAAIQCGAFHNTTGGLTYFNTTPLGRAVTGTMLVAAMKEDGVNIWGDGSTYKGNDIERFYRYGLLTNAELQIYKPWLDTDFIDELGGRHEMSEFMIACGFDYKMSVEKAYSTDSNMLGATHEAKDLEFLNSSVKIVNPIMGVKFWDESVKIPAEVVTVRFEQGHPVALNGKTFSDDVEMMLEANRIGGRHGLGMSDQIENRIIEAKSRGIYEAPGMALLHIAYERLLTGIHNEDTIEQYHSHGRQLGKLLYQGRWFDSQALMLRDGLQRWVASQITGEVTLELRRGNDYSILNTVSDNLTYKPERLTMEKGDSVFSPDDRIGQLTMRNLDITDTREKLFGYAKAGLLTASSATGLPQVENLENKAK

SEQ ID NO: 12927 - protein, 328 aa, Salmonella enterica subsp. enterica serovar Paratyphi B str.
MSHLALQPGFDFQQAGKEVLEIEREGLAELDQYIDQNFTLACEKMFNCTGKVVVMGMGKSGHIGRKMAATFASTGTSSFFVHPGEAAHGDLGMVTPQDVVIAISNSGESSEIAALIPVLKRLHVPLICITGRPESSMARAADVHLCVKVPKEACPLGLAPTSSTTATLVMGDALAVALLKARGFTAEDFALSHPGGALGRKLLLRVSDIMHTGDEIPHVNKHATLRDALLEITRKNLGMTVICDESMKIDGIFTDGDLRRVFDMGGDMLQLGIAEVMTPGGIRVRPGILAVDALNLMQSRHITSVLVADGDQLLGVLHMHDLLRAGVV

SEQ ID NO: 12928 - protein, 1448 aa, Salmonella enterica subsp. enterica serovar Paratyphi B str.
MQHRGAILADGKTGDGCGLLLQKPDRFFRIVAEERGWRLAKNYAVGMIFLNKDPELAAASRHIVEEELQQETLSIVGWRDVPTNEGVLGEIALSSLPRIEQIFVNAPAGWRPRDMERRLFIARRRIEKRLQDDKDFYVCSLSNLVNIYKGLCMPADLPRFYLDLADLRLESAICLFHQRFSTNTVPRWPLAQPFRYLAHNGEINTITGNRQWARARTYKFQTPLIPDLQSAAPFVNETGSDSSSLDNMLELLLAGGMDIIRAMRLLVPPAWQNNPDMDQDLRAFFDFNSMHMEPWDGPAGIVMSDGRFAACNLDRNGLRPARYVITKDKLITCASEVGIWDYQPDEVVEKGRVGPGELMVIDTRGGRILHSAETDDDLKSRHPYKEWMEKNVRRLVPFEELPDEEVGSRELDDDLLASYQKQFNYSAEELDSVIRVLGENGQEAVGSMGDDTPFAVLSSQPRIIYDYFRQQFAQVTNPPIDPLREAHVMSLATSIGREMNVFCEAEGQAHRLSFKSPILLYSDFKQLTTMSEHHYRADWLDITFDVTETTLDATVKALCDKAEQMVRNGTVLLVLSDRNIGKNRLPVPAPMAVGAVQTRLVDQSLRCDANIIVETGSARDPHHFAVLLGFGATAIYPYLAYETLGRLIDTQAIAKNYRTVMQNYRNGINKGLYKIMSKMGISTIASYRCSKLFEAVGLHDDVVNLCFQGVVSRIGGASFDDFQQDLLNLSKRAWLARKPISPGGLLKYVHGGEYHAYNPDVVRTLQQAVQSGEYSDYQEYAKLVNERPAATLRDLLAIHPDGEAVTIDEVEPASELFKRFDTAAMSIGALSPEAHEALAEAMNSLGGNSNSGEGGEDPARYGTNKVSRIKQVASGRFGVTPAYLVNADVIQIKVAQGAKPGEGGQLPGDKVTPYIAKLRYSVPGVTLISPPPHHDIYSIEDLAQLIFDLKQVNPKAMISVKLVSEPGVGTIATGVAKAYADLITIAGYDGGTGASPLSSVKYAGCPWELGLVETQQALVANGLRHKIRLQVDGGLKTGVDIIKAAILGAESFGFGTGPMVALGCKYLRICHLNNCATGVATQDEKLRKNHYHGLPFKVTNYFEFIAREVRELMASLGVTRLVDLIGRTDLLKELEGFTAKQQKLALSRLLETAEPHPGKALYCTENNPPFDNGVLNAQLLQQAKPFVDARQSKTFWFDIRNTDRSVGASLSGYIAQTHGDQGLASDPIKAHFSGTAGQSFGVWNAGGVELYLTGDANDYVGKGMAGGLIAIRPPVGSAFLNHKASIIGNTCLYGATGGRLYAAGRAGERFGVRNSGAITVVEGIGDNGCEYMTGGIVCVLGKTGVNFGAGMTGGFAYVLDEDGEFRKRVNPELVEVLDVDSLAIHEEHLRGLITEHVQHTGSQRGEEILSRWSSFSTQFALVKPKSSDVKALLGHRSRSAAELRVQAQ

SEQ ID NO: 12929 - protein, 483 aa, Salmonella enterica subsp. enterica serovar Paratyphi B str.
MQLEVILPLVAYLIVVFGVSIYAMRKRTAGTFLNEYFLGSRSMGGIVLAMTLTATYISASSFIGGPGAAYKYGLGWVLLAMIQLPAVWLSLGILGKKFAILARRYNAVTLNDMLFARYQSRLLVWLASLSLLVAFIGAMTVQFIGGARLLETAAGIPYETGLLIFGVSIALYTAFGGFRASVLNDTLQGLVMLVGTIVLLVGVVHAAGGLSQAVDTLHALDPKLVTPQGADDILSPAFMTSFWVLVCFGVIGLPHTAVRCISYKDSKAVHRGIIIGTIVVAILMFGMHLAGALGRAVLPDLTVPDLVIPTLMVKVLPPFAAGIFLAAPMAAIMSTINAQLLQSSATIIKDLYLNLRPDQMQNEIRLKRMSAVITLLLGALLLLAAWKPPEMIIWLNLLAFGGLEAVFLWPLVLGLYWERANAAGALSAMIVGGVLYALLATFNIQYLGFHPIVPALLLSLLAFLIGNRFGSSASQATVLSTDK

SEQ ID NO: 12930 - protein, 369 aa, Salmonella enterica subsp. enterica serovar Paratyphi B str.
MVTTAIFPSRYVQGKGALTTHLPQELAALGHKALILQDPVVHNTYRDTVATALHGVIEFDIEVFSSECSDEEIARISARAQEIGADVIVGMGGGKTLDTAKATGASLRLPIAVVPTLASTDAPCSSLVVIYTPEGKFKRYLMIPRNPTLVLVDSSIIAAAPVRFLVSGIGDALATWFEAEDCRIKGAGNMTTRPGPMTAFELARFCYTTLMRYGRLAKLACEQHQVTPALEHVIEANTLLSGLGFESGGLAAAHAIHNGLTVLPATHKYWHGEKVAFGTLAMLMLTDRAPELIEEVYQFCEDIGLPTTLADIGLAGVSDDELLVVARASCQTGETIHNEPFTITPEAVQAALRAADAVGQARKKIDLAG

SEQ ID NO: 12931 - protein, 324 aa, Salmonella enterica subsp. enterica serovar Paratyphi B str.
MKPSIILYKTLPDDLLHRLEAHFTVTQVPNLHPETVARHAQAFASAQGLLGTSETVNRALLEKMPALRAASTISVGYDNVEVDALTARKIVLMHTPTVLTETVADTVMALMLATARRVVDVAERVKAGEWTESIGPAWFGVDVHHKTLGIVGMGRIGMALAQRAHFGFTMPVLYHARRRHQEAEDRFNARYCDLDTLLQEADFVCVILPLTTETRHLFGTTQFARMKSSAIFINAGRGPVVDENALIAALQNGEIYAAGLDVFEHEPLSVDSPLLNMSNVVAVPHIGSATHETRYNMMACAVDNLIDALQGKIEKNCVNPQAAG

SEQ ID NO: 12932 - protein, 562 aa, Salmonella enterica subsp. enterica serovar Paratyphi B str.
MASSGTTSTPQRFTGAEFIVHFLERQGIRIVTGIPGGSILPVYDALSQSTQIRHILARHEQGAGFIAQGMARTEGKPAVCMACSGPGATNLVTAIADARLDSIPLICITGQVPASMIGTDAFQEVDTYGISIPITKHNYLVRNINELPQVMSDAFRLAQSGRPGPVWIDVPKDVQTATIELDALPSPAEKSPPPEFSAESIREAAAMINAAKRPVLYLGGGVINAPTRVRELAEKAQLPTTMTLMALGMLPKAHPLSLGMLGMHGARSTNFILQEADLLIVLGARFDDRAIGKTEQFCPNAKIIHVDIDRAELGKIKQPHVAIQADVDDVLAQLIPHIEAQPREAWHQLVADLQQEFPCSIPQENNPLSHYGLINAVAACVDDNAIITTDVGQHQMWTAQAYPLNRPRQWLTSGGLGTMGFGLPAAIGAALANPGNKVLCFSGDGSLMMNIQEMATASENQLDVKIILMNNDALGLVHQQQSLFYKQGVFAATYPGSINFMQIAAGFGLDTCDLNNEADPQAALQDIIRRPGPALIHVRIDAEEKVYPMVPPGAANTEMVGE

SEQ ID NO: 12933 - protein, 542 aa, Salmonella enterica subsp. enterica serovar Paratyphi B str.
MVHALRAQGVKTVFGYPGGAIIPVYDALYDGGVEHLLCRHEQGAAMAAIGYARSTGKTGVCIATSGPGATNLITGLADALLDSVPVVAITGQVSAPFIGTDAFQEVDVLGLSLACTKHSFLVQSLAELPRIMAEAFEVANAGRPGPVLVDIPKDIQLASGELEPWFTTVDNEATFPQADAEQARQMLEQAKKPMLYVGGGVGMAQAVPALRKFIAVTQMPVTCTLKGLGAVEADYPYYLGMLGMHGTKAANFAVQECDLLIAVGARFDDRVTGKLNTFAPNASVIHMDIDPAEMNKLRQAHVALQGDLNSLLSALQQPLKIDAWRQSCVELRAEHAWRYDHPGETIYAPLLLKQLSERKPADSVVTTDVGQHQMWSAQHMTYTRPENFITSSGLGTMGFGLPAAVGAQVARPNDTVICISGDGSFMMNVQELGTVKRKQLPLKIVLLDNQRLGMVRQWQQLFFQERYSETTLTDNPDFLMLASAFGIPGQHITRKDQVEAALDTMLASEGPYLLHVSIDELENVWPLVPPGASNSEMLEKLS

SEQ ID NO: 12934 - protein, 387 aa, Salmonella enterica subsp. enterica serovar Paratyphi B str.
MEQVIIVDAIRTPMGRSKGGAFRNVRAEDLSAHLMRSLLARNPSLTAATLDDIYWGCVQQTLEQGFNIARNAALLAEIPHSVPAVTVNRLCGSSMQALHDAARMIMTGDAQVCLVGGVEHMGHVPMSHGVDFHPGLSRNVAKAAGMMGLTAEMLSRLHGISREMQDQFAARSHARAWAATQSGAFKTEIIPTGGHDADGVLKQFSYDEVIRPETTVEALSTLRPAFDPVSGTVTAGTSSALSDGAAAMLVMSESRARELGLKPRARIRSMAVVGCDPSIMGYGPVPASKLALKKAGLSASDIDVFEMNEAFAAQILPCIKDLGLMEQIDEKINLNGGAIALGHPLGCSGARISTTLINLMERKDAQFGLATMCIGLGQGIATVFERV

SEQ ID NO: 12935 - protein, 298 aa, Salmonella enterica subsp. enterica serovar Paratyphi B str.
MAVIAFIGLGQMGSPMASNLLKQGHQLSVFDVNHDAVQRLVDKGAQPASSPAQATIGAEFVITMLPNGDLVRSVLFGEQGVCETLSREALVIDMSTIHPLQTDKLIADMQSKGFSMMDVPVGRTSDNAITGTLLLLAGGTTEQVERATPVLMAMGNELVNTGGPGMGIRVKLINNYMSIALNALSAEAAVLCEALGLSFDVALKVMSGTAAGKGHFTTTWPNKVMKGDLSPAFMIDLAHKDLGIALDVANQLHVPMPLGAASREVYNQARAAGRGREDWSAILEQVRISAGLTANVKK

SEQ ID NO: 12936 - protein, 810 aa, Salmonella enterica subsp. enterica serovar Paratyphi B str.
MSVIAQAGAKGRQLHKFGGSSLADVKCYLRVAGIMAEYSQPDDMMVVSAAGSTTNQLISWLKLSQTDRLSAHQVLQTLRRYQCDLISGLLPADVADDLTSAFISDLERLAALLDGGVTDAVYAEIVGHGEIWSARLMSAVLNQQGLDAAWLDARAFLRAERAAQPQVDEGLSYPLLQQLLAQHPGKRLVVTGFISRNHDGETVLLGRNGSDYSATQIGALAGVSRVTIWSDVAGVYSADPRKVKDACLLPLLRLDEASELARLAAPVLHARTLQPVSGSDIDLQLRCSYTPDQGSTRIERVLASGTGARIVTSHDDICLIEFQVPASQDFRLAHKELDQILKRAQARPLAVGVHRDRQLLQFCYTAEVADSVLKLLDDVGLPGELRLRQGLALVAMVGAGVTRNPLHCHRFWQQLKGQPVEFTWQSEEGISLVAVLRTGPTESLIQGLHQSVFRAEKRIGLMLFGKGNIGSRWLELFAREQSTLSARTGFEFVLAGVVDSRRSLLNYEGLDASRALAFFDDEAVEQDEESLFLWMRAHPYDDLVVLDVTASEQLADQYLDFASHGFHVISANKLAGASASDKYRQIHDAFEKTGRYWLYNATVGAGLPINHTVRDLIDSGDTILSISGIFSGTLSWLFLQFDGTVPFTDLVDQAWQQGLTEPDPRVDLSGKDVMRKLVILAREAGYDIEPDQVRVESLVPAHCEEGSIDHFFENGDALNEQMVQRLEAARELGLVLRYVARFDANGKARVGVEAVRPEHPLAALLPCDNVFAIESRWYRDNPLVIRGPGAGRDVTAGAIQSDINRLAQLL

SEQ ID NO: 12937 - protein, 367 aa, Salmonella enterica subsp. enterica serovar Paratyphi B str.
MDRIIQSPGKYIQGANVIARLGDYLKPMANNWLVVGDKFVLGFAEETLRKSLTDAGLSVEIAPFGGECSQNEIDRLRAVAEKSQCGAVLGIGGGKTLDTAKALAHFMNVPVAIAPTIASTDAPCSALSVIYTDAGEFDRYLLLPHNPNMVIVDTQIVAGAPARLLAAGIGDALATWFEARACSRSGATTMAGGKCTQAALALAELCYNTLIEEGEKAMLAAEQHVVTPALERVIEANTYLSGVGFESGGLAAAHAIHNGLTAIPDAHHYYHGEKVAFGTLTQLVLENAPVEEIETVAALCHSVGLPITLAQLDIKQDIPAQMRTVAEASCAEGETIHNMPGGATPDEVYAALLVADQYGQRFLQEWE

SEQ ID NO: 12938 - protein, 467 aa, Salmonella enterica subsp. enterica serovar Paratyphi B str.
MVDQVKVAADEQAPAEQSLRRNLTNRHIQLIAIGGAIGTGLFMGSGKTISLAGPSIIFVYMIIGFMLFFVMRAMGELLLSNLEYKSFSDFASDLLGPWAGYFTGWTYWFCWVVTGMADVVAITAYAQFWFPGLSDWVASLAVVILLLSLNLATVKMFGEMEFWFAMVKIVAIVALIVVGLVMIAMHFKSPTGVEASFAHLWNDGGWFPKGISGFFAGFQIAVFAFVGIELVGTTAAETKDPEKSLPRAINSIPIRIIMFYVFALIVIMSVTPWSSVVPDKSPFVELFVLVGLPAAASVINFVVLTSAASSANSGVFSTSRMLFGLAQEGVAPKAFAKLSKRAVPAKGLTFSCICLLGGVVMLMVNPSVIGAFTMITTVSAILFMFVWTIILCSYLVYRKKRPHLHEKSIYKMPLGKLMCWVCMAFFAFVLVLLTLEDDTRQALIVTPLWFIALGLGWLFLRKNKLAK

SEQ ID NO: 12939 - protein, 774 aa, Ralstonia metallidurans CH34
MTSPQQSPSQDDLKQQQREALRKAALEYHEFPTPGKISVTPTKPLSNQRDLALAYSPGVAAACEEIVANQANSFRYTARGNLVAVITNGTAVLGLGDIGAAASKPVMEGKAGLFKKFAGIDVFDIEVDEKDPEKLVDIIASLEPTFGGINLEDIKAPECFYVERKLRERMKIPVFHDDQHGTAIVVGAAVINGMQVVGKDISKVKLVASGAGAAALACLDLLVDLGLPIENIWVTDLAGVVYEGRTELMDPEKARFSQKTDKRKLAEVIEGADIFLGLSAAGVLKPEMVQKMADKPLVMALANPNPEIMPELVKEVRPDAVIATGRTDYPNQVNNVLCFPFIFRGALDCGATTITREMEIAAANAVAELARQEQSDIVASAYGIQDLSFGPEYLIPKPFDPRLIVKIAPAVAEAAAKSGVASRPIEDMDAYRLQLQQFVYHSGTLMKPIYAAARKVQKEKKRIVFAEGEEERVLRAVQVIVDEKLANPILIGRPAVLAHRIERFGLRLRMGEDFTVVNPEHDERFREYSDAYYRMMAREGITPQYAKLEMRRRTTLIGAMLVEKGEADGMICGTVSTTAAHLRYIDQVIGGTNCVYAAMNGLVLPGRQIFLVDTHVNVDPTAEQLAEITIMAAEELKRFGIEPKVGLLSHSNFGTSEAPSARKMRDTLKILRDRAPDLEVDGEMHGDSALDEKLRDSLVPDSALKGEANLLVCPNIDAANISYNLLKVAAGNNVAIGPILLGVKAPVHILTPSATVRRIVNMTALVVVDAAAKV

SEQ ID NO: 12940 - protein, 409 aa, Ralstonia metallidurans CH34
MKPIQKSHKLQNVCYDIRGPVLEKAKQMEEEGHKIIKLNIGNLAVFGFDAPEEIQQDMMRNLPNSAGYSDSKGIFAARKAIMHYTQEKKIQGVGLDDIYVGNGASELIVMAMNALLNSGDEMLVPAPDYPLWTAAVSLSGGTPVHYVCDEANEWMPDLDDIRRKITPNTRGIVIINPNNPTGALYSDELLKEIVAIAREHGLIIFADEIYDKVLYDGNTHTSIGSLSTDVLTVTFNGLSKNYRSCGYRAGWMVVSGDKRPALDYIEGLNMLSSMRLCANVPGQWAIQTALGGYQSINDLVTEGGRLRRQRDLAYELITKIPGVTCVKPKAALYLFPKLDLSMYPIQDDQEFIYELLQESKVLLVQGTGFNWGAPDHFRIVFLPHEEDLREAITRVGRFLESYRKRHGTA

SEQ ID NO: 12941 - protein, 606 aa, Arabidopsis thaliana
MDTKIGSIDDCKPTNGDVCSPTNGTVATIHNSVPSSAITINYCDATLGRHLARRLVQAGVTDVFSVPGDFNLTLLDHLMAEPDLNLIGCCNELNAGYAADGYARSRGVGACVVTFTVGGLSVLNAIAGAYSENLPLICIVGGPNSNDYGTNRILHHTIGLPDFSQELRCFQTVTCYQAVVNNLDDAHEQIDKAISTALKESKPVYISVSCNLAAIPHHTYSRDPVPFSLAPRLSNKMGLEAAVEATLEFLNKAVKQVMVGGPKLRVAKACDAFVELADASGYALAMMPSAKGFVPEHHPHFIGTYWGAVSTPFCSEIVESADAYIFAGPIFNDYSSVGYSLLLKKEKAIVVQPDRITVANGPTFGCILMSDFFRELSKRVKRNETAYENYHRIFVPEGKPLKCESREPLRVNTMFQHIQKMLSSETAVIAAETGDSWFNCQKLKLPKRYEFQMQYGSIGWSVGATLGYAQASPEKRVLAFIGDGSFQVTVQDISTMLRNGQKTIIFLINNGGYTIEVEIHDGPYNVIKNWNYTGLVDAIHNGEGNCWTAKVRYEEELVEAITTATTEKKDCLCFIEVILHKGETSKELLEWGHASLLLTAVLPNPQ

SEQ ID NO: 12942 - protein, 607 aa, Arabidopsis thaliana
MDTKIGSIDACNPTNHDIGGPPNGGVSTVQNTSPLHSTTVSPCDATLGRYLARRLVEIGVTDVFSVPGDFNLTLLDHLIAEPNLKLIGCCNELNAGYAADGYARSRGVGACVVTFTVGGLSVLNAIAGAYSENLPLICIVGGPNSNDYGTNRILHHTIGLPDFTQELRCFQAVTCFQAVINNLEEAHELIDTAISTALKESKPVYISISCNLPAIPLPTFSRHPVPFMLPMKVSNQIGLDAAVEAAAEFLNKAVKPVLVGGPKMRVAKAADAFVELADASGYGLAVMPSAKGQVPEHHKHFIGTYWGAVSTAFCAEIVESADAYLFAGPIFNDYSSVGYSLLLKKEKAIIVQPDRVTIGNGPAFGCVFMKDFLSELAKRIKHNNTSYENYHRIYVPEGKPLRDNPNESLRVNVLFQHIQNMLSSESAVLAETGDSWFNCQKLKLPEGCGYEFQMQYGSIGWSVGATLGYAQAMPNRRVIACIGDGSFQVTAQDVSPMIRCGHKTIIFLINNGGYTIEVEIHDGPYNVIKNWNYTAFVEAIHNGEGKCWTPKVRCEEELVKAINTATNEEKESFCFIEVIVHKDDTSKELLEWGSRVSAANSRPPNPQ

SEQ ID NO: 12943 - protein, 406 aa, Azospirillum brasilense
GFAGDAAARYSSTLGVAAVTYGAGAFNMVNAVAGAYAEKSPIVVISGAPGTTEGNAGLLLDHQGRTLHTQFQVFKEITVAQARLDDPAKAPAEIARVLGAARALSRPVYLEIPRNMANAEVEPVGDDPAWPVDRDALAPAPDEVLAAMRSATSPVLMVCVEVRRYGLEAKVADVAHGLGVRSVTTFMGRGLLADAPTPPLGTYIGVAGDAEITRLVEESDGLFLLGAILSDTNFAVSQRKIDLRKTIHAFDRAVTLGYHTYADIPLDGLVDALLERLPPSDRTTRGKEPHAYPTGLQADDGPIAPMDIARAVNDRVRAGQEPLLIAADMGDCLFTAMDMIDAGLMAPGYYAGMGFGVPAGIGAQCVSGGKRILTVVGDGAFQMTGWELGNCRRLGIDPIVILFNNA

SEQ ID NO: 12944 - protein, 590 aa, Asparagus officinalis
MCGILAVLGCSDDSQAKRVRVLELSRRLKHRGPDWSGLCQHGDCFLSHQRLAIIDPASGDQPLYNEDKSIVVTVNGEIYNHEELRRRLPDHKYRTGSDCEVIAHLYEEHGEDFVDMLDGMFSFVLLDTRNNCFVAARDAVGITPLYIGWGLDGSVWLSSEMKGLNDDCEHFEVFPPGNLYSSRSGSFRRWYNPQWYNETIPSAPYDPLVLRKAFEDAVIKRLMTDVPFGVLLSGGLDSSLVAAVTARHLAGSKAAEQWGTQLHSFCVGLEGSPDLKAAKEVAEYLGTVHHEFHFTVQDGIDAIEDVIFHIETYDVTTIRASTPMFLMARKIKSLGVKMVISGEGSDEIFGGYLYFHKAPNKEEFHHETCRKIKALHQYDCLRANKATSAWGLEARVPFLDKEFMDVAMSIDPESKMIKPDLGRIEKWVLRKAFDDEENPYLPKHILYRQKEQFSDGVGYSWIDGLKAHAAKHVTDRMMLNAARIYPHNTPTTKEAYYYRMIFERFFPQNSARLTVPGGPSIACSTAKAIEWDARWSNNLDPSGRAALGVHDSAYDPPLPSSISAGKGAAMITNKKPRIVDVATPGVVIST

SEQ ID NO: 12945 - protein, 155 aa, Ageratina adenophora
MPIVPSLFGGRRSNIFDPLSFDVWDPFKDFPFPSSSIVSNETSGFVNARVDWKETPEAHVFKADLPGIKKEEVKVEVEDDRVLQITGERNVEKEDKNDKWHRIERSSGKFTKRFRLPENAKLDQVKAAMENGVLTITVPKEEVKKTDVKSIEING

SEQ ID NO: 12946 - protein, 649 aa, Ageratina adenophora
MSGKGEGPAIGIDLGTTYSCVGVWQHDRVEIIANDQGNRTTPPYVAFTDSERLIGDAAKNQVAMNPTNTVFDAKRLIGRRFSDASVQSDIKLWPFKVTPGPAEKPMIAVNYKGEEKTFAAEEISSMVLIKMKEIAEAFLGTTVKNAVVTVPAYFNDSQRQATKDAGVISGLNVMRIINEPTAAAIAYGLDKKATSVGEKNVLIFDLGGGTFDVSLLTIEEGIFEVKATAGDTHLGGEDFDNRMVNHFVQEFKRKHKKDITGNPRALRRLRTSCERAKRTLSSTAQTTIEIDSLYEGVDFYSTITRARFEELNMDLFRKCMEPVEKCLRDAKMDKSSIHDVVLVGGSTIIPKVQQLLQDFFNGKELCKSINPDEAVAYGAAVQAAILSGEGNEKVQDLLLLDVTPLSLGLETAGGVMTVLIPRNTTIPTKKEQVFSTYSDNQPGVLIQVYEGERTRTRDNNLLGKFELSGIPPAPRGVPQITVCFDIDANGILNVSAEDKTTGQKNKITITNDKGRLSKEEIEKMVQEAEKYKSEDEEHKKKVEAKNALENYAYNMRNTVKDEKIGEKLTPGDKKKIEDAIDEAIAWLDANQLAEADEFEDKMKELENVCNPIIAKMYQGGAGDAAGAGGMDEEPAPSGGGAGPKIEEVD

SEQ ID NO: 12947 - protein, 400 aa, Burkholderia thailandensis E264
MTEAFLCDAIRTPIGRYGGALAPVRADDLGAVPLKALAERNRDVDWAAVDDVIYGCANQAGEDNRNVARMSLLLAGLPHAVPGATINRLCGSGMDAIGIAARAIKAGEANLMIAGGVESMSRAPFVTGKATSAFSRQAEIFDTTIGWRFVNPLMKQQYGVDSMPETAEHVATDYRVSRADQDAFALRSQQKAARAQADGTLAQEIVPVTIAQKKGEPLVVARDEHPRETTLDALAKLKGVVRPDGTVTAGNASGVNDGACALLVASEAAARRHGLVPRARVLGIATAGVEPRVMGIGPAPATQKLLARLGMTLDQFDVIELNEAFASQGLAVLRLLGVADDDARVNPNGGAIALGHPLGASGARLVTSATYQLHRTGGRFALCTMCIGVGQGIAIAIERV

SEQ ID NO: 12948 - protein, 329 aa, Burkholderia thailandensis E264
MQKILVARSIFPDVIERLKQYFDVDWNDGDALAPDALKARLADKDGALTAGDMIDASVLAAAPRLRVVSNMAVGYNNFDIGAFDAAHVLGTNTPDVLTETTADFGWALMMAAARRIAESEHWLRAGRWRKWSYDSFLGADIHGATLGVIGMGRIGQALARRARGFGMRVIYHNRSRVAPEIEAELNAEYASKAALLAQADHVVLVLPYSAESHHTIGAAELAMMKPSATLTNIARGGIVDDAALADALRNKRIAAAGLDVFEGEPSVHPALLEVPNVVLTPHIASASEGTRRAMANLAADNLIAALGAGPDAGRPPNPINPGVLGKARI

SEQ ID NO: 12949 - protein, 388 aa, Bacteroides fragilis NCTC 9343
MAESNFVDYVKIYCRSGKGGRGSTHMRREKYTPNGGPDGGDGGRGGHVILRGNRNYWTLLHLRYDRHAMAGHGESGSKNRSFGKDGADKIIEVPCGTVVYNAETGEYVCDVTEHGQEVILLKGGRGGLGNWHFKTATRQAPRFAQPGEPMQEMTVILELKLLADVGLVGFPNAGKSTLLSAISAAKPKIADYPFTTLEPNLGIVSYRDGQSFVMADIPGIIEGASEGKGLGLRFLRHIERNSLLLFMIPADSDDIRKDYEVLLNELKTFNPEMLDKQRVLAITKSDMLDQELMDEIEPTLPEGIPHVFISSVSGLGISVLKDILWTELNKESNKIEAIVHRPKDVSRLQQELKDMGEDEELDYEYEDDGDGDEDDLDYEYEEEDWEDK

SEQ ID NO: 12950 - protein, 435 aa, Lactococcus lactis subsp. lactis Il1403
MFLDTARIEVKAGKGGDGAVAFRREKYVPDGGPAGGDGGKGGSVIFKVDEGMSTLMDFRYNRIFRGKPGEKGMNKGMHGRGAEDLIVHVPQGTTVKDNETGDVLVDLIEKDQEFAVAKGGRGGRGNIRFATPRNPAPEVAENGEPGEDKILLLELRVLADVGLVGFPSVGKSTLLSVVSNARPKIGAYHFTTITPNIGMVQVGYGDSFVMADMPGLIEGAHSGAGLGIQFLRHIERTRVLLHVLDMSELEGRDPYEDYKTINDELESYNLRLMERPQIIVANKMDMPEAAERLAEFKEKLAADLGPDKEMPEIFEVSGLTKTGLQGLLARTSELLAQTPEFLLYDEDELADETAYYGFEEEEKPFKVSRDDDGGWRLSGDKIERLFIMTNFDHDESVMKFARQMRAMGVDETLRSMGAKDGDYVRIQKFEFEFVD

SEQ ID NO: 12951 - protein, 341 aa, Legionella pneumophila subsp. pneumophila str. Philadelphia 1
MKFVDEALIKVEAGKGGNGCLSFRREKFIPRGGPDGGDGGDGGSIYFEASSDLNTLIDFRYTRQYKAENGQSGMGGNCTGKKGDDLTIKVPVGTMVYDADTGELLADISQPGIPVLIAQGGFHGLGNTRYKSSVNRSPRQTTPGSPGESRNLRLELRVLADVGLLGLPNAGKSTLIRAVSSSKAKVADYPFTTLHPGLGVVRVSPYKSFVMADIPGLIEGAAQGAGLGHRFLKHLSRTCVLLHVIDIAPLDGSDPVADAKAILNELTQYNPDLLNKPRWLVLNKIDMLPDEKEREEKIQSIIKGLEWKDKVFSISAIESKGTQELCYALMQLIDEMKESEA

SEQ ID NO: 12952 - protein, 330 aa, Rickettsia conorii str. Malish 7
MHFIDEVKIYIKGGNGGNGCVSFHREKFIDRGGPDGGDGGRGGSVIFRSNHHLNTLVNYRYKQHFTAENGENGKDSNRSGKSGKSLVLDVPIGTQIFSEDGNILFYDFTVDDQSFEIIKGGSGGLGNSHFKSSVNQAPRKRTEGEIAEEMWIHLSLKLLSDVGLVGLPNAGKSTFLSVVTAAKPKIADYPFTTLVPNLGVVYVDDEEFVIADIPGLIEGAHQGHGLGDKFLKHIERCNVLIHLIDGSSNDVVADYNTVRLELELYSDYLKNKIETICLNKCDVLTDEEIQEKINKLQKATNKEIFPISTCTNAGVNKIVKLALETIKNQK

SEQ ID NO: 12953 - protein, 379 aa, Arabidopsis thaliana
HQVQHPTIAQKAAGQFMRSSVSKDVQVGYQRPSMYQRHATYGNYSNAAFQFPPTSRMLATTASPVFVQTPGEKGFTNFALDFLMGGVSAAVSKTAAAPIERVKLLIQNQDEMIKAGRLSEPYKGIGDCFGRTIKDEGFGSLWRGNTANVIRYFPTQALNFAFKDYFKRLFNFKKDRDGYWKWFAGNLASGGAAGASSLLFVYSLDYARTRLANDAKAAKKGGGGRQFDGLVDVYRKTLKTDGIAGLYRGFNISCVGIIVYRGLYFGLYDSVKPVLLTGDLQDSFFASFALGWVITNGAGLASYPIDTVRRRMMMTSNEAVKYKSSLDAFKQILKNEGAKSLFKGAGANILRAVAGAGVLSGYDKLTLIVFGKKYGSGGA

SEQ ID NO: 12954 - protein, 1485 aa, Yersinia pseudotuberculosis IP 32953
MLYDQSQERDNCGFGLIAHIEGEPSHKVVRTAIHALARMQHRGAILADGKTGDGCGLLLQKPDRFFRMVAEERGWRLAKNYAVGMMFLSQDEELAKASRRIVEEELQNETLSIVGWREVPTNPDVLGEIALSSLPRIEQIFVNAPAGWRSRDMERRLFVARRRIEKRISDKDFYACSFSNLVTIYKGLCMPADLPRFYLDLADLRLESAICLFHQRFSTNTVPRWPLAQPFRYLAHNGEINTIAGNRQWAKARAYKFKTPLIPDLQDAAPFVNETGSDSSSLDNMLELFLSGGMDLIRAMRLLVPPAWQNNPDMDTDLRAFFDFNSMHMEPWDGPAGIVMSDGRYAACNLDRNGLRPARYVITKDKLITCASEVGIWDYQPDEVVEKGRVGPGELMVIDTRSGKILHSAETDNDLKSRHPYKEWMEKNVKRLVPFEDLPEEQVGSRQLDDSQLETYQKQFGYSNEELDQIIRVLGENGQEATGSMGDDTPFAVLSSGPRIIYDYFRQQFAQVTNPPIDPLREAHVMSLATSIGREMNVFCEAEGQAHRLSFKSPILLYSDFQQLTTLEGEHYRADRLDLTFNPAENDLEQAVLSLCDEAERKVRDGAVMLVLSDRAIAPNRLPVPAPMAVGAIQTRLVDKSLRCDANIIVETASARDPHHFAVLLGFGATAIYPYLAYESLAKLVDSQAIDKKYRDVMLNYRNGINKGLYKIMSKMGISTVASYRCAKLFEAVGLHRDLSDLCFQGVVSRIGGASFSDFQQDLQNLSKRAWLKRKPLDQGGLLKFVHNGEYHAYNPDVVSTLQKAVHSGEYSDYQAYAKLVNERPIATLRDLLAIKPQGTPIPVDQVEPAESLFKRFDTAAMSIGALSPEAHESLAIAMNSLGGFSNSGEGGEDPARYGTNKVSRIKQVASGRFGVTPAYLVNADVIQIKVAQGAKPGEGGQLPGDKVTPYIAKLRYSVPGVTLISPPPHHDIYSIEDLAQLIFDLKQVNPKAMISVKLVSEPGVGTIATGVAKAYADLITIAGYDGGTGASPLSSVKYAGCPWELGLVETQQALVANGLRHKIRLQVDGGLKTGVDIVKAAILGAESFGFGTGPMVALGCKYLRICHLNNCATGVATQDEKLRRDHYHGLPERVVNYFHFIARETREIMAELGVSQLVDLIGRTDMLLELDGISAKQNKLDLSPMLKTATPHPGKALYCTESNPPFDKGLLNKELLSQAEPYIEAKQSKTFYFDIRNTDRSVGAALSGAIATKHGDQGLATDPIKAYFSGTAGQSFGVWNAGGVELMLTGDANDYVGKGMAGGRIAIRPPVGSNFRSHEASIIGNTCLYGATGGKLFAAGRAGERFAVRNSGAITVVEGIGDNGCEYMTGGIVCVLGRTGINFGAGMTGGFAYVLDEDGEFRKRVNPELVEVLDVEQLAIHEEHLRGLITEHVQLTGSSRGEEILANWPEWVTKFALVKPKSSDVKALLGHRSRSAAELRVQAQ

SEQ ID NO: 12955 - protein, 488 aa, Yersinia pseudotuberculosis IP 32953
MLLGLILVLYIAVSKYGNIRLGEGKPEYRTIPWLFMFICAGLGSSTLYWGVMEWAYYYQTPGLNIAPKTPKALEYSVSYSFFHWGISAWATYALASLIMAYHFHVRKNKGLSLSGIISAITGVNPQGFWGRLVDLIFLIATIGALTISLVITAATFTGGLTALIGVPNNFAVQAGVMLVAAVIFSLSSYIGIDHGMQRLSKMVGWGAFGFAVLVLLVGPTEFIINNTINSIGLTTQNFLQMSLFTDPMGDGRFTRSWTVFYWLWWISYTPGVAMFVTRVSRGRKLKEVIWALLLGSSLGCWFFFGILESYAIQQFISGALDVPLILNTQGGETAVQMLLSALPMGKLFLAAYLFIMIIFLASHMDAVAYCMAATSTRNLREGEDPNRMLRLFWCVVITLIPLSILFAGASLDTMKTTVVLTALPFLLILLIEVYGFIRWIKQDYAHVPAHLIEQSTPQVMLPAESLPPATASMLVVETAAPPASKHNQ

SEQ ID NO: 12956 - protein, 352 aa, Novosphingobium aromaticivorans DSM 12444
MHFLDQAKIFIRSGQGGPGAVSFRREKYVEYGGPDGGDGGKGGDIIFEAVTGLNTLIDFRYAQHFKAQRGHGGAGKNRTGAGGNDLVIKVPVGTQVLDDDRETVLLDLTEAGQREILLRGGDGGRGNASYKTSTNRAPRQHGPGWPGEEMYVWLRLKLLADAGLVGLPNAGKSTFINQITNTKAKVGDYAFTTLRPQLGVVRHRNREFVLADIPGLIEGAADGAGIGDRFLGHIERCRVLIHLIDIHSDVDPVEAMHIVEGELEAYGAGLDEKPRLVALNKIDLVDKELVKAFQDELLEGGADRVFPISGATGKGMDALLDAVLEYLPAATVTERPTGEVEEAEDQKPWSPI

SEQ ID NO: 12957 - protein, 202 aa, Thermus thermophilus
  misc_feature (123)..(123): Xaa can be any naturally occurring amino acid
  unsure (1)..(202): unsure at all Xaa locations
MTQVRETVSFKAGDVILYPGVPGPRDRAYRVLEGLVRLEAVDEEGNALTLRLVRPGGFFGEEALFGQERIYFAEAATDVRLEPLPENPDPELLKDLAQHLSQGLAEAYRRIERLATQRLKNRXAAALLELSETPLAHEEEGKVVLKATHDELAAAVGSVRETVTKVIGELAREGYIRSGYGKIQLLDLKGLKELAESRGQGR

SEQ ID NO: 12958 - protein, 435 aa, Streptococcus pyogenes MGAS10394
MFLDTAKISVQAGRGGDGMVAFRREKYVPNGGPWGGDGGKGGSVIFRVDEGLRTLMDFRYNRKFKAKSGEKGMTKGMHGRGAEDLIVFVPQGTTVRDAETGKVITDLVEHGQEVVIAKGGRGGRGNIRFATPRNPAPEIAENGEPGEERQLELELKILADVGLVGFPSVGKSTLLSVVSSAKPKIGAYHFTTIVPNLGMVRTKSGDSFAMADLPGLIEGASQGVGLGTQFLRHIERTRVILHVIDMSASEGRDPYEDYVSINNELETYNLRLMERPQIIVANKMDMPEAQENLKAFKKKLAAQYDEFDDLPMIFPISSLAHQGLENLLEATAELLAKTDEFLLYDEADLVDEEAYYGFAETEKDFEITRDDDATWVLSGEKLERLFVMTNMERDESIMKFARQLRGMGVDEALRERGAKDGDLVRIGKFEFEFVD

SEQ ID NO: 12959 - protein, 768 aa, Stenotrophomonas rhizophila
MSPLTVSTPSLSTPTRTPPATPAPQLILATDLDGTFLAGDAAARHRLYRLVDQHPGIALIFITGRGLEAVMPLLSDPAIPRPDYVVCDVGATVVDGHTLQPLQPLQSMIDAHWPGEHVVAAAMRPFTALQRQDVPQERRCSYFCDPQTLAPLRAQIQAAAQALGCDVLYSADRYLDILPPDTDKGRTLAALARLLDLPRERILVAGDTLNDLSMYTAGFRGVCVGDSEPALTEATATLATTFHAQAPGCGGILEAIEHFALLADDDRYLYPPKQARAAGADLVMVYHRLPFDEVMENGVLVQRPPRSPNGIIPSLLSFFEGGQKGSWVAWGIDDPKRGPFQTHLAVDAERYPTLTAARVPLSRQEVDIFYKRFSKEAYWPMLHVFWERARFREDDWQVFLKVNRKFAEATAAEAAHGATVWIHDYNLWMVPATLRELRPDLKIAFFHHTYFPSADVFNVVPWRREIIGSLLSCDYIGFHIPRQVENFVDVVRGAVPAERLAWESCAPRFLTYGCAVGLDTMTTRLRVGDREIALGAHPVGTDLRRIHNVLARSDVRNDIFKLRREIGARKLVLSVERLDYTKGTLAKLEAFERLLEQHPERQGKVTLLMVCVPAAREMTVYRTLQNQIEQAVGRINGRFSRLDWTPVRFFAQALPFEEVVAHYAAAQVMWITPLRDGMNLVAKEFVATHGIEGSSGVLVLSEFAGAAAELKGAVLTNPHDPADLTAGLLQALSMPEEEATGRMRQLFGSVEYYDVDRWGREFLEAVRG

SEQ ID NO: 12960 - protein, 453 aa, Neurospora crassa
MSQILTSRQADELHRALIAYLTAANLPNTAAALREELNLSEEVFDPATAKKYEGLLEKKWTSVVRLQKKIMDLESRNHILQSELDNATPTSRQNKDPVAWLPRAPPRHTLQSHRDPITCVAFHPVFSSLASGSEDQTIKIWDWELGELERTIKGHTKAVLDVDYGGPRGNTLLASCSSDLTIKLWDPLDSYKNIRTLPGHDHSVSAVRFIPGSGNLLVSASRDKTLRIWDVSTGYCVKTLRGHAEWVRDVCPSLDGKYILSTSDDYTSRLWDVTITNPEPKVTLIGHEHVVLCCAIAPPAAYQNLAAMAGIKKPPATSSAEFMATGSRDKSIRLWDARGTCIKTLVGHDNWVRGLVFHPGGKYLLSVSDDKTLRCWDLTQEGKCVKTIGDAHGHFVQCIKWAPSVIKDASVNGDNGEPNGTPKKGGAAATPEAQIRCVIATGSVDLNVRIFAN

SEQ ID NO: 12961 - protein, 356 aa, Camellia sinensis
MAQLSDLINMNLSDSTEKIIAEYIWIGGTGLDLRSKARTLSGPVNDPKKLPKWNYDGSSTGQAPGEDSEVIIYPQAIFKDPFRKGNNILVMCDAYTPAGEPIPTNKRYNAEKIFSHTDVVAEEPWYGIEQEYTLLQKDVKWPIGWPKGGYPGPQGPYYCGAGADKAFGRDIVDSHYKACLYAGINISGINGEVMPGQWEFQVGPAVGISAGDELWEARYILERITEIAGVVVSFDPKPIEGDWNGAGAHTNYSTKSMRKDGGYQVIKKAIEKLGLKHKEHIAAYGEGNERRLTGRHETADINTFLWGVANRGASVRVGRDTEKAGKGYFEDRRPASNMDPYVVTSMIAATTILWKP

SEQ ID NO: 12962 - protein, 225 aa, Prunus dulcis
MEGYNLGVRKGAWTREEDDLLRQCIENQGEGKWHQVPYKAGLKRCRKSCRLRWVNYLKPNIKRGEFAEDEVDLIIRLHKLLGNRWSLIAGRLPGRTANDVKNYWNTRLRTDSRLKKVKDKPQETIKTIVIRPQPRRFTKSSNCLSFKEPILDHTQRDWWETFLDDKDATERATGSGLGLDEELLASFWVDDDMPQSTRKCINFSEGLIRGDFSFSVDPWNHSKEE

SEQ ID NO: 12963 - protein, 224 aa, Prunus persica
MEGYDLSVRKGAWTREEDDLLRQCIENQGEGKWHQVPYKAGLNRCRKSCRLRWVNYLKPNIKKGEFAEDEVDLIIRLHKLLGNRWSLIARRLPGRTANNVKNYWNTRSRTDYCMKKIKDKSQETIKTIIRPQPRRFTKSSNCLSFKEPILDHTQRDWWETFLDDKDATERATGSGLGLDEELLASFWVDDDMPQSTRKCINFSEGLIRGDFSFSVDPWNHSKEE

SEQ ID NO: 12964 - protein, 243 aa, Prunus salicina
MEGYNLGVRKGAWTRKEDDLLRQCIEKHGEGKWHQVPYKAGLSRCRKSCRLRWLNYLKPNIKRGDFMEDEVDLIIRLHKLLGNRWSLIARRLPGRTANDVKNYWNTRLRTDYCMKKMKDKSQETIKTIIRPQPRRFTKSSNCLSFKEPILDHTQLEENFSTTSQISTSTRIGSDWWETFLDDKDATETATGSGLGLDEELLASFWVDDDMPQSTRTCVNFSEEGLSRGDFSFSVDLWNHSKEE

SEQ ID NO: 12965 - protein, 233 aa, Fragaria x ananassa
MEGFGVRKGAWTKEEDELLKQFIEIHGEGKWHHVPLKSGLNRCRKSCRLRWLNYLKPNIKRGEFAEDEVDLIIRLHKLLGNRWSLIAGRLPGRTANDVKNYWNTYQRKKDQKTASYAKKLKVKPRENTIAYTIVRPRPRTFIKRFNFTERYANIEHNHSEVSYTSSLPTEPPQTLQLENVTDWWKDFSEDSTESIDRTMCSGLGLEDHDFFTNFWVEDMLLSASNDLVNISYV

SEQ ID NO: 12966 - protein, 235 aa, Fragaria vesca
MEGYFGVRKGAWTKEEDELLKQFIEIHGEGKWHHVPLKSGLNRCRKSCRLRWLNYLKPNIKRGEFAEDEVDLIIRLHKLLGNRWSLIAGRLPGRTANDVKNYWNTYQRKKDQKTASYAKQLKVKSQENTKATTIVRPRPRTFIKRFNFTERYENIEHNHSEMSYTSSLPTAPPQTLQLENVTDWWKDFAEDSTESIDRTMCSGLIGLEDHDFFTNFWVEDTVQSASNDLVNISYV

SEQ ID NO: 12967 - protein, 249 aa, Rosa hybrid cultivar
MGGIPWTKEEDQLLRKCIEKYGEGKWHRIPHLAGLNRCRKSCRLRWLNYLRPNIKRGSFEQEEVELIIKLQRLLGNRWSLVAARLPGRTGNDVKNYWNCHLSKKLNAQETHGDHQKINHAGNNNLQVIRPQASKYASSNSKRSMISSTLEDQTCQALEECSKASVAMLCNIDKDQGQISQIVEREDNNNLCVEEEHEGNNDFMGDLGMVDLDQFEQVIEQYDQEFNNKNKKWEWDDSILDMDLWVTDSS

SEQ ID NO: 12968 - protein, 217 aa, Rubus idaeus
MEVRKGAWTKEEDHLLRNYIEKHGEGRWHKVPLQAGLNRCRKSCRMRWLNYLKPNIKRGDFAEDEVDLMIRLRKLLGNRWSLIAGRLPGRTSNDVKNYWSARQRRKIDFGIPKDNEPPKITTKTTIIRPRPRTFTKSLHHLSAKATTSKHSTVENNSLPSSPPPIENGIDEWKTLMLEDVFTNFWVEDMASLTGTGVNSAEQGFEMDLWHFFQEEAR

SEQ ID NO: 12969 - protein, 312 aa, Medicago truncatula
MSQYQQGYGDQTRRVDEYGNPLTSQGQVDQYGNPISGGGMTGATGHGHGHHQQHHGVGVDQTTGFGSNTGTGTGYGTHTGSGGTHTGGVGGYGTTTEYGSTNTGSGYGNTDIGGTGYGTGTGTGTTGYGATGGGTGVGYGGTGHDNRGVMDKIKEKIPGTDQNASTYGTGTGYGTTGIGHQQHGGDNRGVMDKIKEKIPGTDQNQYTHGTGTGTGTGYGTTGYGASGVGHQQHGEKGVMDKIKEKIPGTEQNTYGTGTGTGHGTTGYGSTGTGHGTTGYGDEQHHGEKKGIMEKIKEKLPGTGSCTGHGQGH

SEQ ID NO: 12970 - protein, 336 aa, Gluconobacter oxydans 621H
MKFLDQAKIYVRSGDGGDGVIAFRREKYIEFGGPDGGDGGRGGDIIFRAVPGLNTLIDFRYTQHFKARKGGNGAGSNRTGAAAANVTINVPVGTQIFDEDRETLLADLDAEGKEVLLCRGGDGGLGNTHFKSSTNRAPRRADKGWPGEERWVWLRLKLIADIGLVGLPNAGKSTLLSVASRARPKIADYPFTTLHPQLGVVRLNNTEEFVIADIPGLIEGASEGAGLGDRFLGHVERCATLLHLIDGTESQIVKHWRLIRKELEAYDPELAAKPEIIVLNKCDSLTPTQRSAKKRALAKASGAEVMMLSGATQEGLPELLRLLQDRVTAAKRDRQG

SEQ ID NO: 12971 - protein, 409 aa, Thiobacillus denitrificans ATCC 25259
MSDIKKVVLAYSGGLDTSVILKWLQDTYQCEVVTFTADLGQGEELEPARQKALQFGIKPEQIYIDDLREEFVRDFVFPMFRANTVYEGEYLLGTSIARPLIAKRLIEIVNATGADAICHGATGKGNDQVRFELGAYALKPDVKVIAPWREWDLLSREKLLAYAESHGIPIDMKHRQGGSPYSMDANLLHISYEGRHLEDPSAEAEEDMWRWTVSPEKAPDAAEYIELTYAKGDVVAIDGQQMPAHEVLAKLNELGGKHGIGRLDLVENRYVGMKSRGCYETPGGTILLKAHRAIESITLDREVAHLKDDLMPRYASLIYNGYWWAPERRALQVLIDHTQAHVNGTVRLKLYKGNVIVVGRDSKNDSLFDSTIATFEDDAGAYDQKDAGGFIKLNALRMRIAAKLDARRK

SEQ ID NO: 12972 - protein, 637 aa, Photobacterium profundum SS9
MIDKKHFELIDKPTFFGALGLLISVVVPLLLFPVQGAEWLAIAKTFMTDKLGFLYLALGIAAFFFMIYIVFSDIGQIKLGDVDEKPEFATASWAAMLFCGGIGASILYWGTIEWAYYYQSPPFQLESGSEEAVRWAATYGIFHWGPIAWSIYMIPAIPIAYFFYVRKQPVLKVSAALMPIIGESRSHGKLGKFIDILFIFGLLGGAATTLGLAAPLINEGISYLFGIPSTTTTQIGVLLLCTALFAYSSYKGMDEGIKVLSNINFWGALGLLAFVLCAGPTLFMLETGLDSIGRMLSNFFVMATWAEPFGGYGTFEDTHFPQDWTIFYWAWWLVFAPSMGLFVARISRGRTIKQMVSGAIFFGSSGCALYFMILGNYGLSLQLSGQLDVVSILNEDGPTRAIFSILEQLPMSTMVIAVFTLLCIIFTATTFDSISFILASVVQNNVTEDPMRWNRLFWAFTLSFMPSVLMFMGDLATLQTAAIVGGLPLLVIAVMLMISGVKAATLDLAHQEGYSDPVINIEDFPDVDPWSKEGMAMAQFERLKDEAISAAEEEREKLNAIWVLKKEIRATALSKGESGMELGDAPQEQLDEIKRLTDEAMAAKEHKLQASEQAQEARKVFDDLMRDRQEMEVEAQV

SEQ ID NO: 12973 - protein, 151 aa, Picea abies
MAMDPLLSTVQQLLGVPDDLERILHAPTRSYMRDTEATASTPVDVKEYPNSYVFIVDMPGLKSNDIKVQVEDENVLNISGERKRNEKEEGEVKYIRMERRVAKFMRKFSLPADCNLEAISAACQDGVLTVTVPKLPPPEPKKPKTIAVKIG

SEQ ID NO: 12974 - protein, 581 aa, Nicotiana benthamiana
MGNTCVGPSISKIGLFQSVSAAMWRTRMPDDSGSTTNGDSARGETAESSKDPNLVVPSKPPEQITMPKSDQKEEEPAKKEEGPEKPKKPVQMKRVGSAGLRTDSVLQKKTGNLKEFFSIGKKLGQGQFGTTFKCVEKATGKEYACKSIAKRKLLTDDDVEDVRREIQIMHHLAGHPNVISIKGAYEDAVAVHVVMEYCAGGELFDRIIQRGHYTERKAAELTRTIVGVLEACHSLGVMHRDLKPENFLFVNQKEDSLLKTIDFGLSIFFKPGDRFNDVVGSPYYVAPEVLKKRYGPEADVWSAGVIVYILLSGVPPLWAENEQGIFEEVLHGDLDFSSDPWPSISEDAKDLVRRMLVRDPKKRLTAHEVLCHRWVQVDGVAPDKPLDSAVPSRMEQFSAMNKLKKMALRVIAESLSEEEIAGLKEMFRMIDTDNSGQITFEELKVGLKRVGANLKESEIYDLMQAADVDNSGTIDYGEFIAATLHFNKIEREDHLFAAFSYFDKDCSGYITADELQQACEEFGIGDVHLEDMIRDADQDNDGRIDYNEFVAMMQKGNPVIGGGKKGLEHSFSTGFREALRL

SEQ ID NO: 12975 - protein, 450 aa, Hordeum vulgare subsp. vulgare
MAMPPAEKVIVVDANPSKNGHGDEIDDLPVADATSHQIGVDPWYQVAFVLTTGVNSAYVLGYSGSLMVPLGWVGGTVGLLLAAAVSMYANALLGRLHLLGGKRHIRYRDLAGHIYGPKMYRLTWAMQYVNLFMINTGFIIIAGQALKALYLLISNDGAMKLPYCIAVSGFVCALFAFGIPYLSALRIWLGFSTVFSLTYIVAACTLSLKDGMRSPPRDYSIQGDPSSRVFTTIGAAASLVFAYNTGMLPEIQATVRAPVVKNMEKALWFQFTAGCVPLYAIIVIGYWAYGNQTTTYLLNNVHGPVWIKAVANLSAFLQTVIALHIFASPMYEYLDTRFGSKVGGPFAMHNVIFRVGVRGGYLAVNTLMAAMLPFLGDFMSLTGALSTFPLTFVLANHMYLVSNRQRLSSLQKSWHWLNIVFFTILSITAAIAALRLIARDSKEYHIFADV

SEQ ID NO: 12976 - protein, 233 aa, Streptomyces antibioticus
MTMTYTHDTHRGPVMLSKEGLPGWLDPVVRAVETVEPLQLSRFLPPENGSGRQSAVLILFGDGEHGPELLLMERAGSLRSHAGQPSFPGGALDPEDGDAHSDGPLRAALREAEEETGLDPAGVQLFGVLPALYIPVSGFVVTPVLGWWREPSPVGVVDPNETARVFTVPVADLTDPANRATTVHPSGHRGPAFLVESALVWGFTAGVIDRLLHFAGWERPWNRENEVPLDWRS

SEQ ID NO: 12977 - protein, 125 aa, Castanea sativa
AHVLVPGISLMGGYDSLKPVLLTGDLADSFFASFALGWLITNGAGLASYPIDTVRRRMMMTSGEAVKYKSSLDAFSQILKKEGPKSLFKGAGANILRAVAGAGVLAGYDKLQLIVFGKKYGSGGA

SEQ ID NO: 12978 - protein, 501 aa, Virgibacillus pantothenticus
MNKSTLNNPVFYVSAFVVFLLVIIGATLPNRFGAVAEKLFHFTTIHFGWFYLLAVFVFVVFLITLSLSKFGKIKLGATLTKPEYSFFTWIGMLFSAGFGAGLVFWGVAEPMSHFFKTPFPAVEAMSEEAARVAMGYAFFHWGVSQWSVFAIVGLVIAYLQFRKKRRGLISTSIQPIIGKNKFIADTVDSLAVIATVMGVATSLGLGILQMNGGLKSVFDVPTSIWVQMAIAGVMLITYLISSSTGLDRGIKWLSNINLGSLFIIIVFVFMAGPTVFILNTFVLGLGDYFSNFIGYSLRLTPYTGDTWVREWTIFYWAWSTAWSPFVGAFIARVSRGRSIRQYVLGVLVVSPAIACIWIAAFGGTAVYNDLMNGTSIAEAVNADIAVALFETYQHLPMTTILSILSIFLIFTFLVTSADSATYILGVMTSRGSLNPTLVTKIVWGLLITAIAVVLLLAGGLEALQTASLISALPFTVILLLMMASFTRMLSKGEKKAEQDKE

SEQ ID NO: 12979 - protein, 1249 aa, Solanum lycopersicum
MAETTEGKSMPEAEKKKEQSLPFYQLFSFADKYDYLLMTCGSIGAILHGSSMPVFFLLFGEMVNGFGKNQMDLHKMTHEVSKYALYFVYLGLIVCASSYAEIGCWMYTGERQVSALRKKYLEAVLKQDVGFFDTDARTGDIVFSVSTDTLLVQDAISEKVGNFIHYLSTFLAGLVVGFVSAWRLALLSVAVIPGIAFAGGLYAYTLTGLTSKSRESYANAGIIAEQAIAQVRTVYSYVGETKALNSYSDAIQNTLKLGYKAGMAKGLGLGCTYGIACMSWALVFWYAGVFIRNGQSDGGKAFTAIFSAIVGGMSLGQSFSNLGAFSKGKAAGYKLMEIIKQKPTIVQDTLDGKCLSEVSGNIEFKNVTFSYPSRPDVIIFRDFCIFFPAGKTVAVVGGSGSGKSTVVSLIERFYDPNDGQVLLDNVDIKTLQLRWLRDQIGLVNQEPALFATTILENILYGKPDATMAEVEAATCASNAHNFITLLPNGYNTQVGERGVQLSGGQKQRIAIARAMLKNPKILLLDEATSALDAGSESIVQEALDRLMVGRTTVVVAHRLSTIRNVDSIAVIQQGQVVETGTHEELISKAGAYASLIRFQEMVGNRDFSNPSTRRTRSTRLSHSLSTKSLSLRSGSLRNLSYSYSTGADGRIEMISNAETDRKNPAPQNYFCRLLKLNAPEWPYSIMGAVGSVLSGFIGPTFAIVMSNMIEVFYYTNPATMERKTKEYVFIYIGAGLYAVVAYLIQHYFFSIMGENLTTRVRRMMLAAILRNEVGWFDEEENNSSLLAARLATDAADVKSAIAERISVILQNMTSLLTSFIVAFIVEWRVSLLILATFPLLVLANFAQQLSLKGFAGDTAKAHAKTSMIAGEGVSNIRTVAAFNAQEKIISLFSQELRVPQMQSLRRSQMSGLLFGISQLALYGSEALILWYGAHLVNNGVSTFSKVIKVFVVLVITANSVAETVSLAPEIIRGGEAVGSVFSILDRSTRVDPDDPEGDPVESIRGDIELRHVDFAYPSRPDVSVFKDLNLRIRAGQSQALVGASGSGKSSVIALIERFYDPTGGKVMIDGKDIRRLNLKSLRLKIGLVQQEPALFAASIFENIAYGKEGATEAEVIEAARAANVHTFVSGLPEGYKTPVGERGVQLSGGQKQRIAIARAVLKDPSILLLDEATSALDAESECVLQEALERLMRGRTTVLVAHRLSTIRNVDTIGVVQDGRIVEQGSHSELISRPEGAYSRLLQLQHHRI

SEQ ID NO: 12980 - protein, 1249 aa, Solanum pennellii
MAETTEGKSMPEAEKKKEQSLPFYQLFSFADKYDYLLMTCGSIGAILHGSSMPVFFLLFGEMVNGFGKNQMDLHKMTHEVSKYALYFVYLGLIVCASSYAEIGCWMYTGERQVSALRKKYLEAVLKQDVGFFDTDARTGDIVFSVSTDTLLVQDAISEKVGNFIHYLSTFLAGLVVGFVSAWRLALLSVAVIPGIAFAGGLYAYTLTGLTSKSRESYANAGIIAEQAIAQVRTVYSYVGETKALNSYSDAIQNTLKLGYKAGMAKGLGLGCTYGIACMSWALVFWYAGVFIRNGQSDGGKAFTAIFSAIVGGMSLGQSFSNLGAFSKGKAAGYKLMEIIKQKPTIVQDTLDGKCLSEVSGNIEFKNVTFSYPSRPDVIIFRDFCIFFPAGKTVAVVGGSGSGKSTVVSLIERFYDPNDGQVLLDNVDIKTLQLRWLRDQIGLVNQEPALFATTILENILYGKPDATMAEVEAATCASNAHSFITLLPNGYNTQVGERGVQLSGGQKQRIAIARAMLKNPKILLLDEATSALDAGSESIVQEALDRLMVGRTTVVVAHRLSTIRNVDSIAVIQQGQVVETGTHEELISKAGAYASLIRFQEMVGNRDFSNPSTRRTRSTRLSHSLSTKSLSLRSGSLRNLSYSYSTGADGRIEMISNAETDRKNPAPQNYFCRLLKLNAPEWPYSIMGAVGSVLSGFIGPTFAIVMSNMIEVFYYTNPATMERKTKEYVFIYIGAGLYAVVAYLIQHYFFSIMGENLTTRVRRMMLAAILRNEVGWFDEEENNSSLLAARLATDAADVKSAIAERISVILQNMTSLLTSFIVAFIVEWRVSLLILATFPLLVLANFAQQLSLKGFAGDTAKAHAKTSMIAGEGVSNIRTVAAFNAQEKIISLFSQELRVPQMQSLRRSQMSGLLFGISQLALYGSEALILWYGAHLVNNGVSTFSKVIKVFVVLVITANSVAETVSLAPEIIRGGEAVGSVFSILDRSTRVDPDDPEGDPVESIRGDIELRHVDFAYPSRPDVSVFKDLNLRIRAGQSQALVGASGSGKSSVIALIERFYDPTGGKVMIDGKDIRRLNLKSLRLKIGLVQQEPALFAASIFENIAYGKEGATEAEVIEAARAANVHTFVSGLPEGYKTPVGERGVQLSGGQKQRIAIARAVLKDPSILLLDEATSALDAESECVLQEALERLMRGRTTVLVAHRLSTIRNVDTIGVVQDGRIVEQGSHSELISRPEGAYSRLLQLQHHRI

SEQ ID NO: 12981 - protein, 340 aa, Schizosaccharomyces pombe
MKQSRTKRVLAIGELKFATNTLKRLSEKYHFEFIVPDPHDRSKTIEKIHEAASKSTFDACFWLFRNAAISPFTEEMLGPLLPTCKLFVTGAAGYNNVDVDWATRNGVYVANTPNGPTEGTANMNLMLFMCTLRGAREAEQSLRLGKWRQNLSLTDDPYGKRVGIIGMGAIGKSFAQKILPLGCEIVYHNRNRLEAEEEKRLGASFVSFDELLSSSDVISINCPLTPATHDLISTKEFEKMKDGVYIINTARGAIINEDAFIKAIKSGKVARAGLDVFLNEPTPNKFWLECDKVTIQPHCGVYTNFTVAKTEECVLASIETFLDTGIPTNPVNGPFGMNGC

SEQ ID NO: 12982 - protein, 678 aa, Schizosaccharomyces pombe
MSKRNPPVTNIADLVSDSSLDEDSLSFLEELQDPELYFKNDTFSSKSSHSDGTVTGDTLRRQSSGATALERLVSHPRTKNFDLQGNGGQNSALKEVNTPAYQSMHHFEHLITPLPSTNASHSEVSLSAGVNDLNSNSEHDLLPKSVNKTPGSLSISRRRRIGRIGLGPPKRAEYTLTDPSKTSDTKNSTEADEDIEMKSREVSPASNSVAATTLKPLQLHNTPLQTSQEHPKPSFHPSQFESSFSPRVQFDHDVERRASELHSRPVTVFQEPQRSASQPYESHALSPKVAPLFDNSQATPIPKRQQDVVTVANLQFIKLGVVGKGGSSMVYRIFSPDNSRLYALKEVNFINADQTTIQGYKNEIALLRKLSGNDRIIKLYAAEVNDTLGQLNMVMECGETDLANLLMKNMKKPINLNFIRMYWEQMLEAVQVVHDQNIVHSDLKPANFLLVEGNLKLIDFGIAKAIGNDTTNIHRDSHIGTINYMAPEALTDMNAHTNSGVKLVKLGRPSDVWSLGCILYQMVYGRAPFAHLKMIQAIAAIPNEQYHIHFPEVALPANAVQEKEGSLPGVTVGPDLMDVMKRCLERDQRKRLTIPELLVHPFLNPLPSYLTPLAKKPLPVSGHTNNAHPLRLSTEISASQLSMIIERSVELSKHKRLNKELIDSMAYDCVSNLRKMPE

SEQ ID NO: 12983 - protein, 571 aa, Schizosaccharomyces pombe
MSGDILVGEYLFKRLEQLGVKSILGVPGDFNLALLDLIEKVGDEKFRWVGNTNELNGAYAADGYARVNGLSAIVTTFGVGELSAINGVAGSYAEHVPVVHIVGMPSTKVQDTGALLHHTLGDGDFRTFMDMFKKVSAYSIMIDNGNDAAEKIDEALSICYKKARPVYIGIPSDAGYFKASSSNLGKRLKLEEDTNDPAVEQEVINHISEMVVNAKKPVILIDACAVRHRVVPEVHELIKLTHFPTYVTPMGKSAIDETSQFFDGVYVGSISDPEVKDRIESTDLLLSIGALKSDFNTGSFSYHLSQKNAVEFHSDHMRIRYALYPNVAMKYILRKLLKVLDASMCHSKAAPTIGYNIKPKHAEGYSSNEITHCWFWPKFSEFLKPRDVLITETGTANFGVLDCRFPKDVTAISQVLWGSIGYSVGAMFGAVLAVHDSKEPDRRTILVVGDGSLQLTITEISTCIRHNLKPIIFIINNDGYTIERLIHGLHASYNEINTKWGYQQIPKFFGAAENHFRTYCVKTPTDVEKLFSDKEFANADVIQVVELVMPMLDAPRVLVEQAKLTSKINKQ

SEQ ID NO: 12984 - protein, 278 aa, Thermus thermophilus
  misc_feature (274)..(277): Xaa can be any naturally occurring amino acid
  unsure (1)..(278): unsure at all Xaa locations
ERVAVVGVPMDLGVDMGPSALRYARLLEQLEDLGYTVEDLGDVPVSLAYLEEIRAAALVLKERLAALPEGVFPIVLGGDHSLSMGSVAGAARGRRVGVVWVDAHADFNTPETSSGNVHGMPLAVLSGLGHPRLTEVFRAVDPKDVVLVGVRSLDPGEKRLLKEAGVRVYTMHEVDRLGVARIAEEVLKHLQGLPLHVSLDADVLDPTLAPGVGTPVPGGLTYREAHLLMEILAESGRVQSLDLVEVNPILDERNRTAEMLVGLALSLLGKRIFXXXXK

SEQ ID NO: 12985 - protein, 277 aa, Thermus thermophilus
  misc_feature (274)..(276): Xaa can be any naturally occurring amino acid
  unsure (1)..(277): unsure at all Xaa locations
ERVAVVGVPMDLGVDMGPSALRYARLLEQLEDLGYTVEDLGDVPVSLAYLEEIRAAALVLKERLAALPEGVFPIVLGGDHSLSMGSVAGAARGRRVGVVWVDAHADFNTPETSSGNVHGMPLAVLSGLGHPRLTEVFRAVDPKDVVLVGVRSLDPGEKRLLKEAGVRVYTMHEVDRLGVARIAEEVLKHLQGLPLHVSLDADVLDPTLAPGVGTPVPGGLTYREAHLLMEILAESGRVQSLDLVEVNPILDERNRTAEMLVGLALSLLGKRIFXXXK

SEQ ID NO: 12986 - protein, 276 aa, Thermus thermophilus
  misc_feature (274)..(275): Xaa can be any naturally occurring amino acid
  unsure (1)..(276): unsure at all Xaa locations
ERVAVVGVPMDLGVDMGPSALRYARLLEQLEDLGYTVEDLGDVPVSLAYLEEIRAAALVLKERLAALPEGVFPIVLGGDHSLSMGSVAGAARGRRVGVVWVDAHADFNTPETSSGNVHGMPLAVLSGLGHPRLTEVFRAVDPKDVVLVGVRSLDPGEKRLLKEAGVRVYTMHEVDRLGVARIAEEVLKHLQGLPLHVSLDADVLDPTLAPGVGTPVPGGLTYREAHLLMEILAESGRVQSLDLVEVNPILDERNRTAEMLVGLALSLLGKRIFXXK

SEQ ID NO: 12987 - protein, 212 aa, Sinningia speciosa
MVRGKVQMKRIENATSRQVTFSKRRNGLLKKAHELSVLCDAEVALIVFSQKGRLYEFSSSDMQKTIRRYFEHTKEDRSANVRVEQHMQQLKHEAVFMSKKIELLEIARRKFLGHNLGTSSMEELQELDNQLERSLKNIRHRKAQLYNEEIEKLQAKEKFLLEENARLREKSEMRLRNGAEKHREIGSCSQSSLSSEVMTELFIGPPITRNGP

SEQ ID NO: 12988 - protein, 210 aa, Sinningia speciosa
MVRGKTQMKRIENATSRQVTFSKRRSGLLKKAFELSVLCDAEVALIIFSPTGKLYEFSSSSVINKTIERYQSNSKALVIGRKTKENVQHLKDETVELSKKIELLQELQRKLLGEGLDTCSLDELGQIEQQLEQSLSNIRVKKNLLYKQQIDLLRDQEKALMKENTELRKKCEMLPAQLSILPKGKVQPVDVETALFIGLGPVYTPSYNGL

SEQ ID NO: 12989 - protein, 574 aa, Chaetomium globosum
MTDIREQGLNKPIAIAEYLFKRLHEIGIRSVHGLPGDFNLVALDYLPKAGLRWVGSVNELNAAYAADGYARTKGISAVLTTFGVGELSAINGIAGAFSEHVPVVHIVGCPSTISQRKGMLLHHTLGNGDFNVFANMSSQISCDMARLNKPAEVPDQIDHALRECWIRSRPVYIMLPTDMAEKKVDGARLDTPIDLSEPKNETEREDYVVDVVLKYLHAAKAPVILVDACAIRHRVLEEVHDLMEKTPLPVFVTPMGKGAINENHPSYGGVYAGTGSQPAVAERVESADLVLSIGALKSDFNTAGFSYRTSQLNTIDFHSTHCTVRYSEYPGVAMRGVLRKVNERVDLSKLCRPSSPEVANDVTKNRDSSETITQAFFWPRVGEYLKEDDIVVTETGTSNFGIWETKYPRGVTGVTQILWGSIGWSVGAAQGAALAAKDMGADRRTVLFVGDGSFQLTAQEVTTMLRHNLKVTIFLIYNEGFTIERYIHGMDAEYNDIVRWQYTDVPTVFGGSDKQVRKFVIKTKDELEKLLTNKEFNEAGGLQFVELWMPKEDAPRALKITAEIAAKNNAKMSD

SEQ ID NO: 12990 - protein, 713 aa, Actinobacillus succinogenes
MSRTFILIPISGGVGLTSVSLGLIRSLEQKGAKIGFMKPISQPSTGEDKIDRTTSIVRTSTQLETAEPVMLSVAENLIGQNQTDVLVETIVAAHQELSKNNEIVIVEGLIPNRKHSYANSINYEIAQALDAEIILVAAPSTETPAQLKERVEASASLFGGKNNPNLLGVVINKFNAPVDESGRTRPDLTEIFDSFQHSHNNSAEVFKLFEQSPIKVLACIPWSADLVATRVIDLVKHLGAAIINEGEMKTRRIRGITFCARSLHHMVEHFHAGDLLVTSADRADVLAAAALAVTNGIELGGILLTGGYKIDNEINKLCQRAFETTGLPIFRIEGNTWQTALSLQSFNLEVPVDDKIRIENIKEYTSRQFDAEFIHQIAGTSARVRRLSPPAFRYQLTELARAAKKRIVLPEGDEPRTVKAAALCAERGIADCVLLANPEDVKRVASAQGVSLDKGITVIDPATVRENYVARLVELRKAKGMTEEAAREQLEDNLVLGTMMLEANEVDGLVSGAVHTTANTIRPPMQIIKTAPGSSIVSSIFFMLLPDQVLVYGDCAVNPDPTAEQLAEIAIQSADSAKAFGIDPKVAMISYSTGTSGAGADVEKVKEATRIAQEKRPDLLIDGPLQYDAAVMADVAKSKAPNSPVAGKATVFVFPDLNTGNTTYKAVQRSADLVSIGPMLQGMRKPVNDLSRGALVDDIVYTIALTAIQATQA

SEQ ID NO: 12991 - protein, 670 aa, Arabidopsis thaliana
MAAATTTTTTSSSISFSTKPSPSSSKSPLPISRFSLPFSLNPNKSSSSSRRRGIKSSSPSSISAVLNTTTNVTTTPSPTKPTKPETFISRFAPDQPRKGADILVEALERQGVETVFAYPGGASMEIHQALTRSSSIRNVLPRHEQGGVFAAEGYARSSGKPGICIATSGPGATNLVSGLADALLDSVPLVAITGQVPRRMIGTDAFQETPIVEVTRSITKHNYLVMDVEDIPRIIEEAFFLATSGRPGPVLVDVPKDIQQQLAIPNWEQAMRLPGYMSRMPKPPEDSHLEQIVRLISESKKPVLYVGGGCLNSSDELGRFVELTGIPVASTLMGLGSYPCDDELSLHMLGMHGTVYANYAVEHSDLLLAFGVRFDDRVTGKLEAFASRAKIVHIDIDSAEIGKNKTPHVSVCGDVKLALQGMNKVLENRAEELKLDFGVWRNELNVQKQKFPLSFKTFGEAIPPQYAIKVLDELTDGKAIISTGVGQHQMWAAQFYNYKKPRQWLSSGGLGAMGFGLPAAIGASVANPDAIVVDIDGDGSFIMNVQELATIRVENLPVKVLLLNNQHLGMVMQWEDRFYKANRAHTFLGDPAQEDEIFPNMLLFAAACGIPAARVTKKADLREAIQTMLDTPGPYLLDVICPHQEHVLPMIPNGGTFNDVITEGDGRIKY

SEQ ID NO: 12992 - protein, 663 aa, Zea mays
MDRVRGSAFLLGVLLAGSLFAFSVAKEETKKLGTVIGIDLGTTYSCVGVYKNGHVEIIANDQGNRITPSWVAFTDSERLIGEAAKNQAAVNPERTIFDVKRLIGRKFQDKEVQRDMKLVPYKIINKDGKPYIQVKIKDGENKVFSPEEISAMILGKMKDTAEAYLGKKINDAVVTVPAYFNDAQRQATKDAGVIAGLNVARIINEPTAAAIAYGLDKKGGEKNILVFDLGGGTFDVSILTIDNGVFEVLATNGDTHLGGEDFDQRIMEYFIKLIKKKYSKDISKDNRALGKLRREAERAKRALSNQHQVRVEIESLFDGTDFSEPLTRARFEELNNDLFRKTMGPVKKAMEDAGLEKSQIHEIVLVGGSTRIPKVQQLLKDYFNGKEPNKGVNPDEAVAFGAAVQGSILSGEGGDETKDILLLDVAPLTLGIETVGGVMTKLIPRNTVIPTKKSQVFTTYQDQQTTVSIQVFEGERSMTKDCRLLGKFDLNGIPSAPRGTPQIEVTFEVDANGILNVKAEDKGTGKSEKITITNEKGRLSQEEIDRMVREAEEFAEEDKKVKERIDARNQLETYVYNMKNTVGDKDKLADKLEAEEKEKVEEALKEALEWLDDNQSAEKEDYEEKLKEVEAVCNPIVSAVYQRSGGAPGGDADGGVDDDHDEL

SEQ ID NO: 12993 - protein, 607 aa, Zea mays
MGQCYGKAGGASSRRADHDDAVAPPSPLPANGAPTPPQQPATPGRRKSGSATPVHHQAATTAWPSPYPAGGASPLPAGVSPSPARSTPRRFFKRPFPPPSPAKHIKATLAKRLGGGKPKEGTIPEEGGAGVAADSAEAERPLDKTFGFANNFGAKYDLGKEVGRGHFGHTCSALVKKGEYKGHAVAVKIISKAKMTTAISIEDVRREVKILKALSGHNNLVKFYDACEDALNVYIVMELCEGGELLDRILARGGRYTEVDAKAIVVQILSVVSFCHLQGVVHRDLKPENFLFATRDESAPMKLIDFGLSDFIRPDERLNDIVGSVYYVAPEVLHRSYSMEADIWSIGVITYILLCGSRPFWARTESGIFRSVLRADPNFDDSPWPSVSAEAKDFVKRFLNKDYRKRMTAVQALTHPWLRDEQRQIPLDILVFRLVKQYLRATPLKRLALKALSKALREDELLYLRLQFKLLEPRDGLVSLDNFRTALTRYVTDAMRESRVLEFLHALDPLAYRKMDLEEFCAAAISPYQLEALESWEEIAGTAFQHFEQEGNRVISVEELAQELNLAPTHYSIVQDWIRKSDGKLNFLGFTKFLHGVTIRGSNTRRH

SEQ ID NO: 12994 - protein, 579 aa, Zea mays
MAARSLLLYALLLLALATAAPSHGLTQADVAKRLKEVLSERNRGHEMLDSWNGDGDPCSPSTWEGFSCEPKDGAQVVVKLNFSSKKLQGPIPAEIANLTELNEIHLQYNNFTGFIPASFSAFRHLLKLSVICNPLLNNKQPDGFSSGVNFSYGGCATQEYYSSPAEEYQSPPAVASQKVYVIGGVAGGSLACTVALGSFFVCFNKRERRSPKKDCSSTTNPVFQECSIHNTTNPAVQQLSLKAIQTATSNYKTMIGEGGFGAVYRGALANGQEVAVKVRSSSSTQGTREFNNELRLLSAVWHENLVPLIGYCCEKDQQILVYPFMSNGSLQDRLYGEASKRKVLDWPTRLSVCIGAARGLVYLHNFAGRCIIHRDIKSSNILLDHSMCGKVADFGFSKYAPQEGDSNPSMEVRGTAGYLDPEYYSTQVLSTRSDVFSFGVVLLEIVTGREPLDVKRPRHEWSLVEWAKPYIREYKIEEMVDPGIKGQYCSEAMWRVLEVASVCTEPFSTFRPTMEDVLRELEDALIIENNASEYMRSIESTGTLGSNRYLSIDRKMFASGSARIESMKGNLQAMPSLPR

SEQ ID NO: 12995 - protein, 423 aa, Zea mays
MAQAVVPAMQCRVGVKAAAGRVWSAGRTRTGRGGASPGFKVMAVSTGSTGVVPRLEQLLNMDTTPYTDKVIAEYIWVGGSGIDIRSKSRTISKPVEDPSELPKWNYDGSSTGQAPGEDSEVILYPQAIFKDPFRGGNNVLVICDTYTPQGEPLPTNKRHRAAQIFSDPKVGEQVPWFGIEQEYTLLQKDVNWPLGWPVGGFPGPQGPYYCAVGADKSFGRDISDAHYKACLYAGINISGTNGEVMPGQWEYQVGPSVGIEAGDHIWISRYILERITEQAGVVLTLDPKPIQGDWNGAGCHTNYSTKTMREDGGFEEIKRAILNLSLRHDLHISAYGEGNERRLTGKHETASIGTFSWGVANRGCSIRVGRDTEAKGKGYLEDRRPASNMDPYIVTGLLAETTILWQPSLEAEALAAKKLALKV

SEQ ID NO: 12996 - protein, 400 aa, Zea mays
MATGEEHVAAPAPAVEETPEKKQASTTELPAPSGWTKKLAPTRGGRGGRFEVIFVSPTGEEIKSKRQLTQYLKAHPGGPASSEFDWGTSDTPRRSARLSEKVKATESPEGEKTPKRARSSSKRGKKEEKVDAEDANEAGEDGAAAEGKGTDVEMKDAENAEDEKKDVPSAEKTEEVDDKKDAENVEMKDAAEKTEEVEDKKEEAPTVDAAENTVEGDDKKEEPPAEKTDEKEEAPAVDAAEKNEEGDDKKEEEPPAEKKTVEKEVVPAVDAAENTEQSTGGQAQPNDVAAPESENKGDGKPAESESAPLAFVDDAAPLVIVGEEKTEDSQAAESAVPSLASSEGEKKENGGATEPAAPPPVDAEKGAENSGQVNTAPQEPTAANCDKGQIQPGASAVRCT

SEQ ID NO: 12997 - protein, 321 aa, Zea mays
MASSSFTSLSVMVLLCLAAAAVASAQLSPTFYSRSCPRALATIKAAVTAAVAQEARMGASLLRLHFHDCFVQGCDGSVLLNDTATFTGEQTANPNVGSIRGFGVVDNIKAQVEAVCPGVVSCADILAVAARDSVVALGGPSWRVLLGRRDSTTASLALANSDLPAPSLDLANLTAAFAKKRLSRTDLVALSGAHTIGLAQCKNFRAHIYNDTNVNAAFATLRRANCPAAAGNGDGNLAPLDTATPTAFDNAYYTNLLAQRGLLHSDQQLFNGGATDGLVRTYASTPRRFSRDFAAAMIRMGNISPLTGTQGQIRRACSRVN

SEQ ID NO: 12998 - protein, 280 aa, Zea mays
MAAMANTSRLPTPCSLPTISIGAKSRRLAVAAVRCGPGGSRSHRRSLGVLLCRSSSTAGAQGSTRMEDYNTAMKRMMRNPYEYHHDLGMNYAVISESLIVGSQPQKPEDIDHLKNEERVPYILCLQQDKDIEYWGIDFQSIVNRCKELGIQHIRRPAVDFDPDSLRSQLPKAVSALEWATSQRKGRVYVHCTAGLGRAPAVAIAYMFWFENMDLNTAYQKLTSIRPCGPSKRAIRAATYDLAKNDPSKEPFENLPEHAFEGVADWERKLIHDRVRALHEA

SEQ ID NO: 12999 - protein, 610 aa, Zea mays
METLLAGNPANGVAKPTCNGVGALPVANSHAIIATPAAAAATLAPAGATLGRHLARRLVQIGASDVFAVPGDFNLTLLDYLIAEPGLTLVGCCNELNAGYAADGYARSRGVGACAVTFTVGGLSVLNAIAGAYSENLPVVCIVGGPNSNDYGTNRILHHTIGLPDFSQELRCFQTITCYQAIINNLDDAHEQIDTAIATALRESKPVYISVSCNLAGLSHPTFSRDPVPMFISPRLSNKANLEYAVEAAADFLNKAVKPVMVGGPKIRVAKAREAFAAVADASGYPFAVMPAAKGLVPEHHPRFIGTYWGAVSTTFCAEIVESADAYLFAGPIFNDYSSVGYSLLLKREKAVIVQPDRMVVGDGPAFGCILMPEFLRALAKRLRRNTTAYDNYRRIFVPDREPPNGKPNEPLRVNVLFKHIKGMLSGDSAVVAETGDSWFNCQKLRLPEGCGYEFQMQYGSIGWSVGATLGYAQAAKDKRVIACIGDGSFQVTAQDVSTMLRCGQKSIIFLINNGGYTIEVEIHDGPYNVIKNWDYTGLVNAIHNSEGNCWTMKVRTEEQLKEAIAMATGDKKDCLCFIEVIVHKDDTSKELLEWGSRVSAANSRPPNPQ

SEQ ID NO: 13000 - protein, 161 aa, Zea mays
MDGRMFGLETPLMVALQHLLDVPDGDAGAGGDKAGGGGPTRTYVADARAMAVTPADVKELPGAYAFVVDMPGLGTGDIKVQVEDERVLVISGERRREEREDAKYLRMERRMGKFMRKFVLPDNADMDKISAVCRDGVLTVTVEKLPPPEPKKPKTIEVKVA

SEQ ID NO: 13001 - protein, 357 aa, Zea mays
MASLTDLVNLDLSDCTDRIIAEYIWVGGSGIDLRSKARTVKGPITDPSQLPKWNYDGSSTGQAPGEDSEVILYPQAIFKDPFRKGNNILVMCDCYTPQGEPIPSNKRYKAATVFSHPDVAAEVPWYGIEQEYTLLQKDLSWPLGWPVGGYPGPQGPYYCAAGADKAFGRDVVDAHYKACLYAGINISGINGEVMPGQWEFQVGPSVGISAGDEIWVARYILERITEMAGIVLSLDPKPIKGDWNGAGAHTNYSTKSMREAGGYEVIKEAIEKLGRRHREHIAAYGEGNERRLTGRHETADINTFKWGVANRGASIRVGRDTEKEGKGYFEDRRPASNMDPYVVTGMIADTTILWKGN

SEQ ID NO: 13002 - protein, 401 aa, Guillardia theta
MQEDMEYNIRFVGSYILDKTLGVGATGKVKLAKHSRTKEKVGVKIIKKDLFYDKPSLRLKIQREISVMKLMFHPHVIKIYDVLEDSKYLFLIIEYASKGELFNYLVEKRKLENREALKFFHEIISGLEYCHKHRICHRDLKLENILLDMKLQIKIADFGMASLSIPNIMLKTFCGSPHYASPEVVSNEPYNGIKADIWSCGIILYALVVGKLPYDEENDNMRKLFNKIRFEPPRIPRIIHPDCRDLIRALLTINPQKRITIDKIKKHPWYKSSPLPESCRISIQNLSFASVQNPISNPDPEIISFLLPLQLVKDKKTLCGILSTKKPSFLRVLYRQLEWRKMKMDSVRSNLINEANFKRKKLFKQGKLGNITGLKYWKNLKCKFLSINIKSFVRTGIYIYF

SEQ ID NO: 13003 - protein, 536 aa, Guillardia theta
MKSLIFDNFFLLKFQFKKFSKIRLLKKKNIKNIFDSKNYIYLYLKQILNILKNYKSEIFINLICGLQQSFLFEENNFYNNDFLNFRKRFFFFLKTEILLYKIFFLNNFNIVQNYSELCLKFNKNPNTKFIHNYIWKFYIRTIKNYIKDSNLLILCILCKKKRSLEKIILYSYFIFRQSPSIKTNFKKTFEIMKFDYFLIFHRILKNSINFTKRFVIYLEKLKFFSFFYHEIFFCKSYFRNSFGHSRIICIEFMKKSNFVSYSDLLLINGVIYIKICLIAKGGSGKVYKIIDQNKKIFALKKIKINQNNKNFCLKEISILKAMNKRKGIIHIIDVEFNLFNSKISIILEFGKENLHELLRNPLNRNINSKKLLCLQIADAVNLLHSEKIVHSDLKPSNFMFIKKSLKIIDFGISHEIYVNRSNISREIQIGSINYISPEAIIENSFFTGKKKYKIGKFSDVWSIGCIFYEIFYGNPPFYEYTFLKKIQIITDKLDHLIFPKNSDSLLNDLIKFCLRKDPNLRILINEILKHPFFDVF
